United States Patent Application Publication US 2019/0348154 A1 - sequence listing, part 66

SEQ ID NO: 248696 - DNA, 1035 bp, Klebsiella pneumoniae
atgctaactgcaaaagtgaagttttataacatcaatagatgtggttattacaagtatagttctaaggttcccgatctgagcaatacatcagacgtactgctcaaactgaacgattgggcttcagatggaagggagttcatcaacacaggcacctacaaggctgaaaaagacgaagatattctcaatacttatttctgcggcttagcaacagacaaacgttacggagatcaccttttaacactttgggctgaagttcccaacgactcaggtgtagtctatggtatgccgccactagcgaaaccgggaaaagtggatatgttaaccactggattcgacatcgataaagctattcctggtttcccgtgctacttttggttcattcctcaattaaacgtatttgcttctataaagtttgatcattcattaatgggcaaaggacacctcgataactatttgaatggttacctcgctaataaatcaccatatagagtttttgatgaggataacaaagttattggtttttccgtagatggaaaaaaatcaaatgactcatcaaaattaaaaccaaatttttatgcagtagggatgaagtacgatgaagttcaagctgagctcataagtaacctaagtaaaataacgaaaatacttaaaagggaaaaaataacctacagagctccagacgatagaaaaataattgaaagagtattctctggcttgttaaaaaatgccccagacagtacccaggaacgaacattgcttcatgagatggaatttaagccaactgagaccgaattaaagtccattataaaaagctataattcccttgaaaatacctcgtctatcaggaatgttggctttaaatatagtgacggaagggcaatatggcttagcggtgctaacgtttccttcgagattgaattgaatgttagaagaaaagacaatcacatcatccccccaggaaggttactttctgctataataaagcgcagggatgaattaataaccaaaatgaagactccaccaacaggggggtga

SEQ ID NO: 248697 - DNA, 849 bp, Klebsiella pneumoniae
atgtcatttccagcaactgtgttgaatgttctgattgcatccccatcagatgttcctgaagaaagagaagccattactgagagtctttacgagtggaatgccctcaattctcatgaaactggttttgttttattaccagttaaatgggagtcgcatagcgctccaactatgggagatagacctcagggtattatcaacaatcaagtggttagaaactgcgacatgttgattggtgctttttggactcgattaggttcacctactggagttgaagaaagtggcactgttgaagagattaagtggtttctgaggcaacaaaaaccggtaatgctttattattcgaaaaaacaagttgacctcgatgctattgatacacaacaacttgagaaactcaaagagtttaaaaaaagtattcgagagaaggggatacaagagcaatatacgaatgtcgatgagcttaaaatgaagctttctcgccaattaacaatcgttttgcgagaagtttcagttaacacggtggtggatgtgaaagctgtcaaggcagcgaaaagtcacgaagataagaaatttgatgctgatagctcttcgcttgccgcttcgatcccaaaagctaaggcaaaaaaaacttctagctctaatgagatccgcttaatcgattacaccgaaaaggcgtttgtagtggtaggggacacaaatgattatgcggaacaactcaaagaactgagcggaaaatggataacagttcgttggggtgggaaagcttggatgttttctaagaagagattaaatgaagtctctgaacttttagatttagcgccagaaatgttaagtgaggatgaagcactctaa

SEQ ID NO: 248698 - DNA, 147 bp, Klebsiella pneumoniae
atgattgactctataaagggctcagacctgctgtcaaagcgtatggtggccttgagtggccttctgataacgctaagcaacattggtctaagtccatttgttgccgtgcctgtcggcatcgctcttgtgtatattttacgtaagtag

SEQ ID NO: 248699 - DNA, 567 bp, Klebsiella pneumoniae
atgggctggtcttcgttggttaggataaccattggtacatttctattagctgggttgtcgttctctgcatacgcgaagaactgcaagaagggtataccatgcggtaattcgtgcattgcggttggaaaaacgtgccggattggatcaagtacctcttctgcgtataaaaattattcttactcttacccatcatcttctcttcatagttcaatccctaaatcctcttcacattccccatcagcgaaggttgacgggaaaaacacagcttcaactgcgaaaacctatctctgtcagtacgctattgcagcaatacagaatggcagaattggtgctttacgtgtgctgggtagcgccgaggtaacgttgtatgtcgatagcttcaaagttaaccgtttgaacggcacatacctgctctcgccaaagctgaaaactaacggtaagttgatgatggctgatgataaaagcaaagtgtacgcctatgattcgtcgctgatgaactttgcaattagtgaccgcatcgcaagaagcactgagcaatgggatcattgtaaactggttcacaattaa

SEQ ID NO: 248700 - DNA, 498 bp, Klebsiella pneumoniae
atgaaaaaattattaatggctttcgtgattctaactttacctctgctctcattcgctaagggtattggttacggaaatactaaatgggacatgaatccttcagaagttgttgcggctcagggcaatggtgcacatctgatctcaccagaaaagtataaggataattttgggaaagtgcggattgataatgtatcgatcggtagcggtctttatactgtcacattcctctttaatagcgctgatcgccttgtacaaacgaacgtagccagtaatgagaaaaaaaatgaaggtatcgctgcgagtcaatttggcacattgagtcaattgctaactcagaagtatgggaaacctgagttttcagattcagacaaagcaacatggaaatttcctgacactacggttgagttaagcaagatggtcatttctgggatcatggcccaaacagttgttcgttacattccgaacagccgagtcgcaagcgatacttcgaatctttag

SEQ ID NO: 248701 - DNA, 441 bp, Klebsiella pneumoniae
atggccacgatcaccaaaacctacgagaagatcgccccaaaacttgatgacatggtgcgccgtgggttcagcgacattgagctaaaatatggaagccagaacgaaatctacgcttacggcgaacggaaactatcagcagaggatttccgcaagctctaccctgaaaaggtgagcgacattccgcaagacctccctcaaaatgctacggtgctcgtggaagacatggtattgctttacaagccccgaagcggtcaactcaccagaaccgcatcagagacacagcttaagcatcaccaggctttcaatgattggtgtcatgccaatgtttataaagggaaaggctacacccagacaacaaagaatgcggtaaacgcgataaacattatcggtgctctcgtattggctgggcttgccatttgggggctatctcacatccgctga

SEQ ID NO: 248702 - DNA, 552 bp, Klebsiella pneumoniae
atgcgtattaagggattatctcttttcttttgtgccgtttgcgctggttgtaatgggtattctcagccacgagagcacttagatgtgccgacttactcagaaagctatgatcaagccctgggatggcttgtaactgctcgctacagagatgtagataactcagagagcgtaatgtcactcgtcggagacttttgcagaagcaaagggaaggaagcaacgctgtacaaaacgaccgctggcagtacatccgctattcaagaagtttgggcttgtcagacccccccaatgctgaatgataccgacatactgagtggggtttattgccatttcattgttaacgcacctcgctattctgtagatttttcaaaccgtcagaaacaagtagcagagcaaaagtttgttaaggcttttgtagcaaaagggattgaataccccgttggtggtttttacgagaagtatcaaaataactttgcttcgtgggctgttgccaaacacgaggagggtaccaacaccgataaaatccgccagtggtttgacaaacattgccagtaa

SEQ ID NO: 248703 - DNA, 408 bp, Klebsiella pneumoniae
atggcaggagtattagcaagcacggcggcggctatagggattcttgataaagccgttagcatcacccagaaactggcgaataacagcgatgaactggacacggcaaagttaaaacttgagttggctaatctgatggttgaacttgctaacgccaagatcgaaaccgtggcaatacagactctattgttcgacgcagagcaaaaaatcaaagtacttgaagatgatttaaaagataaatcgacctataccttcaagcatggtttgtggtggaaggaaggtgatcagattccattttgtcctcaatgttatgaggttaaacaaatcaaaacacacatgaaactattttcagctcgtgatgaaatgagcgatgattactggttttgccgtaactgtagtttttctacttga

SEQ ID NO: 248704 - DNA, 612 bp, Klebsiella pneumoniae
atgaccaccagccgagtttatgcctaccttcgcgcctccactaaagaacaggacgctacacgcgccaaagcagcattggcagagttcgccgccgctcatgatttgggccacgtcacttacttcactgagaacgtgagcggagccagcttacagcgcccggagcttatgcgtctgatagacatagccgcacccggtgacattctgttagtagaacaagtagaccgcctcagccgtctgaacgctgaggactgggagacactgaaagcccaaattgatagtaaaggcttgcgagtggtggccctcgacctgcctaccagtcacgaagtgttaaactaccaaggcgagtttatgcaatccatgatgaaagctatcaacggcatgatgttagaaatgctggcagcaatcgcccgtaaagactacacagaccgccgccgccgtcaggctgagggaatcatcaaggcgaaagctgagggtgcttacaagggccgtccagtgaatgaaaagctacacgaacagatccgcgcattgcatgaagcaggtaagacaaagagcgagatccatcgcctcacaggtgccgcacgaaccaccattaacaaagtgctggagacgtaa

SEQ ID NO: 248705 - DNA, 315 bp, Klebsiella pneumoniae; identical to SEQ ID NO: 197270

SEQ ID NO: 248706 - DNA, 387 bp, Klebsiella pneumoniae
atggcacgacgcagcaaagctgtatacgaagaatttttccaaaatgggcgcaaggcacagcgcatagaagaagttgagcgccagcttatgaacgcagaccaccagcaccaccgtcagcttgaagcggaggaacgcagcacggaaaacatggaagaccatttccctcgtgttattccaaacacgccaatcatcgagtggttgccgggatactacatccatcgccttgagtgggaagcgtaccgcgacgggcgcagcgtgatagacgcgcaagaaccgcgccagacggttgacccggagctaatctcgtaccagtggaatcactttgtagttaactcacgctttccgtggaagctggaagatcacgccatcgtttacaccttcgtttag

SEQ ID NO: 248707 - DNA, 1224 bp, Klebsiella pneumoniae
atgacagaaaagcaacaaataagaacactgattgactatttaaaggcagaaaaatacgcatttatcagcgcccaaggtaaaatactcctccaccacgtccccactaacaccaatcatggaacggacattctccgcaggttattcaaacttgctactggtggcagatggcagcaacattatttagatgatctgctggtcgaagtgcctttcatcatggtgcaggactttaatccagcgaagccatgcggcattgatcagaatggagcactgaacatgttcaggacgtggcgcagcgacaagccaccagcggcagatctcactctctggcttgagtatttggcgaggctcttccctgaccaggcagaccgcgacacagtgagcgcatacatggcgcacatgttccagcacccggaacagcgcccaagctggcacatcgtaattcccagtgataccgggacgggtaaaggttttttgttcaatcaaatcctgtcaccgctcctgatgcagcagaccacgctttacagtaactacagcaccctgaccagcgtccacaatgacgcgatggcgcgtacaatcctcattctgtttgatgacccgccgcccgcctctcgcagcatggcagaccgtctaaagagcattcagacagaaccagtgatcgagattaacaggaagtacgaacaaccccgtaaagtgccaacattcacccggtttttcaccttctccaatagtgagagtccgattgaagtagaaaccaatgaccgtcgccattactgcactcaatacgtgcgccaccgggcgggcagagaggaaacagccgagtttatcacccgccttgatgattggctcgccgtgggcggtctggaagccgtacacgcctggctaatggcttacccgttggaatccttcaatccgtatcgcccaccgttcagcgtggcacttgagcgcatgaaacaggccagcatcaccgaagagcagaacgaagcggagatcttcaccggagagaatccggcgtttgcattcaaatcattccatgatgcttgcccatcgttcccgcgaccacaggacgcgagtcaatggctacgtgacaacggctatgtgagtgccagagtgaacaccagagcagggttaaaatcagtttggtatcgagcgtcgcaggacggcagcagcaagatcccggagagcgttctctcctggtttgttgataagtattacccgtcccaatga

SEQ ID NO: 248708 - DNA, 153 bp, Klebsiella pneumoniae
atgttgaaactcattatcgcacgcgacgtgctcagctggattgatgcaaataagggcgaggacagccgcccaacattcattattaaaactttacgaaatgctatgaacgagggcactgatgacagaaaagcaacaaataagaacactgattga

SEQ ID NO: 248709 - DNA, 204 bp, Klebsiella pneumoniae
atgaatacagaagcagaaaaatcgctggcatggttaaaaagctattggaaccaccagcgacaggaaaaagtgcagaaatcagaaatcaccctcgaaacccgaaaagaacttttcagcaagaaagtagaccgcctcactattggcgagttttaccaatggctattatctgagggctacatcttcaaaactaaggataacaaataa

SEQ ID NO: 248710 - DNA, 441 bp, Klebsiella pneumoniae
atgtttgaagaatacgcacagaagcggaacccgctcaaactggcgcagaagcaatcccgcgcctacagggaaatgatgaccgcagctcagaacggcatcgactttatcacagggcgaccactgacagatccggtgattgaccatgaccacaacccagacaagcgacattgccgcctcatcctgaacaagagcacaaactctattgagggcgattttaatcgtatcttgtcgcgcattgctgaccgcgaagatttcacctcacgtttgtgggaagtgtattttggtcatcacgtcgatctgtacgataagttattcgaggcagcgaccgaacgccgcaacggttatttagaagaaactgagttctggcacatgctaaagcagtttgccgtctactacgcgatcccattcgatgaaatcaaccatttggagtattaccgatga

SEQ ID NO: 248711 - DNA, 465 bp, Klebsiella pneumoniae
gtgactaagctaccagccgcattaatacgtgaagtaaaaacagaatttaaagcccagcgcgaaagttacgtttcagagcacattgaagcccatttgtccgatgtgttcagtatctcagacttctacccggtgatcctgaccaagttacaaaccgccattctcgacggctatacagtcgcggattttgaccgccagccgttctataacgccggggaacctgcgattcgcatcgtgttaaaccgcaagcaaggtgaaattgaggcagaccgtgccactctcaccgcagaggcagaagcccaactaatagcatccctgacagcccaggcagaagaatattacgctcaagccgtagccgaagaggaatgccgccaacgtgcagatgcagccgcgcaagccgccgcagcagccgaggcccagacattcgccagccgtctccgtgtagccctttcagattcagcaaagtag

SEQ ID NO: 248712 - DNA, 288 bp, Klebsiella pneumoniae
atgccgaccaccccgcagcgtgtggcatttatctactgggcagaagaagtgatgaaccactgcttcacctgggatgatttcgtaaacgagtggagcaatggcaacgaccatcgcgagatcaacaagtggctgcaatctgggtttatcggaatggaatactacgaaggacgcgttcattacgtcacgtcttacctcgtaggaggaaagagtccattttattgcccacgttgcaaccgtataaacatcaaaaaaatattagaaatcaaggaaaaacaaaaaagtgactaa

SEQ ID NO: 248713 - DNA, 1179 bp, Klebsiella pneumoniae
atgtctatcaagggccaatcttatctttatccaacttcggaaggggtctggatgtttcagatcttcattccggtgtacatgcggcacattttcggcgggaaacgtctgtaccggaaatcgacgggaaccaaagaccttaacgccgctaaacacttccgtaatcacatgctgatcgagtggaagacgctcaaggaacagtattccccaaacacggaagaacgacgcatccaaaccgccatagctggattgcataagcaaacctcattacgcgccccactccagacagtgccaacattaaccgccattcgtgatcaatacgctgacaaatacagcgataagcgctcattctcgacgctggctaaatcggctcgcgctgttgaggtgtttcttgcttcgcttgaccgtgcagacattcagatcacggagatcagacggtcacaagtggcgatgtttatcaatcagcaggacaagaaagctcctcaaaccgtccagaactggctaacgtgccttggaagtctgtatgagtatgcgcgcagaggttacgacgacatagccccagataacccctttcacggtcataatctggaagcacgagccagcattgttagctatgagccattccagcctgatcagatgcaaaaactactggatgcagcagagccggagatcaggaacattatagtaatgggactgttttcaggatgccgccttgatgaactggcaagcctcaagaagtcagagatccaaacggtggaaggtgtacgctgtttctacatttcgaaatcaaagaccaaggcgggggtacggtacgtccctcttcattcccgattagctgcaattgtcgatgtatacctaagccatagctacggcgaatacctgttcccacaggctaacaagattaaccgtgctgacggtaagaaaggcccgttctactctcaagcgttcaccaggttacgccgccgtgtattgcctaccgctacagatcggcaatgcttccacagcttgcgcgggatgttcatcacctgccttgaccgtgctggatgccccgagcagcgtataggggcgatcaccgggcacaccgaacagaaagccaaaacggaagccttccgcacctattcccagggcgcgagcatggaggaactaaaaaaatatgtggatctcgttgaatttttatggtaa

SEQ ID NO: 248714 - DNA, 459 bp, Klebsiella pneumoniae
atgatcggcatgatcctcgcacacccccatctgttctggctaagcctcggcgggctgctgctggcggccgagatgctgggcggcagcggatacctgctgtggagcggcgtcgccggcgtggtgaccggcgccctgacctggctcctgccgctgagctgggaatggcaaggcacgctgtttgccgttctcaccctgctggcggcgtggctgtggtcgaaatggctgcgtaagcgcgtcaaaacgcagcgcccggccgatgcccagctcaaccagcgcgggcagcaactggtgggccgccgcctgacgctggatgccccgctggtgaacggccgcggccacgtccgcgtgggcgatagctcctggccggtgattgccgatgaagacttcgcggcgggcagcaaggttgaagtgattgccgtagaagggattacgctacgaatcagacccgccgtccgttaa

SEQ ID NO: 248715 - DNA, 567 bp, Klebsiella pneumoniae
atgctaaccaccctgatttaccgcagccaggttcatcctgaccgcccgcccgtcgatctcgacgctttagtccatcgcgccagcagtaaaaatttgccccttggcatcaccggcattctgctgtttaacggcctgcagtttttccaggtcctggaagggactgaggaggcacttgagtcgctgttcagcgaaatccaaagcgacccgcgtcatcgcgacgtagtggagctgatgcgcgattactcagcctaccgacgttttcacggcaccggaatgcgcatactggatctccggctgtttgaaaccgatggcgcgctggaggaaattctgcgctttagcacgtttggggtcaccgaaccggtcaacgaccggatgttccggctgcttagcgccttcattgccgacggcggccgctattgcctgcccgagccgctgcagccctctcgctggatatgcccgcgtcaggtacggccgcgccgcagcacctgcccggtcaaccttgccagtttgctctgcaggctattgtcgagccggctaaaaagcgagtttcttcctttgaggctctga

SEQ ID NO: 248716 - DNA, 147 bp, Klebsiella pneumoniae
atgatgcatttgatgcatggtatcaagaattatgtattattctggcacataatggaaaatgtgcaccctacaaaatggcatggtatgaattttatgagcaaggactatctgtgcaagatgcagcgaatcaaggacctagtgaaataa

SEQ ID NO: 248717 - DNA, 903 bp, Klebsiella pneumoniae
atggcgccggcaatttacgttgagaacgggcttgattccttcctggaaaagatccgcgccggagtaaacgaagttcctgacctgagcactgcaaagggacgggctcgtattgcatcgctggccgcacaggtatcacgcagcaaaactgctgtagagaaacctggcagggattacctgaagcgcctcaaggagcagccaaaagtggttgaagctgaattgcgccgcttcgtcaccgaatgcgatcagctgcgcgatgaagtacgccgccctcttaccgagtgggaagatgctgaaaaggcgcgcaccgaagcactgcagcagcgccttgtggatttgcgtgcgctggctgacgtgatcgacaccgccggtaactacctgccttctgctgatattcaggcgcgcattctggaagctaaatccgtggtactggatgacagttggcaggaacgtgcaacagaggcgggcgtggctaaggattcaactattcagcaactggaagcgtcgctggtaatagcgcaaaagcgcgaacatgaagccgccgagcttgatcgcctgcgcaaagaggcagaagaaaaagcacgccttgagcgtgaagagaatatccgccgtgaagccgctgaacaggctaagcgtgatgcagaggaaaaggcacaggctgaaattgatgctgctatcgcagcggagcgccgccgtcaggaagaagctgaatcagcgcgcctggctgaccagaagcgcattgcggaagaagaagcgcgccgggccgctgataaagagcaccgccgcagcatcaatcgacaggctatcgcagacctgattgaaagcggccttacgcagaaaatggcagagaaggcactgatcgccatcgccagcgggaaggtatctgcagtctctatcaagtactaa

SEQ ID NO: 248718 - DNA, 750 bp, Klebsiella pneumoniae
atgaaagaacgcggaatgatttttaacggggagatggtgcgggccatcctcgacggccggaagacgcagactcggcgggttatgaaggtacagccgaagccatcgaaatcacgaccaggggatttttggttttcatcgaaaaaattagaaagcatggtgcacgtttctgaccttgcgcctggcaactcacctattgccgattatcaccttttcattcaggagcattgctgcccgttcggagcagtcggcgaccgcatctgggtgcgtgaaacgtggggagtagtcagccacgaattggatgaggatggtcgaatccaaccatggacgccagaccggccggctacggttattcatgaaatgccgtttggcaacggctattactctggtcacgccatttatgcagctgatggcgatttcacctggggtgatgacgatggttatgaagatggtcgttcgtgctggaaaccttccattcatatgccgagagcagccagccgcattcttctggaaatcaccgacgtgcgggttgagcggctgaacgctattagccaagaagatgctcaagctgaaggcatggagcttaccgggtggcggcctacatactctgacccggatagcggcggcgaggttatgacgccatacgacaactttgctgagttgtggtcatccatctacggcgaaggaagctggaaggctgacccctgggtttgggttatttcgtttaagcgcgttgaaggcggtgcagcatga

SEQ ID NO: 248719 - DNA, 183 bp, Klebsiella pneumoniae
atgagtaattatgcgctagttaaaaatggcgtcgttgaaaatgttgttgtatgggatggcactggaggcattttcgatgattatattactgtgaatattgacggcatatcggctggtatcgactggacatatgacggagaggcatttgcccctccgccagaaattactccgcagggggtgtag

SEQ ID NO: 248720 - DNA, 1581 bp, Klebsiella pneumoniae
atgaatgtcaccaccctgaaagatacgctggtcgcccgccgactggcactgaacccatggacgggattctactttttacagtcgctgttaattaacctggcgctgggctatgaatttagcctgctttataccgtggcatttacctgtgtgttacatctgctgtggcgcgcctttccgcgcgtccagaaagcggtggtcggcgcctattccctgctggcggctctgtactatccctttggccaggcctacggtgcccccaacttcaacactctgctggcgctgcacgccaccaacgtggaagagtctacggaaatcctgaccatcttcccgtggtacaactatctgctggcggtcttcatcttcgctctcggggtcattgcggttcgccgtaggatcgttgagccatcacgctggggaaaaatggatacgctgggcctgttgttcagcatcgggatcttctttctccagccggtgcaaaaccttgcctggggcggtgtattcaaggtgattgacaccggttatccggcctttcgttttgtcaaagacgtggtggtgaataacaacgaggtgctggacgaacaggcccggatggcgcagctggctggcatgaaagacagctggcacgtgttggcgataaagccaaaataccatctctatgtggtggtgatcggtgaaagcgcgcgccgcgatgccctcggcgctttcggtggccattgggacaacacgccgtttgccagctcggtaaacggttatctgtttaacaactacatcgccgccagcggctcaacgcagaaatcgctcggcctgacgcttaaccgggtggtcgatggcaaaccacagtatcaggataactttgtcaccctcgccaaccgcgccggtttccagacctggtggttctccaaccaggggcaaattggcgagtacgacaccgctatcgccagcatcgccaaacgggcggatgaagtacagttcctgaaaaacggcgatttcgaagccaataaaaacacccaggacgagcagttgctgaagctgaccgagcaggtgctctcaacccagcgtacccagccgcagctgattgtcctgcacctgatgggctctcacccacaggcctgcgatcggaccaagggcaaatacacggttttcgttcagtcgaaagagacctcatgctacctctacagcatgacgcagaccgattcgctgctggctaagctttatcatcagttgcaaaattccggtgacactttttccctgacctatttttccgatcatggtctggcgttcaaggagcggggcaaagaggtgcagtatctggcgcatgacgataagttccagcagaacttccaggtgccgtttatggtgctatccagcgatgacaaagcgcataaagtgattaaggcgcagcgttcggcgaatgatttcctcagtttcttctcccagtggaccgggatccaggcggcggaaatcaccccacgctatcggtttatctctgagcaaaaggccggtccggtgtacatcaccaacttccagctgcagaaggtggactacgctcacctcggtaccgatgagttcacagtcaattaa

SEQ ID NO: 248721 - DNA, 597 bp, Klebsiella pneumoniae
atgcattttgtcgccgcggaagggttcgatgatatctatcgtccggaggatctcgccctgatggcgacggtgaaggtcgattatctggcgttcagctattacgccagccgcacattgaacagcgacgcgatcccgccgggaacggcggtcaacaactatatgctgtttggcaaccaggataacccgttcctgaaagcgacggaatggaactggcagattgatccgctgggcttccggacgatcatcactcgttactataacgactggcgcctgccggtgttcccgattgaaaacggcatcggggtgattgagtcctgggacggcgaacatcccattgccgacgattaccgcatcgcttaccatcgcgaccatatcaacgccatgaaagcggccatctttgaggatggggcgcaggtgatcggctatctcggctggggattaatcgatatcctgagctcacagggcgatatgcgtaagcgctacggcgtggtgtacgtcaatcgcgaaaaccatgacctcaaggacctgcggcgggtgccgaagaagagctatgcatggctgaagcaggtgttccgcagcaacggcgaagcgatgtaa

SEQ ID NO: 248722 - DNA, 1092 bp, Klebsiella pneumoniae
gtggctgagactaagaatattgacgcagtggctggtattatttcaagtaagatatttagggaactaaaatgggagatgagcatacacactgatcttaattggccgtgttgtttagactcgcacctcaagcataatcaaaaagaaaaaacacatcctactgatgtggtttttttctacaaagatccatatagtgatatatatcaatacattcagacagatcttaagtcttattcaaataagaccataactgattcacaatatggaaaaatacaatctacaataaaaagcttagcccagcaggtagattgcagtgttagaaacgctgagtggaaagaactatttctgaatgagatcacagataaatttcaagtacatggaatgcttttcatatataaccatgacaatgagtacgacaatgggttacttgataaaatttcaaatattctaaattcggacctcaaattcccgaccaattcttatctatttattttagacccagtttcaatccggtttctattaagcgtaactgaagatatcgcgaagcgaagaaattatgaagattataatgggcaactggccgaattcctatgggagaaaattcctccatgggatagttgtggatttttttatcctgacaaacataacaaatttgcgtctaaagacaggctattaccagcaactattgaaatggtcacatcaggaatgattttcttccaatacaaccatgatttcgttcgggaccagaatggtgctagaattacaaaaaaaatattgaacatttattggaaagaagtcataaccaaagaggaacaatttgtatttttaattgaatatatatttaactatcaattattaaaccagtttgataagattctcattgttacaccttttagttcctcttcatctaaatttttaagagatgcaattacaacttattccagcatttattcttttacacttgataaattgaatagactaagagagcaactacataatatttctatcgacattataacatctagtatattcccatttagagtaatcagcaaagatgtcaataaaatttgtgatttttctggagagtctaaatga

SEQ ID NO: 248723 - DNA, 1242 bp, Klebsiella pneumoniae
atgaataagtatcaagcaacaatattctcaacagatagtgatatatacacagccctacaatcgaacaaaattaagctgtcagataattcaattcgtgaaattgcgtttaatcgtggtgttttgtttgcatcaaatcttgagagagatgcattgatagaaaaagtatctgaactccctttctcatattctcacattgtatcaattcaagaccgactggcaacaaatacaaaccatgaaatatattcaatattgcgagtttacgaaggattcgatgttaacaatctatacgatgtagtagaggtagttagatcagaaaggaaaaacaaatataaagatgaaattatcaatcacagcggtggtttaggggtttacaccatcgaaattaagtatactgaatacgactttaggcgaggaaaatttcaacaaaaaaaattaaatggtggaaaaataagctttattaaatccaagaatttcacatcagtacgattcactcaaactaagaaaataaaaagtattctcaatgatattcttaactattacaaggttaaagttttagatacaataaacatacagtacatagatctggcacatatttcagatcagaaactgagaaatatgttcgccaaacatctctacgacttcgacaacagatctacaatcgatggttttaattattttggtcttgagaaagttaggttaagcagaataaaaacaatatttgaagatgatgcagatgatctgagtacaccttctgcggattcaaactcagattttgaaggagatgaaggtgatgatgaagatagctcacaaggaatgataagtaaaaaagaggaaaatagaaaagatgaacataaccgagtgtttagacttaataatgcatcttatgatggacattcattagttgatgccaagcagattgaggagttgtgtgatgagggtttctacagaagcttcataagatggaaatcaagagttactttactacataacaatccaattgttacttttgaaattggattcgaggacaaacatttctgtcgtgaaattaaaataagaatacttcataagcaatattcatactcaggggatgataaggaaaaaatcgagcctcatgagtttgatttgattataaaatcattagaggatagaatatttaatgctaatgatttaattatagaagaactggcaaagcaaacatcaacgccgattaaaacgttagcagaagaaccggaggctgaataa

SEQ ID NO: 248724 - DNA, 639 bp, Klebsiella pneumoniae
atgataaaagtcaaggtctttcacactgatgaatgcctaatgagagacttagctcttagtaaggttaactcaaaaagctataatgacaatgatggatttggatttgtcatccacgatgattttactgattattgcaaagttcaatacgtagaaaaaaacactattgagcgacaaattgaaacaccgataggtgattttagcactattcaagaagtaacatattacaaatttttctttattctcagatataactctaacaattcaataatatttttgaatccccctagaaatataaaatacgcctctgatattattcgcagtctaattcctgagggctgtcacgtaagccagctaaagttagatttaaaagaaataatagaaaacattaaacacatacggaaagggaagttaaaaagcgctacgcttagcaatattctatatgatactcaaacccatgccaaaacaaaactaaactcaacagatgatttatatcatttttatactaaaaattatatgaaaacaatcgcaaaagttgatagcgctatttttgaaataaatgggaaactttatgaattaacggagtcaggacggataactttccaaggagatgatattgagtccgtacttaactttctctga

SEQ ID NO: 248725 - DNA, 660 bp, Klebsiella pneumoniae; identical to SEQ ID NO: 245915

SEQ ID NO: 248726 - DNA, 486 bp, Klebsiella pneumoniae
atgaagatgggcgaatttccacacagcaccggcgcccggcaagatgggcggattcccacacgacagcggcgcccggcaagatgggcggatttccacactacagcggcgcccggcaagatgggcggatttccacacggcagcggcgcccggcaagatgggcggatttccacacggcagcggcgcccggcaaggtgggcggattctcacgcggcagcggcgcccggcaagatgggcggatttccacacggcagcggcgcccggcaagatgggcggattctcacgcggcagcggcgcccggcaaggtgggccgattcccacgcggcagcggcgcccggcaaggtgggccgattcccacgcggcagcggcgcccggcaaggtgggccgattcccacgcggcagcggcgcccggcaaggtgggccgattcccacgcggcagcggcgcccggcaaggtgggccgattcccacgcggcagcggcgcccggtaa

SEQ ID NO: 248727 - DNA, 1359 bp, Klebsiella pneumoniae
atggggagtaattatatagaaatgcgccttgaagattgtatggatgctattattgattacagaggtaaaaccccaaaaaaagttgataatggcattcccctgatcacggctaaaataattaaaaatggtagaattcaagaagttagtgagtttattgctattgatgattatgacaattggatggttagagggttacctttggaaggtgacgtcgtactaactacagaggcgccactaggcgaagtagctcaattagatgcgcgcaaggtggctttagctcaacgagttattactctgagaggtaaaaaaggaattctggaaaatgattatcttttatatcttttacagtcttcttttgttcaaaaccagcttgatggtagagcctccggaagcacagttactggaatcaagcagtctgagcttagagaaataatattaaaattgcctccgaccactttacaaaaatcaatttcgcatcaattaaaatgccttgataaaaagattgatttaaataataaaatcaaccaaactttggaacaaatgtcccaaacactgttcaaatcctggtttgtggatttcgatccggtgattgataacgcgctggatgcgggaaacccaatcccggaaacgctgcaatctcgcgccgaactacgtcaaaaagtacgcaacggtgcagatttcaaaccacttccggtggatattcgtacacgattcccggctgagtttgaagaaacagagttaggctgggtgccgaaaggctggcgcattgaaaatttttccgagattgctcaattagtaaaagaaaatgtaaaatcggaagatatctctacggacgttcactacgtaggattggaacatttagaacgtaaacatattttgattactaattatgggaatggtagtgaagtatccagtaacaaatccgctttcaataaaggtgatttgctattcggcaagttgcgtccttattttcacaaagtagcaataactccgttttcaggaatatgctcaactgatatattagttttccgagccaaagagaaatattacaaatctttaatggcaatgtatgcatttaccgatgagtttgtagcatacgcaaatttacgttctacaggaacaagaatgcctagagcagaggctaaagacctgcttaaatataaaatcgttttacccaatgaaaacattttagaaaaatttgaattgctcttaaacgattattggtcaaaagggcaacttaacaataacgaaagtaaacagctaactgccctccgcgacaccctgctccccaaacttatctcaggcgagctgtccctggaggatctaccagatttagtaacccaaaccgaacccgcttaa

SEQ ID NO: 248728 - DNA, 633 bp, Klebsiella pneumoniae
atgagatcaatcaaagtgggtaatgacagcggtggacgcgatgcaataaataggctgattcaagcttataacttcaactcgcgccagcagctttgcgatcacttaggtgtatcaaaaagcacgatggcaaacagatacttacgtgacagtttcccggcggaatgggtaatccagtgcgcccttgaaactggtttgtcgctaagatggctaacaactggtcaaggtgataaacacggcgcccctgggcaggaaaacagttttgattctgtgaccccgacacaggtaaggtccctttctgaagtagttgcgcctgaacttgataaagcatccctgatcggcggctcactggtggagcatgggaaggtcatattggatagtagccttatccctcatgatctgaacaacccgatcttgattcatgctgacaatgacgcatacctaattgaccgcgcgattaccccgccggttaacggggtgtggctagtagatattgatgggataaaaagcatcgtcaaattagcccgtataccaggtaacaggctggttgttcatcaaggcgagtcatcttttgaatgtgctattgatgatattgaagtgttaggcagagccgtcaaagtaattaagagcgtctga

SEQ ID NO: 248729 - DNA, 243 bp, Klebsiella pneumoniae
atgagtactgacatttcaattcgtgtacctaaagaggttgcaactccggcggagttcgcggagtgggagggcttaacccgtgggtctgtatatcaaaaaattcatcacggcaagctcgcaaagtatctgaaaccaaaggataaaaaggaggggcgctgtgtaatttattacctcaagttcaagcaggaccagattcgcgagtctctgggtcactccaacttccgcatcattgttggtcagtaa

SEQ ID NO: 248730 - DNA, 234 bp, Klebsiella pneumoniae
atgcgtgtcgaaataatgattgataaagagcagaccatcagccccgcgacattggtagctctcgaaaatgagctttaccgcaacctgtgccctctgtatcccaaaaccacgatccgcattcgaaaaggcagtgccaatggcatcgagttaagcgggttaaaactggatgaagataaaaagcgcgtgatggaaataatgcagcaggtctgggaggacgacagctgggcgcattaa

SEQ ID NO: 248731 - DNA, 132 bp, Klebsiella pneumoniae
atgggaaaaattgactgcaagtatcaggttgtttatcgggatgaagggttggaatacttcatttccggcggatgggtctttttccagaggccaaaagaatgttgcggcggttactggttaggtcggagctaa

SEQ ID NO: 248732 - DNA, 744 bp, Klebsiella pneumoniae
atgcctgttcataaaatttctggagcgtttttcaaaagtatgcaggtggaatggccctgtcctatgtgcggtcagaagaccttgcagatcatcccagaaacctttgttcttaatgacacacacgacaccatcaaacacagaagtgaagattggttcgagccagatatgcaccgttcaatttttagctgtatggcccgctgctcaagaagacaatgtggtgaagtagtggcctgctcgggagatagtgggtgggagctgcaacaaggctgggatgagggctcatctgattacgactattaccaatggtatcaccctaaaacctttttcccatcattacaccctttcgaacttccggctaagtgccccgaagaaattaccgaacctctccaggcttcgttctctatttttttgatgcagccaggtgcagctgcgaacctcattagaatttcagttgaacgaatgttgacggctatgggggttgatgagaaaaacgaaaaaggtaaacgcatcgttctacatacccgcctggaaatgctcccggctttatatgaattgtttaaagggcctcttatggctataaaatttttaggtaatgccggtagccatacctacgacaaagttaaaatcaaagacattgaagatgcgtttgaaattatggagtacgtagttaatgatttgttctctggcaggaaagagtccgtagaggtcctaacgaagcgattaagtgataaatttcaagaataa

SEQ ID NO: 248733 - DNA, 129 bp, Klebsiella pneumoniae
atggacaacatcggaactattttttatgagcagtccagccttgtgggcgctcgtctgacagacaatgatgcttcgcctgatttaattgatgataaaacgcactggaaaggacatgtccacaatcaataa

SEQ ID NO: 248734 - DNA, 726 bp, Klebsiella pneumoniae
atggcttacacctcccgtttgctcaatgcgatccctggcatccgccacgcttttctcgatgtccatgaaaccgccgcctttccctatgccgagctggctccggtgaagctggtgcatggtaatgaggttcatcattatcagcagccgctgccgacgcgcccgcacgccgacgcggtgtttaccgcggtagccgggcaaaaggtgggggtggtgaccgccgactgtctgccgctgctgatcgcctcgcgcgacggtcgctacgtctgcagcgtgcatgccggctggcaggggctggtcagcggtattgtcgacaacagtctggcctgttttcgccagcagggggtggcattggccgatctggtcatcgccgtggggccgtatattcacccctgctgttacgaagtctccgccggattctatcagcaactgctggaccagcccggcggtgaccgggtggcccgccatcgccagcggctgttccactcccgttcgggcccggtcagcgatccgctcaaagccgccgcacgcggcagcgataatctgtggtttgatctgcgcgcctttgccgaagcgatcttcgcagaggcgggggtggcgccggcgagcgttgaatggctggggagttgtacctactgcaccccgcagtcgctgggctcctaccggcgccggacccattttccggcgccgaagagctttcagtattcgtggatcatgcgcgaggcctga

SEQ ID NO: 248735 - DNA, 774 bp, Klebsiella pneumoniae
atggcaaaaccggactgggaggccatcgaatcggcataccgggccggagtccttagtctccgtgatataggcgataaatacggcgttactgaaggggctatcaggaagagggctaaaaagtttgactgggtacgcaatagcggtacgcaggtacgcaaaaatggtacgcaaagtggtacgcaaaaaggcaaggtgcgtaccaccgagaagcccgtcaactctggcggtacgcaaaaaagtacgcaaccaaaagctgagccgcttccagaaacgaaaccgatacgcggaatgcgtaccgatcccccaaccaatccattccagaccggtaatcagcatgctctgaagcatggcggttatgggcgtcggatgttgctttctgatgctacaaccgaagatgctcagatgctcacactcgacgatgagttgttctggttgcgcgctgcgaacctgactgctgcggagaatatcgggcgctggcagacagagctggagacggcagacagcgagcaggccaaagatttgcacgacctcatatctcaggcgcagaaagccatgcatcgcaatactgctcgtattgaatcactggagtacaccaaggcatccatcattaagcagcgcgctgacgttacctatagagaggctgctactgataaggtgtcgctggaggccgatcgtcttcgccgtgatgcaggtattgatgatggcaacggagagcgtgacctcaatgacttctactctgacatccaaaccgacgctgaatccggtcctgcgtag

SEQ ID NO: 248736 - DNA, 1401 bp, Klebsiella pneumoniae
atgacttctactctgacatccaaaccgacgctgaatccggtcctgcgtagcttctggacgacgcgggcgcgtaacaaagtgctttatggtggccggtcatcgtcaaaatcgtgggatgccgctggcatagccatatttctgtcgaataaatacagcctgcgcttttgctgtgcacgtcagatccagaacaaaattgaagagtcggtgtataccctgctcaaaattcagattgaccgctttggcctgcggcatcgtttccgcattctgaacaacaaaataattaaccgggtgaccgggtctgaattcgtgttttatgggctttggcggaacattgaagagattaagtctctggaaggtatcagcgttctgtggctcgaggaggcccacgcgctgacggaataccagtggaagatactggagccaaccatccgtaaagagggatcagagtgctggtttatctttaaccccggactggtgactgatttcgtttggcgtaactttgtggtcgacccgccagaagatacgctgatacgcaaaatcaactacgatgaaaatccctttttgtccgacaccatgctgaaggttatcgaagccgctaagcgccgggatccggatgggtttaagcacgtctacgaaggcgtgccagagtcggatgatgatgcggccattatcaagctgtcatggattgaggcggccgttgatgcccacaaagtcctgaatttcgagccaagcgggcgcaagcgtattggcttcgacgttgccgatagcggcgccgataagtgcgctaacgtctatcgtcacggctccgtcgtgtattgggcggatgagtggaaggcgaaagaagacgaattgctgaagagctgccagcgtacctatcaggcggcactggagcgtgatgctgatatcgtctacgactcaatcggcgttggggcatctgctggtgcgaaattctcagaaattaatgaggatcgtaagcgcgaaaacatgaatgcatcccgcatcaattatcagcgattcaatgcaggtgctggtgtgaatgagccggactacgaatatattggcatcccgaataaggattttttcgccaacctcaaagcgcaagcctggtggctggtagcggatcgcttccgtaacaccttcaacgcggtaaagaacggcgagcagtacccggtagatgagctgattagcattgactcatcctgtccgctgctggaaaagctcaagctggaacttaccacgccgcaccgtgattttgacaaaaacggtcgcgtgatggtggaaagcaagaaagacctcgccaagcgtgacgtaccatcgccgaacgtggccgacgcgttcatcatggcgtttgctccaaccgatacggcaatggatatctgggaagcgctggggaacagctaa

SEQ ID NO: 248737 - DNA, 909 bp, Klebsiella pneumoniae
atgacagtaacgaccgaattgtacccttccgcacatattgccgagctatttttcccgctcgccggcgatgaaagcgcgcttttgcacgtcatccgtgaaatcgccggtattggttattaccgcggttttgaaaccggcattattcatcaaccgcagatagcccggactatccgcacgctagcagaacagaatcagttaagcgtgacccagtggctcacctttgaactgctgaaagacaacctcaacctcagcagtctggatcccgcgctacgtgaaagatcgatccgccgcgcctgtgaactggtccacctggcagccgactgcggtacccgcaaactgtcgctggtcagcggcgccgaccccggcgacgcccgccgcgaagaggccaaaaagggctttgccgaggcgctggtgcgcattggcgaaaccgtcaggcagtatgacaacatgctgctgcaggttgaaccgctcgatcgctttgcgcacaagtgtcagcttatcggccccactggcgaaactgtagaatggatgaaggcgctgcggccagactgtccaaaactgtatcttgcctgggacagcgcccacgtcgcgctaaacgaagaagatcttatcgaatcgctaacgacggcggcgccgctgatttcacagcttcatctggctaacgccattctcgatccgcaggcgcagggatatggcgattaccatatgaaattcggcgcgccgggcttcctgacgaccgccaccgcggcgcaaatcatcagaaccgcactgcacctcgctctgcctgaggaactcggcccgatttcgctggccgttgaaatgcgcaccaccgaccaggatgacctgtgggataatgagcgacagtgtcgcgagttcctgcaaagcgcctggcgcgaagcgctgcgctaa

SEQ ID NO: 248738 - DNA, 939 bp, Klebsiella pneumoniae
atgccagtgatattacgagtggataaggtaccgccgtcgttagcggaagagctggcgcgtgaccataccttgtatgaatacagcaaattatcagcggaagacttgcaggccattgccggggaaattcaggtgatattagccagtggggagtcgaaagttgaatcctcattgattgagcagttgccggaattaaaactaattgctgtgtttggtgtcggctacgacggcgtggatatccacgccgccttttcacgaaatattcaggtgactaacacaccggatattttaaccgatgatgttgccgatctcgggattgccctgatgttgaacgtatcgaggaggatcaacggcgcacagaaatttattgaatgcggaggctggctatccggcgcttaccccccgtcaaccaaggtcagcggcggacggctgggcattgtgggtttcggccgcattggccgggcggttgcccgacgggcgcaaggttttgccatgcgcattgcctgctttgaccgcaatcccgttaacagtagcgaggtcacgtattacgccgatctactggaactggcgaaaaatagcgatgtgctgatggtctgcgccagcgcgggcaaggagagccagaagcttatcaatcgcgaggtgctcgccgcgctgggtgcgaatgggatcttaatcaatatcgcccgaggcagcgtggtggatgaggaggcgctggtcgcagcgataactcagggtacgcttggcggagcggggctggatgtttttgccaacgaaccgcatatcccgccggcattgctcaaccgtgatgaggtcgtgatcacgccgcatatcggcagcgcgacccgggccacgcgcgcggcgatggcgaaactggtgattgataacattgcggcattttatgccggcgaggcattgctgacgccggtggcgccgccgcgctaa

SEQ ID NO: 248739 - DNA, 1323 bp, Klebsiella pneumoniae
atgtctgactctacactcactccgtcatccaatgcaaagaagccgacgaattaccgctgggttatctttgcaactatgttcttcttattggctgttaacctgatggatcgtattacattatctatcgggatgccctatataaaagaagaattcgatctttcacccacgacgcaaggtttgattcttagcagtttcttttggtcctatgccctgctacaggttccggggggctggttactggatcgctacggtccgcgtaaagtgatcaccggcgcgctatttggctggggctttttccaggccattatcggcctggcgaccggcgggattagcctgatcctttcccgtattggtttaggggcgatggaggcgccggtttcccccagcggcgcgaaactgagctcgacctggctgacccagtcagagaggggacgcggcgcggtgatcatggactccggtagcccgctgggcgtggcgatcggcggcatcatcgtcgcacacctgattgtgctgctggactcctggcgcgtcaccttcgtggtggtcggtatcttcacgatgctgctgggctttatggcatggagaatcctgcgcgatcgtccctctgaacacccaaaagtggatcaaaaagaggtggcgtatattgcggcgggcaacgtcaccagcgccgccggaaccgatgacgccacgccgacaaagggtctgggcatcagctggtttaccatgattgccatcatgattggccgcgcttcgtgggggatggtgtactgggggctgctgacctggggaccgagctacctggcgcaggcgcagggtttgcagctggcctctatcggtaactctacgttctttatcttcattatggggacgctgggatgcctgttcagcggtttcttcgtcgacttcctggtgaaaaagggcgtcagccacaacgtggcgctgaagagcctgctttccgtctccggcatcgtcggactgtgcgtcctgtatgctctggcgacggttactgaccctgagctggccgtgacgctgctctccgtcgcggcattctttatgatgttcggcagcctgtactggagcttcccggctattctggcgccaaaggatcgcgtcggcctggtcggtggattaatgaatatggcaaacagctgcgcgggtattctggtgccgattctggttggcgttattctgcaggctaccgggagctatgaaagcgtgctggtctattttgccgtctgtgccgggttctataccgtgggtaccctgtgcattaactttaataagttaccgctcagtaacgggaaattgtcgttccagaaataa

SEQ ID NO: 248740 - DNA, 855 bp, Klebsiella pneumoniae
atgaataagcttgtgattggcgtgaataccgcgatgttcgacggtctggagactgatgtcgcatttagcacgataaaaaaagcagggtttcgctacgtcgagctggcgtataaccagggctacgttggcgatatgcccccggcgctttttggcgaggagaatgcccgacatattcgtgagctgctggagaagcaccagctacgcactcattcgctgggagcgaccatgaatatgggggccgtggatgccgttgcccagttcacccggcgtatccgtttcgccagtatgattggcgccaaatggatcaacatctgcgtgggcagaagcggcgaccgggcgcgtattatcgccaacctgcgtgaactggcgccggtggccagcgatcatggctgcgtgatgtgcctggaaaacggcggcgatcctaattatgacgtctttcgtctggccgacgatggttttggactgctggaagccgtcgacagcccggcggtggccttcaacgtcgatgcgggcaatatcgtttcgctgtgccccgacgtcgaccccattgagcaggctatcgccatgctgccgggggcgcagcattgccatctgaaggatctgcaggtacgcgatggtgaagtccatttcacggcgatggggtacgggcagttgaattatgtgccgatgctgaaagaactggaggcccgcgcgatcccctgtagcctggaaattcctttgcgcatgcaccgccagcgcgacagctatcccgtacgcggcgattcacccgtcgatcctgcccgtagtcttgaggtgctgattcagtcgcgtgagatgctggaaaaatggcttgggtatcctttgcatgccgaataa

SEQ ID NO: 248741 - DNA, 1992 bp, Klebsiella pneumoniae
atgtcatcgcgtaaaacgctggccaatgcgcttcgtgcgctgagcatggatgctgtacagaaagccaaatccggccacccgggcgccccgatggggatggctgacattgccgaagtcctgtggcgtgatttcctgaaccataacccgaacaacccgtcatgggccgaccgcgaccgcttcgtgctgtccaacggccacggctcaatgctgatttacagcctgctgcacctctccgggtacgatctgccgatcgaagagctgaaaaacttccgtcagctgcactccaggacgccgggccacccggaagtcggctacaccgccggcgtggaaaccaccaccggcccgctgggccaggggattgccaacgccgtgggcatggctatcgcggaaaaaacgctggccgcgcagttcaaccgtccgggccacgatatcgttgaccacttcacctacgctttcatgggcgacggctgcatgatggaagggatctctcacgaggtctgctccctggccgggaccctgaaactgggcaaactggtggcgttctatgatgacaacggtatctccatcgacggtcacgtggaaggctggttcaccgacgacaccgctaaacgtttcgaagcctacggctggcacgtggtgcgcggcgttgacggtcacgacgcggacgcgatcaaacgcgcggtggaagaagcgcgtgcggtcaccgacaaaccgtccctgctgatgtgcaaaaccatcatcggattcggttcgccgaacaaagccggtacccacgattcccacggcgcgccgctgggcgacgccgaaattgccctgacccgcgaagccctgggctggaaacacccggccttcgacatcccgtctgacatctacgcgcagtgggatgccaaagaagccggtcaggcgaaagaagcggcctggaacgagaagttcgctgcttacgctaaagccttcccgcaggaagcagcggaattcacccgccgtatgaagggcgaaatgccggccgacttcgacgccaaagccagtgaatttatcgctaagctgcaggcgaatccggcgaaaatcgccagccgtaaagcgtcgcagaatgcgatcgaagcctttggtccgctgctgccggaattcctcggcggctccgctgacctggcgccgtcgaacctgaccctgtggtccggctcgaaaccgatcaacgaagataccgccgggaactacatccattacggcgtgcgcgagttcggtatgaccgcgattgccaacggtatcgccctgcacggcggtttcctgccgtacacctccaccttcctgatgtttgtggaatatgcgcgtaacgcggtgcgtatggcggcgctgatgaaacagcgtcaggtgatggtctacacccacgactccatcggtctgggcgaagatggcccgacgcaccagccggtagagcaggtggcgtccctgcgggtgaccccggacatgtccacctggcgtccgtgtgaccaggtggaatcggcggtggcgtggaaatacggcgtggagcgtcacgacggcccgaccgcgctgatcctctcgcgtcagaatctggcgcagcaggaccgtacggcagagcagctggcgaatatcgcccgcggcgggtacgtgctgaaagattgtgtcggtcagccggaactgatcttcatcgccaccggttctgaagtggagctggcggttgccgcgtgggacaaactgactgccgaaggggtgaaggcgcgcgtggtctccatgccgtccaccgacgcgttcgagaggcaggacgcggcgtaccgtgaatccgtgctgccgaaagcggtcaccgcccgcgtggccatcgaagcgggcatcgccgactactggtacaaatacgtgggcctgaacggcgctatcgtcgggatgaccaccttcggcgagtcagcgccggcggaacggctgtttgaagcgttcggcttcaccgtcgacaacgtggtggcgaaagcgcaagcgctgctgtag

SEQ ID NO: 248742 - DNA, 981 bp, Klebsiella pneumoniae
atgactattctggaaaagctgaaagaagtgaccaccgtcgtcgcggacagcggcgatattaccgcgatccgcgaataccatccgcaggatgcgacgaccaatccgtcgctgatcctgaaagcggccgcgcaaccgctttatcgcccgttgattacgcaggccatcgcctgggcctgtgaacagggcgggacggcgcagacgcgcctgatcaacgccagcgacaaactggcggtcaacatcggcctggaactgctgcgccaggtgccgggcaaagtctctaccgaggttgacgcgcgcctctccttcgatcgcgggctgtgcgtcgcaaaagcgcgtaaactgattcgtctgtatgaggatgaaggcatcgatcgctctcgcgtgctgatcaagctggccgcgacctggcaggggattaaagcggcggaggagctggagcgggaaggtatccactgtaatctgacgctgctcttttcctttgcccaggcgcgcgcctgcgccgaagcgggcgtctggctgatttccccgtttgtcgggcgtatttacgactggtatcgcgaccgtcagctgctggaagatgagagtccacagaacgatccgggcgttatctcggtacgcaacatctatgagtactacaaaaaacatcgttacccaacggtcatcatgggggcgagctttcgtaaaccggagcaggttatcgccctggccggctgcgaccgtctgaccattgccccggcgctgctggaagcgctcagccggatggagggggagctcgccgtggcgctggcgcctcccgttgccggcgaaataccgccgtcgcccctgagcgaagccgagttttactggctgcacaaccaggacccgatggccgtcgataagctggcggaagggatccgtttatttgctcaggaccaggagaagctggaatcgatgttgagcgagctgctggaaaaacaggaggccgtaaatgtcatcgcgtaa

SEQ ID NO: 248743 - DNA, 480 bp, Klebsiella pneumoniae
atgttgaaagtcgcaatcggggcggatgacgccgccaccggacttaaaaatctggtaaaggaacatctgcaacgcaaagagattgaggtcgtcgactttagccacgacgtggtggggaatgagcagatgtatccggatatcgccttcaacctggcttcggctatccgcgaaggggcgtttgagcgcgggcttttattctgcggtaccggcatcgggatggcgattgtcgccaataaagttcccggcgttcgcgcggcgcagtgtcatgacatttactcggccgagcgtgcccgtaaaagcaataacgcgcaaattatgaccctgggcgcacgggtggtggggagcgaactggcgttaatgctggtcgatgcctggctggccgctgaatttgaagccggacgatccgggccgaaggtgaaacgtatcgattattacgaaacgcttgttcacccggatggcgccgcccgctcagatgaatga

SEQ ID NO: 248744 - DNA, 1761 bp, Klebsiella pneumoniae
atgacctggatttttaaccgaccgtcagacttcgcaaaagaaatggtggcgggttttgtcagcgcacatgcctcactggtgcggcaggttcccggcggcgtggtgcgcaacacccaaagtaaagcgggcagcgtggctattgtggtcggaggcgggtcagggcattaccccgcctttgccggactggtcggccaggggctggcccatggcgcggcaatgggtaatctttttgcctccccttccgcccagcaaatctgctccgtggcgcgcgccgccaataacggcggcggcgtcctgctgatgttcggcaactatgccggcgatgtgctccatttcggcctggcctgcgagcggctgcgggcggaaggtattccctgcgaaaccatcgccatcaccgatgatatttccagcgcaccgctggcggaaaaagagaagcgccgcggcgtagccggcgatctggtggtctttaaagcggcggcggcggcggccgagcgcggcgattcgctggccgaggtgctggcgatttcccgccgcgccaacgaacaaacgcgctcgctggggctggccttcagcggctgtaccttccccggtgcggaacatcctttgttcaccattccggaagggaaaatgggcttcggcatgggtatccatggcgagccggggatcagcgaactcgatatagtcccctccgccgaactggcgcgtatgctgaccaccaccctgctgaaagagcgcccgcagaccattgcgcaaacgaaaggcgcgcgtctgggggtgattattaacggcctgggttcggtcaaatatgaagagctgttcgtattctggcatgacgtacaacagctcctgcaggcggcagacgtggtggttgccgatgtgcagatcggcgagtttgtgaccagcttcaatatggccggcatgtcgatgactttcgtctggtttgatgacgagctggaaaagctgtggctggcgcccgccaccgccccagcctttaaccgcggctccgtgctcccgcatcaaccgctcgatccgcagcggctggagcagagcggcgcggtaaaaatcccgcagggtagtccggcgtcgagagaagccgccgtcaacgtcatgcggatgatcgacgcggtcgcgcagacggtgatcgataatgccgaagagtttggccggattgacgccgtcgccggcgatggcgaccacggcatcggtatggaacgcggcgtggtcgccgcacgcgaggcggcgaaaaagaccctcgaacagggcgccggcgccggcaccgtgctgcaattcgccgcggatgcctgggcagacgaggccggcggaacgtccggcgcgatttggggcgtgatcctcaatacgctgggaattaccatcggcaacgatgaaaaaccggatgccgcccgggttgcgctggccatcgcccaggctaacgccggggtgatgcatttcggcaaagcgaagcctggagacaaaacgctggtcgatgtgctgctccccttcagccaggcgctgagcgccgcggctgacgaaggattatctctcgccgacgcatggcgcaagagcgaacaggtcgccaggcagagcgcgcaggataccgcgcagctggtgcctaagattggccgcgcgcgtccgctggcggagcgtagcctcggcacgccggatgccggcgcgatatcgctggcgatgatcatcgccgccgtgggcgcctgcctcgccgataacactgaaatcgcaccttctcaggagaacgtatgcccctga

SEQ ID NO: 248745 - DNA, 780 bp, Klebsiella pneumoniae
atgcccctgaatctggtcatcggcaccagccataaaacctattttggctatcggcaaacgcaggcgtggtgccagcaggttgcggaaatattgcgccagcagcccgaagcgctgagcgcgcggctacagctgttcacctttcccgccatgccggcggtgtcggcggcgctgcagtgctttgaaggtaccgcgatggcaacgggggcgcagaatatctgcgcggcgccccccggcgcatggaccggcgagagcagcgcgcccatgctgcaggaaatgggctgccgctacgtcgaattgggccatgccgaacggcgtcgtcactttggtgaaaccacggaaatcatcaatcagaagatcgatatggcccttgcaagtcatctcaccccggtcatttgtatcggtgaaaaccagcagatgagcgccgccgatgctgccgtttacgccatcggtcaggcgcgggagctgctggcgcatcgcgtcagggacattctgccgccgatgattttcgcctgggaaccgcagtgggccattggcgccgcggaacccgccagcgatgactatattcgccacgtctgcagagagctacgcgcgtatttgcagcatgaatacggccctcaattacaggttatctacggcggcagcgcgggtcccggcctgctgagccgtctgtggccggacgttgacgggatttttctgggccgtttcgcccaccagcctcaggccttcgcatccattctggacgaggcgcagaagatcgtcgcaggccacctgcaagcctga

SEQ ID NO: 248746 - DNA, 240 bp, Klebsiella pneumoniae
atggcattgaatgggatcttgcctggtggttcctccggcatcggctttggggtggcacaggccgcacaggcactcggtgccagtgtgactatcgcctcacactggaaaaaattgacaccgcactgggccggctcggtggcccgcaccaaggttacgagcgtccttgcactggcattggaagatgcctactcttccttcgactcgaagttctggggacttaccggctggctcgcgcggtga

SEQ ID NO: 248747 - DNA, 639 bp, Klebsiella pneumoniae
atgatcgacctcgtcgcgttgaagcggccgaccttcgctgtcgcgatctggggcggctcgctatttcgcatgggtgtgagcgcggtgccgttcctgatcccactgatgttccagatcggcttcggcttcgacgccttctctgcgggcatgatgctgatggctgtgttcgccggtaacctggcgatgaagccgctgacaacgcgggtgatgcgtcgcttcggcttccgaccggttctggttgtcaacggcctgttcaatgccgcattaatcggcgcctgcgcactgtttgccagccagatgccgctgtggctgatctgcctcgtgctgtttttaggtggtatggctcgctcgatgcagttcaccgcgctcaacacgattgccttctccgacgtgccgcaggcagagatggcgagcgccaataccctgttctccacggccttccagcttgcaatgggcctgggagttgcactgggagccattgcctggcgcattggcgcggtcgtcgcccccgaggccggggccgccacggcgttccgaattgcctttcttgtcgtcgctgtgatctcgctgctgggcgtttgggacagcgccaggctcaagcccgggtccggagaccatgtggcgaaaaacaagtcctga

SEQ ID NO: 248748 - DNA, 843 bp, Klebsiella pneumoniae
atgttgaagagtcaagctgacactcttggagagcaaaacaatcaaatccttcttcagcaaaagcttcttgaaaaacaacagaatgaaattaagcaggcaaatcagggactactagaagcaaaggggatcacccaggaacaagcgctgcaattggttggctgcgtgaagatggttatggaggcagaaagccgcatcagtactgccaaccagacactgaaacaggatattgataaaaaccttgaagaagccatcaagcaatcagcaaaagacctagaccacgctgtcgcagagcacaagaaccagcaggagacgtttgaacaacagctcatcggtcagttgacggcattctcccaacaaactcaggatgagttacagcagatagccgcagaggtcgccgaaaacagaacggctgttgaggagcaattgacatcgctaggggcagcccagcagcaatacgcggcaacccttgagcaacaactgcaacagacgttatctacccacagccaccatattcagtctgaattcgaacaaattatcgctgagaatagcgttgttcaagccagtcttgaacaaaagctacagatacatagccaagcagtactggagaaaatctctcatcaggagactgtggcactgcaacagagccaagcgattgtactgatcgaaaaccggttaaacagtatccagaatgaatacgataaaaggcagggtaatgcagaagctctgctactatctcagcttaaagcagcacatcgtcaccgtctgataaccgccctagtggccactctgtcactgctctctttaggctggcaggcagcattacattttggagtagtgcactaa

SEQ ID NO: 248749 - DNA, 969 bp, Klebsiella pneumoniae
atgagcgaaataatggatttaaccgtcatcgaaataaaaccagaacaggcgccgaccctgtaccgggctggcggtcttgacgtttacctggagcagattcgccaggccgtgaacgaggttccggacctgaccaccaagaaaggtcgtgaccgtgtcgcttctctcgcggcgcaggtatcacgcagcaagacggcaatcgagaagccggggcgcgagtacctgaagcgccttaaagaggctgttcgccctgctgaggcggaaattaagcggttcgttgacgcatgtgacgaactgcgcgatgcgacacgtaagccgctgaccgaatgggaagccgagcaggaacgcattaaggccgaagaagccatgaacgcactgcatgccgaagcgctggccatgaatgaagacttcgatcggcagctggccgctcgtattgagtctgaccacgaaatggctctgctgatgaatgacgctttcgatcgtgagcaggcagataaagcggctgaggctgagcgccagcgcattgcccatgaagaagaaattaagcgactggcagcagctgcagcagcccgcgaagttgagcagcgcgcacagcgtgaacgtgaagaagcggcgcatcgtgaagctgtgttgaaagcacaagctgagcaggcagagcgagatcgcattgcagccgagcagaaagctgaggctgacaagcaggccgctatcgaagcggagcgctgcaaagctcaggaagaagccgatcgcatccgtcgcgaggcagagcaacgcgaacaggcccggatggctgaggagaagcgcaaagccgaagaagaagcgcgccgcgccgctgatgttgaacaccgccgaggaataaatacagcagcggtacaggctcttatcaatcagggcatccctcatgaatgggctaaagcctgcatcattgctgtagctctcgggaaagtcccggctacaaccatcaaatactga

SEQ ID NO: 248750 - DNA, 303 bp, Klebsiella pneumoniae
atgactatagccatcgatcgacttaaagaagtgacaagggtctttggtcgcaggcatatcgcctaccagatggccagagaactgctggagatttatagcggtaacggcccgttagtgtggaatgtgttgagcgatttccctcctgaggtgaatggcaaatatcttgtcattaccagctacggggatattcggaccgcctgctatgactgcgaatcaggggaatggagggcttcagatggcaccattaccggaatcaaatggatggatttgccagccgccccgcaggaggtgagaggtgagtaa

SEQ ID NO: 248751 - DNA, 216 bp, Klebsiella pneumoniae
gtggcgctccctgtctttatccctgaactgggctatagcttatccggcatgcccggggccggttacctgtatatttccgtgaaacgcgaagatacgcatgcggaaggacaggatcctagttatgtctcatcaaccctccataatgtcgtcagtgaaggcgacacggtagacctgagcgcgccggcgggtcacttctttttattgaaccccaaatag

SEQ ID NO: 248752 - DNA, 576 bp, Klebsiella pneumoniae
atgaccaaatcaaccataaccagagaacgcgcacagcaaattttcctgggcaatggaccagagccgagcgcatcagaagaacgagagttggcccgcatgacgctggtcgcaatggacagcagcgagtcggttgaactgcctcttgactacctgcagggacacaaagacggtctggaatgggccgcccaactggcagaagccaatcaccccgagaccggagactggctttacgatgaccctatcgagctggcaaaagctattcgcaaaggtccagatatgccgccagcgcagccggtagcggacagcgagccggtggcggtaattgacctggctaaccttgattatctcctaagtggtgctgatgccgatgtgtggcctcctgagcgcgaagagatgggagatgtgcttctctatcgccacgcgcagccagcgacggtagtgccgaaagaccatcaaatccgcgaactggttaatcagttgcgcgatattgcgattgaatatcatgggacacagcaacttcgtgaacgcattgcgcgggttctacgcgccgccatgctcagcggaggtaagtcatga

SEQ ID NO: 248753 - DNA, 531 bp, Klebsiella pneumoniae
atgaaattcgaagaatggttatcgcaacaaaacggcgtcattgaggttgattgcggctgtgttaccacagaagctttttatcactggatgcgcgtagcttatgaggctggcaactctcaggtgattccggatggttggacatgcaacgataaagcaaacgcagcgctgatgatgcttgatcggattgaaacggtagaccctgttgatgatgaccgtatcgacggcattaagcgcattgttcgtgagctcgcagccgccccgcatgatacccccgctctgaactcggtgcagagcgtcgatagtgtcgcagatagatggattccggtaagtgagcggatgccgcccagtcgtcatgaggtattggtcgggcgttggtggggagagacgccgcggtggtgttgcaaatgggcaacgtatatccctggacacccagattcgcagagtagcggctggttgatccccggcgcgtcatggacaccaactcactggatgccgctgccggcagccccgcaggaggtgaaaggtgagtaa

SEQ ID NO: 248754 - DNA, 231 bp, Klebsiella pneumoniae
atgcgtaattatccgcaacccggcgaacgctggcagcatgaacgtggctggaccgtcacaatcatccgattaattgaagcctcgccctccgtggcgctggttaatcctgaattcagctgtgaagtgctgatacgtcatgacagcgacaaccagctttcttcctgccctctggcatggtttgaacagcggtatacgcgcctgtttgatgcgccgctcggctttgttgaataa

SEQ ID NO: 248755 - DNA, 168 bp, Klebsiella pneumoniae
atgaagggcttcacctgggtgaagttgaaccagctggccgagttacgcattaccaaggctctggcagagggagatgtgaccgacttttacgacttcctcgacctgctgaatgcagagacgcgcatgaacggcggcaaccacacccgcccaacactgaagacgtgctga

SEQ ID NO: 248756 - DNA, 333 bp, Klebsiella pneumoniae
atgcttaaaaaaaaatggtataaattattttgcatatttattattttgatgcctttaaataatatgtatgaagtaaaagctatgatagatggtacactgccttacaatgggtggagcattcagctaacgccaatttatatcaaagtttataaagatatactaactttcttgtttgcatttgttacgatttttatgattttaaaatacgattatgtacgtcgtatactcaagaaaaaaaaactatcatcaatttatttacttattataattatactccttactacggtgggtgtttttttaattggtgagcctgttgaaaagacaattgattaa

SEQ ID NO: 248757 - DNA, 1062 bp, Klebsiella pneumoniae
atgaataaaccaaaaatattagcatattatttgcctcagttccatgagattccagaaaataacgattggtggggatgtggtttcacagaatggaatgctctggaaaatgcaaaaatatataagccaattcaatatgtgagaaaaccaattggtccatattttaattataatttgccatctaaagatgttatggaatggcaggcagaagttgcaaataaacataatatttatggttttttaatctgggattattggttcggtaatcgaaagaaattacttgaaaaaccaaaggagtatattgttgaaaataatattcattttccatattcattaatctgggctaatcatagttggtataataaaagaaaaaataagcttctcatcaaacaacagtatttaggtgttaaagattatgagcaatacttttctgattgtttgaagcattttttaaatgataactatattaaaattaataataagcccgtgtttgggatttatatgccattcgatatacctgatttagactgtttcatggaactctttgataataatgctagattaaatgggtttaatggaatttattgggtggttgacaatactcctgcaactcacttaaataaagacaagtttgattgtattgtaagtagcacaatttattttaaggcgagaaagtttcgacaccccgtaaacttcatcaaggaacagttgataaaaaaatttaatatgaatgacattggtccagtagtatattcatataaaaaattagtcagtacacataagaattttagtcgaaatgaaactcctgtgatttttacggggtgggatacaacgccgcgacatatggaaagaggtactatattaaaggattttaatgtgtctgcgtttgagcaacatctagataatgtgtttaatttttcgaaatatgctaatagtgagttgcttatcttgaagtcgtggaatgaatgggctgagggcaacttattagaacctgatgatgtctttggttatactttattggaggcattgcaaaaaaaatataataaatattttactcagggatag

SEQ ID NO: 248758 - DNA, 1176 bp, Klebsiella pneumoniae
atgattggcgaagccattcacgtgggcgattctcctgtttcaagtgagcaggtggccattgcaaccctgttcgcggacggctcccgcagctggctggaatcaggctttgatggtcgacctaccgagcattcagcgcaaatgattttggatgtaatttcaggggcaatttcggcatcagaaacccagacaatcgcgctatctacagccccagatggaacgggtcgtgaatatccgacttttgagcgtctgaatacccctattattcagttttctcagcaaagcgctgagacaatctactggccctggatagtggataaatcagcgtggggaggatcagggttcgcgcttttttatagcactgaccattctgcaacccatgacccatctggaatttttctttttgagtcagacgacattaccgggccatggattaacagaggaaaggtttttcgtgacgacaccgggggctggcaatcagaaactccatcagttatctatgattcggcgacaaacaaagtcctgatgtattatcagcaagctgaggttcccggctctatcggtcagcaacaaacttgtctcgcaattgcggatccagcagacctcactatttggacgcgcgttggtgttgtgctggataaggagtttgccgaacagcccggagacgggcactgcggttattttcgtccgtttaaatttaatggtcgcatgctgggttatagcctttacggtggcactctcttttcgaatgcatctctctgggtgtcagacgatggtggttatacgtggcagcgtgacggtagactaattggttggatgcaagataagtgtcgacacctggcggatatactgaaggtcgaacagcatcttgtcgttttaactatgtatgaaggcgatgtaatcaactggaaaggtgagccatggtgggtgggagttgtcgggaaagcgcaatctggtagtgtgagtatacgcaactatcgtcttgtaacagctccgcttgcatctgattttggctctctattaactagagttaacgatattacacctgcgccggcccattacgaaatacaaactgatattgattatccggggaactgtgtcgtttctcatgggagattgtacatggtttaccgtactggcggtcagaaaggggatattgcactgatgaggttgaaataa

SEQ ID NO: 248759 - DNA, 1053 bp, Klebsiella pneumoniae
atggataaaactacatcgctttacttagatgttttgcgcttttctgctgctatcttggttcttttgtcccactcagcaacatttttagacatatacctaccggtactatctgattttggttctgaagctgtggctgttttttttgttttgtccggatatgtcatatcgtatgttgtagcaaaaaaagaagataatcccgcatcttactttaaagcaagagcttttagaatctattctgtacttattccagcattaattattacctttatttttgatcatatcggacttagcattgatagctcatactatttcgcacataaaaactttcataacgattactcatttgtaacaataacccagacacttacttttttaggtgagactttaaacagacatattgtatttggaacaaatgaacctatatggtcaatacaatttgaatgtttatattacatagctttcggagctatccttttcgcaagaaaaaaatcattattggttctatccctatttatttttattttacttgcaactccaaaagtcatcatctatttcccgttatggcttcttggtgtcttagcgcacaaaacaaaactacaattcattacaaataaaagcctagtgtttttcccactcagcattttattaatactaattggaaggtacgtgcctttccctcacattccaatgtacaaagagtttcacctaacgctgacatcagccaaatcaatattctatttttattcaataggagtgatggttgccgtaaatatcgttagcgcaaaaggatttctgaatggaacaggcgtagcaaattatcttgaaaagagtgaaaaaatcataagatatttatcatcaaacacttttactctttacctaacgcatattcctgtaataatgttgctatgtgtaatcataagacctgccaatttaattggttcgattttaaccttgctattgacaatatcaatttgtttcgttgcttcatggtgcttcgaaaataaaaaagggcctgttatttcttttttaaacaaaaaagcaacaaccaaataa

SEQ ID NO: 248760 - DNA, 720 bp, Klebsiella pneumoniae
atgcgtaattacttcctggccattagtactgcttttgctgcaatttatagcccaagcattttcgccgccagcgggtgcgtggttattgatggaaaaacttatgagttgaatctagcatctatgcctattgatcctgatgtggatgttggaactgttttgtatacggcgagggttgatacttcaggtcctaaactgacttgtccattaaatacagcaaggggaaaatattcctctcaaatgcttggttcttttcaaacattagtgggtactaacgcttatggcaatatctatgcctccggcatagacggcatcggcatccaaataagagatctggaacaatctgcaaaagctgttccctatgaaaccagtatggattctggtgcactctactactggagcacagataaaaagacacaaatccagtttatcaaaacaggaaaaattggaactggcacaagttacactggcttagcagctcagttcaagttagattcctgggttgttgccaagatatctataaagaccaaggtggcctggataaccaaaagttgcgtagctgaaccgaactccaggatacagaatattcaactggggaaaccactggcatcatcttttacctctatcggcagtacatcgcctgatgtgaacttttcagttaaattaaaatgccaagaagataacattcccgtggctttgttgaataaatcgaacttttgctga

SEQ ID NO: 248761 - DNA, 141 bp, Klebsiella pneumoniae
atgctggcaaatatcggcatccgctttgtgccgatcccggtagtgacagaggaagagttccaggcactgtctgccgagctttcacgaaagcttgagcagatggcggttgaagcggaaaaaagcgaaggcggtgcagcatga

SEQ ID NO: 248762 - DNA, 246 bp, Klebsiella pneumoniae
atggctgtcgcaactgcgtattacgatcacattgtatggggatcgccgagtgggttcggtagcttgctgaataatctctgccgttcattcgtgctgtaccgcctgcacattgttgacctgacggcagcgggcatgaccatggcagaggcaacggcggaagagcaggccattttcacgcgccgtttcagtttaaacggcaaatattatggcgacacgatcccaacaaatccttcgacctttccgtag

SEQ ID NO: 248763 - DNA, 909 bp, Klebsiella pneumoniae
atgtcgtttattaaatatcccttaccggaatcggtgctgcaagcaactgagcagcggatccagtgggtcatggataatttttcgcgcatctgtgtctctttttccgggggaaaagactccaccgttatgctgcatttaaccgcccaggcggcgcggttacaggggaaaaaaatctgcgtgttgtttattgactgggaagcgcagttctcctgcaccatcgcccactgtgaaaaactgcgtgcgctgtatgcggatgttatcgaaaccttttactgggtcgccctgccgctcaccacccaaaatgccctgacgcagtataagccgcaatggcaatgctgggagcccggaaccgagtgggtacgccagccgccgccctgggccattacccacccgggctatttttcattttatcaacccggaatgagctttgaagccttcgtcagccacttcgccgagtggttttcgcagcgtcgtcccgccgccgtgctggtgggcattcgcgccgacgaatcgctaaatcgctttatgacgatttcttcacagcgtaaacagcgcttcgccgacgataaaccatggaccacttcagcgccgggcggccatgcctggtacatctacccgctctatgactggaaaaccgccgatatctggacctggtttgccaaaagcggcgagccctataacccgttgtacgatctgatgtatcaggccggggtgccgctgcgctatatgcgcatttgcgaaccgtttggtcccgagcagcgccaggggctgtggctgtatcacgtgctggaacctgagcgctgggccgcgatgtgccagcgagtgagcggcgcgcacagcggcggggtctatgccgggcatgataaccagttctacggtcatcggaaatcgacaagcccgaccacctga

SEQ ID NO: 248764 - DNA, 807 bp, Klebsiella pneumoniae; identical to SEQ ID NO: 215942

SEQ ID NO: 248765 - DNA, 444 bp, Klebsiella pneumoniae
atggcaaaacccgccaagattgattttgcaactgagaacgctcaaaccatcgctgacgctattctgaacggcgtaaccaacatccaaaacctgaaagccttccgctacagagtcgggaccgacaaggccgataagctctatccccaaacgcgcgaagcaatgaacctcgttaatgcagaacgaaagaaagcccgtgatcgccaggtctttaaggatctgttgcgcccgttctctcaaaagtacgcagcaggtgcaacgatccctgaaatactcgctcccgttctcaaaggctatcgccagatgtatcttgaaaagctgggtctcgaccttactcatgagcagatcataatgttgttggtcgctactgatggtgtggaacaactcgaaaagtacggttatagcgtaatcggtgattttccaaccgctacaactacccgccactaa

SEQ ID NO: 248766 - DNA, 2130 bp, Klebsiella pneumoniae
atgtctaacggcaacattattgtaagtaccctaacaaacagggtcgagtgggatgtagaccggacatcatatggtaaagcactcaaagctgtaaaatctctcaaagccgctcacgagaagcctgctaaagcgctggaggctgcacagaaacgcgcctcgcagagtgaaggcaaagcagcattagccgcagcgaaagcccagacagcgaagctacgccaggctgaacaactgtcaaaacagcagcagaaacaagctcagattcaagccaaaatggaacgggatgcagttgctcatgccaataaaatgacctcattacaggctcgccagttatcccaacaggaacaggcagcacgtcaaaatgcccgtttagcagcaatatctgcaaaagtgcaggccgcagccagatcacgagcgatgatctacaacccaaacctgggcggtcaacattacgatcccggtcttgtttctcgtcagactgaagcaatgaaccgtggtcacggcgctgttgctgctgacattgctgccaccaaaaaggcgatggccctagaggagaagcgccagcgtgagaaagaggcagcccttaagcgtgaggtgacttattacaacagtttgcgtcgtagcgctctgactctggcaaacgtgaacggcgctgacgttgcaacccgttataaagcgatcagtgcagcaaaggaagttttagacctacagcgtcgtgaacactacaccgtagaggaaacccgctttgaaatagcgcgtattaccacagaattacgcaagcaggctcgtctgcaacagcgtattacccgtgagcagaaagccgcaggtgttcgtgctggtcgtgtacgcacagaaagccgtggtgggagtgtaggtcttgccgccgctggtattattggtggtggttccctgattggtagcatgggcgtagctcgtgttggtcagacccttcagggaagccttgagcgctccagagaggcgcagcaattaaggcagtatgacattagccagcttgaatttaatgctattcatgacgttgtacagaagcgtacagggtacgacctgactgtagataagtatgcgtccatgaataaggattacttcgagaaagcaggcgagctaataaataccggttcctttaaaactaacaagcaaggggtaacaacattcagcggaggtggtgaacttgctgatctggtgaatgcagttcttagcaaaaccaaccagcgaacagcccagaaggtgatcggtgaactccagaaattagacatgggaacctttgttacctacgtccggcagttgggtaaacaattcggctggacagagaattccatgcgtcattttcttgaggccatagacgatggttcggtgctcctcagcgggcttacaggggagggtgacgaggttattgcccgtatgcatcaactcgcttctgaaggatggaccctatctgatgcacagcaggccaaccttgataagctggcagcattaggagctgagtacaaccgagtgcaaaccagccttgcagatcatttctcagcctcgtttgttgaaggcctggggcagtacgctgccaatactgacactctacgtcagaagatgactggactgatcccaatttccgatgctctcggcgttgcccttggtgagctaaccaccatcattctctccttcgctggtcgagtcggtgaagaactcaagaaaggcgcgacactgccggatgcagtctacaacaccgttgtggatgactctgcaaacggtgctgccgattggataaaggaaaagaccggatttgatccacgcagcatcggtcagacgctcaaacagatttacccgtggctggatagttctgcacagaacaatatcggcagtggacaggcctggacaaatccggggttaacccgtggggttgcaggatttagccaaccacaactcaccttcactccgcctgagccattcggttctactggatggagaccagacaactccaggtttaatctgactggtgaggcgacggttaaggttgaggtcgagcaaactctgaacgctggggttttagatggccttattgatacaaagatcaacgataacaacgtcagacagcagaatatgatactgggtatagccgattaa

SEQ ID NO: 248767 - DNA, 600 bp, Klebsiella pneumoniae
atgaatgaccgtgaaacgcgctgttacagcggggaggtcagagccgagcaacgcaccgatgaacctacccgcattctgggctatggctcggtgttcaacagccgttctgaacccctgtggggattccgtgaaatcatcaagcccggagcatttgacgatgtgctgaatgatgatgttcgcgggctgtttaaccatgaccccaactttattctgggacggagcgctgccgggacgctatccctgtctgtcgatgagcgcggcctgcgttacgacattacagcgccggatacgcaaactatccgcgatctggtgctggcgccgatgatgcgcggtgacattaaccagtcatcttttgccttccgggtatcccatgacggtgaaaattggtaccaggacgatgaagggatcgttattcgtgaaatatcgaagttttcccggctgtttgatgtcagtccggtgacttatcccgcatatcaggaggccgactccggcgtccgatcgatgaaagcctggcaggaggcgcgcgacagcggtgcgctaaagaacgccattaatcaacgaatggcgcgtgagcgcctgctgacccttcttaacgcgtaa

SEQ ID NO: 248768 - DNA, 864 bp, Klebsiella pneumoniae
atggttaaggtagcaatactattatttattatgcaattaaactcgatgctcgcggttggtctgggatggttacctcagagcgttgcattgtctgtgcgagtctgtgtgggaggctacttactataccattatatccgcaatggtaagatgcattattctttatatgttctattattagtaatgctcacattatttattatcaataacatgatattgataattaattttatatttgtaagtttgatgatttattccataaaagataacggagaggaatcaatcatcaaaagtatctattactcgacaattgcgttatcactaatatttattgtaatctctcttaatggtatattacatcctactattctttactctcccgatacaggtagatatcgaaattcattagggtttatatcacccaactatcctgggttgattgctttttcatgcattgttgcactattttcttgccttggaatgttgaaaagcaaagtcggcaaaaaaagtaaaattcttgtggttataattgcgttgttttgtttggttataccgctattaaccgattctcgaaccccgttatatacactaattgtttcatttattttttatgtatttcttaggttctcattttttagattactaacaaggatatttatccctttagtgcctgctatttttatgggtttaacgttatatattgcattttattacaatcatgatataaatgcactattaagcggtaggccgtacttatattctttatatttgaaagactttggttgggccgattatttattgggtggggaaggaacccagggattttctgttgatagagttcaactataccaggatactcttttataa

SEQ ID NO: 248769 - DNA, 360 bp, Klebsiella pneumoniae
atgtcgcataactcagctccgtctaataacaaactgctgattgcgaatctcgacggcggtctgacgggatctgctgtactgaaatcgaccgcatcagcgaaaaccggcacggacatggtcgcggacacggcctattacgatcatatcgtgtggggatcgccaagtggtttcggcagtctgctgaataacctgtgccgctcgtacgtgctgtaccgcctgcacattgtcgatctgacagcggcaggcatgacgatggctgaagcgacggcggcagagcaggctgttttcagccgccgctttagcgccggtggaaaatattacggcgacacaatcccaacaaatccgtctacctttccgtag

SEQ ID NO: 248770 - DNA, 240 bp, Klebsiella pneumoniae
atgcttcgacagtcagacatcgccgcagctttccgcgagtcggtattgcgtaaccccaaaggataccggtacctgcacacaaaggattttgtgtcagcgctgcgccggcgcgggctgcactttaccgactctgaggctaatgcatggatatcgagagagcagggttatttcgtcgacaaaaccaccgaccatagcgaaaaccgcctgtggatgatggccaacatggggagggttctgtaa

SEQ ID NO: 248771 - DNA, 324 bp, Klebsiella pneumoniae
atggacgcactggccacaggtcgcaggatcaagtgcctgacctgcgtggatgatttcacaaaggaatgcctgacggtcactgttgccttcgggatttcaggcgtgcaggtcacgcgtattctggacagcattgcgctgtttcgcggctatccggctacgataagaaacgatcagggcccggagtttacctgccgcgcactcgatcagtgggcttttgagcatggtgtggagctgcgacttatccagcccggcaagccaacgcagaacggatttattgagagttttaacggacgctttcgtgatgaatgcggctttgttgaataa

SEQ ID NO: 248772 - DNA, 303 bp, Klebsiella pneumoniae; identical to SEQ ID NO: 239334

SEQ ID NO: 248773 - DNA, 993 bp, Klebsiella pneumoniae
atgaataaaattctgtttgataagcgttggattggggagcatgggattggtaggtttgcaaaagaaatttaccgaagttcaacacaaaagatggcacttgaattaaagggaaatccagcgggtatgttcgatatcttaaaattaacgacatacttattattccatagaggatatttttattctccaggttataattcgccttttttttttcttaaacgtactatatttaccattcatgatttaaatcatatagattttatggaaaatagtagttttcttaagcgagtttattataatctgatcttaaaaagagcttgccgaaaagctaaaaaaatatttactgtatcggagttttcaaaacaaagaattgtgaattgggctaaaatagataaagaaaaaatttttgttcttggaaatggcgtatctgaatcatttaattataacgttcccaaatatcaatgtgattttaaatatattttagtagtaggtaatagaaaagcacataaaaatgagccaagagcattagaggcatttttaagtgccgatatcgataaaagagtaaaaattgtttttactggaaatatttctgatcctcttaaagcgatcattaaatcttataatgctgctgaccgagtgattttttctggtagaacatctgatcaagagctagcatcattatacaaatcagctgagttcttattatttccatcgctatacgagggattcggtttgcctgtaattgaagctatggcgtgtggcacgccagtaataacatcaaatacaacttctttagtcgaaatttcaaaaaatgcagcattgcttgtcaatccaaattctacagatgcaataagatcttcgattgagcaattattttatgatgaggaattaaaacttcaattgagtacaaaaggattaattgtagctaaaagttttatttgggatgaaattagacaaaaattcgatacgcaaataaataagattattaatgaataa

SEQ ID NO: 248774 - DNA, 894 bp, Klebsiella pneumoniae
atgaataatattaataaaaaagaagcctctgtcatcataccttattataatgatagtaaggtatttgaacgttgccttttaagcgtaattcatcaagcttattgcccaaaggaaatcattataattgatgataactcttatgattcatctgatttaaagagtattattgaaaaatataaagatgagatttcgattatttatgagcgaaacttgataaacaagaatgctgcattttctagaaatagaggggtcgatctatctaattgtgaaattatcgcatttttagatgctgatgattattggcacacagaacacctaagcacatcgataaatcagctattaaaacatgatgcagattttgtgtattctaatgttatagaggttaatccattaggggagttaaaaaaaaggaaggtagataatatatctgaacttgaaaatgcatttgatatagtattaaagtcccccccacaaacaggctcatttgtattttataaaaaacttatgaatgaagtacgatttgatgagtcattaaggagacatcaggattatcaattcttgattgatgtgattcgtgcaggtaaaaaacatcactatattgatgcgtataatacttattattgtgaatcacatcgtcctttttccagtagagtaaattttgattcaatgttcaaattttggagcgattattacaaattattcactgaaaaccaattaaaaaaatttttgataagaaatttatgtttgtcgctccggattaaggggtccaaaaaaattagttggtatttagaacattataaggcatttgaaataaccaaagatactgcgtttattaagctttacaaattaatagctgtctcttatacacatctgacgctgccgacgaaggcttag

SEQ ID NO: 248775 - DNA, 237 bp, Klebsiella pneumoniae
atgacaaataaaatatctgtcacagtaagtatgttgtgcgaagaaacccctgaagtaatgaatactattcaagaacgttttgaagtgtatgttgccattactggatattcagtagaagaaatcatggatgaccacaaattgcttgacgagttaaatcgatttattaataacgaactagttaatgatttagggttggaatatggttccgttatcatcaatatcggttataacaactaa

SEQ ID NO: 248776 - DNA, 837 bp, Klebsiella pneumoniae
atggcaaaagttaactttttcgacacgcgtattgttaaaaaattttcagactacacatcaacaataagcactattttttcacttttattgatttttgttgacattccaacagaaaataaaattacgcttgggattatattcttattcactttgtcattgttgtattttggaatttggttgaaatcaaataatcttacggaagttaatttagatgtagagggaagtattgttactgtaaaagctggggatctatttctacaagacggattcaaggttatagcttttaatgaatactttgacactcaagttgatgacaatattatctctcataaatcccttaatgggttatacattgataaccatttatcaggtcctgtctctgatttagaccagcgtgtttcaaattataagtttgatgaagatgaaatccttgaagtcaaccaagacaggaaggtaggcaagaaacaaaaatattcgttaggaactatcttcgtaaatgaagattatctattaactgctttttcaaaatttgatgataaaaatagagcgtttcttaccatgcctgactatttaggttttttaataaatttctgggacaaggtaaatcgtatatatgctcaaaaaagcgtttcggtccctatctttggctctggaataacacgaataaaagaacataagaatataagcgatgaagatttgcttaaaataatgttgtggacatttagaatcagtgagatgcgatttaagtttccggcaaagctcactattgtcattcacaaagataaaattgataaaataaatttattggacattaaatcagcaagaaatggtctttag

SEQ ID NO: 248777 - DNA, 510 bp, Klebsiella pneumoniae
atgagctatcgtaataaaacatatgtagcatttgcgagtgaaaatataagttcttatcgtctaatggaggcgtggaaagcaaatgagaacattgacttcaacttttttgatgcacatgacctttatatttcaagagatacgagcaaaccagaaacgataaagaaaaatctccgtgagcgtatgaaaaacgctaaacaggttgtacttcttgggagcagcgatgcgaagagaaaaggtggtgatggtgactcattccttgcgcatgaaatagatctcattattgagtttaatctccctgtggtcatcgcaaatctggatggtgataggaaggtggatcggaattttattcctaaaccattactggatgcagaccactatactgtctctgtttcgttccagcccaaaattatcaaatatgctttagataactattgtgcgacttattcttcaagcacaaataaagggcctcatcaatatccagatagcgtctatagtggtttggatatttaa

SEQ ID NO: 248778 - DNA, 345 bp, Klebsiella pneumoniae
atgagtgaacaaatgaaatatgttttaaatattgatacttacattttgcagaacagccatgaaaagatcactgatatatttatgactaaacataaagaagcggtaataaaacactgtgattccgatatggaacatttccagttttactttgaagctggactacatacgattggggtatggcaaatgcaggttgatgcgggcacttgtaacaatgaagaagatgaggtattgaagttctttagcgaattgagtcaagacgatgctggtaaactggctgagtctattttacagttcagtaatcttttcaatatgagcggtgcagatataataataaatatttgttag

SEQ ID NO: 248779 - DNA, 1068 bp, Klebsiella pneumoniae
gtgttcaactttgccatacatccgaacgtatattcttcaagttcaattaatggacttcgtaaattattagaagaaacatggatacgaaatcttcccatcggcgacggtagaattttcatcatttcaggcttttcaaattataacggtggtgcccggttttataaaagattaaaagaacacactgaaaatggcggggaaatacttgcaattcttggggggagttctagccaaaaactatctagtaaacaagttgttgaagctcttcttgaatgcggtgcacgtgtaatattgattaatcgaaaaagaatattgcatgctaaatgctacggttatataaaaaaagataattcacaaaatctaattgttagctccggtaattttaccggtccgggtatgtctcaaaatattgaagcatctgtacttctggacgaacatttgataaaacaatctaaatttgattggaatgaatgtataaaaggatttttatcacaagaatggcaatactatgaatgcacgcttgattttcaaaacccctgctggaatctattgtatgatgaaagtgctcgtgctgtagtatctgacgattcagaacttgaaacaatggtaataacacttcaaccgacagatacaaatcggattttagcctctaagggagatatctcaggtcgaggaagtcagtatttttggttaagcaaagattgttttgactttttccctcctctgacaattaaaaatgaaagaggatggaaaggtactctctcaacatttatcaacttgaattatgttgatcttggaattatacggcaagagcgggtgacttttgaagcagaaaataatcttgattttcgccttggaacaggctcattacgatataccaagattgcagcgccggatgatcttgcatgcttgacaagaattaatgatactgattatgagttacgtattattaaaaagtcagatcgacattatcacgcaattcgtaattatgcccatcactacatcggtcacaagggtaagcagtatggctttgtagataacttaacttttactaaaatcatcacaaattaa

SEQ ID NO: 248780 - DNA, 1512 bp, Klebsiella pneumoniae
atgttgctaaagtttcctgactataacatgtttcaatatgaaaaagcattggctgaaaaagaagttagactgatttttcccggtgctatttattcagtttctgatggcggaatacaggtacatattgaccatgataagtataatattaacgacctgcttaagttgacatattttaaatctatcgaatgggacgggcatgaagagctaacgtaccaagccttgaaagaagcatcttgcccaaaagtagggacgcagaaaaaacaatccacacgatatggtgctcacggcttacatgaatataaagggaagtttaacccacaaatagtatcttctataataaatttgtgtggtataaagcaaggagataaaatacttgaaccattttgtggaagtgggacaactctttatgaagcaatgctaaatgggatcagttcagatggatttgattataatcccttagcttgttttttgtcaaatgcgaaggtatctagctttagaatatctggtagtgaattattaaaatacgcggaagctgtacttttatattgtgaagagaattctcataatatagttattgaaaatgatgaacggagtaaatatttatcaagatggttagatataaaatacctaaaaatattcgaatgtttacttaaaacagcaagcaaaatgatcgatgatgatcatataagaaacgtttttcttagtatttgttctaataatattagagaatattctttgcaggaaccagcagacttaagaatcagacggcgctcaagtccttatcctgatatagatgtattgactaaaatcaaaaaatctatagctgaagttgcactaagtatagatgctataaaaaaaattcaacaaaataaaaatattgagatcaatacgaattctcataatatagatattagagataaaaaggggcttgttaactaccatggatatgatgccgctattacaagccctccatacgcaaccgcattaccctatattgatacacaaaggctgagtttaatctggttaggattagcaacgccgaaagaagtaaaacttttagaaaacagccttataggttccagagagcttacaaaaaaagaagagaaaatattaagagaagagcttaaagaaaacaaaaatcagatcaaagatgaactacatgaactttgtaatgacatgttgacctcacttggtagtgaagatggttttcgtagacaggctatgccattcattgtgtatcgttatttttcagatatgcaacgaatgttcaaaaacgtgttttcaatgctgaatagtaatggctcttttgctctagtagttggtcataatcaaactacattaggcggaaagctttttgatcttgatactccaacatatcttaagatgattgctgaggaaaatggatttacttccgtcgatgatataaaactagatgtttataaaagatatgatttacataaagcgaactcaataaatagtgaaaggttattaattcttaggaaaaaagactaa

SEQ ID NO: 248781 - DNA, 924 bp, Klebsiella pneumoniae
atgtctgtatcgcaaaaaatgggatatgaatctattgggattgatttaaatccgattgcatgcctcatcagtagagtcaaaacatcagttttgccaagttgttttcgtgagacctatcagaaagtactagtggatataaaaagccaaaaggatgtattacttgataataatattccaaatgttaatcactggttcagactagatattcaggcagaaattgaaaaattaaaaaaagctatagagaaatataaccaaagtacagccctttatgatgcgctgagtttggcgttatccagcatacttgtacgtgtttcaaatcaggaaagtgatacgagatatgcagctattgacaaaaaaattacagcaggtgatgtatttcgactttttgaaaatagctgcgaaaaaattcttgagaatattacagtaaaagaaactgctcctaaagttaaagtaattaataaagatatattgaaggtcaatagctcagatattcaggcagaagtcggccttgtaataacgtcgccaccgtaccctaatgcttatgaatattggttatatcataaatatcgtatgtggtggttgggttatgatccggtttcggttaaagagaaagaaattggtgctagagcacacttttttaagaaaaatcatcatactgaactggatttttatcaccaaatgtcaaaaacattaaatactataaatgaagttttgataaaagatggttatgttgccatagttgtcggaagatctaaaattcatggaaaaataattgataatgctgaattaatagagcgtgcagctaaggataatgatctgatatgtgttggaaaatttaatcggatgatgaaatctagccgtaaatcatttaatttgaaccatgcaaatatcaaagaagaaacaatagtggttttaaagaaataa

SEQ ID NO: 248782 - DNA, 591 bp, Klebsiella pneumoniae
gtgttcctcaccacgcctgtcttccattcgcagcttgttgttcgccggggtgcgcagcacattgcgggtgtgattgtcccggttcaccaggtcgggatgttcggagtcgtgcagcgcatacgcgatgtacggcaggtcaatatcaccgttgctgtacgcaatcgccacttcggttccgtcaatgagcggcgtatgccagcccagcgtttcaccggcataaggtttcgccatccgcagccacagatagccgtaacccggttcggtcccctcccggtcgaagtccggcttcacccggtagcgcccctgcccgtccatgtgagcgtagatatcgttcttttcccggctctcaatccgggccggaagtgtgccgtgaatttccggacgcgggatttccgccggacggaaacagtaccgttcggtgtaaggcatgccccacaccgacacgtgcagacgggaatcacgtgctccccggtaggtcaccagggtgaggacgacgccttcttgcagggccgtaatgacgtcgccctgcggctccagcacctgaccgggagtgaggtgtgcagcattgctgaacagatgaatgcgggctga

SEQ ID NO: 248783 - DNA, 852 bp, Klebsiella pneumoniae
atgataatacaagataacaatactatagaaatatttaaaaatcaattacctgtgaagccttactgttccaacaatttagaaaatggtcttagtatcaggaacaaaaacaaagcacttgagatgctttaccttcaggcaaatcagccagctatacagacgtgcttactgttcgatctcgatgagaacaacgctttctacaagtttgaagatgtagggcttcccgttcctacgttcatcaccaaaagcccagagtctggtaggtgtcattatggctatatgctcaaagccggtgtttgtaagacacaacacgcaaggctgaagcctttaaagtatgcagcagccgtagaagctggcattgctagaaagttagcttctgatcgaggatatgctggactgattacaaaaaatccactgcatgaacattggtcaccgtattggtcaggtgctgatctgtatgagttagattatttagctgattttgttgagttacaaacaccaacaaaaaaagttaaatcagagaactacgggctgggacgcaatgttaacttgtttgaagatttaagaacttatgcttataggcgagtattgaagtttaaaaatgactcaacttatgaagcatgggaacgtgatcttttaagtgtagccgaaggactcaacacacattgcaacgcattaaaccccttgcaacacaatgagataaaggcaactgcaagatcagtgagccgttggacttggaagaactttgatagtgctactttctccgaaatacaatcaaaaagggcaaaaaaaacacgtaaaacaaacgctaaaaatgaaatgttagaaatattaatgagcaagggggcgttatga

SEQ ID NO: 248784 - DNA, 228 bp, Klebsiella pneumoniae
atgaagagtaaacaatggatcagcacgcaaaaacataaacagttctattgggctcgtattgagtttgaggaatggtggatggaaagagagtgggagcatcctgttacccgatttatcctcaagacatctggtttttttatgctgatcgttttggaagccgcctctttgttttttggtattggttcacataagaaagcctttccagaattgcatccaaaagataagtaa

SEQ ID NO: 248785 - DNA, 534 bp, Klebsiella pneumoniae
atgacacgcacacaatcagaacgcctgactctacgaccggttacaacaactgacgttgatgacttattcaggatttatggcgatcctgccactaacacttttaacccggcaggtccttatccgaatccaactcatgcaaagacagtcttggcccgctgggttagccactggaaggaaaatgctttcgggaactgggcaatctctttgcatgaagcaccagaaaaggtgattggatttggtgggttgagtattagcacttacgccggtattaccatcaacaatcttgggtatcgttttgctaccgaagcatggggcaaagggctggcaactgagttttcacgctatgccgttcgttatggattcgaaaaacttcagcttgaagccatctcgggtgtcgtcagaggaaatcatcttgcatcacaaaaagtcctgacgaaagcaggattaaaatatgtcagagagatcagcgacatagataatgcaccgcccagtttgctgtttactctcacccttgatgagtggtgccgtaaatga

SEQ ID NO: 248786 - DNA, 837 bp, Klebsiella pneumoniae
atggcttacacagcaacggttatccctgtaatgatcgcaccccctggtgatgttgccgatgagagacaagtcattcgtgacgtgattcatgagtggaacgatataaattcagctcgttcgaaagtaatgcttacacctgtcgggtgggagacacacacatcgcctgaacttggaattcgacctcaggagctaattaatcagcgattgcttgtagagtgtgatttattaattggcgttttttggacccggttaggttcaccgactggaaacgagtccagtggaacagttgaagaaatatatcggcacttagatgcaaataaaccagcaatgatttatttctcagctaaaccagtagcgccggataccattgatgtaaatcaacataaagcgctcactgaattcaaagcagaatgtatgagcaaagggttaatcgaacattttgacaatctgaaagattttaaacaccaattatataaacagttatcattaactcttgccggtaacgaatatttacagaaactgattaatgggatgaacaacaccggttcatcgatggcggaaaatgtatcagagcctgcgatatcagatgatgctctgcatgtcttacgagtcgcttgtgaaacaggtgatggttcaattatgatgttaaatgttttagctggcacaattattcaagttggctcgcaagttattaatgcagagagtgccagagagctggcaaggtggaaaagtgcgattaaagagctgcaatttaatgggttgattattgctcaaggttataaaggtgaagtatttgaagtaacacataaaggatggagtatttttgaatcgcaatga

SEQ ID NO: 248787 - DNA, 498 bp, Klebsiella pneumoniae
atgacaggagcagactttttattaccgattgcagcgggagccgcgattagctgggccagttatagtgtagttgcccatgttgtatcaaagcagcacatcagcacgctacgcgcagtttcatggggcattcttggaaccctctcattggtgttaggcgtgtgcacattttccgctgtaagcgcagaacacccggcagcgaaacacgagactatgtgcttaggtaacgccccagaatgctatgcaaaagcgcatcacgaccccgtcaaagagtgcatgcagataatggacaagaaagaagcgtttcgccatatatggcaggatagtgaagcgcagccggttttcaacacctacctctggcacgacgagaaaaaacgaactattcaaatgttcgggcaacaagctaaggcgattaataaccttgggatgcaaacaccacttcaatatttttgtgtttttgacgccaacactggggaagtcatcgcagcttcatttgagtaa

SEQ ID NO: 248788 - DNA, 1020 bp, Klebsiella pneumoniae
atgggaacaacacatttagccaaccttgcacttaattctccgcctgtcgatggaatgcttccatacttggttatgattacaggatgccgtttctatgctgcggtgtgcaaagcaacagatgcaacccagcaggtcatcaattatgaattggacgcagccagttctagtgaacatgcgtatatccaaagcttcattaggcgttgcggcgttccagaattagagttttcaggtggtttacacagattaaaagagggggatgcggcagatcaaataactgatggtctgaataacttatttatgagcatgaagcaggtgggttacgcagatgaaatttgtctgatggcaagatgcaccattgtttcatatattatttctcgatcaaaatatgcggcctcagctcctcagttgcacagtattaatgtctttttgaatcctccgcatgatggagttttgaccaataaatcgcaaaggctagatagtatgggattaagtagtttatttggacttaaaaaagatatttttattattggtggcgtcaaaactaaattgccagaaactgatgaacaaacaatgaggctagtatctgagattacgcagcagctagctcagaaattgccaacggaacaagatatctattggtttgtgatcgagttttttgatagagctaatgggttcagtagtgcagcacgagaaatactaaaaaacttaccgatgaatttattggagatggaatatgcaggccgtcgttcagaaaattcatatgtcggcaagaaaaatccgggggtagcttatcttttagaagatgttgcaccttcttttcaaaaggctgtttcgcatcttggagctggccctgagcaagtaatcgtagcccttgtctacctcattttttgtaatgagtatagagagataataaaaaacttaagaattaaatatgccgttcactatcataataattgtatatcgagcggtagttttaataatgctgataaatggggtgaggtaatcggtagtttagaataa

SEQ ID NO: 248789 - DNA, 720 bp, Klebsiella pneumoniae
atgcaagagaattataagattctggttgtggatgacgacatgcgcctgcgtgcgctgctcgagcgttatctgaccgagcagggcttccaggttcgtagcgtggcgaacgccgaacagatggatcgtctgttaacccgtgaatccttccacctgatggtgctggatctgatgctgccgggcgaagatggtctctctatctgccgtcgtctgcgcagccagagtaacccgatgccgatcattatggtgacggcgaaaggcgaagaggtcgatcggatcgtgggtctggagatcggggctgacgactatattccgaagccgtttaacccgcgcgaactgctggcccgcatccgggcggtgctgcgtcgccaggcgaacgagctgccgggcgcgccgtcgcaggaagaggcggttatcgcctttggtaaattcaaactgaatttaggcacccgcgagatgttccgtgaagacgagccgatgccgttgaccagcggcgaattcgcggtcctgaaggcgctggtgagccatccccgtgagccgctgtcgcgcgataagctgatgaacctcgcccgcggccgcgaatactctgcgatggagcgctccatcgacgtacagatctcccgcctgcgccgcatggtggaagaggacccggcgcatccgcgctacatccagaccgtctggggtctgggctacgtcttcgtcccggacggttctaaggcatga

SEQ ID NO: 248790 - DNA, 2970 bp, Klebsiella pneumoniae
atgcgggaatatggttacagctccagccaggtgctggatattactgaggctatttctactggtttaaaactttctggcgcgaatgctcaggagtccagttcggtcatcactcagtttagccaggctctggcgcagggcgtgctgagaggcgaagaattcaatgccgtcaacgagagcggcgacagggttatacgggcgcttgcggcagggatgggggttgcgcgtaaagaccttaaatctatggcggatcaggggcagttaaccattgataaagtagttccggccctcatcagccagcttggtaagctccggaatgaatatggtgagttgccgcagaccgtttcatcgtcggcaacaaaagttgaaaacgcttttatgcaatgggtcggtggagctaatgaagcgagtggcgcgacaaataccctgaccggattacttgatggcgtagccaacaatattgatcaggtcgccactgctgccggagcgcttgttgccgttggtgctgcccgatatttgggaaatatggctcttggtgccagctctgcaacggctgggattattaacgcagcaaaaagcgaagtagctttagctgaagcccaggtcagagggacgcaggtttcgacagctcgtgcgcgtgctgcagtttatcgtgcccagcaggcactggcagcggcgcggggtacagacgcgcaggccgccgcagaaaaacggctctcactggcgcaggagtcacttaaccgtaatattcaggccagagtatccgctcagactgcactgaactcggttactgctgtaggttcccggctcatggggggagcattaggcctcgttggcggtattcctgggctggttttgcttggtgccggtgcctggtacacgatgtaccagaatcaggagcaggccagattatccgctcaggaatatgcaaacaccattgatgctgtccgtgaaaagacaaaatcaatgtccctgcccgaagtttctgataatgagaccaaaacccgtcaggcgctggaggagcaaaaccgtcttgttgatgcccaggcatctaaagtaaaaagcctgaaggaagagatcgctggctatcagtatgtcctgtctaaccccggaccaacaaccagtggcggtttcatgataaaccacctgacttcggtcgaaacggtcacccgtggtctggaagaagcgacttccgctctggccgttgaacaggagaggttagctcagatgcaggctaagtctgagtcgatccagtcggtactggaagggatagagaacaggcgaatagcattaatccggcagcaggctgcagaacagaattcagcatatcaatcgttattaatgatgaacggtgagcatactgaatttaaccgtttgctgggtctcggaaataatcttctcatggcccgacaggggctggtaaacgcaccagtacgcttaccacaggtagacctgacaacccagcaaacggttgcacttgaaaaaagccgtcgtgatctggcgctttcaaaactcaaaggtgaggacaaggagcgcgcacgactgggttatgctgcggatgacctggggttaactaacgacccacagtttcagaccggacggcaggagttgattaataacggcctgaatgaatggagaaacaaccaggaaaataaacccaagccaaaaggaaggcatgggaaaaccgaggcggagaaaaccgaagatacctatacccggctgattaaacagcaacgggagcaaattgctctttccagccaaaacactgagctggcaaagatgaaatatcaggttactcagggggaattatcttcgcttgaaaaatccaaaaaggaaacgttgctgcacaatgcggcgcttattgatcagaaaaatatcgctgaacagttaaaaacattccgcgaaggtctggccgacagtaatactgccgcccgggaaagggggaatatcgatttcctcggcgcgggacagggggataaagcccgtgaccgaatgaaggaaatggcggatattcgcgctgattttctcaggcagcagcgggatttacaacgtgatttcagtcgtgggcagatttccgaagacctgtataaaaagcaaacggaagcgcttaaagcagcgcttgccgaacgcctggatattcaggaggagtattacaaaaaaaccgatgaacagcagtcagactggcgggcagggatcagcgattccctgatgaactatgccgatcaggcttctgatctgagttcaatggctgctactgcaaccagcgaaattctggatgccaccactaactctatctccaacaacctgacaaacgtcctgacaggcgctgcttcttttaaagatgggatgtcgaatatcttcagctctctgggtgaaacggtgattaagacgctgatccagatggcaacacaggcgttgatcaccaaagcgattatggcgtcatttggcggcggagcgggtgggttgttcggtagtctttttggcggtgccagcggtgcggcaagtagtggtaccgctattcaaagcgcgggagctaatttttcattcaacgctctcggaggcgtttacgattctccgtcactttctgcctacagcaatggtgtttacagcactccccaatattttgcgtttgcgaaaggggcgggtgtattcggcgaggccgggccggaagccatcatgccgcttacccgtggcgctgatggttcgctgggggtcaaagctgttgggcgggaatcgccggcggtacagaacgctgctaaccagatccaggcacagccacgaattgctgtcagcgtagatgccagaagtacgttcaccggtaaaccggatgacataacgatgcaggctattgagcgaaggaatgacgctctggaacagcggatagttaacaccttaaccgccgaagtaaataacccccagaagaaattcggtcgggctatttattcaaatctccaatctaaaaaaccaagatag

SEQ ID NO: 248791 - DNA, 2175 bp, Klebsiella pneumoniae
atggcctttgatccgccacttgggagcacgtcgcccgcggtgctgctcgataacgccactcgcctggataatttgctgaatagcctggcgctggtctaccctgaccgcgaaggggctgatctggatacctggcgaggtatcatgttgcgggtttcgaatacactggatgatatccggcaaaatctgatccctctcagccggcagtacatgaccctggctgaagcccaggcggatatcgcgaatattccggtgggctcgaccacgtattaccgcagcccggacgatagcgctctcgctatcgaggtcataaataacggcggaacgctggagccaaccgggcgaaaaatgccttcacaggaggcaataaacgaactacaaaaatacgtttctgaattaatcagcaatgatccgtccatcagcgcattcgttcagtgggaggccgttggcgggtttattctggggcagcttgacaaggattatctgaaaacggctggtttcgaagttggcgcaaagcgattgtcgatggacagcatggatacagaggcaactaacgttccggaaattgttcttcaggatgagcatggttttattatccagcgccagacatcacagtacctggaaaatagcgcagggaaatttatccctgtagataataacgattacgttattgaagatgagcatggattccatattttttcagcaatgcaatctggctctccgacctcggctgaagacaagactgccgcgcgtgaagcatatatagcaaaaatggataatctggcgcttgcggtcagtgctgcggtgaacaacacgctggttaccggcattcagcgtcctgtgtttgattacaacctggttatcacagacgggcagtcattatcgaccgggacggaaggatgggcagctctttcaactgtggcatttgaggctgaaaaccttttgatgtttggcgactcagttcgcccttcaaccgaccgtgcaaccggcggcagtacctggaatcctctgggtggcgcagcattaaaaccgctgaaagcggtcacgcaatcaatcggcggcggtagcgttctgacagatgcagaagtttccgccctgcctcccggtgcggttaacgagggtgaaacggtcgatgtgggcgcggttaatttctggcgtcagttgcagaatgattttcacggagtcagcgttaaccctgcacgtaaaatcattgtgctcaactgtggtgttcagggccgtacagtggaggaactttcaaagggacatccgtataaccactataaccgcgtcattgaggcggtgacgaaagtcaaatcttatatcgccagccagcagcctggcgcgactgttggtatcgtcgcgtttctttatatgcaaggcgagtggaattactggacatcaacaaccggtacgcatgaccgtgcgacgtttcttgagctgacaaagcaacttcgcaccgatttgattacagattgcgcgtacggcatttgcggccagaaattacctccggcgtggataacctatcaaaccggcggaagttatacagacgacacctacaacctggcaatcgggatggctcagttagacatggcagagcaggttcctgggtgttatctggcaacgccggtatatcaggtaactgataaaaacggacaccttgatccaaatgggtatcgatgggccggaatgcagtttggcaaggtattgcaccgtattctcgacaggggcctcgattggaaaccgatgaaaccgataaaagtcgtcagatattccgacgatgaaattctggcctgttttaatacgccatccccgccagcaaagtttaaagaaacctatgtggtgaatacggcaacaatgtacccgaataagggattcctcgttaccgatgcaaacggtgttgtgggtgtttcgtcagtaacgaccgtcggccaggcgacattatctgtaaaactcagcgctccagccacaggcgatgtgtacctctggtacgcgccaaaaaccacatacaacggcaacggtaatctctgcgatagcgattccaccattgccccatataactatgaataccacgcaggtagcggccagtacccgtcagcaaacatagctgccctggtcgataaaccatacccgcttgaaaactggtgctgtgctttcagaattaaagtagaggaaaaatag

SEQ ID NO: 248792 - DNA, 756 bp, Klebsiella pneumoniae
atgggtcagagacaaatcatcaagggcgtgaatggttccccgattgcaatcggctattccgcagcagtacctgcagggcttcagtttattaattactatggcggggctatgccgcagggcaggaatatggcgccggacggtgttgcggcccgtgttgtcggttcgccggtagtcggaacaatggctgaaggggttttgtgtaaatcacataccgcttatattcagagtcaggtgcaacaggcagccagaatgacagtgcttggtgtcttctgcccaacatctgacctgcgagcatatgcaatctctaacgctaacggggcacggccaatcggattgtctgtgtactcagagccgtcaggaactaccggagttcacaatctacgcattcagtttggtggggtgctgtccgcaggtggcggaaacggtaacgccagtgctgccattgctaatgccatcacgaacaatgtcccgttcgcgtttgcagcgcttctggactattccaccctgaccgcaacaaaagttacgatcaaggacctgaaaaaagcggttactcagagcgctacagcatcattttctgcagcaggctctggttccacaggtatgatgtttgggtcagaactggaatcagtcgtgtatggtgatacccgtctgttggaaatggctgtatggagcagaatattaactgatgatgaaatcgcagctcaatatttgcagattaagaattactatcaggaaatacatggtatcaatatttag

SEQ ID NO: 248793 - DNA, 768 bp, Klebsiella pneumoniae
atgcccaaggctgctcccaagtcgaataaaatagctagcgaactcatagatgtactgaaagcgaaggttaagattgatgaatttacttttcgcaagtacttaagagagatcgatagtctaaatgaccgattttcagatgattatctgaaagcactggcttatgctgcttttggcctcaaagatgatgctgtgcattttttcgaggcatcactagcttggggtgttgatacctatgctatgaattacgcaatttacttgtctgagttcggtacacataaggagttacgagaagtcgtcaaccgccttattactaaatacggctctaagactatgcttacctttggttgggaaactaacctgttcacaggtaatatagaaactgcattacattacgccgatcgtttcattgcaattgctgacgaaaaggacgctgaagctatgaaaaatgatgctcatggtattgcgattgaatcagaaaaattccgacaaaaagccggtcttactgaggatgagtataaagatatagcgcagaaaatgattgatgttgctgacaattatggtattcgcgcttcatctatatctttttattttgtagcagaagaaaaaactgcggcatatatactgacgttaaaaactgatgatattgatgttattgccgatatgaatattgatatagctttttctcttgctgaaaatgaaaatttagcggggaaaagattcagtgtttggtatcgtggtactcaggaggaagaaaatgcctgtaactag

SEQ ID NO: 248794 - DNA, 840 bp, Klebsiella pneumoniae
atgaacgcgaagaataaagtagttattgtagcttgtgaaggacaacatgacatttccttcataactcgaattcttcatactgcaggattcagaacagataccagaaaaatcaaagaattccctatgccttttaattctctttttacaggcatcgcgagtaaaatgattctggatgatagaaagctagggtatcaaagccctaacttcctcttaccatcagtagccttagtggctgaaggaaaaattattttccttcataatctaaatggcgacggtcgaagtccagaaagggcacaattattagcctcatacggtagcttagtcggcgaagatgatttttcgaaagattttaattatgagtttagatttttattttttttcgatgctgatgagcatggagtacaaactagacttacagagatgcaaaatgaattaaatattgaacctgccttaacaaatggattaatagtaaactatggcaaacacgagcttgggtgctatgtttatcatgaaaacgagactgacacaggagtacttgaagacatattgttagagcatttttctcgcaagagcgagattttaatgcgcaatgtatccactttcctttcagataattcattagatgctgaaagaacaagagagctacatattatcaatggagaggaacagagaaaaggcgcgtctaaatactctgagaaaaaatctaaagtaaatttatttggccaactccaattctcaggaatgaataattccgttattatatctaagtctgactttttgagaaaagaagatatcgagcactgccctcaatgtttggctataaaaaacatgttcaattaa

SEQ ID NO: 248795 - DNA, 879 bp, Klebsiella pneumoniae
atggcctctcaattcaagttaataagacaaaaaaataaatttttatcattaagtccggtttttttaaacgctgtatttcaggatgtcatttctattgatggtaggttcaatgatgtagatgtctcagtgagaatgacaaagttcgacgaacctaaagtcgataaaaaagatgattacatagcatcatataaactgacttcacaaattgatggaacagaaatatcaaatttagtacatacatatgtgcatgaaagcatgactaggatatctgatcaagtctctcatctttgtgcatcatcatttaaaagtccatatttttacgatattgaagactcaatcactgattataatagaagtgtcgaactaaaagtcacatcgcttgatggtacttcacagacagcaattaacctcgttatagattttatgaaaagagttgaggcaagcattgttgatattcgctataccgaagaaatggatgttaaacgtttcttggttgagtctaaatactcaactgaacgaagttttgatctaactacgtacggcgaaggtattcagcgaatattttatattgctctcgcatttgcatcatgtagaaatggtgtgattttaattgatgagtttgaaacagccatacacttcagcttattaaaggaattcactcagttaacacaagaacttgccgagacatttaatgtacaagtatttttaacctctcattctcgcgaatgcatcgaagcatttatagaaaacggatacaaaacagaacaaatcacaggctttcagatgataaacgacggccgtaaaataacctcaaagagaattgagggagagcgttttaagtatcttgtcgaaaatattgctcttgatattaggggttaa

SEQ ID NO: 248796 - DNA, 255 bp, Klebsiella pneumoniae
atgactacgatatgcccgcaatgcggttctgaccgcataagtgagcgtcatattggcaggaagacgggaggtattgctggaggatttgatattaaaaatagtgatattatttacggggtaatggaagataaatttggtaattctactctcatgtatagcagtctgactatagtaaagttctggctgaaattgaacatgatagtgaagataagaattatgttaataaaactcatgaatatcttaagtgatgtttaa

SEQ ID NO: 248797 - DNA, 669 bp, Klebsiella pneumoniae
atgaataatgacattttctaccctcaattaacaaggaaggaagaacaatattattataatcggaatggtactttctacgctaattatcttgaaaattatgaaaaaatagctgaagattgccatcatcgttgtgtatattgtgatgcgacggaaaaagagtgtggaggggaccctttctctttggatcatttcaggcctaaacaaattttcgtccatttattcaatggaattttaattacccatccgcataatttatatttatcttgtcaaaaatgtaatgtactaaaaagtaatgattggaaaggtccaactgacttaattgacggcccttcttatatcaataaccaaggatatattgatagatttaaagacagcactaacgactttataaaggtcacggatacaggggaagtcatctctgttaataagaacggcccaggtgactatatgataaagaaaatgcttttgaatcgaaccaataggatatatttaaggaaaaagagaattatagacaagcaaatacaagaattaaacaaaacaataaccaatcggatagaggatctaattttatattttaatatggaagacatcgatcataaaaaattaaaggatgatatcactttattaataaacataaaaagagactttgacaaactaatcgctgaataa

SEQ ID NO: 248798 - DNA, 630 bp, Klebsiella pneumoniae
atgatggcaaaaattatttttattgacgatcgtgaggatgtacgcaccacttatagaatgaacttaagtcgaatattccgtaatgttgccgaagttatggctttggaaccgttagcacttcttgatgatatgattgcttaccttgataacatcgacaataaagttatgtatgttatcgatgaagatcttaaacatttcggacaagctcaatattctggagccgagttaattaaagcgataagaatatatgataggaagatacccatatatattttaactggatatattttaactattgataaaaacctcgctgatgttgagttcgtaatcgataaaggggagtggaatgataattctgaaaaatttgcaaagagatttcttaggcatattgatacttacaatgaagttaaggatgctcaagaaaaaagattcgatgaattattatgcaaatctttaatttcccctttagatgaaaatgaacaagaagaatattcagcgctgaatttcaaccgtagcaaaatattatctaatgaatcagtaattactgttaaagatattgaacaactaaacgaaaaaacaaataaattaatagatatccaaaaaaggctaagcgagttagatcatgaataa

SEQ ID NO: 248799 - DNA, 2277 bp, Klebsiella pneumoniae
atggctaaaaggttgatcgataggaaaccctttgatttttctgccagagtgacattacaacttggtagagaaagtatttccagctctacagttgctgtatctgaacttataaaaaattcctacgatgcagatgccgaaactgttcgcataaatttttatctacgtgagcaaggagctatatccactttaatcatccaagatgatggattagggatgaatactgatactcttgccgaccattggttaaaaatagggactaataacaaagctgtaaccgaatactcttcaagcaaacgtagaattttaactggggcaaagggtcttgggcggttaggtatagatcgactatgtaaaaaaatgattctatatactaagcaggcaggagaaaaacatgccactcaacttagtgttgattggagaaaatacgaaaacacagataaatcgctaagccagattaaacatgatatctatgaagttgacatacccaataagggtaaatacggcaatatttttacaacttcagaagaacatggaacatatctcatcttaattggattaagagatgattggaataatgattttatcaatgctctatctaatgaactacgtttacttatctctccatatagagcaattaatgatttctctattacattaaaaacaactaacaactcaggcacaatagagaaagaaattgattctcaagatattttatctggagctgtatggaaagttaatgcctatatcgataaatataataatgttaaaacttgttttactaataatataactggcgaaaaagttgaacataagccaataccgtggagtagatggatagtaaatcaaggtagggcaccattatttgggcctattaagtttgatttttattacctaccaagattaaaagagtctttagctaaagttaatctttcagcaaaagattggtcgaaatttatggagctaaatagaggtgttagaatctaccgagatgatttccgtgtcagaccctatggcgaaccaagtgggaaaggcgattggttagatattgggtacaggaaagctcaaagtcccggtggtattagtcaaggaggatggcgaatcagtccagcccaattaattggagcgattagcatttctcgtcaaaataatgaaatactgaatgatcaggctaatcgcgaaggtattgttgaaaatgacgctttttttcaaatgaggacgtttgcaattaaggtcattgaaatgttcgaggaattagctcataaacaagcatcaggtaatgaagagttagatctatcccaagagttagagaaaattctaaataaatcctcagcagatctcactgaagcttttgataatgtaaaaaaaatagcattttctaagagaacgaaaaaaagaaaaaaaaactcaccaaacgcaatagccttatatcaacgaatcagagaattagaacgagcaaagataaatcacgaaaaagctgtagagaattattatagtaccttaaaaaaagaacgagtaaaattagaagaggaaaaaaacacactctctaatcttgcctctatcggtattctttcagtttgttttggccatgaaatccgaactcattcatttcttgcattacaaaatgcagatgaaattaataatattgtgaatgactatattattgatggtattgaaatcccccagcacgatcttaaaagtattagcaaaatccttaaagaaagcgtttcatatattaataaattctcgcagttagcaattgaaaacataaaaccagataaaagaacacgcaaaaaaacaaatgttccatctgtatttgagtacattttcaacttaatggaaaaaagcttatctcagatgggggtagtccataaatttaactacgtcagaattagtaaagaagattttaatgttcgctcatttgaaattgactgggaaagtattgccataaattttataactaattccttatgggctttaaacgataaaaatagaaatgaacgaaatatagaagttacattcgaaagagtcgggggcacgaagcttaggatatcgttcgaagactcgggttgtgggctagaagaatcacaagaagaaaatatatttcttccgatgaaaagttcaaaacgagatcgaactggaaacgtcgttggtaccggaatgggtttagcaattatccgaaaccaagttgttgataatatggccggaaatatatttgctaaaggctcttctcctcttggaggagctggtttttatatcgaagttaatcaggatgtttaa

SEQ ID NO: 248800 - DNA, 1263 bp, Klebsiella pneumoniae
atgagtctacaagcccctttagaatacaataaaatgttacgtgaaattatatcatcctcatcaaaaggacatgctataaaatcaatcgaccttgatgaaatagactcaatcctaagagactccttatcgattaaaaatatgagagaggctggtagtttctttactgggcttaaacttgcgacaaagactcttgattcatttcttgagccaataaaaataaattcggtggtgctagatcccacgtgtggtgcaggaaatctactagtggcctgttcacgtagattctctatctatcctactttaacacagacattaagcatatggggacaacagctgaaggggtttgatctctatgagatttttgttgaaagtgcaaaacttagaataataattgatgctttgaatagaggagcaaaaaaagattgtgatatcgatatagcattgaccctgcttccaaacataaaagtaaaaaatgcattagatgtatgtgaaatggatttgaaagatattactcatgttgtaatgaatcctccctttacaataacgccatctcctaacaactattattggaaaaaagggaaagttaactcagccggtatcttcatggataagtacatcagattgctacctgcaggttgctgtgtcagtgctattttaccggatgtactaagatcaggcagtcgatatgaagaatttagaacattcattgattgcaatttgataggtacttgcaatatatggggtagatttaatacaaaaactgatgtagatgtctttatcttatcagggaaaataaaacgctatcttaatagtcggctgccatggtcaccaaaccttggtaaatacacgcaattatcatctcaatacgatgttcgagtaggaccattagttgcttatagggatcaccaagaaggtgaagaacatccttattttcaccccaaaaactctcctgcatgggaaataatatcgaaagttagtgaaactagaaaatttaagggtacgacaataatccctcctttcatagttgttaaaaggacatccagtccaacagataaatttagagcatcagcgaccataataaatttagatcttcctgttgctgtagaaaaccatatgatagtaataagacctaaagactcatcattcgagtcttgtttgaaattaatgaaaatacttaaatcagaaaagacaaataattttctcaataatcgaattagaacacgccacttaactgttggagtgattaaagaaattcccatttaa

SEQ ID NO: 248801 - DNA, 2454 bp, Klebsiella pneumoniae
ttgcctgcggttcggtatccgaatcggaatcggaatcagaatccgagtcactgtccgagtcggagtcgctgtccgagtcggagtcgctgtcagagtccgaatcgctgtccgagtcagagtcggaatcgctgtccgagtcggagtcactgtcggaatccgagtcgctgtcagaatcggagtcgctgtccgaatccgagtcactgtcagaatccgaatcgctgtcagaatccgagtcactgtcagagtcggagtcggagtcgctgtccgaatccgagtcactgtcagagtccgaatcgctgtcagaatccgaatcgctgtccgagtcagagtcgctgtcggaatccgagtcgctgtcggagtcggaatcgctgtcggagtcggaatcgctgtcagagtccgaatcactgtcggaatccgaatcactgtcggaatccgaatcactgtcggaatccgaatcgctgtcggagtcggagtcactgtcagaatcgctgtccgaatcggagtcactgtcagcatccgaatcactgtcggaatccgaatcactgtcggagtcggagtcgctgtcagaatccgaatcactgtcggaatccgaatcgctgtccgaatcggagtcagagtcgctgtcggagtccgagtcgctgtcggaatcggagtcgctgtcggaatccgagtcgctgtcggagtcggaatcgctgtcagaatccgagtcgctgtccgagtcagagtcgctgtcggagtcggagtcgctgtcggagtcggagtcgctgtcggagtccgagtcgctgtcggaatcgctgtccgaatcggagtcactgtcagcatccgagtcgctgtcggagtcggaatcactgtccgaatcggagtcgctgtccgagtccgagtcgctgtccgagtctgagtcgctgtcagaatccgaatcgctgtcagaatccgaatcgctgtcggagtcagagtcgctgtccgagtctgagtcgctgtcagaatccgaatcgctgtcagaatccgaatcgctgtcggagtcagagtcgctgtcggagtcagagtcggagtcagaatccgaatcgctgtcggagtccgagtcgctgtcggaatcgctgtccgaatcggagtcactgtcagcatccgaatcactgtcggaatccgaatcactgtcggagtcggagtcgctgtcagaatccgaatcactgtcggaatcggaatcactgtcagaatccgaatcgctgtcggagtccgagtcgctgtccgagtctgagtcgctgtcagaatccgaatcggagtcactgtcagagtcggagtcggagtcgctgtcggagtcagagtcactgtcagagtcggagtccgaatccgagtcgctgtcggagtccgaatcgctgtcagaatccgagtcactgtcagaatccgagtcactgtcagagtcggaatcactgtcagagtccgagtcgctgtcggaatcggagtcggagtcagagtcgctgtcggaatccgaatcgctgtcagagtcagagtcactatcagagtcagaatcgctgtcggaatcggagtcgctgtcggaatccgaatcactgtcagagtccgagtcactgtcagagtcagagtcgctgtcagaatccgagtcgctgtcggagtccgagtcactgtcggaatccgaatcactgtcagaatccgaatcgctgtcagaatccgagtcgctgtcggaatcggagtcggagtcagagtcagagtcgctgtcggaatccgagtcgctgtcggagtccgaatcgctgtcggaatccgaatcgctgtcggagtcagagtcactgtcagcatccgaatcgctgtccgagtcagagtcgctgtcggaatccgaatcgctgtcagagtcagagtcactgtcagagtcagaatcgctgtcggaatcggagtcgctgtcggaatcagagtcgctgtcagagtcggagtcgctgtccgagtccgaatcgctgtcggaatcggaatcggagtcgctgtcagaatccgagtcactgtcagaatcggaatcgctgtcagaatccgagtcactgtcagagtccgaatcgctgtcagaatccgaatcactgtccgagtcagagtcgctgtcagagtccgaatcactgtcagagtcggaatcactgtcagagtcggagtcgctgtcggagtccgagtcgctgtcggagtccgagtcgctgtcagaatccgagtcgctgtccgagtctgtatcagaatcggcatcggcatcactttcgctgccgccagggtcggtatcgctgtctgagtcagaatccgaatcactgtccgcatcagaatcagtatcatcgttcggagaatgcgacgaatgatctttatcggaagatcctgcaatcatcgcccctataccaagcaaagccgccccggccattacccatggagcaatgctgccaccagaactgcctgcagctaataatcctgagatatcactga

SEQ ID NO: 248802 - DNA, 168 bp, Klebsiella pneumoniae
atggtactgcgtctggtcggcggtcaggcgggagaccggcggcaggacgccgaacgcatcggccgtcaggaagatcactttggtagcgtgacccgctttagacaccggcttaacaatgttgtcgatgtggtcgatggggtaggagacgcgggtattttcggtctttga

SEQ ID NO: 248803 - DNA, 801 bp, Klebsiella pneumoniae
atgttaaactttttgatacctgtaaaaaatcatatcgatattaagaattgggatattataaagaaaaatattcaatcaactctgatatctattaataaccaaagcgataataattggcattgctatatagtatgtaatactggctgcgatctacctgcattacctgatgaaaataagttcactatcttatctgtagatctaaataaaatgaatgtccaaaagtctgctggattacattcttattatgacgctataagagaagataaaggacagcgtttatatacagcttttaaaaaatgtaacaatgacgatttttttatggttgttgattatgatgactttattcataaagatatctccttatatgttaacaaacaccagaatgaaaatggatggtatattgataaaggttatttttactctggtggtaacgtcttaattaagacaaaaaaattcgatacaaaatgtgggacttcaaatattctgaaagtttcattggtttacgaatttaataatggagaaaaggaattgtcaatttcattgatcaaagaacttcttggcagccatcgatttttaaagaaatacatggttgataaaaagaaagaatttaaaagtattccgttttatgcagccctatataatatcggtatccctggctcaactagcggaacttcaggggtcatgagtaatttcttttcgttaaatgttttgattagaagacctgatcgttttgtcagaaatttttttaatataagatggttttcttcaaaaaagaaaaaattctttggtcttgttaattaa

SEQ ID NO: 248804 - DNA, 2052 bp, Klebsiella pneumoniae
atgtctcactcggatattgatttttgggaagagattgaagcgctcagagagtcaagtgaaattgaatgcaaaaaagcatctggatcccttccaaaatccttttgggagacgtatagctcatttgctaatagttatggtggaatggtttatttgggtttaacggagaatagtgatggaagctttactgtttctggcgtcgataaacccgactcgatattgcaacaaatgtgggattgtttaaacaaccctgaaaaagtaaatctcaatattttatcaccaaacaacgtttccgttataagtgtaaatgatctcgatataattaaaatagcagtcccaagagctaacaggagacagaagcctatttatatcaataacaatcccaaaatgggatgttacatacgacaacacggcggagattatcgagctacagaagaatcattgcaaagaatgtggtcggaaaagggccatgagtcgagggattctcagatattaattggttttgatctttctgatttggatttgaccacattaaaaacttacaggcaaatgttccagaatagacagcctgaacatgcttttaataccttagatgatgttgagtttttaagagcgctaagtgcgtggaaaaaggaaaggcttactggtcaggaaggggtgacagtcgcagggttattagtattcggtaaataccaaagcattcgggaacagtttagctcctaccatttagattacatagagaggccagatgcctccattgaaagacgctatttagaccgggttacattggatggaacatggtctggtaatttgttcgatttttatcttaaaataattaagaaattaacaattgatcttaaagtaagattccaactggaaggtgacaggcgtaaagaggaagataaggttcatgaggcattgcgagaggctttagttaatactttggctcatgcagattataatggtagagcctctatactcatagtaaaacgacctgatatgtttggttttagaaatccagggctaatgagaattccgcttgaagtcgctatagaaggaggcgagagtgactgccggaatagcatcgttcacgatatgttcaggatggttggtctaagtgagaaattgggatctggtcttcgaaaaatatttgataattggcgcgaagaggagtggcaaagcccacgacttcatgaaaagcaggagccagaacaaaccctattggaattacacatgatagattttgtttctgagacaattaagcgtgacctaaatgaacgttttggggataaattcaaagatttaagtgagcttgaaaaaataattttggtatcagctgcatcggaagggtgggttacgcatgagcgtgttgcacaattgactacaacccattctagggatattaccatagctctgccgagattagagagaaatggatttttagaatcaaaaggaactcagaaagaaaaattctaccatcttccgggtgtcaatgttgttacccctgacctcattttcccagaaacatcaccgatcacattggcaagtaaatcacttaaaatcagtgggttaggtagtgggttgaaacttaagattagctccgatattaatcgctccagctccgatactaacgacttgagctccgatactaacgacttgagctccgatactaacgaacaggtgaaagatgtgcggaaagggagtgctggaacgcttaacagggatcaacacggtagggtgatatcggattcacttcgcttacctatcattgacaatatacacaatttgacaccggactatcagcaagttctgtttgatattgcatgtgatgcccgacaaaaacagcgtatggcgaaagacacaatgcagagtttaatcgtgcaattatgtgcagagcattttatgactttaaatgctttagctgtagtgttaaatagaaaaccagatgctgtgaggcaacaatatctttcggcaatggtgaaaagtggtgtattagtgttggcgttccctcaaacaccaacccacgaaaagcaagcatatacgtcaagaatataa

SEQ ID NO: 248805 - DNA, 909 bp, Klebsiella pneumoniae
gtgactcggattcggacagtgactcggattctgacagcgactccgattctgacagcgattcggattctgacagcgactccgactccgattccgacagcgactcggactcggacagtgactccgactctgacagcgactccgattcggacagcgactccgattctgacagcgactcagactctgacagcgactccgattccgacagtgactccgattcggacagcgattccgacagcgacagtgactcggattccgacagcgactctgactcggacagtgattccgactccgacagcgattcggattccgacagcgattcggactctgacagtgactcggattctgacagcgattccgactccgacagtgattccgactcggacagcgactccgactccgactctgacagtgactcggattctgacagcgactcggatgctgacagcgactccgactctgacagcgactctgactccgacagcgattcggattccgacagcgactctgactcggacagcgattcggattctgacagcgactcggactctgacagcgattcggattctgacagtgactccgattcggacagcgattcggattctgacagtgactccgattcggacagcgactccgattctgacagtgattccgacagcgacagtgattcggattctgacagcgattcggattccgacagtgactctgactctgacagcgattcggacagtgactccgattcggacagcgattcggattctgacagcgattcggattccgacagtgattcggactctgacagtgactcggattcggacagtgactcggattctgacagcgactccgattctgacagcgattcggattctgacagcgattcggattctgacagcgactccgactcgattctga

SEQ ID NO: 248806 - DNA, 588 bp, Klebsiella pneumoniae
atggaaattgattcagaaatcagtaacgaacacgtcttagataggatttgcgaaatctacggatttgctcaaaaaatccagcttgcgcggcacttcaatatcgcggccagttccctgcaaaaccgctacacacgaggggctatttcctatgacttcatagtccattgctctctggaaacaggtgcaaacgtagagtggttgcttacaggtaaaggggaaaagctatccggtagtaacatcaaggcatctgttgaatctgaagagttaacagttaaatcattcacattaagtgaaggtcgattgattgacggtacagatttgaggatatccaagtctttctttaatcgaacccttaacaatccacaatgcatattttcagacaatgcggctcactttattgagactgatgccttgctgtcagatggttcgtggcttgtagatattgagggggcaaaaagcattcgtgagttaacgattttaccaggcagaaaactacacgttgccggagggaaagtgccttttgaatgcttagttgatgacatacaaacattagggcgcgtggtgggtgtatatagtgaggtgagttga

SEQ ID NO: 248807 - DNA, 264 bp, Klebsiella pneumoniae
atggcttctgaaattacaattgtgaaaattccaagtgagattgtttctcctcatgagtttgcagctttagagcgggtctctatcgctacagttcgtcgctggactactggcgacaacccttgcattccaatcgagccgcgagtcattaagcctggtcgtaaacgtgcaagcggcatggttcgcatttactacgcgcgctggaaagaagagcagttgcgtaaggcgctggggcattcccgttttcaactcgttattggcgcttga

SEQ ID NO: 248808 - DNA, 1665 bp, Klebsiella pneumoniae
atgtcgcgagccgatgttgacctactggccggtgacattgctaatttcattcgttctgagctggcaaatattgatgattcaggttttggtgagctcaaaacgctatacacctggtacatgcacgctggttttatttctctgcaattcaatgtcacccctccccattgggagcgcgtggcaaataaatacttcaacaaagatgatatcgccccagcagtaatccgtatgtttactgagtcatggtggcgtaatcgtctgcgtcgtgtcgcatcggcatggcgcgaacatctacaaattgcagtcggcaacgtcagcaagaaacgacacgcctacgcgagtaaaaactgtgtgactgactggcgtgagcagaaacgccgcacgcgcgaatttctcaagggactggatctcgaagacgaagacggcaaccgcatcagcctgatagaaaaatatgacggttctgtcgctaaccctgcgatacgccgctgcgagctgatgacccgcatccgtgggtttgaaaatatctgcaatgaattaggttatgtaggggagttttacaccctgaccgcaccgtctaaatatcacgccacgactaaagcgggctaccgtaacagtaaatggaacggcgccagcccgtcggacacgcagagctatctaaccggcctttgggcgcgcatacgcgccaagctgcaccgggaagaaatccgcattttcggcatacgtgttgccgagcctcaccatgatggtacgccgcattggcacatgcttatgtttatgttgccggaagacgttgagcgcgtgcgtcttatcatccgtgattatgcgtgggaggaagaccgccacgaactgagaagcgataaagccaaaaaagcacgtttccacgccgaagctattgacccggacaagggcagcgctaccggctatgttgctaaatacatttcgaaaaatatcgacggatatgctctcgatggcgaaaccgatgacgaaagcggtgaactgcttaaagagactgcccccgccgtatcagcatgggcggcgcgctggcacatccgtcaattccagtttattggcggcgcgccggtgacggtctaccgtgaattgcgtcgtctcgctgataccgagactgcgcacggtctgagcgttgaatttgccgccgtccatgatgccgctgacgccggtgactgggctggttacgttaatgcgcagggtggcccgtttgtccgtcgcgacgatttgcaggtgcgcacgctgtatgagcctcgcgccgagtttaaccagtatggtgaggaaactatctgcattcgtggcgtgtacgattccgccgtcggcgctgacaccccgattttaaccaggctaacgcagtggaaaattgtgccgaagcgtgccgttgatttggccgttgacgttaagggcgctcctgcgccctctcggagttctgtcaataactgtacgggaagcgaaagcgatccgccggagctggatttatccaaaccgttgagtcgaagtgaaaggcggaagctaacggccaggctcagggacaaaaaacgggtcaccaggtgtgattttgtccacggaacggataaacaaagcgcagccattgacagaacaatagacgagattcagctcacgaccggcgaaaccatcagccggggtgaggctcgcacctga

SEQ ID NO: 248809 - DNA, 309 bp, Klebsiella pneumoniae
atgtgtgtagctttaatcaagagaattctgactaattttattgataatcaaactgatgcgatgagctatcagtttgcggtccatacctccatcaatttgtgttttttaataaaaacaattgcttgtatgtatgctgttgttgctagattaatgccgatagcgcagcagatttgtcactgcgccagcaataactcccggcctcccttctttcactgctctgataccgataagctggtcgaacaggcaagctgcgcagagctcggtccggtcattaaagacctactacatcacattagaatgaaaaaataa

SEQ ID NO: 248810 - DNA, 3447 bp, Klebsiella pneumoniae
atgcgacagtcactggataaaacgcttagaaatcagctggaaaaagttgttgtcagggcccgagaactgatagaaaaagctgcatcagaagcattaatacgtttaggagtggagacggcggaagcccctggatacctgaacgataatgagcgtaagctgcgtaatcgcctgcgtgcccatgcccgccagttgggggacaagctgcaggccaatggtgtgcaaggaactgaacgcctgcaggcggaggtcagctatgagcactggcatcgtatgttatttgcccgctttttggagcaaaacaatctgctaatgctggataaatatcttgctgtcacgctgaccgactgtcaggaatatgctgaagaagaaggctgtaaagatggctgggaactggccggcaagctggcgcagagaatgctgcctcaggtatttcgggtcgattcccccgtatttgagctgcaaattcccgtcgatcgcattcgtgaattagaggatttgattctgacacttcctggtgcggtttttcaggcccaggacagcttgggatggtgttaccagttctggcaaagcaaacgaaaaaaggaagtaaatgcggcgggtattccgattggtgcggatgagttaagcccggtcacccagttattcactgagccttatatggtgagcttcctgctggataacagcttgggtgcctggtgggcgaaaaaacagctgacggatgcggatttacgctcggccagtgatgagaaaactttacgtcaggctgctgccattgatggtgtaccgctggaatatctgcgttttgttaaaaccagcgatgagcagggtgagttgtggcaagccgccggcggctggtttgatggctggccacaggaagttcgtgcactgaaaacgctggatccgtgctgtggttcagggcattttctggttgcattattcctgatgctggtaccaatgcgtatgcagcttgaaggacttgatgccagaagcgctgtagataaggtgcttgctgataaccttcatggccttgaacttgacagtcgctgtgtggagattgctgcttttgctctggcgctggaggcctggcgatatcccaatgccggtggttaccgtaccctccctgcactaaatattgcctgctcagggctggatgtcagcgcagctgcccaggaatggctggcgcttgctaaacacaatccggatatcagcgaggcacttaattggtttacccgaaccttcaaagatgccccggtgctgggcagcctgattgacgtcaatacggcttattacgaaggaaaaactgaaggcaaagattccccctggcaggttctcctggatgcgaaagctgcaaccgacgatgaagcaaaaacagccgaggtaactgctcagggtctggcagtagcagctaaattgttgtctgaaagttatcatctggtagcaaccaatgtgccttatctggcccgtggcaagcagtgcgacaccttacaaaatttttgtgagaactactttccggaagcaaaggccgacctggcgacagtgttcttggaacggtgtataaatttcagtccaaccggtggaacatcgaccatcgtattaccccagaactggctttttctggccagctataagaagcttcgtgaaaaactgctgacagaatatagctgggatctggtggcgcgtctgggaccaagagcatttgaaactatttcaggcgaggtggttcaggcgattttgatcactcttaccaaaggtattgcgactcaaggatcattactgcatggagtcgatgtatctgcagctaaaaccacagcagagaaagcaggtcaactatttgttgaggatgtaaaaggtgttgagcagttgaagcaactggagaatccggatgcgagagtttcctttgggcaagagaataaactttctttactggatgaatatgctgatgggttggtaggactgcaaagcagtgatgaccctatgtatatagtagggttttgggaggttgcaagaaaaaacaagaaaatatgggagttcttacaagctacaccagataattattcacaattcgatgggcaatcttggcttgttcgatgggagcaaggtaaagggttcttacatgcttcacctacggcttatccatcaaaagggttaaaagctgttggtagtaatgggattgcagtccatcgaatggggaaattgttttcttatatatatagcaaagaacgtttccaccagaacgtggccacaattattccgaaaaaaaaggatgctttaaaagctatctgggcttactgtgaatcagatacttttggagaagaagttcgtaaagtcgatcaatcaattaaagtcactaatgccactcttgttaaaattccatttgaccttgaatactggtctgaagtagcagaagaaaagtatcccaacggcctcccaaaaccatacaccaatgatccaacacaatggatcttccatggccatccctgtggctctgttatctgggatgaagaaaaaaaatggactgctatcgctgataagcgaaccgacgagacagtactacaagttgcggttgctcgccttttgggttaccggtggccagcagagctggatgacaaaatggagctggctgatgagatgcttcactggcttggtaaatctgatgaactgcttaaactcgtggatgatgatggcatagtctgcctgccagcacttcgcggggaaaaagccgctgcttctcgcctggaagccatgctgcaggctgcctacgaagaggactggtcatccagtgttctcagtgatctgcttgccagcgttagtagtaagagcctggaaaactggctgcgggataaattctttgaacaacattgcaaacttttccagcaccgcccgtttatctggcaaatctgggatggtcttaaagatggattctcagtactggtcaactaccataagctcaattatcagggtttagagcgcctgatttatacctatcttggggactggatccgtactcaggagcatggtttcaaagaaggcattgatggtgcagaaagtcgtttgatggcggctaaaaacctcaaagactcgctggaagccatccttaaaggagatgccatcaccggcaagagtggtctcgacatttttgtgcgctggaaaccgttacacgaacagcctatgggctggaacccggacttaaatgatggtgtgcgccttaatattcgtccgtttatgcaggcaccagatgtggataagaagggggccggtgttttacgcactaagcccaatattaagtggggtaaagaccgcggcaacgacgttgaatcggccccctggtattatctgggactgcagtatggtgaaaaagagggggcgcgtatcaatgaccaccatatcagtcttgctgataaacaagctgccagagacgaatatgaaaataaggaaaatcacggatga

SEQ ID NO: 248811 - DNA, 579 bp, Klebsiella pneumoniae
atgctcaaaaattcagatagaaattttaatgaagactggttcctagcctcagttctcaatgcacacatcgatgaaatgataaacagatactcatgccttttggcattacgtatggattttttctacaaaaaggaaagtgccaggcattcacacttaaatcatcaaacacttgaacatgacttgcgtgaattaatggagaaaatggcaaaagagaaaggtgtggtgggctatttctgggttgtcgaatggactgaactacatagataccatgcgcatgtcgtattctggctggaccgacaaaaaacacagagaccttatccttttgccattaaagcgagcaagctgtggaatgaaataactctttgggaaggatgggcatatcgatgtcaataccagccgcaatatccgggaaatatagacgttcctgttcggtataacgatccagccagcattttgaatattcgccgtgtcctgagctatctggctaaggaagaacaaaaggacggtttgtgtgcatacggctgtaatgacgttcctccacgctcagcgtcggggcgtccacgtaagccaggcccctga

SEQ ID NO: 248812 - DNA, 1098 bp, Klebsiella pneumoniae
gtgagtgatagcgataatgagaattattatccgaaagggattggtaaactgggcgctgaagaattagcaaggccagaagaacctctccatgagggagggagccgctttaccagtcctgagagcgaatttagtatcgactcttggccagaagacgagtctgcgcaggcggccgaggattctgatattgaagtcaggacaggagaaccgatctcaagccccccggtatctgaaagcagtaataacgctaccaggggtgatgaagcttttaagcgtttaatgcaaaatatgcaggccggggaaaaacgcaatgttaaaactaaaagtcttcatgttgaagattcttcatgtctacaagacgtcgatttaaagtggttgaagggggaggttaattcacgtgctattttttggttctgggcgtatatacgaaaagcctctgcccgggagctttatttacctgaagatacggctgtgttaattccggaatgggatcaaagagaggaaaacttatactcttttttcagactatctggtaatccaacgagttcagctgaaagaagccgggtaattattaccttcatgaataaactgtcttgttccctcagtccatatcaaagtaagaaaacattcgattatattcgtagtatctggcttgtttttaatagtcaggttcaaagccccagatggttaaagaaaaatgataatgaaggcattgagtgggcatggtcgtatttatcaaagaaaaaggatataaaaagaaatgttctgtcctggtttaaacccgcagaccttaatgagcgatacattggtgtaatgggcgcgattgattgctgggccatcccgagtaaactggatgtggaaaattacagaaaatttctggatgataaaagcgcacttctgaaaaaaatgagtgattcttttaagcaacgaaaaagaaggtctggaaaacatgatttgacaatctctgccaaagccagcaaggaattatctgagttagcagtggtacttaataaaaaagagattaaagttattgaaaaacttattcatgatgagtatctaagatataaaagcaagctttttgattacaaaaatccatcctag

SEQ ID NO: 248813 - DNA, 231 bp, Klebsiella pneumoniae
gtgcataccgaacctgctttttccctccccgacggtccgtttacccgccaccaggcaacatccctcacagagctatataagaacgtcgctatcgaagacgaccaggggacacattttcgtctggtcgtacgctataacggcacgatggtctggcgggcatggaacttcgagccagaagccggacggttacttaaccgttacatcacttcttacggtattcgtaaaccctga

SEQ ID NO: 248814 - DNA, 1266 bp, Klebsiella pneumoniae
atgaatatatgcaaatgttttaaatgtgatacctgtgaaacgttaattgattgcagaattggaatgtctaacagggatgttcagccttttcagtttgcctgcccagtgtgtgaagaacgcatcacttttacaatcggctctgagagaggcgatctcactggcgcatcagatataattgattttaaagcaccattcacaggtgagaatcatttcgttgaattacaccttgatttccccgtttattttggtaagtacacgaagggaatgacgactttttttcgcgtaatggatgagattggtagagatgaatttggtcatttagctcaacgccttgatatgttgaaccgcctctatccattgaaaagggagttagagagagttattactcaatacaaaaaaggtaatataaataactttgaaaaagtgtgtgcgaaattgccaatggaaaagctgagaagtcataaaaaagaagatgttttagcatccctgtacactgcaacatcgattatgtcatcgccttttacaatccatgagcaaaacgaagagttagtcaaaggttttcctcttttatatcagtaccttcacgggaagcatcaaaagaacgtcatcaaatttgttgaggagatcattaataataaatttctaaaaaacctgcattttgattgtcttggcttatacccacgccttgttgaacttgatttaccattacgacctgccctcttttatgattacattgaggtagagaaataccgaccagttcccgctcgcgtatcaacggcttactttgacatatgcaataattactacaaagacttggcagaggttttcgcccgtcagttaacgctccttgcaggcctgaacaatctactaaaacgaggtgatcacaatgaatttgaagcgacattaaagctgaataaaaagaacgaacctcgtaaagaattatcctctctgaataaatttgccgatgtggatttaggccagaaaattcagtatatcgacgactgcttttatacaattaatatgcaggccattgataacaggctcaggaatggtattgcacactataaatatgaatataaagaatcaacgcaagtcattacctattaccctgcaaaagaaggtatggaacgcgttaagtcggaagatattacttttatggagtttctgcgtaaaactctgctgctattccgtgaagttcacagcctgaatcatctcattaaggcgacactctactacatcgttctgatcctgaaaaaagacgtgtaa

SEQ ID NO: 248815 - DNA, 339 bp, Klebsiella pneumoniae; identical to SEQ ID NO: 220363

SEQ ID NO: 248816 - DNA, 753 bp, Klebsiella pneumoniae; identical to SEQ ID NO: 95287

SEQ ID NO: 248817 - DNA, 786 bp, Klebsiella pneumoniae; identical to SEQ ID NO: 182623

SEQ ID NO: 248818 - DNA, 195 bp, Klebsiella pneumoniae
atggctacgaccctcaccccgtcacacccgcagtttgtctttgtatttgccgccgttcgtcgcgcagaccgtcagctccgcatctgtatgctccgcgccgtcgccggggatgaacacgccgcacgcctttccctcgttcgcgattacgtcctctcgtttgccgggcgtctgccggtggcggaggtgcacgcatga

SEQ ID NO: 248819 - DNA, 612 bp, Klebsiella pneumoniae
atgggtctccagcgtttcgccctccaccggcggggtaaaatccacgtcgcacagggtgcgcagccagtgcgatttgctgtgcgggctgaacaggccgctttgggtatcgagtaccccgttgcgaaaaccaatcagacggcgtgccggtgcctcctgctgcggaataatcagtttcagggtatccaccaccgaggcaattctccccgacgagaacggggcgcgcaggcgctgaaacagtccggccacatcgcgggcaaaatcagacggcgttatcaccttccagatgccgttttcatagcgggacaggagctggccgttcgcatcgacggccagcgcttcgccgtaatgctcatgcacccgcattgccttatcgctggcgctcatggcggtaaattccgcctcgctcatggtgtcgaaggggctttgtgccgctggccggatggtggcataaatggctttccgtgtggcgtcctcccccttcagcatcatcgcatcattccagtcaccgaacaccggcggcagggcgacaacgccctcacaggcctggcggctgcagcggctttagtctggccggtgccgttcaggtcacggtcggcggcgaggataatctga

SEQ ID NO: 248820 - DNA, 2151 bp, Klebsiella pneumoniae
atggatcacgatactttagttaaccatattcgcggattgagtaagaatttctttgatgcagcctgtaaaatagtccttaaagattattttgaaattaacgctataaatgttgatggtgctaatgacggcggcgctgactttataagtatatctaatgatggaattagaaataataatatataccaactaaccacacaaaaagacaaaatccctcaaaaactcggccgtgatgttttaaaggcaattgaaaagctttcagctaaaagattttattttttcacaacaaacaacattagtgaagttgagtgcagaaagtatgaaagaaaatacaatgatgagctagacattcaagtttctttttttagcgcccggcacattgccgaatttttactcgatggaaatcttctaaataaattcctcgaccaaaccaattatccccttcccagatcatttcaaagtaatccagactacaaagaaatggcgcttcatagttacactgtgatgtcaaatgaagccaaaggcatgcgggatggggtatatgatgatacaatactatttattttatctgactccacaaacctacatgaatatgaattagttgagaaggttatcagattccttaatatagaatcagataaagatatgtatttaaggaaacgtataggagctttattctcaaaatccctactacagcgtactgacgaaggattaatagtactctctcaagaatcaagtcaagatatcgaagctagaaaaagaatttacgaaaaagagctaagtgatctcgctgcagttcaaatagatattatgcgtcaagactttcaagttaactggtctttggaagagtcaaaagaaataagtatttatattgctgattcatatatttcaaaccagcttgagcttttgtcagatgttaaggcaaagattagcattgagtcattcttcaatcacagaaatagagacaaaaacagcattagagactatataaaaagcaaatccggcctaacaaacaaaaaagctaatgaagctgcactagctatacttgaaagcgcttcgaatcatcctctaataataaaattagccagagcatctatatatgtggccttagaaggtaaaaatgcaataacctctgcaaaagctcttggagcaagtaggtggagtgattttaaaatattagtcgagcctacggtagctatccattggatatgttcttgcctatacaatggagatgtcgatggattttacaatataagtaaaaaagccataagacgcgcattgaaactagattcgataccttttataccattttattatattaacgaatgcgcctctcatttattaaaggctcgaaaatatgcattcctacaaggttatgagaaccccgaagaactacaatactcaaaaaatgctttcattgccaattattatgcacttaaaatacagggagttaaggttcctgataatatttttgattatttaaagacctttagtcccgccgtactcattgagcgtaataattggaaggattgggtaagagttgttatgactgacatccaatcaattttgaataaatcaggagtccaatttatagacacgccattctatcaggatggagattgcgtccagtttgagcgtgaatataacatccatctagaatcacgcaaccaaaccaaatcgccttatctcatgagtcacgatttatgggccttacaattcacccataacgaaataaccgatttgaatgctcactggataatcttaacttttgacaatactatgataaaagttagcaaagaagcgcatcactccggatgggttgtatctccatataaatttctggatataacagcatcatcgcaatcattatcagacacacaatacttttcacttgtgcactctttagctgtgtcaagtacaaaaacattatcaattggagcaagaataattgatagagtaattagttatgcctctgaagaattccagaactgggagtttaagcgcgattttgaaaaatttaaaagcaatttaatatctgaattagatgataatgatgtgagctttgaagatgaagatagcgagttaaacaaaaaggttgatgagttcttaagaactaaaggaattgttatacctaatgaagaagatagtgaataa

SEQ ID NO: 248821 - DNA, 489 bp, Klebsiella pneumoniae
atggacaaaagtgaatatcatcattcggataatcaaggtactacctactctccatcagaattgttctatgcaaagagagttggaaatgcagtggttttcgagcctgccgctttcttgttaacaccaaacaatttacatacaatcaaagatacgtttagctcagattacaaagatgaccccggggttgagatgagttccaaaacattgggcaggattgagttctggattggtatagcagttggcgttatcgcaatcgtcggctctgcagtaacagtaacatggagcgtatccagcgccataaccagtaaaaatgactcccttaggacagagctaaatcagaatatcacgacttctaaacaagagattggagccagaatagatagattagaagataaggttgatggcggattcaaagacttatcaaccaaccttggcgacttgaaagtaattttgctcacacaaaaaaacgaaaaatcagaaactaagtaa

SEQ ID NO: 248822 - DNA, 1020 bp, Klebsiella pneumoniae
atgggaaaaataaaatattggttaatagcgggatttattatacttcttgcaattgtttacactgctatcagtgacagggattctacgctttctaggttgaaatcagcaggtgaaaacggagatgtagaagctcagtatgcattgggtctcatgtatttatatggagaaatactggatgttgattatcagcaggcaaagatttggtatgaaaaagccgctacccaaaatgatccacgtgcggaggttaaactcggtttgatgtatgcaaatggtctcggagtaaatcaggattatcaacaggccaaatcttggtatgaaaaagcatcggttcaaaatgatgttgatgcgcaatttttgcttggagagatgtatgacgatggtctcggggtaggccaagactaccaacaggcaaagatgtggtatgaaaaggctgcagctcaaaatagccctgatgcgcagttcgcccttggaattctgtatgccaatgctaatggtgtagagcaggactttcagcaggcaaaagactggtatgagaaagcagcagaacaaaatttcgccaatgctcagtttaatcttggtatgctctattacaaaggtgagggagttaatcaaaactttcagcaagccagagaatggtttgaaaaagccgcgtctcaaaatcagctgaatgctcaatataatttaggtcagatctattactacggtcagggcgtaactcagagctatcgaaaggcgaaggaatggttcgaaaaagcggcagagcaagatcatgtcgatgcccagtataaccttggcgtaatatacgaaaatggtgaaggggttgggcaggactttcatcaggcgagagcttggtatgaaaaggctgctgctcaaaacgatgcgcaggcacagttcgatcttggcgttatgaatgaacttggtcaggggggaagtataaatctgaaacaagcaagaacttggtttgggctggcatgtaagaatgggcataaggaaggttgcgaacgttatgaaaataactga

SEQ ID NO: 248823 - DNA, 612 bp, Klebsiella pneumoniae
atggctcatgaaacatttatatcatataaatatagtgaagcacaggatttaagagacaaaattgtcaaggcattaggtgatgacgctgtttactataaaggggagacatcggagtctcctgatataagtaatacaacagtagataatataaagaacaatcttaaaaatatgatattcgggacatctgttttaattgtaattatttccccgaatatgattaaaagtaaatggattgactgggaaattgaatattcattgaaagaatacaagagaggtggaactacctcccgaactaatggcattgttggtgtgataatgaaggttaataatagttatgactggttagtatcttcttcaatcaatcctgatggatgttcatcaagaactattgatacaactaaactatatgacattattaataataatagatttaatctgacgtcagaagataaatattgttgcccagagtgcaaatcatatgatcaattgacaggctcatatatttcattgatagaagaagaccggtttttagcagatctatcttcatacattgaaaatgcttatgataaatctaaaaaattaagttcctacaatttatctaaacaaaaatag

SEQ ID NO: 248824 - DNA, 1437 bp, Klebsiella pneumoniae
atgacgtttagtaatgaaattgaagttttcataaaagattttgttaaagatcttgaaaatgattgtgctgctattttttctggcgcaggaatgtctaaaaaccaaggttatgtcgattggaaagaattacttagcgatatagcagaagagcttagtttagacattaataaagaagacgatctaatatcgcttgctcaatttcatgttaatgaaaaaaaaggtgctacaaaactcacgaggaagataatcgaagagttttctgagcaagccgaaccatcagaagttcataatataattgctcgtttaccaattaagacattttggacaacaaactatgacactttaattgaagatagtctacggaaagtttacaagattgcagatataaaaagaaatatagatgatttaaatacaacccgacctaagcgagatgcgatagtatataaaatgcatggtgatatttcgtctccgtccaaggctattttatataaagagcagtatgaaaaatactacagaacacacgcctcatttattaccgcacttagcggggatttaatatcaaaaacttttctatttatagggtttagttttaccgatccaaatctagattatattttgagtcgtttgtatactcattctggggataagagaacacattattgttttatgaagaatgaggctaataattcgctagatgatgaagaaacagttgcgtacaagatcagaaaacaaaagctgcgaattgatgacctcaagagatttggcatacaagtattattaatagatgaatattctgacatccctataattctagctaagatagaacagtcatttaaaaagaaaacgatatttatttcaggtagtgcagaaaagtatggggggcttgaaaggccgaaagcattagactttattcatacattatcatatgagattataaagaataattataggatagtgaatggatttggatggggcgtcggaagttctgtgataaatggtgcgttggatgccatttatagtaggccagataaattatcagaagaacagcttatagttagaccatttcctcaaactgtcagtaaggggaaagatattcaagaactttgggaggagtatagacagagaatgattcctcttggtggtattgcattgtttatttttggaaataaacaagaggaaaataatgatatagtaaatgctaggggagtatttagagagtttgagattgctgttcaacatggtcttgtaccaattcctttacccaataccgggtatatgtctgaatatatatttaaacaaatatcacaagatcctaagaaatattatggaagtaatgaatggatatataatgatttgtctgagcttactgaaaaagatttttcggtaaaaaaaacaatagaagctgtaataaaaatcataaacaaactgaataaataa

SEQ ID NO: 248825 - DNA, 180 bp, Klebsiella pneumoniae
atgataaatattaatatttggtatgattctgactccactgtttctttacctgaactggtgtctataaatatcgataggggttcttttgagaatcaatcagatctagatgactatatcattgattaccttatgaacaacgggtacggagaaaaaacaaacctgacatggcgggttgtttaa

SEQ ID NO: 248826 - DNA, 2388 bp, Klebsiella pneumoniae
atgtcggtacctaaccagaccccctataacatttatactgcgaatggtcttacgactgttttcacgtatgaattttatatcatcagcgccagcgacctgcaggtgagcataaacggaaacgccgttaccagtgggtataccgttgctggagtaggcaataaggacggtggcgatattacgtttctgacgccgccggcgaatggtgcggttgtcatgcttgagcgtgtggtaccgactttccggctcactgattaccaggacaacggcgatctgcttgctgataccgtcaataaggatttcgaccgtatctggatggctatccagcgtgcgtttattgatctcgggtttgctcttacccgtcctttttttgggggaccattcaacgcaaagggatatcgcattgaaaacctgagcgatccagttaatgatcaggatgcagctacgaaaaaatttgttatcgataatggtaaaacaaacctttctcgtaccctacgagtccccgaagcatcggtaaatgttctgccttcagcagagggccgggcatggaaggggctgggatttgatggtgctggacagccaaaattgcaggatcctgctggaacaggattatgggggtatgttccggcaataggttcgtttgagaaaggctcgctactcactcaacgctttgaggttcttctgtgggaatccacggatgaatactggcgctgggatggcgtaatgcctaaggtcgttttacctggtagcacgccggcgacggctggcggtaccggaaagggtaagtggatcgacgttaccgatgcgactcttcgcgcaaacctgggttcaagcgaaatgccaggaacatctctggtcgcgcactccgatgatcagacagttgagcagcatataaacaccttaaatcgccgaaccagctttgtaatgcctgaggatttcacaggcaccgacactcagcaactgttagctgctatcagttatgcaaagacaagcggtattgggcgcattgaactcatcgcaggaaaaacctacgtactaaccggaacgacgggacttgatattgacttaggttatttttcgtttggttgcatatttggctgcgcaactattgatgcgactgattttgcaggtgatgcggcggtatgggttcactcatcggccccgtatttagaagggaatcgtattcactcaaataagctcagaggaatagaggttaaaggaacgaaccgtggaacaggacaggccgggattattattggaaataaaaataataataccaacggcacatacaatggtgactgccatatcgaggattgcagctttgaaaccttcgataaagtgctcctggccactaacagcacatggcgctataaatttataaattgcggatttacaaatgaaatgaccgggggaactcatataatgcatttcccagccggccttgctgattcaggggagagcgtgagttttgttaactgtaaaatatatgacaccaagcgagcattattagctgtggactgtgctaactttgctatagggatgcccggaacatcggttcttaactgccccatagaaattaatggtgctggcgctcttgttattctggattccgctgcaaacatcgaaaacccgggggctacagcatggtaccgttatgccaaagtcaccggtgttgcagctcgtctggttatgaatggctgcactctggtttgcaaccagccagcattacagactaagccgatatttgaagtcgcgccaaatgcttttatcgactacagtcatgttaaatctcccgggaacaactatccattccagaatggtgctgagggattcagaacgttcgttgagggagatggttatgttattgcggagggttgtatagcagatatcggatctggcgcgggtaatatcccgatccataagtcactaaaccctacaaggaacttcggttttgctactggtgatctaacgtcatggtcattcaacaaccaaggatcagcaagtcaaacttgcgtcgttgatgctgcatataaaaagactggctcttttggtgcgagaatgaagtcaatcggttcgttaagttgcttccttactcagaacgttaaagtaactaagcacaactattacacgtgttcacttctggtgaaagtagtaaccccaggaactggcgtatcagcgggtggattaacagttacattttatgacaggtcaggagtaaaaattatagatggtatctcatccaatatacctaatacggtttctggctggatatctattggacagtttatccagggtagagttgttcaaagtgcagaatattgcgaggtttcaatacgctgccgagagggggctgtaatagatgttgatagctttatcattaatttcacttaa

SEQ ID NO: 248827 - DNA, 567 bp, Klebsiella pneumoniae
atgcttttcgaggtcggaatcctgactatcacaaggagcataagaatgaaaaaactaatacctttattgctaatttttccctttattgcctttgcctccccagatttagttgaggattcaggatatatcgtcccaatatcaggcccaggaataccagttactaatccatataccgactataagatcattaatagtatcgacaatggtaaaaaaattgaaatccatgtagctgtattacatttgcgaacctataaagaaaacgcagattttagtgaatccaatactcactatgtggaaggaagcaaaaccttatctagttacgacactaatgtttacacagccgattttataaaattctcctcagaagctgctctaaactcaacaaaagaagacttaaaaaaattatattgtacgcctgacggtttttacccggtttcatctcaagaacggctattctacgaaacccgaaaagaaaataaaaaaataatgctcaattactacagtgattcaggaaaaaccctcatgtttgggtttggggtttctccagaatcatgtaaatcgaaatag

SEQ ID NO: 248828 - DNA, 447 bp, Klebsiella pneumoniae
gtgagcgacaaagatatcgagcaacaaattcagtccaaaggcttaatcgcgccgcgcgttacgctgagcgattttaaagaaaatatcgtcaacacagagatcgttaaacacgtttctgttacaggccaggtactccgttgggccgttctgaccacgaaaaacggttttgcggttactggcagaccatcatgttcagcttcttcagaaaacgataatgctgtaattggtgaacaaatcgctatcgaaaacgcagaaaatgaattgtggccgcttatggggtatgccttgaaacagcgcctgcatgattccggcggccacaccgaagaggaaaactttgaacatttccttgcctattctggtttccacaatgaaagcgctgaagtgatcgagaagttgcgaaaagcatattacgatggcggttacgcgtttcagtggaaatctgaataa

SEQ ID NO: 248829 - DNA, 399 bp, Klebsiella pneumoniae
atggcacgacagaagaaaaccatcgagacaccggggcaggagacaacgcagccgcaggacgccaccggcgcagcgctgaacgctgaaactaccgaaccaacggtgcagcagaacgttgcgacgctgctgggcgctacggcgctggccgagcgcaacgccatcctcgccacgctcaatgcgcaaggcgccaccatcgttgcccgcttcgaagagctgggctttaccgatctgaccgaccagaaccttaccgacaacctcgagtttctcaccctcgtacgtaaagccactgaggccaccaccggcggtacgggcgcaatggtgacgaacgaagagggcaagccgcagccggtacgcggcgcacctgtattaaccgaacacggctggcatgtgccgggctaa

SEQ ID NO: 248830 - DNA, 237 bp, Klebsiella pneumoniae
atggaatttaaactggttggcgggtcttatgatggcgagtcaattgagttgcacgtagaccgctacggtaatacagactcgcagttaagcctgccgagaaagaaaactctgtcgcaggggcgtgaagaacttctggcaaacaggccggaaatgcccgaacgcttcgaggtgtatataaaaacgccccacggcattaacccggacggtagtactaaatttgtgtactggaaacgataa

SEQ ID NO: 248831 - DNA, 270 bp, Klebsiella pneumoniae
atgccagtcgtcgccacgtttaaaacagactggttccgcgttatcagcgacataaccagaacggggatcccgctgcaggagatagcccgcgagctggatgtttcgaagtctgctatcatcggctggaagcagggcgccgcaccaaaccaccacacgggcgaagcgctgattgacttttggtgttacgtcacacagcgcccgcgctccgagttgccagcgcaggtcacatcacggcgattcgtttacgcctggcgcacaaagcgcatttga

SEQ ID NO: 248832 - DNA, 2169 bp, Klebsiella pneumoniae
atgccagagattaagaactggggggcgacgcctgatgaatggttccacttcgatctggtgctgggccgtaccgaccagctgctgccggtcgtgtgcaacccgtccgccgccatttcccctaacagcaaactgaaagcgctgggcaaaacgccgagcctatataaccgcgaccacctggctacgggtatcaaagactggacagagcatgttgtgactgaacacgactttgcccgctggtcaaaagaacccgattacggcatttgcgttcgcacgggccacggctggctggcgctggactgcgacagcgaagacgccgacgtacagcaaaagatccgcgacctgctcgagcagctgctgggcgttgtcccgccgcggcggtacagagataacagtgtgaagtgcctgtatctgctctcggttcctgatttgttccgcaaacgcattcaccggcttgagggtgaaaaggggattattgagctactggcgaatgggcagcagttcgtagcctgcggcacccatcccagcggcgcccgtatacagtgggacggcggtctgccggatgatccgccggtgctgaccgctgaccagctcgaaacgctatggcagcagctggccgacgtgctccctgtgtcggtcaccaccgaagcgggcagcagtaagatgcgcgaccgctcaaccttcacgcccggcgccacagacgaaacggcggaatacctggacgccaacggctggactctgctggacggtaccaacggcgagcgttacatccgctgcccgttcgaggacggacacagcaccggcggcgacccgaccagtacggtttacttcccggcgggtaccgctggtttttacctcggccatttcaagtgcctgcacgccagctgcgcccaccgcaacgatggtgattacctgaatgctatcggcatccgcaacgacgatttcgaagatctcactagcaccgaagtggctgagccgttaccgctgccggcgttcgagcgtgacaaatgggggcgcatcgaggccaccatcagcaatgcagccaaagcggttgtgcgtcctgacttcgttgatatcgatattcgttttgaccagttccgcgatgaaatcatgttcgcgccggcgggctccggtcagtggcaggcgttcaccgatccagattacgcgcgcctgcgtatcacgatggaaaaacgcggctttaaagcagtagggcgcgagcttatacgcgatgtggtactgctggccgcggatgaacagcctttcgattctgcgaccacctggttaaatgggctggagtgggacggcgtaccgcgcatcgaacatttctaccatacccacttcggtaccgccgatacgccttacacccgcgcggtgtccatgtacatgtggacggcgctagcgggcagggtgctggagcccggcatcaaagccgacatggtgcctattctcgtcgggcggcagggctgcgggaagtcttcaggcgttgaagcgctcagcccggaccctgcgttcttcacggagatatcgttcgctgagaaagacgacgacctcgcgcgcaagatgcgcgggcggctggtcgccgagattggcgagctgcgtggcctaaataccaaagagctggaatccatcaaggcattcgtgacgcgtacgcacgagaactggatccccaaataccgggaattcgctacacagttcccgcgtcgcctggtgttcatcggtaccaccaacgaagacgagttcctcgcggataaaaccggtaaccgccggtggttgcctgtcgaggtctccagcgtcgatgtgcaggccattaagcgcgacctgctgctgctgtgggctgaagcccgcgagacgtttaagcgcctcggcggtatccagttccgcgatgctgaacgcctcggcgcaagcgtccatgcgcagtacaccattaaggacgcgtggctcgagacggtcgagaagtggctcgacacgcccgacctcatgacgaacgacattccgcgaaactgcgaatttttacgagcaagtgacgtgttgcgcgatgcaatcgggttagacccgcgccacatcggaaaacgcgaagaaatgcgaattagcaatgttttgcaaaattgcggctataagcgcgaaacaaggcgcgttgaaggcaaattaatgaaggtttggcggcaagcgtaa

SEQ ID NO: 248833 - DNA, 213 bp, Klebsiella pneumoniae
atgaccctggcaactcgagtaaaagagcgacgtaaagagctcaacatgacacaagtcgcattggctgaactcaccggggttagccagcaggcgattaacagaatagagagtggggtaatctcccgccctcgttatttgctggagatctccgcagcgcttcaatgtgaccctaactggcttctccatggccaacctaccgaaaataaggcgtaa

SEQ ID NO: 248834 - DNA, 624 bp, Klebsiella pneumoniae
atgtctctcgcagcacgcttcaaagcccgccgtatcgaacttggaatgactcaaacagaagtcgcaaacgtagctggggttagccagcaatcaatcgagtccatcgagagcgggagaacgcgaaaaccgagaaacgtactggagttggcaaaggcattgaaatgcagccctgactggttgctgaacggtaaaaacattatgccgctggcagaggtcagcactcgccgcatacctatcctcagctatgtacaggccgggcaatgcactgaagcgagggactacaccaacatggaaggtgagttcgaatacgttctcgcggatgctgatgtgccggaaacatgcttcgccttacgcatagacggcgacagcatgcagccagaatttaaagagggagatattgtcatcatcgacccggatctgtaccccgcgccaggcgaattcgtcgttgccaaaaataacgggcatgaagcaacctttaagaaatatcgcccgttaggtatcggggtagaagacttcgaactggtaccgcttaaccctgattatcctgtattacgcagcgcggagctgccgttacgcgttattggcgtaatgattgagcaccgcatataccgccgtaaacgctaa

SEQ ID NO: 248835 - DNA, 201 bp, Klebsiella pneumoniae
atgcatacctacgaactcacatcgaaggcccaaccgacttttgaaatcgtggaaaatggtcctgatgcgacagactatgttgtcgatacggtcaaaggtgagaacgctgcgcgcctgagggcaagctcatatcaggatcgcaacggatatctcggttacgggtataccatccggcccaagcttaacacccttcccctctga

SEQ ID NO: 248836 - DNA, 927 bp, Klebsiella pneumoniae
atgagccttgaacaaaatctcgaacttaataaccagctgctgaccaagcaaaactcgctgtacgaacgcaatatcgcgctgctcgaacgtctggtgcagtctctggcatctggcgttgcgcttaaagccgacaccgtggcgcaggtgcaggagtaccgcgaaacggccaccgaatcgaaaaccgctctgacgctcgacgatctgcagttcggagacgttatcgcgctggcagcgttctacccggtaccgcagcaaatcaccgaagacatgctgcagcgcgcgatcgactaccgcgacgctgaagctgacgcccgagtagtgcagattgatgcgctggacaacgccctgcagggagtgaagcgcgccaaatcgctcctgaaacctgccctgctcgacctgtcccgcaacgttcttaagtactgggacgacctgccgaccatcggcgagcgccgcagctttgccgagcgtcttctcgacgccgcaccaaccgagcgcgaccaggtgaagccgaagaaggtcagtgataaggctgaagaacgcaccgggccgttctactgcaagaacgttgatggctccgctgccagcgagctccataccttacgcaagctgaacgaactacttaaaacgggccatatcgagatcaccagagtggaatacctccagttgcaggaagaatttgagcgtaaaaacgccgcaaaaggtggtaacgaagcaggtagcgaagttaaggaaaagagtggcgaagagacttattttgcggcgctgcgtaaacaggccgaagagtgcattaaaacgctgtgtaaaggcggataccgcgctgaggccgtcggcatcctggacagtttcggcgcgaaaaagctgggcgaagtggcagacaaagacctcgctgacctgatcgccaaagccgaaaaagctctggagggctaa

SEQ ID NO: 248837 - DNA, 531 bp, Klebsiella pneumoniae
atggaattaacaatatctttttcaacagtccttatggccgctttgggttttttgggagtgtatattttaatgccgatagcattagtatttcgtgatcatttgattttgaaatttatcgaaaataatatcattaatcctaagttctgggttatggttgcagattgccagcgtgctctggcgatgaatgatactgtctatagcgctcattggtcttattcacataaagatggcgtggaagtttgttacataaaaggaatcccagtgtctacgcggaaatttctaaagtttcagagtgagcgagagaaatctatcaacttatttaggcagctgaatgtgaagattcaaaataggataaactggcttatttgggcagagaaatattttaaggttgaactaaaaatgactgaggaaattaaaaaagaaatggatgatagttatgcttatgaagttggtagaatcaaacggcataatattgatgctgtgatttcggatataactccgcacccagtaacatccgaggcggagttatag

SEQ ID NO: 248838 - DNA, 204 bp, Klebsiella pneumoniae
atggcacaaggcaacgtcgaaaacttcgcgatcattgtgttaatcaatggtcgtacttcacaggtaaaactcaccaagtcccaaaagcagctatttgcaaagctaacgctcggcgcactgtctgaaagcgaccaaatccagctgatgcctatcgacgatatggtaaagctggaaccagaccacgaagctttttccacagattga

SEQ ID NO: 248839 - DNA, 213 bp, Klebsiella pneumoniae
atgtatcaccgtatgaggagaagcaaaaatttaggagagtttttgatagtagtaagcttaatttttatcgtcattgctttgatgataagtggtatgcatattttaaataattccctccagatctttgctatccagcaccaccacggtaaagcccagcgcgcgcagccgttcatgctcgcgcagctggtcggcgcgtggcgccttgccgggtga

SEQ ID NO: 248840 - DNA, 1290 bp, Klebsiella pneumoniae
atgattcgaagaaagttttctcgagtattttcaaagagaactgacatgcataatataattagattgctttttagaaatccgttttttttcttgttttgtctttttataccttttgataatactagcctgcaaagtatcggggggattatgacagcctctccttcggctttaattctgttgccaggcctatttgtttctatcttgtcaaaaggactaaaggtcaataaaaacatattgctctgtttctttggtgttttattgatttcatttttgtactatttctactgggttttttattttccagagttagacccgatattcatacttgacagagggagtagatattttttattatatgttttttattttttggcgctttactattcattgcgacaaaatatcaaagatattcgagctggcgccgccttaattattattgttgttattttttctgttttgctcaattatttagatcctgccataataaataacaaaagtattatacaatataacgattttattagccctgagaggttgagaggattctctcttgaagctagtgtatttggctaccagattgtatgtagtatccttctattagccgtactgttaaactggagtacttttttccttgtcactgtaacgatcgttatcgctatattgacaacctctaaaggagctgctctttcatttttgatatgtatttgcttttatttttcccttaaaggaaagttaatgtttagggttttgctgtcgctatgctcaatagtaatatcttatattatattcaaatattatttcctagatgcacttgcaagtgatatagacacatattcatccgtggcaacaaggggaacgatgttcatagtcggactgaagatttttttatttaatccgttaggagttggattcttcggttatttgccatctatttacgattttacttcaggggtaatagacttcattaaaagccattttccttttttgaattttgatgaggtatatacatatacaattccaggagaatataaaactgttgggaccaagtcgctaatattagatttattgattatttatggggtctttttcttaattccatttatatatttcattaagaaaatactcaaagaatttgatgcgcaatccgaaagaaattcttattttctattgctctttataattttttcaaatatgttttttatttctcatttaggtagttactttactccgttttgcattgcatttttgataattttatcaaaaaatcgggccgaaaatgacatcaactaa

SEQ ID NO: 248841 - DNA, 288 bp, Klebsiella pneumoniae
atgccactgctggataagctgcgtaagctgtacggggtcggaccggtatgcagtgaactacatattgccccgtcaacgtattaccactgtcagcaacagcgacatcatcctgataaacgcagtgcccgtgcgcagcgcgatgactggctgaagaaagagatactgcgcgtatacgatgggaatcatcaggtatacggtgtgcgtaaagtctggcgtcagttgttacgggaaggaaaaaggtccgcactaccgtcagccggaaagccgttgccgcaggcgaccgcgtaa

SEQ ID NO: 248842 - DNA, 354 bp, Klebsiella pneumoniae
atgaatgatgatgaaataaaaaatacctatctaactggcaattattttaagaatgatagaagtaggccggatgtaaagaaaacccttgagcaaaaaatcgcaggagcacaaaataaattaaactatctgaaagcaaaagaaaaaagagaaactaagcaagaaaaaacgagacaaaaaataattcttggtgcagaagttgctaaggtattgaactgtgatataagtgaagtagataagcaactgcttttcggtatattattagaaattccatctttacatataaacgatatagaacagtataagattcatggtcaaatttatattgaaagagttctcaaaaaaatcagaccttaa

SEQ ID NO: 248843 - DNA, 483 bp, Klebsiella pneumoniae
gtgtggtggaaccgtctgtgtgacaacgtactgtcggaaaaaaccatgccgtttgacctgctgacggttttgccgacccgcctggatattgaagtgaatggctttaacggcggtgttctgaacggtgttccttctgcatatcactggtatacagaacggtatggcgtgaagtggccttgtgggtatgacctgaatatcagcagtcagggggaaaacttcattcaggtagatttcgacacgccgtggtgtcagccggaaagcgacgttgttgcagaattaagccgccgtttcggctgcacgctggagcactggtacgccgaacagggctgcaatttctgtggctggcagttgtatgagcgcggagagcttgttgatgtgctgtggggggaactggaatggtcttccccgacagatgacgatgagctgccggaagtcaccggacctgcgtggatagtcgacaatgtggcgcattatggcggatga

SEQ ID NO: 248844 - DNA, 336 bp, Klebsiella pneumoniae
atggggatcgcctcgctgatgaccagcaccattatggaacgcgccaaagagatcggtttgatgaaagcgctgggtgcgcgacagtggcaaattatgctgctgttctacctggaagcggcgtccagcgggctggctggcggtgcgctgggatgtattgccgggtgggggctggcgaaagcgattggcgtcatgctcttcgacgcgccgcttaattttgcctggattgtggtgccgtgcgtactggtgattgcggtactgattgcgttgatcggcacctggttcccggcccggcggattgcccggctgtatcctgtggaggtgctgtatggccgctaa

SEQ ID NO: 248845 - DNA, 234 bp, Klebsiella pneumoniae
atggtcgaataccaccacaaaggcacggtcagaagcggagtccaccgccagattctgcacacttgtgatttgtggtctcggatctttcaacgggatggtacgcagcagcgtctgatttttcgcatcaatttcgttgatgtaatctcttccgccaacgtagattttctgtgttttttcatccatcgtcagaccatacgctgtacctttgtaagcatccttaacctcgccttttaa

SEQ ID NO: 248846 - DNA, 249 bp, Klebsiella pneumoniae
atggaactgctgaaataccaggccgattttctcggcgcgaaagcgacggcgcccctcttcatccagcgcggcggcatcggtgccatcaagaaacacctgcccttccgtcgccgtatcaaggcacgtcagaatattcatcagcgtggttttaccagaaccagaagcgcccataatggcgacaaattcaccctgcgcaatgcgcagattaatgtcatccagggcggtaacgtcaccgaaccgtttgtataa

SEQ ID NO: 248847 - DNA, 240 bp, Klebsiella pneumoniae
atgatgcagggggtgtttgtcgaagttcaccagattttcatcaagatgcacgtcatactcttttttctccggaggcagtgccagcatggactgctgctcttcgagccagcgatcgcagggacgtgcctggattgtttcatgctttcgttggttagcgacatcgtgcagccagcgcagaccgtggcggttggctgtttcaacatcgacagtgatccccatcgggcgcaggcgagtcattag

SEQ ID NO: 248848 - DNA, 258 bp, Klebsiella pneumoniae; identical to SEQ ID NO: 129547

SEQ ID NO: 248849 - DNA, 210 bp, Klebsiella pneumoniae
atgcaattgaagattctgggcgttggaaactcgccgctgctgtcgatcaaggttaagacgttggacgatgccaacttgctgaacgtgtcagagcttgccagaaagttggacgtacctcgaagcacctttttatcacgcgtggcgacgaatggccttgaggccgcgatcttgttctacgcaactgaacagaaattgaaagatctaaactaa

SEQ ID NO: 248850 - DNA, 135 bp, Klebsiella pneumoniae
atggggagggagtgcaataatgaatacaccagtaaagcaaaagccgcattacctgataatgactctcttatgatgtttctcactatttccagtttttctttaaaagataactttttcatttgtacctctgattaa

SEQ ID NO: 248851 - DNA, 255 bp, Klebsiella pneumoniae
atgtcccgcatccaccgctttcacgccaagagctatggccagatgagtttttccgacaccaggaggtcccagcaggatcacgttttcgctgcgctccacgaacgccagaccagccagttcccggacaaccttacggtcgatgcccggctggaaggtaaagtcgaactgctccagcgttttgacccacggcagacgagcctgcttcagcctggactccataccgcgctgatgcctgccgttccattcctgctgtag

SEQ ID NO: 248852 - DNA, 228 bp, Klebsiella pneumoniae
atgctgaacgtcttccgttcacggtactgctggacgatgtggctgggggcgctgataacgtcgttgttgttcgtcgccgcgcacagccagtatcagaacctgctgacactggcagaactgttcctggtggggttgattacatcagtggccaggatcagaagtggtggcctgctgctgccggtattgctgcatatggaagcaaccacgctgggtttactgtttggttga

SEQ ID NO: 248853 - DNA, 2079 bp, Klebsiella pneumoniae
atgaatacgcgcagcctggatgaagtgcctattgaacgttgggatgaaggtattccagcccttctcctcaattacaacatgaatagctatcagagccgatataagggtgcagaaacttacgaaagcacgtatttgaacctgcgtcccggtctcaatatcggtccctggcgtctgcgcaactacaccacctttgagcatagtaatcagagtggaagtaaatgggacaacgtctatagctatcttcagcggaatattgtctctttgcgaagccaactgacgttaggcgacagttcagcaccagctgatgtcttcgatagcgtgccatttcgtggttttcagatggcctcggatgatgacatgctgccttccagcgtacgtaactatgcgcctgtgattcgaggggttgcccgcagcaatgccctggtgaccatccgtcagaatggttacgttgtctatgagaccaaagtggcgccgggggcgttcgagatctccgatttggcctccaccggaggagcaggcgatcttgacgtgaccatcaaagaagccgacggcagcgagcagcacttgcgcatcccctacgcatctttgcctgttctacagcgtgaaggtaagtttcgctatagcgttacgggcggtcaattccgcgcctacgatgctcacacggaaaaaaacctgtttgttcagggcaccggaatttatggccttccgtggggctttacgctctacggcggcgtgcaaaatgcaggcaataaatatcagtcatatgcgttgggggtgggtaagaatatcggtagctggggcgccttttccgccgacgccatccattcccgatccatgtcgaccgataccggcaggcaacagggccagtcgctccgggtgcgctatagcaaaaatttcctgcagacgggaacaaattttaccatcgccggctatcgctattccacctccggatttcgctcgctggaagaaacgctgggtacctaccgtagcgataataacattccttcttatatcaccgatcgccggcgtaaccgggctgagctgtcgctgaatcaggatcttggcgataactttggggcgttgaatgcatccttgatcagcgaggattactggcagaacgaacgtaacagcctgtcggcaaatctgggctattacaaaaatttcaacgcgattggtatcagtctgaactactcctggaaccggaataccgggctctatggccatgccgaacaggataatgtggtctcctttgagatcaatgtgccgctggataaattcctcaaccggacatacgcctcatacgggacaacccatgcgagtggaaacggaaccagccacaacctccgactgaatggttcagcctttgatgatgccagtcttgactgggggataaacgcgacgcttgcggggcgcagcgaacaacaagtcgtcgggggtaacgtcagctggaaggcaagccacggaacgttaaatggttcctacagccgcagccgcgacagccaacagctggggtatggcatagccggtggggtagtgattcatgagaatggtatcacgctttcccaatccctgggtgaaaccattggtttagttaaggctcctggcgcagaaggcattggcgtcaataactacgccggtatctctacggatagtcggggttacgcggttgttccgtatctgaccccctatcgccgcaatgatattagcctgaatagtaaaaccctgcgggacgataccgatatcacctatatgaccaataaagtcgtccccacccgcggggctatcgttagagcagagtataaaaccgccattggccaccgtgtcctgatgacgttaacgcggcctgggggtaaaccggtcccctttggcgcgatggcgtcgctgcttaaaagtgaagaaaacgcgtcaattgtcggtgacggcggagaagttctgctgagcggtttaccgcaaaaagggacgctgcaggtgaaatgggggaatggccaggggcaggaaaccacctgtcgggcggattatatagcccataaatctgctggcgcgtccggtctctggaacgcgacgagcgtctgtcaataa

SEQ ID NO: 248854 - DNA, 765 bp, Klebsiella pneumoniae
atgaatcttgattatcaactcgacgggccggatggcgcgccggttatcgtcctctccaattcgctgggcaccacccgggcgatgtggcagccgcagatcgaggcgttaaccgcccatttccgggtgctgcgctacgacacgcacggccacggtaaaacgacgaaaaatggcaaagtgaccctcgcccagttgggtgaggatgtgattgcgctgctcgatcacctgaatatcgaccgcgcctggttctgcgggatctcgatgggcggtttgaccggcctgtggctgggacgctttgcgccggagcgttttcatggtctggcggtcgccaacaccgcggcgcgcattggcgatcaggccagctggctgtcgcgggcgcgggccgtacgtcaggaggggatggcggtggtggccgccggagcggcagaccgctggtttacccacgcgtttcgccagaaggcgccggaggtggtcgaggcgctttgtcaccagctgacccataccgatgctgaaggctatgccgcctgctgtgaggcgctggccgccgccgacctgcggggcgaagtggggcagatcccgctgccgacgctaatcatcgccggggaaagtgaccctgtcaccacggttggtgacgctcatttcctgcagcagcagatccccgcctccgaggtggtggttctggcggcatcgcatctgtctaacattgaggcgccgaaaagctttacttcggcgctgctgagctttttccagggggaacgccatggatga

SEQ ID NO: 248855 - DNA, 219 bp, Klebsiella pneumoniae; identical to SEQ ID NO: 233538

SEQ ID NO: 248856 - DNA, 2436 bp, Klebsiella pneumoniae
atgctgacgatgggcggcggcgcactgcagcagctggcggactgcaaacgcgtccatggcgtggtgactgccttccggcgtatcagcagttcagaagatcagtcgaaatatcagataaccctcgaacccttcctctccttactggataaacagtttcgcagccaccgttttttcgtgaataaatcggtgccggaggtggtggagcaggtattgcaggaacatcacctccatgactgggagtatgagtttaatctcaagcaacactatccgcggcgcgagcaaattaatcagtatcaggagagcgacctggcgtttatccagcgcctgctggcagaggtggggatattttatttcttcaccctgcaggaagaggcccagagcgaagtggtccacttcgccgacgcgcagcgggcgctgatgttcgataagacacttcctgtaaacagcccgtccgggatgagcgacagcggtgcggaatcgatatggggtctgagcatcacgcacaatgtcgtagaggcaaacgtcactacccgggattataacccccgcgatgcgcagagcgttctccagtcggcaacagcggatatgacccggggaaatggtgaaggcatcacttacggtgaggtataccactataagcttcgtcaccgggagcgtggcgataaaatcgacccgcagacggagaccgccaacttctatgcccgcctcgaccatgagcgttttctggctcaccagacgcttattaccgcgagcagtactgcagcctggctggcgccggcccaggtgctgaacgttaccgacagtctgccgtcgaccctgcctgcgcccgtacaggattcgctgttaatcaccggcaccggttttaccgccagccgccgggaggcgctgcgggtgtccctgcttgcggtgccctacagcgaaacattgtgctggcgtccgccgctgctgccgcgcccgaaggtgactggcaccatgacggcgcgggtgaccagcgcgaaggcgaatgatatctatgcctggcaagatgcgtccggcctgtaccgggtgaaatttgacgctgacagagacgagaaagggcagggtcaggaaagcatgccggtgcgtctcgccaaaccctacggcggcgacgtgtacggctttcacttcccgctgatccagggcacggaggtggcgattgctttccacgaaggcgatcccgaccggccgtatattgcgcatgcgctgcatgactcgcggcatgtcgatcctgtgacggagaaaaacagcacccgcaatgtgattcgtactccggccaataataagctgcgaatggaggacaagcgcggcgaggagcatatcaagctcagcaccgagtacggcggcaagacgcagctgaatttaggtcataacgttgatgccatccgcaagcttaggggggaagggtttgaactgcgtaccgattcgtggggagggatccgcgcggggaaagggatattcattactgcggacagccagcctgaggcacaagggaaagtactggatatggctgcagtacattccttgttgacgcaagccgttagtcaaatggagtctctttcactggcagcatcagcggcaaaagcacagctcttgcaatatgagcaacaacaggcactgatggaagagaagttacttgcgctaaagcaggctgtattactgatgagtgcaccagaaggtattgctttagccagtggaagtcatcttcaggcagttgcaagcgaaaatatttatatgactgcagggcaaaatgttgaactgggagcaaagaaaaatattacccttgccgcttctgaaaaaatatcaatctttaccgaaactgagggcgtagaagctattgtagctaaaggcgatataatatcacaggctcagtcaggaaatattgaagtaatagctaagcaaaatatttcgctgaccagtacaacaaaggatatgacttttacagcggcaaaaactttaacgtttacctgtgctggcggggcatacattcgcctttccggaggaaacatcgagttaggctgccctggtgatattatgatgaagcaaagtaagcttctctacagtggcccagcttctatgcagtcaaatattccagaacttcctgatagtggtccacagtcaatgagttttatgctgttagatgctcttggtaatgctgcgccatctactatgaaagtgagtctttttgatagtgaatcaaaagaacaaatatggaactctgcttttaatgatggagagtcaggttgttttgaacagcctgaaagtaaaaattttcatgcaataattggcgatgataaatggacgagccttttttcttataacgatgtgcatgatattgaggatgagactgatgatgacctggatttcgatgaacatggtccgcaatatgatggtgaattaaacgaacaagataaggaatag

SEQ ID NO: 248857 - DNA, 174 bp, Klebsiella pneumoniae
gtgcccgaaaatatcgtgtctaccgtcattgacggggtagttttgtttgtgacttcgtctgttttctggctggccgtcgctggctggttagtcatcctgactccggtaatattacgaagaaaattctcggcaaagaaaaaagttaaggaaggtgcgaacaagttcctgatatga

SEQ ID NO: 248858 - DNA, 231 bp, Klebsiella pneumoniae
atgcgcacagtttcgatatttaaaaacggcaataaccgcgccatccgtctgccccgggacctggattttgacggcgtcagcgagctggagatcgtaagggaaggggacagcatcattctgcgtcccgtccggccgacctggggctcgttcgcgcagctggacagggccgatccggactttatggcggagcgtgaggatgtggtcagcgatgaaggacgctttgagccatga

SEQ ID NO: 248859 - DNA, 921 bp, Klebsiella pneumoniae; identical to SEQ ID NO: 231915

SEQ ID NO: 248860 - DNA, 2001 bp, Klebsiella pneumoniae; identical to SEQ ID NO: 233636

SEQ ID NO: 248861 - DNA, 603 bp, Klebsiella pneumoniae
atgaaaagtctgcaagttcgcggtcttccatactttatttttaataaagtagatactatactttatccttatcttatttggagtgttatacaaggcctgactgaattcttactgtcaaaatatactaacggaaatctaagactttctgatgtttttgagttactttggcatcccagagctcaattttggtttttatattctctttttttaaattttatattgatctctttaatattgagtttaaaagaaaaactgaaaataaatacaactattgttattgctttttcttttctttttgcaatttttatttatctggctttttcaaatatccttgatacaaatccccttaattatattgtgcacaactctgtgtttatactatcgggaattgttttctcttactatagattagatataaaaatacaaaacaatattgttttttttgcgactggttttatagtgccttttatttttcaagctatatatatatacgaaaatgtaatgggttacaaatttagtgttttagcgcttgctttttccttaattggaacaggtgttattctgtctcttatacacatctccgagcccacgagaccgtactag

SEQ ID NO: 248862 - DNA, 192 bp, Klebsiella pneumoniae; identical to SEQ ID NO: 233631

SEQ ID NO: 248863 - DNA, 972 bp, Klebsiella pneumoniae
atgaatatttactgcgatgatggttcaactaatgttaagctggcatggtttgaaggagatgagcttcagacacgagtctctgcgaactccttcaggcatggctggaaagtggcagaattcagtgcggcaacgttcaattatcaggtgggcacgctgaaatacacctgggacagcgtcagccgggatgccatcccgacaacaaacgtggaatatcagtacggtgatctcaacctgctggccgtgcatcatgcgctgctgaacagcggactggagccgcagccggtgagcctgaccgtgacgctacccctgagcgagtattacgacggggactgccagcggaacgaggagaacatacgacgcaaacgggaaaacctgatgcgtgagctggttctgaataagggcagagcatttaccgtaacggacgtgaaggtgatgccggaatcactgccggcggcgttctcccgtctcgcggagctgaagcccggccccgctgagaccaccctgattatcgatctcggtggcaccacgctcgatgccggtgtgattgtcggccagtttgatgatatcagtgcggtgcacggtaatccgtctgtcggcgtgtcacaggtcactcgcgcagctgcaggcgcgctgcgggcggcagacagcgaaaccagcgccctcatcgctgacactatcatccgcaaccgcaatgatcgtcagtatctgcagcgtgtgatcaacgatgccggtaaaattgacgaggttcggaacaaaataacagaggcaatcacctccctgggcgcgcgtgtcaccagtgagctgacggccttcaggaacgttaaccgggtattcctggtcgggggaggggcatccctcattgaagaggctatccgtcaggcctggcctctggctcctgaccgtatcgaggttataggcgatccgcaaatggcgctggccagggagattgccctttacaataaagaggactaa

SEQ ID NO: 248864 - DNA, 249 bp, Klebsiella pneumoniae
atggaccataacgttttgtccccgcttgtatccctgccggatggcacgtttacccgcgagcaggctcaggttgtcgcagcgcagtatcagaatgtggcgattgaagatgaccaggggacccattttcgccttgtcgtccgtcataaggatgacggcagcatgatctggcgcgtatggaattttgaaccgggcggcgaggacataatgaaccgctacatccgggactacggagtacgcaaaacgaagtaa

SEQ ID NO: 248865 - DNA, 2058 bp, Klebsiella pneumoniae
atgtctgcaacagagtctaaggtaaaaactgcaccgaaaaccagcaaaaaaacacttaagtctgccgaggctgaggcgcttaaagtggctctcgatgccgcacaggtcgagtatgtcccggtgtctgcactggtgaagtctcccctgaacgtcaggaccattccctatccggcggagaaagtctgttcaatggctgattccattgaagccattggcctgttgcagaatctggtcgtgcataacctcccggatggtcgctgtggtgtggctgccggtggtcgtcgcctgaaagcgctgcagctcctgcagagtgaaaaccgtatcgatgccggatatcaggtgatggtgaaaaaggtacctgatgaactggctgttgcggcatcaatggcagaaaacgaacagcagatggcaatgcatccgtctgaacagatcgccgggttccgcacactggcagagcaggggaaaacccccgcgcagattggcgatttgctggggttcggtacgcgtcatgttcagcgcatgttgaaactgaccgaactggctcccgaaattctggcggcgctggcgaaggatgaaatcaccaccgaacactgccaggcactggcgctcgaaagcgatcagaaacgccaggtggaagtgctggaatccgcccgcaaacggtcctggaataatgaagtatcagtttcctcgatccgtaacctcattacctcagaagaggtttccacaaacggcgacaaattccgctttgtgggagaggccgcattcagtccggatgaaatccgggttgatctcttcagcagcgaaaaccgcggctatgtcaaaagtgcatcgctcgataccgccctgctggaaaaactgcagaacatcgcggagcacctccgcgaagcggaaggctggtcatggtgtgatggtcgtcttgacccgatttcacactacgggaaggacactaaaatctggcgcctgcatgctgtcccgcctgtggaatataccgaagccgaatcagaacgtcttgcagagttggaagctctggaagctaagtatgaagacgagaaccccagcgtgaatgatgacgtcgtggccggggctctggaagccgtctgggaagaacagcagaccatcgcgcaccgggcaaaacaccgggcatggacggatgaaatgaagcaatctgccggagtggtggtttcctggactggccaggaggtgaaagtacagcgcggtgtggtgctgtgcgccgatgaaaaaatggaggagaaggatgcatccaccgatcaggcacctgaaaaagtcgatccgctggacgccgtcagtgtcccgttgctgacccgcctttcttctgaacgcacactggcggttcaggcggccctgttgcagcagccgcagaaagccgtcgcgctgatggtctggaaaatgtgtaactcggttttccataccacaacgtccgtcaaagagccgttctgcattagcgtgagtgtgtcgcattacgcgctgacccgtgaagcacctgacggtgaaaacagcgttgcgtttcaggccatccaggcagaaaaagaacgtcttgaagccctgctgccggaaaactggcgaaaggatatgaccaccttctttacgctcgatggcgcaaccctgatggcgctgatggctttctgcaccgcctgttccatagatggtgtacagggcaaggatgaatttggtcgtaaacaccagagttcgctggatggggtggaaaacgccattcagtttgaccttcgtgactggtggaaaccgacggctgataaccttttctcgcacatgaagctgccacacattgtacaggcactctctcaggccggactggctggcgcagcacaggacgccgcgaagatgaagaaaaaggatgccgctgaacatgcagagcacttcctctcaaaaatccgttgggttccggaatggatgaccagtgctgacaatcagaaacagcttgccgcaaagtctgaactcagtctggcaacaagtcagaacgataccgacgctgatgccggcgacgtcaccgaccataacaacccggcctgcgccgcctga

SEQ ID NO: 248866 - DNA, 522 bp, Klebsiella pneumoniae; identical to SEQ ID NO: 232255

SEQ ID NO: 248867 - DNA, 648 bp, Klebsiella pneumoniae
atgctgctgtgcttcatccgccttcggagtcagcgtgcgggtggttttgccatcagaaagcgtgacactgtcacccgaaacagactgcacctcccagacgctgttggccacatagccgcgttccgggtcactcttgctgaaacgcattctgtccccctgagacacggtgatctcttcctggcgataaagcgtcacaccttcagcagaggcttcacggggagagatatatcgctcctttccttcactgtcagtcagagtgatcagctgattatccttatccacattgtcgatacggtggtatacgttatcaaccagcgccaccgcccccttgtgagccgtccaggtcgacagtttgcgcagttcaccgtcacggatgttgctcgtgaccagcaccggcagggtgacttcctccctgccagtttccccgttctcccgcctcgcttcatgaatcataccgttcagtgcccgccggtcattattcagatgggttataatcagcgtctgcgactgtgcctccggggtccgtccggtatagtccttcaccagtgcctcgtagagcgtcgcgggctggcctgccggcaggctttcccccttgctcagcgccttacgtatctcctcttcctgcgtcggcgtgaattccaccactga

SEQ ID NO: 248868 - DNA, 231 bp, Klebsiella pneumoniae; identical to SEQ ID NO: 92366

SEQ ID NO: 248869 - DNA, 231 bp, Klebsiella pneumoniae; identical to SEQ ID NO: 223479

SEQ ID NO: 248870 - DNA, 669 bp, Klebsiella pneumoniae
atggccttaataaaatgtcatgagtgcgctaaagatattagtgattcagcaatctcatgccctcactgtggagctccaatatctaattcacagaaaaccaattctattaaaaacaaccaagagccaaggcaagttagctttattctcgcgcttggaatagtaatactccccattctcttcgtgtggttcttattcagaaagggatattctaagaaatcaagaattataggtatcgtttaccttgtgctaagcatcatctttcttggaaggagtagcgaggatgtttcatatgaaagtacggaaacggaatcagttacttcaacttcaacttcaaacggaaggcctgacgctagctctctttcagaattttcagcccaagaaatttttgatgcatatagcgcaaacacggtagcggctgataaacagttcaagggtaagtggttaattattagtggtaaggttggcgatatcaatacagatatcactaattctgcatatgtagcattttccgtagatgattcattcaattccccccaagcctcgtttatcgaaagcgaagaggataaattggcaaatttacgccaaggccagtatgtcaaagctatttgcatcggaaatggcgatattgcaaaaacaccaatgctgaaaaattgcactctggttgaatga

SEQ ID NO: 248871 - DNA, 630 bp, Klebsiella pneumoniae
atgctcgctaaacagcggcacctggtgcatcacgatggggaatcattaaatcagccatactggttacgcgatgtttcgtcagtactgaatatctacggcgctgttcagacactcaacggcaaagacgcctgccgcgttgatgcgggaaagtactatgccaagggcctggacgttcctgtcaacttgactgattatccgcccgcagggaatcacggtgacgtcgtgttcaatacgaatcccgtgggcaatccagtagggcgatatcagtacaacagcgcgaacagtacatgggagcttcagaaccgcgagaacatcagccagtcgccttctgacacctcagcaaccatttataacccgatatggggccggggattcaattgggttcaaacgttgacacaggacgtacagtttacttccagcgctgccaacctctcaacgctcaatcgcggagataaaatccgtctctacctcacccaggatgctaccggaggacgggtagtaacgttcagtacagcgtttaaattcccggtagcgtgggtgaacggcgggaccaccggacagcatacgatcggagagtttgtctacgacggccagttcctggttcttgagcgggctaatgtctggtactaa

SEQ ID NO: 248872 - DNA, 168 bp, Klebsiella pneumoniae
atgaaaataaactgggaatggagcggtaaacgagcaaccagattaggtattcttctgcttgtcggtgctgatgtttattgccttttccctgatgtgttcgtctatatcactggcgtaatcatgttcgcgcttgggtttaagtgcgaagtagagcgcgctgacagataa

SEQ ID NO: 248873 - DNA, 159 bp, Klebsiella pneumoniae
atggaaaagaaacacatttatctcttctgctcggcaggcatgtccacgtcactgctggtctccaaaatgcgagcgcaggcggaaaatatgaagtcccggtcattattgaagcctatcccgaaaccctcgcgggcgaaaaagggccggaagccgacgtag

SEQ ID NO: 248874 - DNA, 276 bp, Klebsiella pneumoniae
atgaaactgaatcctgagaaatacaatagaaatatcaccctgctatgtcctgtgtgcggaaatacagagatggaacacgaggaagagtctgaagtcgtcagatgtgtaggctgcgggaaagaattcactaatgatgagttaatccaagaaaacggggtgagtattgacgcccatgtggatgagataaaagaagagttaacaaaagatattcaaaaacagtttaacgacatgctcaaaaaggcatttaaaggaagtaaaaatataaggattaaataa

SEQ ID NO: 248875 - DNA, 1053 bp, Klebsiella pneumoniae
atgatcgactggtttaccggaatcctgccttgcacacaccgaccgttaccggctggtagtgtcgtcagcgtcgatgctgacggtgcagtggagtgggaaacagtaaaacggttgaccgttcgcggttcgcatgagtccacaatgaaagtaaggtctgttggatctgatggtgaaggtcgggcaacacatctctacattgacggtaatccatcaaagtttttgcaaggtcactctgttatcggttccgacgatttgcaagggttggtgttaacagcttacgccagaatattggcattactgcatattcctcatgatctaccatcctatcggcaggtcatggaagggcaatttaagatctcgcgcatcgatatcaattacatgtattcattgtcaacattagaaaatgtccgcgcatggttatatgccgcagaatttaaagctaaaactcgccacggtcgcgcctgtggtaaaggtggcactgtttacttagggaaaaactcccgtcgttggagcctgaaattttattcaaaatatgatgagcatacatctggcaaaaaagggcaccagatggcagacgaattcgttaaagctggtttactggactggtcaaaagataaattacgcattgaattaacattaagaacaactgaattaattgatttgaatcttacgcttggtaatagctggaatattgagacgcccaataaattattctctgactatgtagggagaatagaaatgaatcaaaatactatattaactgatgaaaaaataattaatctcccaagaaaaatacagtctacatatttattgtggaagcagggcgcgaacatgaaagagatgttaccgaaacctacattctaccgacaccgtaaagaattactttctttcggaatagatattaacttttattgtgagtcaccggattctaataacgttgttccgttggttcgtactcttgaagccaaaccagccaaaattccatcatgggtttatgagaaaggtttaattttcgattataaccgtatttcacatgccagtaactggcattaa

SEQ ID NO: 248876 - DNA, 288 bp, Klebsiella pneumoniae; identical to SEQ ID NO: 10867

SEQ ID NO: 248877 - DNA, 1467 bp, Klebsiella pneumoniae
atgaaagggaatgtagccaaaacaggaagatcatttaaaaatagagttggttatatattaaaagatgatcacacctttatttgtagcaatatgtcagcagataaaaataatgttagcgatcttactgatgagtttaaaactgtaagcggttttagacctgatataaaaaaaccaacttttcatgcgtttttatctcttccaaaaaatgagaagctcacagatgaacaatggcaagaaatagcaaaagactatttgaaggaaatgaatatcgatatagaaaaacatcaatatatttgtgtgcgtcataaagatacagataaagaccatattcatattgtagcaaatagggttgggctggatggttcggtatggcttggtcaacactcagcatttaatacaatagcagcttgtgaacgtttagaagtaaaacacggcttaaccattactaaaggcttacaagggcaaaaatcagaggtatcagcaccaaccaaagcagagatagagcaagccctacgcaaaggtgagaaaccagctcgtatcgttctacagaacgcattacaggcggctatgttgggtaaaccagatctgcagacgtttattgacagagtgcaggccgtaggcattgaaccttggttcaatgttgccagcactggcaacgtggcgggttgttctttcagtgtgggagatgtggccttcaaaggttcgcagttaggtaaaaaatacagttggaacactataaaaaacaaggtgaaatatgacaagaatagagatgatgaactcattagaagattcgcagcaagaaaaacatatgacgaaaatagtattagacgatcatttgttgaaccaaatatcaatgacgatagaaccattatcagaaacgatgatgatattatcggagtcagtcagcacagctttgaaccagacacaacagacactaacaagagtgaacaactcattagaggcaacaacaaccgctttaaactcagcgaaaaatataatagaccaacaggcccaaaagttagaagaacaacacaaaaagctgcacaagtactcaacagaattaaaaaacaatacaataaagaaccaatcaagccttataatcaaggtggcttcaatagtgggagttctaaatttagcagcggttctattggtaggatacttgatcatgcagaaacagccaacgcagccacaaataaatttagactcaagagaggtagccgtttcaatagtagagcaactaagatcgaagaaataagagaacgtttgggtattaaaaaaccagttattcagccaaagaataaagaaaaaatagttaaagaagaaataaagaaaaagccatctcatttagctgaaaatgaaaatagatttaaatcaaaattcaaagcaagagtgaaaagtgaaatattaaaatcaatacaacaagatgatgatcaaaatttgaaacatagaacgttaaagataaaataa

SEQ ID NO: 248878 - DNA, 1089 bp, Klebsiella pneumoniae
atgaaggcagtatctctcttttgtggtgcgggtggtatggatgttggcgtccaaaacgcaggttttgaaattgttgcggctaatgaattagatccctacgcttgcaaaacttatagagaaaatcataaagaaaccattctatatgaaggagatatagaaaaaaatcttgatgcgataggcacacataaaggtatcgatttagtaatcggagggccaccgtgccaaggtttttcagttgctggtagaatggatccgaatgatccacgctcaaaactggtgttctcatattgtgacgttattgaacgagtcatgcctaaagcttttataatggaaaatgtcaaagctttaggagcattagaaaaattcaaggggattagagaagagatatttagaagaatgtcagcattaggatatacactttcaatggtaatccttaacgcaaaagattttggtgtccctcaatccagagaacgtgtttttattataggtatatttggtaaaaataaacaaataacatacactgactttgaacacaaaaaagagaaagccatatctttacgtgaagctataatacatcttggccccgcaggcagtgaaaaaaactcaagaattaccaaggcgaaaattactcttgccgaaaaacctgtgctgagaaagtctccatatgctggtatgctttttaatggtcagggcagacctcttaatcctgatgcatggtcaagcacactgcctgcaagtatgggtggaaacagaacgcccataattgatgaagggcatttatatgacgatatgccaagctgggttgaagaacatcacaaggctttaatggaaggtacaaaaaaagcggaatatggagatgctcccaaaagattaagaagattaacgattgatgaagcaatcatactacaaacattcccagatgattatattttcgttggtcctcaatcaaaagtatttagccaaataggcaatgcggtaccttgtaaattagctcaagtcgttgctgaagtagtcaaaagcaaactatcgaaaaaaacaaaccatcaagaaaatgatagtacgcatcaactacccttagagattatatag

SEQ ID NO: 248879 - DNA, 1086 bp, Klebsiella pneumoniae
atgaatgttcaaacaagaaatgataaagctaagcagttcattttagatcaactatcaactgtagctcaactaaacgaaagtgattttgaagatttacctgatttccaaaggcttaaatctatcactcaagatttaatttatgttaaggctatggggttcagaggaattgttgctacggctttaacgggcaagtttcttgatgatagctatgattatttgaatgatttctacaaatgtaatccgcgatctatctttgaaaatggaatattttacgcatttcaggaaatgaaaataccctgtggaaaatcagatccattaaatgtagcaaaaaataataatgttttagacgaaaattgggctaaggggagaaggcctcagaaaactgctatcgctgcagtttatttattaagaatcattagcagcgaaggtgatgatactattcggcaaaaaattgtaaattatttctttttccggttgttatcttattcacaggaatgtggttcagtagttattcacactcttaatgaaactttcctttcaaatcagatcgttgcttcaaagttaattagctttacccttaattatcctgagtctggaacaataccgcagtttgttatttcaaaaatattgtcttctctatatagccaatcatcaattgatgttatcggcggagatgaaagtgtttttggaactaatactacctcgaaaaaacctgctgatgtatggctcgaaaatgaaggtgtaatattaaatctctatgaaataactgttaaaaaaatcgattacaaaagattggacgacagcattcagtcccttgctgataccgactctctggaaaaaacaattatattcatatgtcgactgccggatgatataaatactttgaacgggtatcaagacggtgttctaacgtataaaaataaatcatttaattttgtggatatatcagagtttattaaaaacactatagctttattatctccccatcaaattgaacttcttctgtccgaaatagaggagtttgtcggttcatatttaaggcccgttaagactaaaaatggatggaatgaaatattcgccatttga

SEQ ID NO: 248880 - DNA, 1347 bp, Klebsiella pneumoniae
atgactaatgaaatatttaccaccattatatccagactaaatttttcattacgccataaaacgccagttatattacagtcggaggcaacagagtgtgggatcgcttgcctggcgatggtttgcggtcactatggtctggatattgatctgtttaatttccgccagcgctttggcagcgcttcgcagggagtaacgatgatgtcattaagcaaaacggcagatcatgccggcttgaaaagccgtgctctgtcgttagacctgaatgagattcgtcagcttaaactgccctgtatcctgcattggggaatgaatcactatgtggttctcaccaaagtacgtaaatcaagtttcattgtacacgatccggcattgggtaaacgagtcattggcaatcaggagatgtccaattattttaccggtatcgccctggaactctggccggatcaaaactttcaacaggaaaaagccaaatctcgcctgcgtctgttggatctgatgcgtaatattatcggattgaagtcaacgctactgaaaattttcgccttctcggtcgtggttgaagcgattggcttattgctgccgataggcactcaactggtgactgaccacgtgatcatggcccatgatcagagcctgctatccgtaatctgtatcggtctggtcttcttcaccctgttccgcacctttatcagtatgctccgggcctggacatcgttaacattaaatacgttaactaatattcaatggaaaaccacgcttttcgatcatctggccagtctgccactatccttttttgaaaagcgtcatttaggagatatccagtcgcgtttttcctctctggacaccatacgctcgacgtttacgaatagtattgtcagcggcattattgactcgatcatgactattggtctgctgatcatgctgacactgtatgggggctggctgacctgggtggtcgttggttttaccctatgctatgcgattatgcgctttgctacctaccgcttttatcgtcgcgtagcggaagaacaagtgattaaaggcgcacgctccagctcgcattttatggagtctctgtatggaatctcgaccatcaaggccttaaacctgaaagagcgtcgctcccagcattggctcaatattaatattgaagcctgcaatgccggaatcaaacaaacgcgcttcgacatgatgtttggtggaatcaatacttttataactactatcgatcaggtcgcggttctttggctgggtgccattatggttattgataataatatgactctcggtatgtttatggccttcaacgcctaccgtggccagttttcacagcgagcttctaaatag

SEQ ID NO: 248881 - DNA, 1020 bp, Klebsiella pneumoniae
atgaatcatgactccttgaaagaaaaagcatttcaaagagaacatttaataaccgccagtattgagttaactcagcattgtaattttaaatgtctccattgttattgtccaacgaaaaaagttcatatggattataatgatgttattgcatgtatcgataaattatacagcatgggagttttgtaccttacatttactggtggtgaggcttttttatataaaagatttgatgagatatatacatatgcaaaaaataaaggatttatcatctcgattatgtcaaatttatcttacataacggatgtgactaaaaaaattcttatcaaatacccacccaaagttatcatgattacgttatatggtactggtgctgacgaatacgcaaagttcactataaataaaagtgcttttaaaagagtgatcgaaaatataaagtttttatattctaataatattgatttcatgttgaaagcaattataggaaaagaaaccataccagcagctttggaaggaaagtttgatgatattgctagagtttataaaaaagaaattatgtatgatgccataattttcccacaaaaagatttaatgagaggtaaactatctcaaagagctagtattgatgatattattaactttgagcatagtaatccagaaactgtaagtttctggaggaaatcaatatctaatatgacttcacaagcatgtattaaatgtggtggtggcattaatagcctttcaatagatgctggaggatatgcatctatatgttctttatatgtggaagataaaattagttttttgagtaatgatgagaaaaccataaggaaatacttgaaagattcacataataaaatgcaaagttattatatcaatagcaaatgctctacatgtgatcaaaaatccatttgcagatggtgtgcggcatatgccaatttggaacatggaaattcatcagaaccgatagattttatgtgcgagttagcacaacgcagaatttctgcgtttacggaggtataa

SEQ ID NO: 248882 - DNA, 696 bp, Klebsiella pneumoniae
gtgagtaagaaagaattaatcactataaatgcggccgatgaggatttttttaatagcttcttgggaaaatccgttaaacattttgaagaagattcaagaattcataaaatgattcaactttcacttgataaggcacacgatataagaaagtttgagattgaattatactggaaacgtgcaacatacttttttgctttttttaccgtaataacggtttctttcggctatctttttacgcacgatgattatgcaatttatgcaccgggaatgtctataacaggtatcatggtttccatatgcttttattttgtcaatattgggagtaaatattggcagtgtaattgggaatatataattgataaactcgaagtatatgtcacgggtaacttgcataaactttatttttataaagaaaaatcaaacttgcgtccatcagtttcaaatataaatcaaactatcagcgtgataatattactactttggcacgcttgtttgattgcatcattgtataaattacatccaaataacccagaacttattggttgttacattattggttatttactttctttttctatcatactttcaaggtgtgtaaattttatttctgacattattgatgaagataataaaagcattgtatcgaacactagatattttaaattcagagtggaatcatataaaaaatcaaaataa

SEQ ID NO: 248883 - DNA, 714 bp, Klebsiella pneumoniae
atgttaaggattaatcaaataattaaaattcttagtgatatgaagccgtatgcaccttatacatacaaaagtaaaacagataaagtaatcgacaaaatacatggtagattgcttgcaattgtaattattgctgcgctagctttatgcattgctttatataagttaactagtttcgctaaaactgatgtaatggtaaatgttatctatgggttatattttactataacgtttattgggctaataataatgatattgccacctatcttaggagtaaagcatttaatagactggaaaagagaatcatttaatgattttatttgtgaaatctcgcatgatgaagaaaatgcgaaactacttataagttattcagaaattgaacttctatatgcaattcattggctacaacttaagataaatagaataacagtgagggttagtagtttctttggtgaaaaaacagcggtattatcaatcttgggtctttgctattcggcagtacaggcatcaattggatttgatacattgagtaaaacatttatcggagatctttctaacacgagctccactaatactgtcatcatgttcggattagcatttttattaggtatatctctgggggcattgatgttaaaaaaagtagcaaatcatcagttatatctgaaagaaattgttgagttggcaataagaataaaaaaagatatccaaaatggataa

SEQ ID NO: 248884 - DNA, 333 bp, Klebsiella pneumoniae
atgttctttttcaaatggcacattcttggctccacaatagacgcagctataattatatttctcaagcaaatattcttttacttcataatcaaacagcgtgccacgctgatactcgataccgtcaacatcagcgttttccatcttctgcatatcaaacttaaccgattctacagttataaaaccaacagtaacgtaacgaatgaaacgcttagaccattccactatattatctacacggctctggacggatggagccaaccatcctttatgtttacttcttacacgattaaggaaccgtacctgtctgtaacgggttttacggtttcttcttga

SEQ ID NO: 248885 - DNA, 1359 bp, Klebsiella pneumoniae
atggtcaggcaaaagtgtagcggtattaggcgcagctatttagaacatatcgtaaaagactctacagcattgtggaatgaagttgaaagagttgagcgccagagcaatggtcaaacatcccgttatttcgatgttgccatacctgccgagttaaacaatgacgacaagaaaagacttgtccttgagtattgtcagaaaaattttgttgataaaggcatgattgctgatatcgctttccatgatctcgatagcgacaacccacatgctcacgttatgttgacattaaaaactataggaccagaaggttttggtaaaaaggaaagaagctggaacgacagaaaaatgtctgtggtatggcgtgaatcatgggcatcgatggctaacagctacctcgctgctgctggttcgccagaacgtattgatcatcgttcccttcaagcccagcacgaagaggcattagaaaaagcggcggctgctctggacaatgaagaacaagcgctatggcttgctaaagccactgaaacgaaccgccctgcaatgaaacgtgtccacagtgccaaatggcgtagtaaggcggctcaggaacaaagagccacagaacaagctgttcgtgatgctgccaagcaggaggccgttgaagtctacaaaacattcagcgaacttgatcttgaaatcgtcgttgatgtcagaagctttacgattacacatcttgctgaaccagaagagattgtattacctaaaacacaccccggctcttctactgatgagaatcgaagacctgtattggtagcaccaactcctcatactcgtatgcgtggagttaaatcttaccgtgataaaacaaaagtcagtaaggtcgttgctggtaagaaaccatcagtcagtatttctgattctggaacaaatactattctgaaaatatccacccctcaaaacccaaacagggcatccagaagcgcccctgaacgtgttaagaggacacatgctattccacgtcaggataatatttttaaacgcttcacaactcttgtcatagattttttcaagcagaagtttgtatgggctaaagcaaacaaatctcaaattgatcatatcagtgaagcacatgataagcgtattgctgaaaactatgtctttgatgaggtgctgggtatctatgtgctacgcgctgagcatgagagacgatccaagtttaacaatgataattacaagcctacctctgatgagatcaggcggtttccaagccgaatggttaagtcaacacaacccgatagcgatcttgattacataccaacacttgcgacggacaggaaaaatccggtacatagatggaaaacaccaagcagtaaaataaaatga

SEQ ID NO: 248886 - DNA, 285 bp, Klebsiella pneumoniae
atgaaaatcaacagagctggaataaaaaatgttgacaaattattggaaatggatataggttggatctggtggcaaaaagatgttgatttgtcaaaaacagagtttaagtttgttgctaatctcattgttttgaaaaatccagaaattaaatattctgacattttcattaattggaactctgtcactggagagtacggtatatatataaagaataaatggtttggatatgtagaggactggcattttgcaggctatgcgtcttatgaagagtactataatttttaa

SEQ ID NO: 248887 - DNA, 594 bp, Klebsiella pneumoniae; identical to SEQ ID NO: 217396

SEQ ID NO: 248888 - DNA, 954 bp, Klebsiella pneumoniae
atgctgctgcgcctgatccgccttcggggtcagcgtgcgggtggttttgccatcagacagcgtgacactgtcacccgaaacagactgcacctcccagatactgttggccacatagccgcgctccgggtcacttttgctgaagcgcattcggtccccctgagacacggttatcttttcctggcgataaagcgtcacaccttcagcagaggcttcacggggagagatatatcgctcctttccttcactgtcagtcagagtgatcaactgattatccttatccactttgctgatacggtggtatacgttatcaaccagcgccaccgcctccttgtgagccgtccaggtcgacagtttgcgcagttcaccgtcacggatgttgctcgtgaccagcaccggcagggtgatttcctctttgccggtttccccgttctcccgccgtgcgtcatggatcagactgttcagcgcccgccggtccttattcagatgggtgataatcagcgtctgcgactgtgcctccggggtccgtccggtatagtccttcaccagcgcctcgtagagcgtcgcgggctgacctgccggcagggtttccccctcgctcagcgccttttgtatcgccttttcctgcgccggcgtgaattccaccacagaactgcccggcgcccagacgccttcttttctcggcacctgctccggcgtgacctgctcgatggtggtcagggcgcggtgcacatcccgctcaatcaggctgtagaccgccggtcgcagctcaggcacctggcgcacaatctctttcatgatggcaacgtcggcggcgctgcgctgctgcatgagcctgaacggctggcccggcgcgatgggctgcagctggtcgttatccccactggacaccgcccgtccaccgccggcgacgatgagggagtgggcttttgccatatcggccagccccaccattga

SEQ ID NO: 248889 - DNA, 573 bp, Klebsiella pneumoniae; identical to SEQ ID NO: 235419

SEQ ID NO: 248890 - DNA, 447 bp, Klebsiella pneumoniae; identical to SEQ ID NO: 218060

SEQ ID NO: 248891 - DNA, 411 bp, Klebsiella pneumoniae; identical to SEQ ID NO: 92378

SEQ ID NO: 248892 - DNA, 132 bp, Klebsiella pneumoniae
atgttcaatctcctgtttcagatgacgaatcacctgttcactctggtcagcagaggctgtatcacgctgtccagagacctgtccagaatggtgttcacccttcggttgctcaaagggaccaaagacacgtaa

SEQ ID NO: 248893 - DNA, 243 bp, Klebsiella pneumoniae
atgacaaaaaatacagttttgtctgttgacgaaaatacagttttatctgtaaatttaagccatccaaacaacaccggcaacgccggggtgaagtcaaaacgtcccgttagccgcgataaggcaaaaggtgaagagatgatccgagaacatgaggttcctgcgtggaacagattcaaggtgaaggtggctctgttgttggctttggtcgcattcgtaagcgttcagtgctggggtgcggtatga

SEQ ID NO: 248894 - DNA, 507 bp, Klebsiella pneumoniae
atgactgatatcaccgaactggcgcagagcctgaaagcggcagcagagaaagcgactccggggcgctgggaatattacccgggaaatacgagcattgaatataacgttgactcgatggatgaagaccagggttcaatcgtttatgtcgatagtggcgacttcacacaggctcaaacagaacgtaatggggagtttatcgccctggctaacccagccaacgtcctcgcgctggtagaggtgctggagaaggcacagcagcgtatcgcggagttggatataaaaaactgcgagcttgattcgcttactcagcgctgggctgttgagcgtgctgaaaatgcagaccgtatcgccgagctggagtcccgtaccgtcactgtgaagttgccagagcctccagggccaatgtctgtaggcgcgcgtaccgtttacttcggaattgtagctgatgtcgttagcgcttttcagtatggactcaccgccgctggcatcaaggtggaggttgagtga

SEQ ID NO: 248895 - DNA, 351 bp, Klebsiella pneumoniae
atgagtcgagcactttttgccgctatcttctttttggttcctgggatgctatatgccgcagatgaaccactaatgacctgtggaccttttgccatttcctccagttctgatggttttgctcacattaacggtcagcgacctgagacccagaaattcactttcttgggcgaaaagggtgattactcaaaagttaagtatcaatggatgcttcccgacgccaatacaggccattggctaggtctcgactacgttaagcgcaacaataaggccattctcaacgttgaagtgatccgcaagaacatggacgagcccagagagttctggacgtacgactgtcggaaggtgaagtga

SEQ ID NO: 248896 - DNA, 468 bp, Klebsiella pneumoniae
atgttattttctgaatcaaatcaggctttctatttgcctgacgctaattacggagtggatttgcccttagatgttgttgagattagcgctgacgaatatcgtgatttttatctctcaataaacaatgaatgcagggtttacacaaaaaataaaaagtttgaggtgagtgataaaagaccaagtcggtaccatacctgggattcctcatctctctcatgggtaatcacagaagaaagtagagctttaatggactccgacctaattagctcaaatattaataaaaagcaaaatctcatggcgatagcctccagcacaatagcacctctgcaggatgctgtagatattggaattgcaactgacgatgaaaaaataaccctcggcaagtggaagaactacagggttgctttaaacagactgtcagttacatccgctaatagtgtcgactggcctgccattcctgaattgtaa

SEQ ID NO: 248897 - DNA, 231 bp, Klebsiella pneumoniae
atgaccacgttcactgtagaaattcatgaagatatcgttacctggcttaaaaggagcactcgccctgagatagtcctggatctgccatcggtgccggaacccggcgacaagctatggctgaagagtatgcgaggtacgcatgttgtcgaaacggaaaggtacatgatcgtggagtcgcaccgtgtctcgcgcctgcgtcctactgtgcgcttagtgttggtattgcaataa

SEQ ID NO: 248898 - DNA, 708 bp, Klebsiella pneumoniae
gtgtttgattatattttaaaaagggaaggtgtgtttatagcatttcttacgttcatgctatatacggccgtgtatttttttgaacgtggttcagcaagtgaactccaaataccactggatttaatcagtattagtgtgactactattagtgacgatttaatttattgttacctctatttattcccaatgctaaccatttcatttgctgctctttactgggggcgtaaagcagaggaaaaaaaagcattttcgtttctggttattgctttcgtatatgtactgttatcatacttaatgatagggactgataaaaaaacagtgcttttttcaatcttcatgagtgggattttaatacatttagtaaatagaatcacaccattaaaaaacacccctaaaaatccaagtaaaaatgatggtgcaaaatattatcttaatcaagttattgatgtagcggcagtattattttttatctcattcacttttgttggtctaggtagaggggcggtgtacaaggatgaatttaaaacgtttgttatgaatggaaaagagtatgcaattgtaaaggtatatggtgagaatatgtttgtgtggcaggttacacaaggaaaagctgaaggcaaactgacttatttccgagttgagaatgtaagtggagttgagttaatccgcaagagcttaaggagcgaccatctaagagcactacgttag

SEQ ID NO: 248899 - DNA, 153 bp, Klebsiella pneumoniae
atgctgtttgaaataaacaagccgagcgatggtatgtggaatcttagcggtggtcctgttgaaaaggactatatggttgtaatgatctggcttgccgtgattgttacgattctcaactggataattgactttgtcatgtggctaaagtcctag

SEQ ID NO: 248900 - DNA, 1068 bp, Klebsiella pneumoniae
atgtggtcaagtgttggattggtaaccagtggtttttccttattagcctttatagtcgctgcgattgtcatttgttatagatataaattagccaaccagcaaaaaactttatctagagtgactggagatgatcttaaaaaattaattgatagtatagtcgatatgcctagcattgatacaagtaagctaaaaccctctcagcactatcaattagctatggagttgttgactcagcggcgcaaacgattatacatgcaaactattttattgtttctatttgggttgcttttttttattatagcttttgtaacaataataaaagataatatacccagcattataaagcagtgggtggatgagaaaatcgatcaaaagaaactacaatcaagtaataacagtaatttaaacaatagcactccaggaatgtctcctatcactattgcgccgtttgtaaatgcgaaatcggaaggacagggggaaacattaccattgaatgttgcgattgttaatgagcctgctacagtcaaagaatatctggctcgaattaaaattgaaaaaaataagaaagaaaagaatgagttagcaataaaagctagggatctaatcgctccagactttaactttgattacttcgaataccaaaaggaatatataaacgcaaggcacgatgatttgtttaaatttatcagttatgactcaaaggcaaataagctaaacatgcatattttgagcaaatattattcagtgggtttagccgggaggcctaaatactttctcacaggtgaatatgaagctgacgttagcataagtattaataatgtggacatgatcacgaccaattctgttaccgattccgatggttatgttattgcatgctacattgatactcaaaggaaatgtattgaatattcaaacattacgaaagggtgtcctataagtggagagtttggatcaaattcctgtccctctcttgattctagcctttatatttatgatgcaaccagcccacaggcgcgaaaactaaaatcagcacttaaaaatgcaataaaaataaataaagcgctttga

SEQ ID NO: 248901 - DNA, 1431 bp, Klebsiella pneumoniae
atggaaaattatttaagaaaagttgtgattaaaggtttattcgaaaaggataatgattacacaatagattttatagaaggcgcgaactgcatatatggagataatggtactggtaaaacgtcaataattaacttaattgttagttgtttgagttgtgatattggtaagctcaaaattctaccttttgagtcggttgttttgtatacggcaaaatctgggcaaataagagcaaaaaaatttcttcatgttcaaaagactcccccgtctattagaggcaataacttagaagtcggttctataagaatggaaatatctaatgatacggattctattgaagtgccatactatggtaatgcttctctgccgcctccttgggaagatgtcgaaaactccattgcagcaaaactagataattttaaagataaaatatcatcagagttgacattaactcatgtccctctcttaagggtgcatgacagcgagatttttagtgagaatggtcatgatgaatatttgcagatggtgttgcgcaagaagcggcttaatcaaaagcaaatatctgaaattatggatccaagttttagggttatttcttctattcaatctcaatttatcgatgaggcaaatttacggcgaaaggaaatcacagcgtcgttagagaatcttaagtctaggattatcgaaaaggttatgattgaccaaaagctagtcaatcagtctaaaaaagcattagtttccgtatccaaagtaatgaatggtccggataataatatggatgggaacagttactttaaaaaacttgagagcgcaaatattgatgttcctgaagagaaagtaaaagaacatttccatttatggtctgagttaggagctaagtgtagagaggaatatgcagagcttgtgaattttaaacattcgaacaacgacaaagataaagaattactacggaaaacacaagaaaagttcaataatacatatatgacattattctcaataacaaatatttatgatcgttttttatcaattgtcgaagatgttgaggtcatgcaaaatcaaaaagaacatattttgaagatattcacagattatgaaaatgaaattaattcctactttaatgactctaagtcttttagcttaaccgaagatggtgaatttaaaataacttcaaaaaagagaaagataaaactatcagatctatcatcaggtgagaagcatataataactatacttgggcgagccaccctatctaattcaaatggagctgtttttgttgccgatgaaccagaattatcccttcatttggattggcaacggaaaatattaacttcaattaaaaaattatctcctctatctcaaataatagtagcaacacattcacctgcgattttcacaaaaggaattaatcaaattaatttggaggattgcaaataa

SEQ ID NO: 248902 - DNA, 855 bp, Klebsiella pneumoniae
atgtccaaaattcctgcatacgatatcgaagagaatcttagaagaatagacatgcagcgcacgttaaaatttatcgttgtcgaaggaagtgacgatgttccaatttatgaaaatattatcgcctcatcaactggaggtgaagttgatttcgaagttattcattcaggtggtaaaccaaggattaggcgattcttaaatgaaaatcccgctgtgagaaattgtattttcataatcgatcgtgattttgacattattgagtatgaacacgataaactcgtttatcttgaaaggtattcgattgaaaattattatttttgcgaggatgtcttaaagcctgtaattgccatgtcagttaaagttaagctagatgtcgttagcgatatatttaacatcaatgcgttcattcagcactgcactcctattttattaaagttattttgtgcaatttactattatcagaaggttgagtctaaaaaattagctggtgaagggaaggaagtgaagggctggagcgacacttttttatgcaaaaatgacacatgggaagtgtgtccagagaaagctgaagagttaattggtcgactctatcctgagggatataatgagcatgaagcggaagcctactgtagacaatcgtatgcctcatccggcaatattatagctgattttcctggtaaaatgctcaaggtagcacttcagagatatcttaaagatagtgttattaaattaagccccaagtggggcagtaagtttagtaatgtagatgttacctgtaccctattaatgtcaaatttacaccgttcaagtgatttgagaaataacttgagctcagtgtatggttttttgtctaattaa

SEQ ID NO: 248903 - DNA, 1077 bp, Klebsiella pneumoniae; identical to SEQ ID NO: 248683

SEQ ID NO: 248904 - DNA, 1572 bp, Klebsiella pneumoniae
atgaaggcgagtgatatgcagcacttatgtaatatagccagagagcttgtttctgatggcaagtttgaaaaggcgtatgagttcacgttgcagatttataaatcccttgacgaaaatatctttggggataattactatatacttctttataatatggctgcgaattttgttgatataggaggaatgcaaccgaataaagaggcttctctgctaggctataacttaatgaatgagcactttgactctttttctaaaattatggatgaatctacgctctattataacctagcaaacgcaaagtcaaacttggttgaaaaaggcagtgtttttaaacaaacgtttacaacaattgaggatatggtggatgtaaaaaatttatactggaaggcatttaaattactcggtgatgataatactatatatagcaaagaactgaaggtcaatttagcaaactcactcaagcaacagtttagagttgtagagtctatttcatattatgatgatgttatttcctcgggggaagatataccgcaagcatggattaacaggtctgaagccttaatgctattgctgcaactctctggttctcatactataaagcatataagagagattagacttggatatatgaaagcaattgaatcaacagagatgccaccgccatggaaaccacactttcaatcacgtgctgaaaaactcacggaagatataatcgaaatgtcgggaaaaccattttttgaaaaagaagatgagcttgatgaaaaacagacgctagaagaatatagcaaacttaataattatcaaaaattcgttttagataaccactttgttctttctgagcatggggtgtattgtccttgcgtagttggggctaaagataacctaacaatattaccaacacataatggtgtttctggtgattttattattcccatggaaatggttttgaataggctaaagtctgaatatgctttggcaaggcgctcgttattcgagtatgagtacatggaggaagttgatgatgtggcctgttattcagagttgtataacgatgaagttttaaatgttggtgttgagaagataagaaatgcatttcgtatatgttttggtgtgttagataaaatagctattgcaatatgtgagttatacgatgtttatccagccaataaaatagtgtactttgaaaatttttggcaattaaaccaaaatgggcgaagggataagtttgaagaaataaaaactccagctttactggctttatatagtctagctactgacctaaatgatagaaagaatggtgaattatccttttataaggattggagaaatgatttggaacataatatagtgatcgttcataaagattgcgagcctttagatatatataattcctacggttacatgaagaatattaggttgatatcggagtctgattttactagacattttaaagtgttattgcaaatagtacgctcagcaatttttctttttacctttatggtaagagaagaggggggtaaaagtaacaaggattcatttttgatatcaaactcactagattggaaaatatga

SEQ ID NO: 248905 - DNA, 987 bp, Klebsiella pneumoniae
ttgaaagataagccgacagatttagagagacttatacatgaatctctagagcaactgggttgggaggctgacgctaaggctatcgctgaacgtgtaaatagacttaatattggcctcccgttagaagacgagttttcgattatctgtggttggctaggtcaatgcaacctagtccataaattggatcaacagcagtatccaactacttctaacaagacttttcaggttccagatttactagcaaattttaatgtgcgtggcgcaggcaagactactgttttgattgaagttaaatcttacatgggaaatgttttgtcttttcgtccagattacgtgtccagattaagagcttacggccaattattagggctgcccgttttaattgcctggagaagacatggaatttggagcctagtagatctagatttatttacaaaggcaaaaacaaatttcaaccttaatttcaatgatgcaatgcgtaatagcttaatgggtaaagttttaggtgacttcacctacactccacaagttaattcaggtgttcatataagtttcaagaaagaaaatattattgaaaccattgaaacagatgaagggacacaagaaaactggcataccgtcatagatgatgtttacttcactaacggaagaaatgaacaaataagggatctgtcaccaattgctcagcaattatttcattcttgggatctttctacgaaagaatcatattctgattcccacgtggttgcccattatacaatcgatgaacaatcaggaatgttcgcacatatggctctaacccgattgttatcttttcatagtcgagaaaaagatgttcactggcgacatcatttacaacatgatgcaacaatctcaagtattctagatttcaggaaaggaattgaggagaacctaaaagccggaatcattaaatatatttttgaccttgaaccagctaatatcccagattttctcaacataacataa

SEQ ID NO: 248906 - DNA, 270 bp, Klebsiella pneumoniae
gtgaaatctttgtcctcaagtcgccgggaggtacttttagattgttttcacgtctacacctgtcacatcggctacctgctgccgggtagcgccgttctccagcatccggtgacagcgttcgacaacctccggagtcataacccggcgacagccgcctatgcatccctgctctcccgctgctgccagccctgcgcgcgtaatgaaaatataaagcgcgacatttatcgcgcttttttaattgcatttatcgcgatcggcatcaatctctga

SEQ ID NO: 248907 - DNA, 1164 bp, Klebsiella pneumoniae; identical to SEQ ID NO: 226549

SEQ ID NO: 248908 - DNA, 354 bp, Klebsiella pneumoniae
atgcgcgaaatcggagaacaaattacagcggcgagggccgccgcagttatacatgaaacattcggacacctggacgcgaagccgggagagcagcataaaggctggttcgtctttatcaacggtcaacatggcgatatggacgttgtttacagcgactttccaacgttcggcgaaggccctggatatttcactgacagagagaacttcatctggcagttaattcgtgatgatggtccatgttctgttatcggaatctaccggtttgatggtgaatatcgcctgcccaaaagaaaaggtcctgcccgtttcgttggcaaaaccatctgcattcagacattcggggagactgagtga

SEQ ID NO: 248909 - DNA, 1404 bp, Klebsiella pneumoniae; identical to SEQ ID NO: 138599

SEQ ID NO: 248910 - DNA, 993 bp, Klebsiella pneumoniae; identical to SEQ ID NO: 5753

SEQ ID NO: 248911 - DNA, 2124 bp, Klebsiella pneumoniae
atgaagaacgctccgaaccttaaacatctgccaaaggaaaaatttactgaggcaatcatttttgccgggactgatgcctatgctcatgcaaagggatgggaagaaggtatgggtaaacaaattgccgaagatacaacgccccctatctatcttgggccaaagcaactggcagagctggataacctgcaaattgttgataaagggcgccgtagcgcccgtgtgtatctggccggaaacatcgagccgatactgattaacgtcattggtgagaagctggcgcgggccggagtacaggacgccagactgtataagggcattcctgacaggaacccggaggactggcgagactatctgaaccggttacgggaggaagccaaagctgaggaaagcaatatttgccagttgccagtaactaagcgagcaccaaaaaaagaaacgggcgatgaacttaagccgcgtgtcgaaagccgtgatgatggcgttttctggatcactccgaaggtcgataaagaaaccggagagattattaaccctgaaacgtggctgtgttcccggatcgaggtggtgggttcaggtagcgatggcgcagagcgctatctggtgttgaggtggcgctctccacgtggccacgaagatattacgcgggcgatcccttgtgctgacattggagagcgtgacgggtggcggtcgttaaaggctggcggggtaaacgtcacgaccaaaaacacattccgggcgattctggctgactggctgcaacaaagtggcaccgggcaggaatggcgaatcagccacacgtcaggctggcactatggcgcttatgttatgcctgatggcgaggtcataggtgagcctgaaacgccgatactgtttaacgggcgtagtgccgctgccgggggatatgacgttacagggacggcggaaagctggcgtaatagcgttgcgcgtcttgcgtgtggtaatccgtcaatgatgctgggcgtgtcggcatcaatggcagcgccgcttatcgggctggtgggcgctgacgggttcggggttcacctttttgagcagtccagtgcaggtaagacaacaacggcgaatatcgccagtagtgtatggggcgttcctgatgcgttgcgcctcacctggtacgggacggcattaggcattgcaaacgaggcagaagcccacaatgacggcttattaccgctggatgagataggccaggggagcaatgcccgcgacgttgctacgtctgcatatacgctgtttaacggagccggaaagctgcagggggccaaagagggtggaaaccgggagttaaaacgctggcgcactgtggcgatcagtaccggggaaatggacatagaaacgtttctttccgctggtggactcagggtaaaggccgggcagcttgtgcggcttttgaatatcccgatggagaaagcaaccgtattcaacgggcaacccaacggtaaagcccacgccgacgcgctgaaagaggcatggcttgataatcacggagcggcggggcgtgaatgggttaaatggctggcaacccaccagcaggaggcaaaacaggcggtcagggatgcgcaggaacgatggcgcggccttattccggctgactatggggaacaggttcacagggtcgcagaacgctttgcaatactggaggccgcgcttgtgttgtcctgccatataaccgggtggagtgaacaggccagccgtgacgctatccagcacagctttaatgcctgggtgaaagagttcggcaccgggaacaaagagcaccaacaaatcatcgagcagtgcgaagcgtttttgaatacctacggatttagccgttaccttccatacccggaaagcgacgctcgcgatctgccgattaaagagcttgcggggtacagaacgggaagtcagtccagtgatgaagtatttaagttctacaccttccccgcggcatttgagcaggagatagccagaggctttaaccatacgcaatttgccagggctttagccagtgccgggatgcttgagaccggggataaagggaggcacaagaagaaagcactacgcaagatgggcggcaagcagcatgtgttttatgtgctgatgttctcacctgatgatgagtaa

SEQ ID NO: 248912 - DNA, 309 bp, Klebsiella pneumoniae
atgaaaaaggtgctaaaggatttctatcagatacaggatgctcaggggaatgctgtatatggacatattcataaaaaacaagatgttgatgaatggttatatcattcaccatccaatttacgtgattaccgtttgaagaataatcactcattaaacctacacaaagagagaggggcaatagttgactatgttctccccgcagatgcaactatagactgggataatctaatgttgactaccatctatgccgaggagtttaaattagtttatgtcgaacctttgtctttcttaagtgaccctcagaattga

SEQ ID NO: 248913 - DNA, 939 bp, Klebsiella pneumoniae
atgaaaatatttattagctggtctggtccagaaagcttaaaaattgcaaaaatacttagggactggattccaaacgtgattcaagctgtgaagccatatgtttcagcagaggatattgataaaggaacgcgatgggctgctgacatatcaaaggaactagatgactcattatatgggattatctgcttaacgaaaggtaatatatcagcaccatggataaattttgaggcgggagcgctaagtaagaaagttgataagagcaaagtaagccctttcctgtttaaaattaaaccatcagaggtgacgggaccaatattgcaatttcagcacacacgttctgatgataaagaagatatattaaagcttgtatcttctataaataaacagggtgaatttcttacggaagagcgcctgaatagttcttttgaacaatggtggccaaaattagaggctgacctttctggtgttattgactccgaagcagaatcgaaagagcctgctaaacaaaataaacatacatctaatgcagaaatacaaaatctatcgcagatcgttgaaagtctcttagatatcagcaggacaaaccatcaactattgagaaatccagaagttttgttgccagaagaatatgtcaaaaagattctggggaaaactactaatcaagaagtcgtaatgactaatgttactaatgatctagtcgattctttaagtcatctatctaggttgagaaggattatccttcgcagttcaaaggatgaggcagcaattaatcattatttggaggaacttgaatctattattgattcactttctaaaccagtagattacatgcagaagaagtttttggaagagtcgaccacattacctagaacaattcgccttagaaggcgacagctcaacctaatggacgaccctgatagtgaaggtcgcggtaactaa

SEQ ID NO: 248914 - DNA, 903 bp, Klebsiella pneumoniae
ttgaataacgcagtactcgaacttttcaacgaccgcttaccgcacaagccgtacttttcggacgatctgcactttggtgtacgcattgccggtaaggaacgcgccattctggcgaaatacatccagttcaatcagcctcacgccatgttctggctgggattcgacgtcgatcgcgccggtgccgctattgactggagcgaccgcaatgcccccgcgccgacactgacgatcaccaaccccgacaacggacacgcgcacctgctgtacgcgctgaaaacctctgtacgtaccgcgccggacggaaaaatgaagccgctgcgctacgccgccgccgtggagaatgcgctacgtaaaaaattagaggctgatgcggggtattcgggactaatctgcaaaaatccgaaccacggacactggaaaatcgccgtatggcagccggaactctacacgctggactggctggccgacttcctcgacctgaactccgcgaacgacaaggaaatcgtcgccgactacggcttaggccgtaactgcacgctgttcgacaaaacccgcaaatgggcataccgcgctatccgtcagggctggcccgagtacaaccagtggctacaggcctgctatgaacgtgccagcgcctataatctgcaatttgcagcgcctctggatgaaaatgaggtgagcgggatagctaaaagcattgctaaatggacaaaaaataaatttaccgaagataacttcgccgaatttgtatcagctacccacacgcctgaaatacagagaaaaagaggggttaagtcaggtttgtctagagcaataaatagcctagaagctaaagccccttggttaaatatgggtgttagtcgaaggaagtatttttatcttaaaaagaaaggtgatttatga

SEQ ID NO: 248915 - DNA, 210 bp, Klebsiella pneumoniae
atgaaatccatcaaaactttcgttgcagttgccgctctatccatgatgtctttcggtgcttttgctcagagcgtcagcgctaccgcctccaccctggatcgtgctgaagcaaaaattgccgcacaggccgctgaacaaggtgcgtcatacaaaatcaccagcgctcagttcaataaccgtgtccacatgacggctgaactgaccaaataa

SEQ ID NO: 248916 - DNA, 183 bp, Klebsiella pneumoniae; identical to SEQ ID NO: 230359

SEQ ID NO: 248917 - DNA, 1701 bp, Klebsiella pneumoniae
atgagcctggctagaaagttaagagaaaaaagaagtaatccgattcatagtgctaacgaggactcctctggaggggatagcataaaccaaataacctccagacagtctatggatcttgttataggattttgcggtgctgttggctcaggaataaagtcaattgttgatgtgactgaagaagaactagatgatctaggatatgatgtttatcgcataagagttagcgagcttatgcaaaaacttttttcagaatggcgtgatgatattgttactccgtttgatagatatcataagctgcaagattttggtgatgcgttaagaaataaatattacccacatatactatctgaagctgtaatccatgaaataaaaatagaaaaaggcattgacacctcaagtaaaaaaaacaaaaaggcttttttggtcgatcagttgaagcatcaggatgaaattgaacttttaaggatggtctaccaacataatttttatttactaggtgtaattagaagtgaagtagaaagaaagcgtaatcttagagatgaagggctgagtaagtcagaagtcgatatagttattcatcacgatagaaaatcagagagcgattatggtcagcagactgcgaaagctatacttgactctgattattttgttaagaataatcaaggacaaagggcgcaccttaaggctaaggttaagcgttttattggcttgatacatgggctaaatggtttaactccaaccacgtatgaaaaaggtatgtatgcagctcattcagcatctctgcaatctgcatgcctttctcgtcaagttggtgctgctatattggatgttaatgggaatctgatttccgttgggcgtaatgatgtacctaaattcaatggtgggctttatagtgcggatgatggtgtcaatgatcatcgttgtgtatacaaaggtggtaaatgttataatgaagttagaaaactaaagattaaaagcaaaatttcacaaatacttatgtcggaaagcgcttgtgaacttggtgttaaattaacagaagatcaagcagagcaactggctgatgtaatatataaaaaaacaccagtatcttctattatagagtactctcgctcaattcatgcagagatggatgctattacatcattagctagactaggtaatggaggtttttctgataaagttttatatacaaccacatttccttgtcataactgcgcgagacatattgtcgctgttggaataacaaaagttgtttatatagagccatatgaaaaaagcctcgctttagaattgcatgatgatgctataaccgaggtgaatgagcatgggaaggttatatttgaatcctttgaaggtgtatcacctcgtaggtatcaaaaattcttcttttctacagatgaaaggaaagatagtttcggtaacgcagaaaagtactccactaaatataaaaatcacattgatatacagtttattgatagctatttagatttcgaaaatcgagtcgttgatatttttagaactaacacaaatattgattctggcaatcatgtcgggagaactgattcgactattaatttatcttcccagcccgtaccgcccgtaccgcccgtaccgcccgtaccgcccgtaccgcccgtaccgccagtaccgccagtaccaccagtaccaccagtaccaccagtaccaccagactcgaaatga

SEQ ID NO: 248918 - DNA, 192 bp, Klebsiella pneumoniae
atgacgaaacaacagaaaacagcgctgaacatggctaaattcatccagaatcagtctctgttcctgctggagaagcttaacgagcttgatctcgatgttgaggccgacctttgtgaggaactccacgatgatgcggagcatcttttccgtacactgtcctcgagactggatgcattacaggatggtaactga

SEQ ID NO: 248919 - DNA, 1764 bp, Klebsiella pneumoniae
atgaacgagctaactttgaaaggttttcttagtgatgagcagataaagtctgtattgcatgaggggaatgcagtggtaatggcttgtcctggaagtgggaaaactcggactttatcctataaaattgcttatgaattatctaaaagcaaagtaaaccgttttataattgctttaacatatactaatagcgctgctgatgagataaaaaaaagaataatggagttgggtgtttctattgataacttatggataggaacattgcattctttttgtcttaaatggattattaaaccttactctgctttatgtgatgaaaccagatatggatttaaaataattgatcctcacgattcggaagaccttaaattacagttatgttctaaatacagtagagactatttcaaaacggattttggctggtgtgaatacggattgagagaaaaagataagcatgggaaagaagttgttgaaaaatattatgaatgtttaagggatagtggctttgtcgattttgaacaaatagtatatctttcttataaagttgtcagcaataaccatttcgttgcaaaaaatctttctaatattttcgaagtagtaatggtagatgagtatcaggatacccaggtattgcagtatgagttattgttttctctactgaaggtaaaaaggaatagctgtaggttgttttttgtaggagatcctaaccaggcgatatttaattcaatgggaggcgttgctttagattttgatttgttttcttcgcgcactggagttaaatttgatttattgcagttaaaagataattatcgctctagtcagcaaatagtggactatttcactaattttagaacggtggccggagaggcatttgaagcatgtggagagttcagaaactataagtcatcaattactttcgataattcatgtctgatggaagacctagattcaaatatttctaaatttattgctggagctattgcggaaggtatctcagttaatgagatttgtgtaattgcaccttggtggtatcatctttcagaaatcacccgaagattgatggcaataatgccagatgttgcatttaacggtcctggtataacgccaatatctcataatagagaaagtttatggtataaatttgcaaagatagctctcattagcccttctccgtataactacaggcatcgaatttcaactgccggagaaatatttgagcaattgattgatgcaggttttttcattgatttgaaatcatgctctccaaaattgtttttaaagcattgcaatgctgtcaaagttaatgagattggtggcgtggagtatttgagtgctttctttgaaaaggcctgcctttattttgattttgatgtgttaagttcaaatgaatttactgattcttatgatgcttttttttcttcagctgaaaaaagaaaagaaaaattaatatctctaaatcttgcagtgcttacctcagtagaacattataaaaggatgtttgaaagggaaaaaggagtcaccgtaacgactattcactctgcaaaaggattggagtttgattgtgttatagcatttggattattggatggcgttatgaataaatttggtgaggaaaatgatcactcaaaaagattactttatgttttaagttcaagggctaggaagaaattgcatctaatatccgagggtgataggaggtatagtagggggttttattctgttaacaaggctcttggtagtgttaattatgactacacagcttcataa

SEQ ID NO: 248920 - DNA, 2142 bp, Klebsiella pneumoniae
atgcatatatctgaacttacattaataaattatagaaatttcaaacaaagcaagttcttttttacaaaggcaattaatacagtgattggggagaatggtacagggaaaagcaatctttttagagctataagattaatgctggatgatgaaatgctctttagggcatataaattagatgaaaatgattttagtcacgagttaggcgattggaaagggcactggataattataagtttgaagttctctgatatttcacatgatgagtctgtacaatcacttttcattcatgaaagtggtgacgtaatgaatgatgaaggagagtatattcaaagtgcaacatataatcttatttttagacccaacatttctaagcgttcagagttggctgaaattcctcatggtgattttgtcgaattggagagggtgaggtctgaaataaaaatttctgactatgaagttatttttacaggccgtagttatgctgatttttatgataaggaaatatataagaagattgtaggtgatttcgacaagtgtatttttcccgataagattgatgtgaaagatgtagggtggaatcttggaaggcagatttcattgtccaaagatgtctctttcacattcattaaagcgctcagagatgttgtttcagactttagtggcagtaaacgtaatccgttgcttgagttacttgaattaaaaagcgaaaacttaaatgacgaggactacgaaaaaattattgatgatgtgatctctctaaacagcgaaatagaactattgcccgatgttattcaggtatcggaaggaattcactcaactattaaatcgacagttggtgaagcattctcaccaacaaaactcataattaaatctaagctaccggaagagcccaaagagcttttaaaatcactaacccttagtgtgagtgaaggtagcgagtattttgatggtagcatcagtgacatgagtttgggaggggctaatctattatttttgacattgaaaatattaaagtataaatatcttatcaataaaggtaaggtggctaatttcatattaattgaagagcctgaagcccatttacatactcatatacaaaaggcattgttcaaaaatttaaactttgataatacacaaattatttactcaacacactccacccaaatatcagagtcatctaaaatcagcagggttaacattatatcaaaaaaagaaaaagcaaatgatgttgatgtatgccaacctagcacgggtcttactccacaggagatttctaaattagaacggtatctagatgcaaagcgtgggaatttactttttgctaaaaaagttgtactagtcgaaggtgatgctgaagaaattatgattccagcgatgttttttaagcattttggaatctctcttgatgagttaggtgtaacgattgtgaatgttggtagcactggttttaaaaatattgctagcatttttcatgaatctaggctgagaaaacgttgtgcgatcatcaccgatttagataaatcaatttatagttcaattaaaaaaactgatgggaagattttacatgctaaaaaacgaaaggcagaacgttctgaaaagttagggaaggaaagaaaaaaaatattggatgatttttgtaaaggcaatgattatgtaaaagcattctttgctgaacaaactttcgaagtcgaatttataaattttttccagaacgagacgtatcttaaatcagtggtgagcgaagtttactctaatgaaaacaaaatattgacagttaataaagatttgagttccccttcaattgaaatttgcggcgatcgtgttttgtctgtggcaaaatatatgggcaaaggctggttggcattgatgctggctgataaaatagatcataatgtcgtaattcctccatacattttagatgcactttctttctctatcggtaagttcaatagagtaatcctcatctcggtcttgaagtataaaagaagtaagcttggagcggatgaaactaaagacattgctccagggatagacgagatattagataagttaaatggaaaagaacttttgcagagacaagagattcgtgatcttatttctaaggtgtttggtattgatgatgctttagtaaggatgatatag

SEQ ID NO: 248921 - DNA, 519 bp, Klebsiella pneumoniae
atgacatcacgcgaaatcgagttgctgaccattgccaagctggagcatggcggccaccagctcagcccagcagaactgcgggaactgaaacgcctgttggcagagggaccagtgatagccaggcggtaccgtgaaatgatgatcggccctgcataccgctggaacaaaccctcgccgctgcgtgctaagcgattaacaacatcccaacatcagacaagtccagtgctggtggatttcatccatactactcccatccatagtgactattcgtcagtgtgttggttcacggcctctctttgttggttcaaaaccgtgtggtgttggttcacttttttgaaaaatattcaaataaaacagagatctttaaattttgaggcaactgaaccaaccgaaccaacactccctgtatgtattatagataaattcgttgatgtgaatttctccactgcatgtagtcacctagtagccaacgtgaagagcggccaaattttatcggtggtggcagcttacccaacttga

SEQ ID NO: 248922 - DNA, 441 bp, Klebsiella pneumoniae
atggaagaaataactagacgctccagcaaaaatgctggcgatgcgggtgaatattacgttgcctatatgctttctcgactgggtatcagcgcagcactaaccaccagcggaacaagtgctgtcgatataattgcgacgatcaacggctcaaaaagcattagcattcaggttaaaggctcttgggcaaggagtcagccgcggcaatggatggtaggcaagcatatgcctgtagtatcgtctgatttattttacgttttctgtaatatatcagaagacatcaacatggagagtacgcctgaggtattcatcgttcctagcgaaatagtgaaagccgtttctacctggcaacatagcgtaccgttgttcaaaatagcgaaaggccaagataaagaatttcttaatcgctgggattatattatagacgcactcacagcaatgtaa

SEQ ID NO: 248923 - DNA, 1062 bp, Klebsiella pneumoniae
atgaaaaagagttataatcattggcttgatttctgtagggcatccgcaattattttggtgctactttcacatggtaggtatttcttacttccgtcgctccctcaacttaacttctttaagttcggtggattccttggcgtggaattattcttcgtcctatcgggatttttaataggtaaaattcttctggaaaaagtagacaattctacttccccgactgactgggttatgggattttggtgtagacgctggcttaggacatacccaagttatttattattcctatgcgtgaatttgatattactattaaacataagacctgatttattcccaaacactattaaatacctgactttcacccaaggattattaactcctcacccgacattttttggtgaagcatggagtctggctgttgaggaaattttttatttcttaacccctgtaatattctcattcttcttgtggctatctagaaacaaagctctatctctaaaaataacaattatcgcgcttttaacaacacccctcgcattaagagtttatgcagcgtttgattcacagctatcatttaacgaaataagaacaatatcaatatttagaatagattcaatcatctatggagttttagccgtcttgtatttaaaaaaatatggcaacaaccatttaaacaaagcgggaatgttattagtcccgatatgcatatacatttcctccaaggaggattcttacataaatgacaacacgtttttaaaaatatttctattccccatagcaaacctaggttttgcctgcttaatctgcactggcttaagcattaatttcaataaatacattgcaattattttctccaacatcgcaagatggtcttacgctgcatatttagtaaacttacctgtattattccttattaaatatttacttcccccaccagcaacctacgctgaatgtttttcgcaatggttattgtttatcacagtaacgctggcaatctcatgccttatttatactgtatttgaaaaaaatatcttacggtttagagataagcttgttgcctcttaa

SEQ ID NO: 248924 - DNA, 279 bp, Klebsiella pneumoniae
atgactgatatcaccgaactaactagcgtacaaaaaaacgctaatactcaccgtttatccaggctctttgccttcgcaccgaacgaggagttacggcaactggttgcggaggttgagcaatatacggttcagctcatagagacccaggagaaggcgcaactgcgtatctccgagttggagtgtgctctgtctgaatggacagactgcaagcatgatggggcatcctactacgacataagcggccaagagcgctgcgggagatgtggtgcggatctatga

SEQ ID NO: 248925 - DNA, 834 bp, Klebsiella pneumoniae
atgagacttccattggtactgaactcattttatcgagtttttgcgcagaatttacctgaatccatcaaaccatcaatgagaggtttgtataacgaaataaataaaattctcacatacggattcagagaaaaagatattttcacagctcttgattttgaaataaattctcactgcaatttagaatgcagttattgccctgcttcatttaaggatggcagaggcaagcatctaatgccatttgaaactttcaaaaaagccatcgatgacctttccaggataaattattctggaaggatatctccccatttctttggagagcctcttcttgatgacagactaccagaactaatggcatacgccagggaaaaactaccaaatgcagaaataataatacatacgaacggtataagattaagcaaagaaaaatatgatgcttgtatgtctgcaggggttactggcttcctggtaacaaagcatacaaaaatgatgcctaaaaacatagttgatatagtagaaagcaaatacgcagagcacggaacaataaaagttaggtcaattgagaatcttactttatttaatagaagtggtttagttaaaccaaaaaaagaaagaaaaatgaaacgatgcttttatctctccgatgaaatctcaataacccacacgggtaatgttgtttgtactaatgactttggagaaacgcacgtatttggaaatgttaatgaatataatctgttagatatctggaacagcaatgaatttaaaacagtaagaaaagaaatcaaaaaaggcatattcaatcttgatatgtgtaaaaaatgcgcgggcattaaatag

SEQ ID NO: 248926 - DNA, 1254 bp, Klebsiella pneumoniae
gtggtaaaatatataaatatcagtatcttatgtgtttcattgtgtgcctcgtcaatttctgtcgccagcgatgttaccggcttgatgggtagagcgtcccctggggaggtgtcagatatctatgcttctggtatttatgcgtcaggtgatacatatggcatgagagctacgtcagttattggcgcttttagggctaactcaaaaaaaccatttgattttccaatatccggattcagatacaccaaggagatgtctcaatataagggaagggattctgttgcgttatatgctgacaacacctcaccaccattcagaaagtgggaggttataaagagcgcacggtatacaccgacatctttttatgcagatggtattgatagcagcaatgtaaaaaaaggcatgctaatcgatacgatgcataatccaaaatggtcatctatagttgtcagttcatcaaatgggaaagtacaaactacggggtgggtaaatacagccactggacatttaggaaccccaccggatggttacggcctcgtaataaatccaataacaaaaatatgggctgcaaactttaatgcattccttgaagagaactcccaatctaactctttagttgttcaggaaaatggggttgtaaataataagctggtaaatccaatggcagtaaatggcattgacactgtcatactcccccagtctaagcatggaggaacggccgcatatctcgcaaggtcagccactggaggtaacagaggtcagtgggactatggctttatgtcacaaggagcaaaggatgctaacttcattagctatgatgttttcgacggcttgaacaacactaatgcagcattcaaagatacgtcaacctctaaatatggcatcgtattctccggtaaaaacaaggaagcatctatagcgtgggagtcaaaaaataaaattgttgcatacataggtagtgaggggcttatccaaaagataggatataaaacatcgataataaaatcagacgcaaatcttaatgattcattcgggaggtatttaataatagcaagcggttccatttcattacagtttccaaaaatagaaaatttaattgatggttataccctgaagataaccaaaatatctggtggagatgttgagttaaaatcacctgatgggctgaaagtaaacggctctccatccttcacgatcaaagaaaaagcgtggaacaaagaggctatttacacatcaggtgagtggtttattgaatag

SEQ ID NO: 248927 - DNA, 1197 bp, Klebsiella pneumoniae
atgaactcaaatattgcaataagaactttcatatatatatcagtaatactgccagcaggttctatctttggcataaatgtaaaaatgttgttgctgcttattgctctatgctctcttttgcagccaaaaaacaaagtcgtattatttgatttgataaaatattccgtgcctgtttttctagttatgtcgtttatagttttagtaacgatgataatttcaagtaatgatgaatatatcatgactcaaacgaaagatatagtcgttttttttatatttccttgtttgatcatgtcgatatgcaaagataaatctaacgtctcgacaattataaatacaacaattaacgcgttattcgctgctggattaataaaagccgctgttatagtctattcctttatgtcaggaattcccgtttcaggagttgtaagtttaatatcatctttctttaacgtttcaataatgagtcttgatgtcgactcatcatatctaggaagggtaaacttcccatcagatgctgcacttcccatcgctatattcatggttatgaataaaataatgaacagctcatcagtgaaatctgactatttgaaaataggcgtgctgtttttctcggttctaataggcatgtcaaggttctactgggccgccactatggtagccatgtgtttttcacttcttttaaatataaaatcaagaaaatccatgacactggctgttttatgcgttgtttcattattttacgcatcaactacagaacctgtgcaaaacatggtagctgcaaggtttgacagccgtaatgttgattactctgatggaataaggacaacgcagttaaatcacatgatgacaagaattgatcaaaacccaatgcttggtaaagggcttgggtattacatgcctgagtacataagggggtatgatgcaaaatactcttatgaattgcagatacctgcacttgtaatgcaaataggttacgctggcgtattattattatttatcttgataatcacccccgttatttcagttgttaatggaatggcgataacaaaggcattctttatattgtcaatgttttcaatatggattgcttcaggtttttttaacccagttctgttttcatcttcagggggtgttttatacaccatgatactacttgtggggaaacacctaaaaacaaaacagatacagaaatactag

SEQ ID NO: 248928 - DNA, 591 bp, Klebsiella pneumoniae
atgaagaatcactttattgcgttaactggggcatttaaagacctgcctatacctgaaggggctaaacctggcgatgaggttaaatttaaaattgactatgcagatcaaggtgaaaacagcttcatgacttttgatgtctactcagtctccctcgcaggagacgagacgccaaaggcttctacggtagaaacagaattacgggaaataattaccgccaaattacgcgatgagatgggatggaaagcgtgtggtttcgccgcagatattgccgcagatattgccagctgcattagcccgcatgaagaaatggggagtttagcccagcttgggcttgcatcacggaagtatatcgccgcactcgatttgattggtcacgctgtgcgagcgtcaggagtgggcggtgcaggtgacaacatttttgatgtggctgagaagctgatgagcggtgaaagcgaagcaaactctaaaacggcggaacaacggaagacatggaaaatgaaccactgcatacaccccgaacagccaaatgtgaatgacaatggctcggtaatgtacccacacgcaccactggacaagccctgcatgaaatga

SEQ ID NO: 248929 - DNA, 189 bp, Klebsiella pneumoniae
atgaaaaaaccacagtacatcatcgacggtaataccgtgacctgcaccgtatttaatgagaatggtgtttcgtttatggctacaactcaggccacagacgatggcgatttatctcctgcaatggcgtcagctttagagcaggcagagaaaacacgtaacgaatatgaaactgaaactaaagaggattaa

SEQ ID NO: 248930 - DNA, 255 bp, Klebsiella pneumoniae
atgctcaatcccaaacagctgcagcgcgtgctgctgccgataatctcactggtactgttaagcaactgcgccagcaggcaaacacccttgcaatccgcctggacgccgcaaagcacaccgcaaatcttgccgctaccgtcagaagcaaaacaaccggtgccaccgccggaatgctcgccgacatgcttggagaccttgcagaagaagctagacgttatgctgcaatcgctgacgaacgctacacatcaggaatga

SEQ ID NO: 248931 - DNA, 192 bp, Klebsiella pneumoniae
atgctaaatcagcaggatatgacggaaaaggcccgtgctgtttttaacactttaagcaatgagccggccacggttggggagattgcacagaatacgcacctgtcgcgcgaatgctgccagttaatactgacgcaactagtgatggctggtttatcagaatctgagtttggatgttataagcgccctcaataa

SEQ ID NO: 248932 - DNA, 981 bp, Klebsiella pneumoniae
gtgagagcgttacttacaccagaaatagcccctcgaatgggtgttgtcctgttccgtcccggtactgaacttttaccccttttcagacgtgggagggtactcattgagccggagccggagaattattcagagtatccaacgggggcaattccacctgccagccagccactggcagaggacccgacgctattaactgtttttgagaacccggaagttatcattcgcgctggtggtattggcggcctggaggctgagcttgagcgtagttttaaatgccagtatccacatgggacctggcatagcgagaacttcacgctattccgtcatgagcctggcagcatccggctgtgctgggcctgcgataatctggttcgtgaccagtacaccgaaacactagcgggtatagcgcgagtaaacctggtatcctggatgatatccgttatccgctcacaactgggcttcaacgaagaccatacgctgactattcccgagctgtgctggtggatggtcatcaacgatttggctcatgtgataccggaggggctggctcataaagcactgcgtttaccaccagttaagcatcagtcggtgatgaaggagagcgatttaactcctgggccagcagctgctgaagtagtacagaaaaagattctggcgctgcgagtggatccggaaacacctgaatcattcatgctgcgaccaaagcgtcgccgctgggtaaacgaaaactggacacgctgggttaagtctcagatttgtgtctgctgtaacaagcaggcagatgacccgcaccacctgataggccacggacaaggcgggatgggaacaaaagcgcacgacctgtttgtgttgccgctttgcagagcgcaccacgacgagttgcacgctgacaccgtggcatttgaacagaaatacggctcacagctggagctgatatttcgatttttggatcgttcgctggcaattggcgtgctggcgtaa

SEQ ID NO: 248933 - DNA, 342 bp, Klebsiella pneumoniae
atggaacagacagtgaagctgaaaccgaatcttagcctgaggcaaaaagaagttcttaatattatccgggcttatcagcgtgagcacggatttccgccaacgacgtatgagctggcggggctgatggggtgtagctccccaaacgccgccgctacccatctgaaagcgctggaaaagaaaggtgttattacgatctctcgcggtgtctccagagggataaaaattaacgagccgccacaggaagatctacttatctctttgttgcaatcgctggtggcgggtgatgaatacgccagagaacacgcgatcctgtttctggagtctcgcggagtgaaggtatga

SEQ ID NO: 248934 - DNA, 399 bp, Klebsiella pneumoniae
atgcacataacagcacagcagctgatacgtgaagcatacgaggcagctaacggccttccaccagcatcagcagcacttgtaaaagagctggcgtctcgccttgatatctcgatggcggccaccagccaggcttgcgatgaacgctccgccgcaatcaatacccttaccgctacccgcgttaacagcgaatgccctgaaggggttgatgtccaggagtgggttaaacgggtatatgccgaaaacaaaagcttgagatctgaggtaatggcctgggcgaaagagtgtgatcgcattgttgaacgccacacaaaaacccgcagcaatatgcacgtcctggaagctatgcgcgatttgaaaaatatctcttcctcatgcaccggcgatgcggaggctgtctga

SEQ ID NO: 248935 - DNA, 504 bp, Klebsiella pneumoniae
atgaataacgacggattaacacttaaccaactggcagagcgtaacgcagtgctggtttctgaggtcgagaaattacgcaccgaacgtgaccagctggctgcggagagtgtggggctgaaggccgcaatcaatgcggtaaacaggaccgcggaggagtgcgaggttaacggcgacgaattgaaatacgttgtcgagccgtcagagtttgaggcgttgattgattttctggacgaaccccccgcaaccgatcgcatctatgccgggattaaggctgatggtcgcgcagagggtatcaactttgctgcaagccgccttgccgccgctttcaatcacggatttgttgataagccaatggcagaagtttttgacgtggtgcgaatgattctgactgcaaaagaggatttggcgaacgacccggtcttagctgccgatggcctgtcaggtgagtacgcagaaaaagccctggctgaatgggagattgagctgcgcgagggggccaaatga

SEQ ID NO: 248936 - DNA, 171 bp, Klebsiella pneumoniae
atgagcaacgctgaagatgtaagcacctcacatgaatgcggccaaaagtgccgttgttactatcatcccagcgaacgaaaacagcatgtttgtgtgtcgcatgaagatgagtttgacgatcacccggctgatgaaatgagccagtaccaggaccattcatatgacaactga

SEQ ID NO: 248937 - DNA, 795 bp, Klebsiella pneumoniae
atgaccagcaaattaaccaaactgactgacgacgaacttactgagactctgcgcctggcaacgtccggctacccactaccagcgtgtgtggaaggtaatctccgtcaggcattcgcagagctacaggaacgccgcaaggccgacagcgagccggtggcgtggttggcaatttatcacggagaggtatacgacgatgcgatcggcattacacgctctgttgttgaggctcaagcggatcgttttggctgggagtctgcgttgacagaaattatcccgctctatcgccacgcgcagccagcgccggtagtgccagatgagcgagcagctttcaacgcctggaataacgaggacaatctaccaattgctggggtgagcgctaaaaatgctgcgtggctggcctggcaagcccgcgccgagctggctggcaactctccggcactatctccgtcacgcgagcacttcatctccctgtgcaatgagttctggggatggtcagatatggacatgatttgcgctgatgacaagggttatgagccgcggcttgaatggaatggtcagtcctttacgcatcccgtaacgcgggggctttggcgcatgtaccaggctacccccggcagctctccggtaattccggatggttacgtgatggtgccgattgagcccacagaagcaatgatgctgcataaatcaggttgccaacaccacgcatgggatgatccagattgcgcaatgcgccagacgcgccagttagtttggtcccttatgatcgctgccgccacgcaggaggtgaagtga

SEQ ID NO: 248938 - DNA, 279 bp, Klebsiella pneumoniae
gtgaaagcgaataagctgaagcgtcgccgctggcggcgcatgcgggacgatctggcatggttcaaagctgaagcggaagactggaaacagatagcccttgagcatgcagatgaaatctttttgctacgaagccagcaactgcgcgtgccaatgccggtaattgtgcccgcagaaatatacaaccaacttaaaggagtgatgcaagaccaccagctgtgtaaaaggtgtaatgacggactgcgtgggggctgttcgtcttgttcatatagtggcagataa

SEQ ID NO: 248939 - DNA, 1164 bp, Klebsiella pneumoniae
atgaatgttaaatctgtttatattattatcggattctttatttcaactgatgttatagctaaaggtatttattctaaaacttttggaaactatgagcatgctgttggtgattatttgattgtcaacaatgaaaatgcaaaagtacaggtgctaggatttaaaaaagattcagaacaagcaatgtatcaaaatagagaccatgtgggttattatattggaatgtatggtcctgaggatcagcttatcttacgagaacctgaaatcacgtatagccatgatggattttatgtgcatgatataggatatctcgatagaataaaattaggtatgtttgtatccactatttctgagcctcgtatatatgggcgtattgtttcaatcaatccatctcaaaagtttgtcggcatcaactcttggtacgaacaaggtaaaaatgttaatggaatagttcctcgcaactcagttcaattattgattaattctgctgataaaatatggggtcaaaacacaaatattttcctaactaagaatagttcggctaaaacagcaactggctatgaacttggttttttttcggatgggactcatgggaatcctgtttggggatttcatgctgtaaatttgagtaatcttggtcaaccttttcagcaagcattcagagctacaggacgctgggttattggtttttatagttctagtgatatagatgtggcgttttcagctgatgaaccaaagcattcggctctgcatgtcacaaataatataaacaagcactggaaaggtagcgtgatagattttagtagccatattgatacattaccagaatcttatttaataaaatcctctattaatgataaaattgtctattctgtaaggactgatggtgtccaaaactcagggaaattcgaagttctacgaattgcaaaaaataccattctctcgattgatggaccatcatatataatttgcaataacaggtataccataaatttatttcttcctaagaaaaatttacgtggagttatatatgaagtgaaagcgaattcagagggagtcgtaagagtaaattatgattcatctagtattgttttaagtagaaatgaacgaagttacgtgaagtttattaatgacggtctttcatggattcctttgtacagtggataa

SEQ ID NO: 248940 - DNA, 1044 bp, Klebsiella pneumoniae
atggttttgttttgtttaatatttggttttttttattcaggaagattaaaacgatttatagcaagaagtaaacctggtaactcatctaagtttaatgtttacatggtagcgatgtttataatagctggaacaggcttagagattatttcttctggagcaataccttttttaatggtttttgaaggagtgacttataattaccgtgagtttggtatcgcctcgtttcatgtgtttttcctaagttacgtatcagcatcggcgatcatcggttttgaacgatatatcttgtttgggaataaaagaaatttattactaacaatcttgggggtactgttttctatcattattgtaaacagggctgctatgttgatgataatcctaccttgtttttttatatatttgtcttataatgcaaaagtaaagtctgtagtaagtgtgttactatgttttctgattataatcattacatttggatatataggagataaaagaatggtgtcttctggttatacggacgacaaaccattattccgggttgctaagatagatagtgttgttcttgatagtttaccttctgggttctcttggttttatatatatgcttcttccccttatgctaatttattatatcaggaacggaatcctagatatgataaaggcaatgttacagactttttgaatgtggctattttaccagatttcatatccaagcgcatagatgatactgttaagtctcgattcccaacgattctgattacagatgagcttaatgcaacaaccggcttttgctatgctgcaataacatttggaagtttgggggttattttattatatatatatatgttttttattttaactttattcttgatgttgaatagaaaacgtcatataagagctgtcgctgcccttctttcgacaattacggcatttatgatttttgagaatatgctagtattcgcctcttgcattatgcaacttatattaataactttgttttgttctaaaaagattactttatttggtcggaatgtgaatttgttgtag

SEQ ID NO: 248941 - DNA, 192 bp, Klebsiella pneumoniae
atgaaaaaaccacagtacatcatcgacggtaataccgtgacctgcaccgtatttaatgagaatggtgtttcgtttatggctacagttcaggctgaagatggcgatttacctgctgcaatggcgtcagctttagagcaggcaaagaaaacacgtaacgaatatgaaactgaaactgaaactaaagaggattaa

SEQ ID NO: 248942 - DNA, 609 bp, Klebsiella pneumoniae
atgaagactcactttattgcgttaactgggtcatttaaagacctgcctatacctgaaggggctaaacctggcgatgaggttaaatttaaaattgactatgcagatcaaggtgaaaacagcttcatgacttttgatgtctactcagtctcccgcgcaggagacgaggcaccaaaggcttccacggtagaaacagaattacgggaaataattaccgccaaattacgcggtgagatgggatggaaggcgtgtggttttgccgcagatattgccgcagatattgccagctgcattggcccgcatgaagaaattgggagtttagcccagctagggcttgcatcgcggaagtatatcgccgcagtcgacttgattggcgacgctgtgcgagcgtcaggagtgggcggtgcaggtgacaacatttttgatgtggctaagaagctgatgagcggtgaaggcgaaccagagtctaaagcgggggaacagcggaagactttgaaaatgaaccactgcatacaccttgaaccgccagaggttggttcccgctttagcaatggcgatggcggggtaatgtacccacgcgcaccactggacaagaaccaccggtattgctga

SEQ ID NO: 248943 - DNA, 192 bp, Klebsiella pneumoniae
atgagtgaaaaaacaaaacgagagctggagcttgaaatcgaggtgcgcaaaacgcgagaacagttatttattgcaaatgcctcaatcatggagctgaagtcaattataaataactctgaaataaacgcgttatcacgggagttaaagctactgctgggcgatagccctgaacagggagaacaaaatgattaa

SEQ ID NO: 248944 - DNA, 213 bp, Klebsiella pneumoniae
atggaaacaccagtggcaacgtatgaatttgacatcaatgaatctgagggcactgcggtctgccggtatcagaatttgatgggaatgacgttcagcgcgctcgttaaactgtctgattactcagatactgaggcagcaaaagttgcggcaacggatgcggcaataactaatgaagaaaattacaaaaaaatgatgggaggtaataatgagtga

SEQ ID NO: 248945 - DNA, 183 bp, Klebsiella pneumoniae
atgccggtggctgggtacgtttttaaggtcaggctgtttctggcaggaacctacatctttaatacctatcagggccagacaacaattgacggcaaccctcaactcactgtaacaacaacatccgcccgtcaaaccattgaaattcagtttgatggtactttttggcagacatttctgaggtaa

SEQ ID NO: 248946 - DNA, 1731 bp, Klebsiella pneumoniae
atgatgaacgatccaatgtgtattgtacttagcccatatacactattagctgaacaaacaactaaacgtgatgctgatggtaatctatatccaatgaatgatattttctatggaagtgctacctatgatcaggcagagaaactactaaatgatcatctatcaggtggtgcgaagaacaaagccgcgttgaattatgattacagtaaaatgacacttgttattgatgaatgtcacgtactatataattcaagtaactttcgccgtaaagctatacgtgcggtgttttctattatgaagttattcaagcgtgtaatcttcatgagtggtacagcaagacctgaatatttcagcaatgttcattttgataaagtgattcgtgtttgtaaacactatccatttacgaagaagattagtatctttgatcatcataacgtatatggacttgcgtattctttgattcaacaatctaatctacccggtatcatccttgttaacaacaaagaagatattgaagatattataaaaaaataccctgatttgaaattcaaagaaatcacagcagatactaaatcagatactgttatcaaggatatgataaaacgtagtacggtagatggtagcgattatattatcggtactatatcagtagtagaaggtttgaacttcacagatgaatttccagaagttaacgtattcattatccatacagaacgtacagtgttcagtacagaacaaattgaacaagttacaaaccgctggcgtaacgcagagaaaatcaatacctatgtattccgtcatggtatcgacactgaagaactaactgaaattgacttttcagaaggttcactaactacagaagatttcatccgtgtagctgttgaaaacgcagatatagcaaaccgtaagttatcaaaggcaatggataaggcttcattcagaaacacctatcacaatacatgctttagtgaaatgattcgttttgatacttctttcaatcagtatgtaccagattatcaactaattgattatcgcatgtatgatatccgtagaagtaatgaacaacttgatctacaaatgtatatgtttgaacttgaatgttatggtttcgtattctgcgatacaacatatgctttcagtcttgatattcgtgaagagaaagcagcacaacgtgaagctaagaaacaggcgatgaagaacgcacaagaaaccatcgttgaaaagtacgatgccagtacagggcgttttgatgattcactttcatatacaaatgaagaaaagaaactacgtaaacacattcaagaactattagcacttggggtacgtgacattgtaaatgatgttgttatggtcgaactaccaaaagcaagtaatccacagaagtttctaagtaacatcaaatttgatgtacagaatcgtctacgtggtaacttgattaccgaagaaatcaaaaggctatgggtacaagtcgctaatggtcgtgatttcatcttgaacaatgagaaagaaataatagcagaatccgtactacgcatgattcgtagtgaacgttatgaagatcaactacacatggcaggtggtcagtacgggcaattcgtcaatgatcaagggcagttgaaaacccaaaaatccgctgatacgttcctaaaattgttcgtctgctatgagtcgtacaagaacaatagcgtaaaaggggcgagagggatcaagtttagtcgtactggacttatctaa

SEQ ID NO: 248947 - DNA, 1056 bp, Klebsiella pneumoniae
  misc_feature (939)..(948): n is a, c, g, or t
atgaacagaacaattacaattacaagaaccgaatcagtaaaattcattgataagtttacacaagaagttcgtagtacagggcaacgtgtacagaacacctattctcaagaatgggatgatttctgtaaagtatggggtgatactaacaactggtcagaactagataagaacggcaaactacagcacacaatgtttcttggtggtgcttgttacactaaacgtaatgatgctaatacagtatttcgtagtatgttcattcttgatattgataatcaggaaggtgaagaactaactacaatggaaatggtagacgagtttctacagggctacgattactttgtttacagtacttatagcaatacaccagagtacccacgttttcgtgtaatgcttccattacttgacgatgtaaaggccgaggattggaaagaacgccaaagcgacatgaaagccttctttagtcctatcgtacaggataccagttgctttaccttgtcccagggtcagatcatgccgtgttacccattgggtaaaaaacacttagctttcactaagcgtaatcagggtgtgttctttagtattgatactatccctaaagtactcaagcgtgatcttgtgattgaccaattcaagacatatcaacgtaactcctattcagatgatacgattcttgattatgttgattgtgtaagtatagccctacaaggctctctagaacgttctaaggcgtttatgttcgcgtgctggtgtgtggctaatggtatcaatgatccgcagtacgtagagcgtacattgcgttatgatgccaataaaacagcatatgaacgtgctattgctcacatgataaacgcaagcaaatcattcatgaactattgcggtaacaattaccatatgggtttctatagtaagcatttacccgctgatttctggatcaaacannnnnnnnnnatgctccacaagctgaaaccttcaaatttgatgttacgtttgaccgtttcgcacaggcaaagaaagaagcgaatgaaaaaggttggtcatactatgaattaccagtaa

SEQ ID NO: 248948 - DNA, 534 bp, Klebsiella pneumoniae
atgtggacaaaatcaaatgttcaaaacttagaactaactaaatctggattggttcgtaattcacaaacaaatgaagtaatagacggatacatagcaggacgtggtaaaagacagtacagaatgataccacatgaaggaaatgtatattatctacatcacctaatggcagaaacatttattggtaatcgtccaagtggtcatgtaataaatcatatcaatactaataaacttgataatcgtctagaaaatcttgaatacctaccacatagtaaaaatattgtatggatgccacaggtaaatgaaacactaactgaaactatgatagttgacgcactacgttactatacaagtgatgaaaaactatcaatcaataaagtatgtgattacatgaaccgcaagtacaaacaagattcacatgaaaatacatacattagattgattcatggtgaataccataaaagtactttacagaaatacaaaacactttcagatgctgcgaaactcaaagcacaatccagaagtaaaaaaagataa

SEQ ID NO: 248949 - DNA, 156 bp, Klebsiella pneumoniae
atgaatcgttttacacccgacggtgaagcatttactgcttacatattatttatcaaattctttcaaagtatgaagaatataggaggggatgctttcgtttttttttcgacccgtagcaccatcaactttaagtttgttgagttatctatattatag

SEQ ID NO: 248950 - DNA, 189 bp, Klebsiella pneumoniae
atgactaattttctaattgaattgttcgcaacagtaatctacatgttcgtactattcccaatgttcttaatactcaatctcttctttatgattcttgtagtacttctacttccattaaagatccccgcagtacaaagaaaagtaactaactttgtgaaacgagacaaaaaaagatggtatcatctatag

SEQ ID NO: 248951 - DNA, 1596 bp, Klebsiella pneumoniae
atgaaggttccggtatggtcatatgctcgcgtgtcaacactaagccagattgacggcttcgggatacaaaggcaggtaaacacgattaaccagtttatacagtatatggtgctggatcatcgtctaccgttcacactggatgtagacaacattacacagatggtggcggagggaaagtcagcctttaagggtaagaactggaatccaaatactaaacttggtcagtaccgaaagatggtaatggatggtgtgattaatgattctgtacttatagtagagaacgttgatcgcctggtacgtgtagatccctacaaggctgtagaaatactatccggtctaatcaaccgtgggactactatcattgagattgaaacgggtatgacctattcacggtacattcccgaatctatcacggtactaactatgcaaatcaaccgtgctaacggtgaatcaaagcgtaaaagtatcatgatgaaaaagagtcatgaaaaccgatttggtaacgttagtaaggttcgtccacgttggtttgatgttgtagaaattgatggtgttaaacagtaccgccagaatgacacggcaaaggccatacagcgtatgtatagtgattacgttaatggtattggtgcggcacagatagtacgtacatatggtaagacagataatggtaagccgtggacgctggttactgtactacgtgccttgagtgataagagggtagcagatgatgcccgttacccgcctatagttgataaagcactatatgaaagggtacaggcaatgaaactatctactaataaaactggtaatactcaccagaagaacatgcttaatatcttttccggtatgtcacggtgtgctgtatgtaaacagtcgattatagtcaagcgtaacagtcatggcggccttttcacggtgtgtttaggtaaacgtactgataaaacgtgtgatgctcgtagcatggcttacaatgcgttagagaggccattactagaagcaattaagggtttagatttcagtgaagtttatgaacatgaagaatctaatgtaattacattgcgtgatcagtggattcagaacgaaagagatattgcggcatttcgtgaacgtctaagtaaggcaagccgtcatgaaaagtttgctattctggatgaactggaaactatcagcaaagagcaagaagaattaggtattcgtctaaagtccgtagatgctccaaaggatgtacagattacctataatgacgataagttagatttaaatgtagattatcgtattgaactgaacaacagaatgaagaagttgattcaacatatcaacataggacgtgtcaatactggtaaaagtacttacactatctattgttctattaagtattggactgatacaatcacacaccttgtgattatcgatgccgaaagtgttagaactggtaaaggtggtacaaatacactaacaactacgcttagatctgttagtagtgtaaatgccgatggtacgttttatggtaatccagatatggaagcgttggactactggcatgacgtaatgaaacaagcgtttgaaaaagctggtttagaaatgccttctatttga

SEQ ID NO: 248952 - DNA, 129 bp, Klebsiella pneumoniae
atgttgaaagagtacgtactgaattatgagaagcagcgtacaaatcagggcatgcagaccaatctagccctcagggagaaaaataacgccgattggttgtccaagtgcgacgaactcaccgtgacttaa

SEQ ID NO: 248953 - DNA, 144 bp, Klebsiella pneumoniae
atgcatatacatgacctgtctcatggcgtatcagtgctggcgctggtgaaggattcagtgtcggaaaaacgcatgcaaaaccattcacattatgtatatatggctttctttcgtaaaaatggcgggaaattcatgaatttttaa

SEQ ID NO: 248954 - DNA, 678 bp, Klebsiella pneumoniae
atgaatgagattattttaaaattcccaagcacaccacatttctcgatctcaacgaaaaaagatgtaagaaacgataaagttcttcttgaaaatttacagagagaaatattcaataaagagttaattattgaggagaaaatagatggcgctaatctaggaatatcttttaactcaaacgccgatattattttacaaaacagaggtgcgattttaatacccccattcactgggcaatggaagcctttagagaaatggatatcattaaaaaaagacattctatttgatgtactaggcgataaatatatactttttggcgagtggtgctacgctaaacattctattcattacacacatctcccagattattttttggcatttgatatttacaacaaagcctccgaaaaattcattaatttcgaacaacggaataaactcattgcactcatgggcatcgagactgtcccattgatcaaaaaaggttttttctctttggaagagctgcccaagctgattaaaaaatctttttatagcgactctctggcagaaggtatttacgtaagagcttcaaataatgaggaaacatttttcagagcaaaactcgttagaaatgacttcactcaaaatattattcaacattggagttcacgatctatcactgcaaatagtctgtcatcgtaa

SEQ ID NO: 248955 - DNA, 546 bp, Klebsiella pneumoniae
atgaaaattcctaacaattatattttagatacaaatgttccaaaaactgcaaatttagcagttgatgggactggagttactcttgaaaactatgattgtgtgatgcgttgcattaatttattagaaacgataaccagtaaaaaagacaaaggactagttcttgattcttcagatgaaatatttaacgaataccgaggtcaattgaatcttggcggttcccctggccagggagatgcatttatgaaatggttgcatgataatagatggaacttcccagaaggggatagggttaatattacaaagcataatgattcttatgtagagtttcctgaacaccaaggcttggaaaatttcgatatttcagatcgcaaatttgtagcagtatcctatgcgcacccgaataaaccttgcatctatcaggcagctgatagtaaatggtggggatggaaaaatgcattagcggaagttggtattgaagtgcgttttatggatgaggaatatattaaagcaatttaccaaagaaaaatgggcaatgcaaatgaatga

SEQ ID NO: 248956 - DNA, 1398 bp, Klebsiella pneumoniae
atgtttaagagattaagaataaaagattttaaagcatggggagacacgctagatattgctatggctcctatcactttattttttggggggaacagctcgggtaaatcaagcattggtcagcttttgatgatgcttaaacaaactattgattcaccagataggaaaagccccctgtattctggtgggccacagacagcagttcaacttggttcataccatgaaatggtaaaccaaagagatatttccaaaaatatttctttcgaatacacttgggatctttccgatgaattaaaagttagagatcctatcagcacaaacacgttcctaggtgacgaaatatcttttagcgcatcggtttcttttaatgcaagccaacgtcttgttgaactggcaggatttaattatgaaatttacaaagaaagcaaattaactttctctgttggactaaaaagaaatgaaaactccaaaaatgatttcaaaacagagttttcacattataatttaataaggcagaaaggtcgagtatggtcaattaaagaagcagtccgattctatggtttcccagatgaggttgtggcttattatcaaaatgcagattttgtacaggagttaaatcttcgccatgagcaattattccgttccctttattatcttggcccattaagaattaaaccatctaggttatatccttggtcaggaataagacctgaaagcgttggttttgctggtgagaatacaatttccgccattctctccgctaaagagcgtaaaattggtcttgggtatagaaaaaccactaagccattcgaggaaattattgctcttaagttaaaggaaatgggtctcatagatgatttcatcgtaaaaccgatatctgagaatcgccaagagtatgaagtaaaaatttgcaccaagggctcaagatcttgggtggatttacctgatgtcggatttggtatatctcaagtattaccggttctagtacagtgtttttacgctcctagtggatcggttatacttatggaacaaccagaaatacatcttcatccaaaggctcaatcagttttagccgatgttttaattgatgtaattcggtcgaaagaaaatggtgcagacagaaacattcagctaataatagagactcattccgagcattttctgagaagattacagcgaagaatcgcggaaaatgaaatcagcaaagataaagtatcagcatatttttcagattttataaaagataaaccgacactaaccccattattaattgatgactttgggaatataaaaaactggcctgagcatttcttcggcgatgagatgggtgatataactgcacagtcaaaagcagcaatgcaaaaaagactcaaggagttgaaaaaaaatgaaaattcctaa

SEQ ID NO: 248957 - DNA, 1116 bp, Klebsiella pneumoniae
atgaccttgaaagctttagaaccatataaaacacaaatgatttcccctgatgagctgattttggatgctaaaaatccacggctgtataacgggaaaaatttcaatgataatgcagatccacatgaccttgttaaagcgctttctgatacagcagatttagaagagctgattaaatctatttcagaaaatgggtatatgtctatagagcccttaatagtaatgaaaaagggtgataaatacgttgttttagaaggcaatcgccgtttagctgcgattaaacttcttacagagtcaggtttggctcaaaaatgtcgagttgttgtccctaaggtattagagcctcaagttattgaaagtttgaaagaggttgcagtatacctagttaaagacgagtctgaagctcgttcatttattggatttaagcatgttaatggtccacataagtgggattctttcgcgaaagcgcaattcgcttataaatggtttgtcaatgaaagatcaaccggactaacaattgatgatataactaagaaactcggtgatagtaataacactgtacgatcaattgtgagtgcaatgtttgttcttgaacaggctaaaaaccaagaaatttatgatattcataccgaccgtatgtctcctaagttttctttctcacatttatacaccgcattaaatcgatcagaatataaagattttcttggacttgaaaaggattggaatgtcactcttaaagacaaccctgtaccggttcaaaattctgataaacttaaagatgttttgaccgggctttatgggtacaaaaaagataagcgagcgtcattgatatcgtcccaaaacccagatctaaaatattttggtgaggtgttggctaatgaggtctcatatgaagcttttaagtctggcgttgagagtttatctgaactctacaaacaagcaggagatccccttcagcatattaaagatgcattccttgagataaataagcaactagatactatatcttcagttttggatagaactgattctttagatgatactacaaaaaattatattgagcagttcaagaaaaaagtatccaaggttcaatttcaattgcaaagtattgagggataa

SEQ ID NO: 248958 - DNA, 1020 bp, Klebsiella pneumoniae
atgcagttgttaccttacccagaaagccaccaaatccaagttaaattggattggctggaattgtcatgcttgtctaatgcatattttacagtgcgtatttctgaactaaggaatatactagagaatttagattcgttcacatcttctgatattggcgaggaagatgctgatgttgaaaatgaaattcaacggctattagagcaatatcaacaaagaaaatatatcttggcagagagctatccttttgttttcaatgaggaaactctttgcttagaattggtagaagatagcttggagcaattgacattagatcagcatatttatctgtattgcctgtatttttcacatatgtcagcttctagattgttcagtggattagaaagccctactaaccagcagagagatctgcttcaaatcgctgccactattgctttggccggttactgtcgagggcatagcatctcatttggttggccaaggcctgatcattctgagttttatgcagccctaacaagagctgttggtttgattggtgaaggaagtctcagaccttttgccgatgtaaatcgttatttgcaaacacggcctttaaaagatgcgggtatcgatgttatcgcttggaaaaacactaacccacgtgacaactatccaggtaataaacagatttattttgctcaagttgccagtggtaataattggcgttctaaagcggttaaggaggatatcgaggttgtccagcgtcattggttatcccaaagaatttatcgtgtaattgatgcaatcatcatcccgtttgattttgaaagcgatgatgagtcgataaaaaaagaccatatttcactagttgccgaagaattcggcacagttttacaccgattaagactaccaacttgtttcaaaatggggttggagcttttagcctcagatcctgaattgcttattgagagagggaatgaagttcacaatatctctcaatatgtaattgcaactacagaaattttacaagatgaagcggcctaa

SEQ ID NO: 248959 - DNA, 1008 bp, Klebsiella pneumoniae
atggaccagagaatcctcgaacatgaggcaattaaacagcttagcaagaaatcggtacgcaagttgtttggggttcatgatatcccaagagccacctcaccttttcgctaccctggaggtaaagacaagcttacctcatttttagctatttttcttatgcacaataagttaaaaggcgcacgttttattgaaccattctgtggtggagcaggtgcatctctttcattgttattaggtggttacgtcaaagagatacatctaaatgacaaaaactacgctcttttttgcttctgggaacaattgcttaacaatactgataacctattagatatggtttatcagaatgtcccatgcattgaagattggcataagcaaaaggaaatttatcaggcaagcattagcagccccgataagtattccaagcttgaatttggctttagtgtattttatctaaacagagctaacaggtcaggcgtgctcagcgcaggtcctattggtggcttggatcaatctggaaaatataaaatagactgccgatatacagtcagcactctaattaaaaagcttgaaaaaatagcaagcatgcgagattcaatatttgtatataatgagcactgcattgattttttaaatagatttgacgacaaagcccattttaataatgattttgtttatctagatcctccgtatgtcaaagaagggcgcaatatatattctaaaaatttttgtttcagtgatgctcagcatcgcgagctaaaagattacattgcagggtactctaaccgctggttaatctcatatgatgaccatcctttggtgcatgatctttattcaaaacatggtacaagagctgttgaaataagttatgtaatgaatcaagcaaaagtcggcaaagaattgatgatagctgattctcggttaagaatgccggaatcactgttcacagttgatattcttgataaagttgaaattgctaaatcaacaataaaaagcattaaaacggcctaa

SEQ ID NO: 248960 - DNA, 426 bp, Klebsiella pneumoniae
atggcgatgcgtcttaatgaaaatctggacgataacggcgaaatgcatgagatcaacgtgacgccgtttatcgacgtcatgctggttctgctgattatctttatggtggccgcgccgctggcgacggtcgacgtgaaggtgaatctgccggcctcctccagccagccgcaaccgcgaccggaaaaacctatctacctgtcggtgaaggcggataggagcatgttcctcggcaacgacccggtgaccgaagcgaatatgattaacgtcctggatagcctgaccgccggcaaaaaagataccaccgtcttcttccgcgcggataaaaccgtcgattacgagacgatgatgaaagtgatggataccctgcatcaggcgggatatctcaagatcgggctggtgggcgaagagaccgtcaaagcgaagtaa

SEQ ID NO: 248961 - DNA, 213 bp, Klebsiella pneumoniae
atggaaacattagtagcaacttatgaatttgacatcaatgaatctgaagacaccgcagtctgccggtatcagaatgtgaatggtctaacgttcagtgcattggttaaactgtctgattactcagatatcgaggcagcaaaatcggcagcgaccgaacttgcacaaaccaatgaagacaattacaaaataatgatgggcggtaataatgagtga

SEQ ID NO: 248962 - DNA, 645 bp, Klebsiella pneumoniae
atgggctacgtcaacggcatggacatggttctgctgtccggctctacgcaagatgctacagcggcgtatctcgcacgcagcggagcatcggggctcgcatggctgtacggttataatgcgcagggaagcagatttaactattattcggacgaaggatctgtcacgccatatgccggatttatggagaactcaaacgctatagttggtatgaagttcaggaataaaaacacctactctattgcctggactaactcttccgacctcactgcggtaaatccttcggcgttgacgacaataattggcccttcaggacatattttcagacagccggaaagaatattaacactttctgccagcgggatgcttaatcaattctatccgactacatacgtcaccgttgcgggggtaacaataacccttccggataaaacgcaaatgcctacttctggttatgtgtttaaggtgagactctttttggtggggacctatatatttaatacatatcagggccagtcaacaattaatggcaaccccaaacttactgtaacaacaacgactgaacgacaaacgatagaatttcagtttgatggtacgtattggcaagcattcgaggtaaatcatggaaacattagtagcaacttatga

SEQ ID NO: 248963 - DNA, 1194 bp, Klebsiella pneumoniae
atgagcactttactgaacccctacttcggcgaattcggcggcatgtatgtgccgcagatcctgatgcccgccctgcgccagctggaagaggcctttgtcagcgcgcagaaggacccggcctttcaggcggaattcaccgacctgctgaaaaactacgccggtcgtccgacggccctgaccaaatgccggaacctgaccgaagggacccgcactaccctgtacctgaaacgcgaagatctgctgcacggcggcgcgcacaaaaccaaccaggtgctgggccaggctctgctggccaaacggatgggcaaaaccgaaattatcgccgagaccggcgccggtcagcacggcgtcgcctcagcgctggccagcgccctgctcggtctgaaatgccgtatctacatgggcgccaaggacgtcgagcgccagtcgccgaacgtcttccgtatgcgcctgatgggcgccgaggtgatcccggtgcatagcggctccgccacgctgaaagatgcctgtaacgaggcgctgcgcgactggtccggcagctacgagaaggcgcactatatgctgggcaccgccgccggtccgcacccgttcccgaccatcgtacgtgaattccagcgcatgatcggcgaagagaccaaagcgcagatcctcgaaaaagagggccgtatgccggacgcggtgatcgcctgcgtcggcggcgggtcaaacgccatcggcatgttcgctgattttatcgaggaaacccgcgtcggcctgatcggcgtggagcctgccgggcacggtatcgaaagcggggagcacggcgcgccgctgaagcatggtcgtgtggggatctacttcgggatgaagtcgccgatgatgcaaaccgccgacggccagatcgaggaatcttactccatttccgccgggctggacttcccgtccgttgggccgcagcacgcgtttctgaacaacaccgggcgcgccgactatgtgtcgatcaccgatgacgaagcgctggaggcgtttaaagcgctctcccgccacgaagggatcatcccggcgctggagtcctctcacgctctggcccatgcgctgaaaatgatgcgcgagaacccggaaaaagagcagctgctggtggttaacctctccggccgcggcgataaagacattttcaccgtacacgacatcctgaaagcgcgaggggaaatctga

SEQ ID NO: 248964 - DNA, 252 bp, Klebsiella pneumoniae
atgcaaggtacaacccaaccaatcgatcgccagacgctgctcgaaaaagccaacaaacttattcgcgaacatgaggatacgttagccggtatcgaagctaccgacgtcgttcagcgcaacaatgtcctggtgtttagcggtgagttttatcttgatgagcagggtctgccgacgccgaagagtacagcggtatttaatatgtttaagtacatcgcccatgtgctgtcggacaaatatcacctggtcgattaa

SEQ ID NO: 248965 - DNA, 261 bp, Klebsiella pneumoniae
atggtaagtcagcctgctccggtggatatcagatcgcggacttctgccaccggagcctttaacaccgcctgcgacaccggaccgtcgcgtctgtcccctaccctgctctttattcttagctcgcagcagaatattacccacaccagtctgcagcctatgcctctcttatacccaccgcctgatatcaccgcttccgccgattaccgcccacgctcccacagcaccattaagattaagctcaacccgttaaataagacctaa

SEQ ID NO: 248966 - DNA, 438 bp, Klebsiella pneumoniae; identical to SEQ ID NO: 208775

SEQ ID NO: 248967 - DNA, 711 bp, Klebsiella pneumoniae
atgaaagaacaacacgatcgttatgaccggctggccgtcaggctgtcggtcatcatcagtcggctactagcaggccatgccctgatactgaaaacactggctgatgaatttggtgtctcagagcgtacactgcagcgagattttcagcagcgcctgattcatctgggtattgagtattccgccggggcttaccgcctggcccgacgtccactccggccacattcgtcggatacgttcaccttcatcaacaatacgggtatttcagggatcatccccacccagaacagaaaactcattcggctgctcaccagcacatcaggaatatccccctgtcttatcgggcatggcggcttaccttcgacgatcacgcagtcagcgtcatttctgctgctggcggaagccattcgtgatcaccgtaccgtcacgctgcaggttaacggacgcagccatgaaaccgtggcaccacaccgtctgatcttccagagcaaaagctggtttctggtcaccacacgatccagaacactccaggttttcaggatggaagagatcaatgccgtcacggtcctggaaacctcttttcgcaacaagcctgagcttgatgccctgacggccagcgaagagtttatctccgcgctgccgcattttcgcttcatcagcaacgttattcattccttccggagctctctcctcccgaagccacccccggactaa

SEQ ID NO: 248968 - DNA, 963 bp, Klebsiella pneumoniae
atgccagtattagacttcaaagaaataccagaggctcataaagcaacagggctgcaagatacatttgaacttttttctcgcgacttcttatcttttctgggttataaaatcatatgtgacccagatagaggtgctgacggtggggttgatattatcgcggaagaaaaaaggactggtgtcggcggggaaacaattatccgttggttggtaagctgtaagcataaagctcatagtggaaattcagttaatccagtagatgatgcaaatattactgatcgagtaatagcgaataactgccaaggatttatcgggttctattcaactcttgctagtacaggtctgtctggaatacttgatgggttgaagggacgaattgaatttcaggttttcgataaagaaaaaatagagagggaacttttacactcttccagaggattggagattgccgaaaggtacttcccaaagtcgttatctgagtggaaaacagaaaacccaaaacccgcaagaatatttgccgatgaacctagcttaaaatgcaaagtttgcgagaaagagcttctgtctcaagacgacaagggaattatcactctatggcaaagaacccgcacagactacgaaaaagaaccagagtataatgaacatactttttggacgtgtcgaggtaactgcgaccgagcactccggcaatatattagaaaacaaacaaataatggccttattgatggctgggaagatatagctgatgtaatgatgccaactgtgtttataaaatgggtcatgacaataatgaatgagttaagatctgggactctatattcagatgaggcatttgaagaactcaagacatttttgatcaacatttacccatttgcatgtcgtcatctcaccgaaaaagaaaaagaaagggttaaatcattaatgatgataccgtcgtatcttggcggcatgaactatgaaggttaa

SEQ ID NO: 248969 - DNA, 1524 bp, Klebsiella pneumoniae
atgtacagaaaaaaaagaggaacaatcaaaccagtagctattttgattgctatattttctgcttgcttgattttggactttcttttttttgtatatgatactaacaataaaaacaaagaaacaatatccgaaatatcacgcatcactgataacatgatctcgtatgcaaataaaacaaatgatacagtaatgagtattacatctagtggaaagaattgtgatgattatcttcctgatattagaaggattgttactataactccctttatacgctccactttttttggtacgaatgatactataaaatgccattctctcattgggcgattagatataaaagacccacaaccatcttatgtgtccaataagatggctttgagtacaggaagtttgattcagacaaagcatccaattcttttggtcaggaagaaatataattcagacttctatgctactgcgatcgatggtatgtatttgcaaatgataatgaagcagttgtcagagtcaggtttgtcaatagagcttaaggttggcaatgtttacttatcagcaaatggtgaattatcattaacctcccataatagtaaaaatgtcgcatttcaattcataaactcagtaaaatatccataccggttaagtgcaggtcttaactatacttccgtttttattgcttacttatatatccagcgctatcatatctatgtcctaatatgtctttttgtggcattgttatttattatcattaggcgttcaagactgcattacaccctaactgatgatatgatgctgggtcttgaaggcggagaatttatagcttatggtcaaaagataatcaacattaaaacaggtaaagcaagtggcgtagagattctggttcgttgggtccacccaacgcatggacttattcgaccagatatgtttatacctcaggcagaacaatctggaattatcatcccaataactcaaggtttatttaaacaagtctcttcggctattaatcaaatagaggaacctttttctgaagagttctacatttcgtttaatgtaacagctaaacactttcataatctaactttatttaaagattgcttccaatttttaagccaattaaaagacaataaaataaaacttgttttagagctcactgaaagagaagaaatccctcagaatgaaacaagcctcagattatttagactgctaaaaaacctgggtgttgaattggccattgatgattttggtaccgggcattcaagttactcttatttacataatcattacatttcaatacttaagatagatcgatcatttatagataagattagtgtcgatgctgtatctggtgtactaattgatagtattatagagcttggacataaattatcattaaaaatgattgctgagggagttgaaactgaagaacagattaaataccttgaagaaatgaatgtaccatatgcgcagggctattattacagtagcccacagccgtttaaagatttaatttatgacttgaaagggatttaa

SEQ ID NO: 248970 - DNA, 564 bp, Klebsiella pneumoniae
atgataataaatttcctttttagagttcttttaacatttaacgcaacatcgttgttggctataattttctttgtacaaaagaagtacaccctttattactttttccaaaggtttgaacacagtcattggttgagtttattaccacaaatgacatcatacgtattttacatgctaatccccatattactaacttggattagtttgcttttaagctccagactgggcaaggatgagtttaaagaaggtgaagtagtttctgtggagcatgcgaacaactcatttcttccaagctatcttggttatttctttgtggctttaagtataactagttggtctgccttattttttgtttatgccgttttatttatttttacctttatgtctcaagcattatactttaaccctttatttctactgtttagatatgagttttataacattaaaaacaagagcggcgcatccatttttttaattagtcgtcataaatacaaaacccccaaagaaatcaagatccccgttgcatttagaataaacaactatacctttatcgaaaggaaaaaatga

SEQ ID NO: 248971 - DNA, 1488 bp, Klebsiella pneumoniae
atgactattgaagttaactatgttccaggtgaaaacgccgtacttgattctgttgttgattctcagcaattagtacaagtaaaagtagaaatgcttgatgaaggttcaaacgatacaaccgtaaactatgtactatataacgggtacttatctagcgtatcagatacgtcagatatggatcaggttgttacccgctcatatgtcttcacaccagaaaaccaggtatcagcaggtattcttgatgaatctgtagttgaactttatcgtggtgattggggggttggttcgaacggtaacgagttcccaagctatcaaggccgtgacggtaactcattcgttaagatcgcagcagccaacgcaccaacaggtgttgatatgttgggtatcactaaccttgatggttctaacggtactcaattagtaatgaacaaaactggtacacctgtactcaatattcgtaacttctcaacagcaagtaacggggcatggtacaaaatctataccagtgctgataaaccaacgttaactgaacttggtgcggcagccgctacagatctcagtaactacgtaccaatcacacgtactgtcaatggtaaagcacttacagctaacattactttggtagcagcagatattagtgatgtttactctaagacctacattgattcaaacgtcgtaccgaaagtgtttcaattaaacggacacgcattatcaggaacggcgttgaacttagtagccgcagatattcttgatgtgtattcacagacacaggttaataatacctttgtagctaaaacggttactgttaacggattgccattaagttctaatatcacattaacggcagcacaactaactgatatggcatcattggcatttagtaatagtacatatgtgcctaagacgttcttaatcaataacaagccattatctggtactaacattcaattggtagcggcagatattagtgatgtatattcccgtactgaaagtaacggattgtttgcgttacgtatcactacgattaacggttatgctctaaacagtaacgtaacgttgaactataacgatgttggaacatattcaaaagcacagattgatgctaaagatgccgcactacaagcaaacattgataccaaagtaactatcactcaagaccttcttacaataaataacgtagaagatactttagaacttgatatgtctgatggtaagcgtgttttcaaagcaacactaaccgcagcagtaacacagctaagtgtaatcaatgccagtggaagcaacttaaatagccaaactattactatgtgtttaacacagggaacaggggcaaataaaatttcatggccttctaatgttatttggtcttatggtcgtgaaccagtattaacctttactcagaattcaattgatgtaattcaattcttaactgtcgatggggggagtacgtggtacggctccttactaatggcggatcttaaagaatga

SEQ ID NO: 248972 - DNA, 2823 bp, Klebsiella pneumoniae
atgataagaaaacaaaatataagcaatgcccaacagatgattgaagggcattggaaatttttagaacgaaatacgggtttagttaatgataataaaactgatcactatgtactaaacccacaaaacgtattagcaaacaacaggcactttatagcggaaacaggatgggaagcacaaccggacggtgacgcaaccacagaaggacaatccttagcaattcttggtgctatctatgcgtatcaggcaaccaaagaaccgtactacctacaacgtgctaaagactttttcaacgcctatcacatggcgttcttccgtggtgtggcattccccgatccacctaatggttcactacgttgtaactggatctgtaatggtaaggctcctgtactggcacattacccattagatccagagtatccaactcacggcgggtttaagggcgtgttgttcaactggacaaatggacaaacacagatacctcatggttcacctaactatggtgaataccttgatgctgtatggtttgcctttccagaaagggcggggcttggttggaaccaggttaacgcaactgcctacgcatggttagccagtgaagatagcattgattgggataccaaagcccctacatatgatgttgattggattgttgaccgcacagcccgcaaggtagatagcaatggtgatgtactggcagaagggctaacaagtcagattggtacagtacagctaaaggacacatcaataaatggtaattaccgtttcaactacgcaacaaaaaaccccgtatcagaaggtggctatcttatggggcgtaatgagcgttggcacaacaggccagtaaacgtacctattgataactatggttcgcttgatttctccgataatgcgagcgatgccgaattgtggttttgtcaggcatgtaaattactatgggatattacaggcgaacgtatctattacttagcatggcagaattcactaattacttgtattggttattctgatattgacaagtatgatatgttctttcgaaaaagtactattgctattacgccgtttactgatggtatttcatatgattacttctatccaagtgatcaagcagcatcatattcacgtgattcagaaggttatattgttattaatcaaagtgcctcagcacaaacaacacttgaacaacaatctatatggttcaagtttaataatagttcatcattccatgttgaatatagtggtgttgatacaactggcaagccgttaagtcttgctgtagcaatgacagtgaataaaacaaaaacagaagatggtgctattaaataccgttgtggtttacctattactaatacagataatagtattatatcaatggatatccccatgaaccactttacacgaattgctaaaccagacggtggacagtacttaaccgcagatatgcgtatgatttccgattatggggataatacagtaactagcttacaatatgtttccggtattgctggaacgtactatgacaacgtgatttctactactatggattctgacggtagttctactgttggtttctggatctttgatgatgaaacacaggatttaaacagcttcacatacagaacatatgctgatgattttaatatccgtattgttgatgatcttggttggcgttggtgggctatgctaccagcaagcaacggggcatgggtaacacaaacgtttaatgtactggattttaaattgagttcttatcaaccggatcatggagaaggtgatgaacaaccaggacaaccaacactaacaggacgtgaagagtttacgttattacttgataccgatccggttgatggtgtctcaggtcgtattgactggtattgtgttaacgatttaccagcactttataacgatggtggtacaggtgattattcagtattagtaagtttaacattcaatgatagtacaagcagtggttatacagcacgtttaggtgattgtgtaattcgtaattatatgcttgatagtctttcttatacaccaggactaataccattcagtaacatcacagatccatatgctcaactgtattccggttggcgtgggctaccgtatcctggttatcaattacccgctatatggtgtttcaaaggtactacaattgatcaaacgagactaaataatagtattaaattcttatgtgctgctcaggattggtttactaataaattccatcctactttacctggtccttgtgctcaggcttatgtatggaaccgtcaggacgcattagcgtattcaccagatggacaaccggatcaattcattatgcagcactggtatgaagaagcatggtcaggttatgaacctcgtgcgttctttggtggttgtgatgtagtccatgaactatatcaacgtggtgattctgctattccgcagaacattattacgtactgtcaaaactggatgaattacttgaagtggttcatgaaaaataatgatggtcacgcaccaacacgatttaaagatgatggtgaagttatctatgatggctttacgggtcatatgtctggtttatggcttgctggtgcttcaatgatggcaatagcaggttatccagatcacgaattacttgatttactattcgcggaaattcaacagaactataacgtagtttcagctaatcacgtaatgaatggtggctggtcatcagctatcagaagtggaacacctacaacacctcagaacaactcaatgttctttggattctatacaggtgaactactaagaggtttagcactttacatgaagtactacaaccaacatatataa

SEQ ID NO: 248973 - DNA, 507 bp, Klebsiella pneumoniae
atgttaccccacatatataaaggaatattaaaaatggcttttaattctatttttgtaggcaataatgtaaaagtggaaatcgcaactgctcctactggtggtggtcaagcaactacctttactgttgttgaagaagttggtgcttttccatcggcggcaggtgctgaatctaacgttgttagtgtaaacactttcggtcaacagtacgctaagaaattgcttggttctcgttcagtaccggatctaacactaactgttaactggaaaccaggtgctacaggtcaagaaatgcttgcggcagcggcagcggcacaaaccctaatccaagttaaagtaacttatttccagaacattgatgatcaggatggtgcggcttattacagcatcgtaaacggttatgtaagttcagatgtagttaacggtgattttgatggtgttgtaactcgtgatttcgtagtttccgtaactggtgctccaatcgcagttggtgaagttactggttcttaa

SEQ ID NO: 248974 - DNA, 291 bp, Klebsiella pneumoniae
atggattttactaatcttatgaaagctattggtgtgaagttaacaccagtagaactaacaccagaatgtaccgtatacatcaaattaccatcaattacccaacacgcagaagtatcagatccatataaagcgatcttctattgtgtagttgatgaaagtggtaaacagatttttgattcacctgaacaagttgaacagaatgttgatttaacagtacagctaaaattaaatgccgagatcggtaaagtgtttgctaaatcctttaatgtggatgatgtagaggcaaagtaa

SEQ ID NO: 248975 - DNA, 2463 bp, Klebsiella pneumoniae
atggcaaacaataataaacaatcaatgatatttgaaatcacaggtgatgaaactggattacaaaaatcattaaaaaacgcggctaacgatttaggtaattttggtgatcgtgctggcggtgtatttggtgggttcaataccggactatcaaccacggctaaagctatgtctggtttcgcaggtgcggtaggggtcgcaggtgttgccattgccgccacattagccaacgtacaagcacaatcagaaaaggcgtttgaagtctttcaggcagcatcactatcacaaactggcatagtacagatacaacaagcggctaatatgtttgctggcgtaggtctgactatggatcaagtagccgatcagatgaaagatgcgaaggataaattaggcgatgctatcactaataatgctggttcatttttaactgatgtaattcaaccgttgaagttgaatatgttcgagttacagaaagcagcagaaagcggtgaagatattattgctaagatttactatcaagctaaacaaatgggctttagtcaggctcagattgtacagatgatggaaaccgtagctaatgatgctacaaaacgcatgactgtatatagagaattcagcagtgaacaagagtaccaaaatagccttgctaatgaaactattcagttaacagcagagcaatcacgacaatttgaagaatatagaacggcaactaataatctatcaagagcgtgggatacgtggcgaaattcaacacttgcccctgttgctaaaagtcttgctgatattcttgatctaatgactaagatactcaacagtaaaccagtggcaggtgcggcagccgccacgagtaagcagggaatacaggcagtacaggaataccagcaacagtaccaacaacagattcagaaaaactcttctatctatggttctcagatggtagaagaacagcagaagcaacaagaagctaataataaaacttttgagaatctattagcaaatctcgatgccgcacatgatcttttagccaaacaacaagagcaatataacaagggttcagataagagtgtaattgattcagcgttgaaaccttatctatcagccaagcaaaagacacaagcacagattgatactcttgatgctactcacaagcaactacgagcaacgattaaagattctttagcacgtgcttataaaggtgatgaagcggcaatgaatgccgatttagctaaacttgatgaagggtataaagctaaccgtgagaagttagtaaaaagcctaacagcagatgaagataaagcacgtgaagctaaagctaagaaagatgaagcagtagccaagaaagcacaagccgcacaagataagattaatgaacaaactaaaagagctaaggcactcttagaacaaaccttatcacagatcggtactaacgaagctcagatacgtattactcgttttaactatgaacaagatgaaattgaaaagcgtatcagtacagcaggtaaattagctggtaagagtgaaactgaaattacagcaatgttagatcaacaatataaaagccgtgctactaagtacaaaactatggttgatgaaatgcttgctgaaacagaccgtttaaaacaagcacaaaacattgccgcaattgccagtgatccaaatgctacaccagacgctaaagcgaaagcggcagcagcgggtaaaacatggatgagtgacacagcaagtcagggattgggatatacaaacccactggacttctcaccagatccaacacaggtacagcaagtaaacaccgatcagcaggaaaatcaggatggggctaaggctctatacgatgccaaagtaatcggattccaagagtaccaggatcagctaacagcgattcaggccaacgccgatattaaacgtgggcgattaaccgcagacgcactatcaaacactttaggtatgtgggctacgggggcaggtgatgtaggaactatcatggctggcgtgttcggtgaatcatcagcagcggctaaggcagcttttgccgtgagtaaaggtattgccattgctcaggcagtgatcaacatccagcagggtatatccgaggctatcaaacttgggtggcctatggggatcgcagcaggtctacaggtagccgcacagggtgctcagctcgtaagtacaatcaaaggtacaactattcagggtcaagcccatgatggatgggattcattaccaagcactggtacatataatcttgaaaaaggtgaacgtgtagtaggtaaatctttgaaccaagatctaactaagtatctcagtaatcaagataatagcggtactggtgatattaagattgacgcacctttgattattaatagtaatggtcagatttctgattctgattttcaaaagatgtgtgataaacacgctgatactattgtacaagcaacacgtaaatcacagaagaataacgtataa

SEQ ID NO: 248976 - DNA, 555 bp, Klebsiella pneumoniae
atgttaaataacactcttattagtgagttcatgttaactgacaatataccacaatttcaaaaccaaacttggacaggtgaaactattacacgtgttgtaggttctcagtacttcacacttagttttaaagtaactcttaataaaatgaatcgtgctgaacttgctaacttctatgctctatatggacagggtaggccgtttgatatgtctcttggttggtggtcacagtatagcggtactcaggcatcacaagtacaggcaacagcagcaagggcagcgggggcaacatcaattgccgtaaatgctaatactcttgaagttggtactgtagttcagtttaacggacacaagaaactatatcgaatcattgctaatactggcaatgtgattactattttcccaggattgattaaaaacatccaacttggggaattagtgaaatatgacaatattcaaggttcatttattctcacaccacagaacgcagcatatcaaatgccaagtacaaacattatggaagtgacaataaacgcaaccgaaaacatcagaggttaa

SEQ ID NO: 248977 - DNA, 645 bp, Klebsiella pneumoniae
atgtctatcccaagtaatgtattaactaatgcggatcttatcgcgtactggaacctaacacgcggagataacaaaactgtactaacagaaaaagaactttatcaatgtggtgtcatggttaagttggttgatattctaccagctactggaagtaacatatatctaactgatgccattgctgatcagaactataatgggattaattataagtctgtacctgatttccttgattcatcatttgctaactatgtagaaaagaaccaaatcaacaataacggtacttctttgaaagtaagtaatgtaagccaggattatctatctatggcgttacgtggattgtggaatgatgccaaagttaatatctggatgggtattgttaacccagccacagggggcattctatacgcctatcgtatgtttagtggttacattgattactttagttcggatttcaacaacacatcaggtaataccactaatgaaacaacagtaaatctaaattcattatggaagaagttagaccaaacacaacgcctactatccagtacttcagtacaccaatcattacatactggtgataagttctttgacctaattggcatactaaatagttcagaacaattctggaagagtagcaagaaataa

SEQ ID NO: 248978 - DNA, 3531 bp, Klebsiella pneumoniae
atggcaatagcagcagtagccgtagctattatcgcaggggcatcagcagcagcagcggcatacgcagcaggtttagctttagcagcagtaatagctatcggtattggtacagcagcactatcttacatcagttcatcacagatgatgaatgtaggtcaaatgggggtatcgtacccaagtacgggaagcaataacgcccgatcaacatcgccaagtaccggtattccgatttcatacggtggttcaaatcgtaacgcaacagaagtagcctataacaaattaggttctattgtggtttggcagaatgtttacaatggtacatcaaaccagttatgtactattcacgctattagtattggtgaaattggtcaggttccaggtgaacaatcacaaggcgtaattaagcaaatctattttgataatgctccggtactgcttgatggtgcgtatatcaccacagaaggccaagtacctacatcaatgatgatagagaagtaccgcaaatatctacagattgaagtacgttttggtaaaccttcatatggtggttctatgacgcttgcccgtcaatatggcggcagtcaatggaatgataatatgcgtggtgatggtcttgtacagatctgtactgtaatcaaaaaaactaacgattcattgattgatggtattctaacgaaccagaactatacactatcagtagaaatgcgtggacgtatgatctatgacttaactgataatgtgcgtaaaccttcaagtaatccaccaagtcaattatatgactttatcacaaatacagaatttggttttggtttgaatccgaatgatattgatatgacaagtttccgtaatatggctaactattgtgctaataatcatttctattcaaatggcaatattcagtacgataaatcatttaaggaaaacattgaaaatattctacagacatttggtggtgtactttatgaatcaaatggtatgtactatctaaccgttgatgctccagatattccaagtgtacattttgatgaatcaaatattcttggtagtgtgaatatcacaacgggttctaagtctgactattttaatacaatggacagtacttacacaaacccaggtaatgactattcacaagatattatccgttatccaagtgatgccattagtaacgcatccattgcgaaagatggttatattatcaagaaggatttaaactatctttgggtacaggataaagatcaacttgcgattcttagtaacattgaattactgaaatccaagtacatcacgaatacaatcacctttaatacatacattaccgatcttaaagtttatgatgtattcactattgatttcaaagaagcaggatttagtaataacaaatatcgtgttattcaacgtactgtaccaatgacagttgataaagcgggtattatacagattacagctatttcatatgatgacggtatctatcaaggaaaagatccgggacaattcccacaggatggattaacaaatctacctaatcctacatacgtacaaccgccaagtaacctacaagctcaacgcttaggggcaacggcatcaggtaatacagtattgcttacatgggatttaagccaggatacaacggtacgtggttacaagattcgctataaacgcagtgattccggtgtttggatcaatattggtaacgtagggcagtattctacgagttttgagatattaaatcttctatacggtgttcagtacgattttgcgattgaggcgtataacacattgggttattcatctgatttagttgctatatataatcaaacaccacaagttattttcgcattaccaaagattactaatcttgatatggttaatgatgatgttgggttaaaccagacttatgctcaagattttattttccgttgggatgatcagaataacttagctgtaaatggtaaaacatttgctgatttcttcaaatattatgaagtacgcgtatatgaccgttatcgaaattacatcacgtcatattacacaactacaagcaactggacgtatacatattcaatgaataccagtgatggccttagccgttaccgtgtgtttgggatcatcgctcatggttggggtactggtatctatagtgaagaagtacagattgaagttagtaacccacagcatccacagttgttaggtatcaatcttaagagtggttatgatgccgtgtttattgattggacagaatctaacgtaccggattatgcggggatcgttcttcaaatcgcacttgatgaggggtttagctcagggtcgaagtactttagcagtgctaaccgttattcagcatcgtttggtattgaagatggttcatggttcgcacgtgtagcagcctatgacgtgttcggacaggatgaacttgtatggtcgcctactatcggttttaaccagaacacgaaggttccttacagcaaattgaacgaagatgttattgatggcctacttaacagtgatacggctactggcattgttgagaaacagatcgtagatgaacttggttcacgctggcagctacaggtatcaaacaacggtaacgtaacgggcattgccttagcagcagatgaaaaaacatcagtgtttaccgttatggcagatcgctttagcatcatcagtacagacagtgccaagctatcagacagggtatatccgtttgtggttcagggcggtaagacttacatcaactcagcggtaatagcatcagcgagcatcaatgaggctatgataaataacctttccgtttcccgtgcgaaaattcaggatgccgcaatagacaatacgaaaatcgccaatgccgcaatccgtaacgcccacattatggacggcgtgatcgactcagcgaagattagccagcagatacaatccagtaattgggatggtgtgaatggttgggctatcaataaaaatggtaatgcctggtttggtaacgtatctgtacgtggaaatatacaggcaacatctggtgtactgaataacgttactatcaatgaaaactgtaacattcttggtactctaagtgccgcacgtatcgtaggtgatatttgtcgtccacaatcaacgggtatcaaccctgtaccgtttatctttggttcacatactgtttcaggtggtcaggccgctaatgatccagtagctaaccagcactatatagcgttgcgtattcgtggtgaagatttcccacgttactttgatagtgatttatcaattggtttaagctcatatgaacgtcaatacttctatattcgtatgggtggtgatggaatcgggttaactaacttattctattatgatgctggtaatggtggtagttctacatcgtttagattgaattctatatatgtaccgcctgtaggtcgtggtaactggaactatatatatgtaatgtgtactacttcacgtagtggaattgcttcacttaatgttcctgctaactggtcttcattcttatatcgtgctggggatcaacctttatataatgcgtaa

SEQ ID NO: 248979 - DNA, 270 bp, Klebsiella pneumoniae
atgggtatgggaacaattcttgctcttgttattagtggtttgggtgttttatatactatctttcgtgacaatacaaaagatactaatgacttactaagtcgtgtatctgaaattgaaacaaccattgcggtacaagatagtaatattacacgcctaagcgacgaacaagacaagatgaaagaaactttgaggaaccttgaaattcaaattcacgaattggatatcaaacttgaaagaattattacgattcttgaacaatcaaagcagtaa

SEQ ID NO: 248980 - DNA, 609 bp, Klebsiella pneumoniae
atggcttggagaagtagcaatagtcctaatgatatgaagcgattcattaataagaatagcccaaagataggaaaagaatttaaaaaagaattaagtaaccgtatgcgtatagttacaaaacacattcaaaggaagattgatagtgatgtagcaggtggtggtgtcgcgtttactggaaaaagtatgtactttaactttagaaagttaagtgagttcaagacagttaaccaaatcatcctactaccaaatcaggcatcatatttgaagtacattctagatccagcatataggaatgttgaagaaggtaagatgatcccatatccaaatgctaagttaactaagcaagggaacattacacaactacgttctagatctaagagtaataaatacaaaaaggtgaagagtaagaacggtaacacgtacttaatcgacactaccaagaaatcctctaaacgtaatcctaaactggcacgtgaacaaagggtgattggttattatggttccgttggtagaaaaccattgtttgatttctatgatgaaaccgagaagcaagtaatagaacaattaagaacattacgcggtacgtttgattaccgttggaggaagtaa

SEQ ID NO: 248981 - DNA, 303 bp, Klebsiella pneumoniae
atgttaagtattatcattgatcttatcaaatccggtattagtctttttactaagaacaaaaccgaagttgctaagtctaaagacgaacttgaaaccgaaaaaacgaatgaagcacaggaaacaaaccgtgaagagatcaaagctggtagaggctggagatcattcttaggttatgcgtgtactttcattcttgtatataactatatcatagtacctatcttagattactttggtatcgttttattctctttcccactatctgacattatcagaatcatcgttttgttacttagtggtaactaa

SEQ ID NO: 248982 - DNA, 2160 bp, Klebsiella pneumoniae
atgtcattagaaactagtaaatctgtaaaagagtctgatgagattgatttaggtcgtcttattggtgagcttatagaccataggaaactgattgtttcagtcacagctctttgtacgctaattgcgttagtctatgctatattttcgacaccggtttaccaagctgatgcattgatccaaatcgagcagaagcaaggtaatactatattaagcagtttgagtcaaatgttgccggatagccaacctcaatctgcaccagaaatagcattaattcagtcgagaatgatcttagggaaaactgtagatgacttaaatctgcaggctgaagttaagcaaaatcattttcctgtttttggaaatggttgggctagaattagtggagacgaaaaaggtgagttatctgtttcaaggttttatttagcaataaaagaagatgatgctgcaagtattaaattaacagtgctagatgatgaaaattatattgtagaaggagatggttttaggttaaaaggtaaagttggacagctgttggaggacaaagggttttctcttaggatagatgctatcaatgcacaaaaaggaagcgcttttacaataacatatatatcaaggttaaaagcaattaatgaattaaggaaaacgctttctgtaactgaccaaggaaaagatataggcatgctaaccctgtccttgacaggggaagaacctgatttgataaaaaagataattgatagtgttgcttctaattacttagaacaaaatgttgcacgtgaggcggcacaagatgccaagagtttggactttttaaatcagcaactacctgaagtgcgaagtgaattaaatactgcggaagataagttaaataaatataggcagcaaaaagattcagtagacttatctcttgaagccaaatcggtgctggatcagatagtaaatgtagataatcagttgaatgagctaactttccgagaatcggaaatttcacaacggtacactaaagaacatccaatttataaggcattgattgagaaacgtcaaaccttagtagaagaaaaagggaagttaaataagcgtgtatcggcaatgcctgaaacgcagcaagaagtattgagatttagccgggatgttgactctggtagggcggtttatatgcaacttctgaatcgccaacaggagttgaatattgccaagtctagcgctgttggtaatgtaagaataattgataatgcggtaacacaaccaagaccgattaaacctaataaactagttattgtgttaatgggtatttttctaggtatgttatcatctatttcgcttgttctaatcagagtttttttacgtcgtggtatcgaatcaccagaacaactcgaagcattaaatatcaatgtatacgccagtattcctgtatctgagtcatttgtaaaaaatacatctcatgtacaaagttggcgaaaacgagaacaggacgaagttcaaggatttcttgctgttgataatccagcagatttagcaattgaagcgattcgaggactaagaactagtttgcattttgcaatgctagaagctaggaatagtgtgctaatgatttcaggggcaagtcctaatgcgggtaaaacctttattagttcaaacttagcagcagtgattgcccaaacagggaagagagttcttttcattgatacagatatgagaaagggctatacacacaaattgtttaatgtaagtaatgatagtggcctttctgatttcttgtcagggaaaataggcattgacaaagctgtaaagtctataccaacagccaaatttgattttataacaagaggaatggttccgccaaatcccgctgagttgttaatgcatcgaaggttcgatgagttaattacatgggcaaatagcaattacgatattgtcattctggatactccacctatattagcagttactgatgcagccataataggccactacgcaggtaccaccttattagtagcacgctttgaattaaatacttcaaaagaaatagaggttagtataaaacgatttgaacaaagcggtgtaattgtcaaaggctgtattctaaatggtattgtaaaaaaagccagcagttattatagctatggctataaccattatggttattcctatactgataaaaaataa

SEQ ID NO: 248983 - DNA, 315 bp, Klebsiella pneumoniae
atgggcaataaaaacggttacgatccatctatacgtagaggtgttcaccagttctcaaacaacggggtatggttcactgtctgctattgggggagtgctctaaagcaattcaagtttggtgatcgggtgatatttgaaggttctgtaggcgggatgtactggcttggaacggtggaaagggattgttttgtactgattagtgaaacaccattcaatgatgttttagatgcggtgagttatctacatgctgaacaacgtgtgattgaacaacatggtgatgattggttttgtggacaagaagaactaccgttctaa

SEQ ID NO: 248984 - DNA, 675 bp, Klebsiella pneumoniae
atgatcacctctaccttcatagcagagccaatcatgactacatcaggccagctcataggatgtgaactgttaacccgctttcactgtgaagaactgccagtgctgaacagcaagtacttcattacggctatgacgattgagggaaagagggaactactcaagcgacaactacaggccattgaagtacgtgcgtcctggttcagagataaccggcttttctgtaccgttaacgttgataccgttcaggcacggctatgtgcgtttgacagcgggatcatagagctactggataagctggagtttatcaggctggaaatctcagaagactttgaagggcttgaattgggtatcgatcatccgatactcagaacactgttaaacgttggctatcgcttattccttgatgatcttggttccggtcgggctaacgttgcggcgttaacttctggatgctatgaggccgtgaagattgatagagcgttctaccgtcaggaagtacagaaacctacattcaatgtactgatgaagaacataatggaatattgcccctatataatagtagagggtatagaacagcagcaggagctaccagtattacgcgatgctggaatatcagcagtacaaggatacctataccgttcagtaccgttcgacaagatacacaaccttatctaa

SEQ ID NO: 248985 - DNA, 300 bp, Klebsiella pneumoniae
atgagagcattttttagtaactcacaattagagtatctattaaatgcttttggtgaaaagctcgtcattgttcaagatggtgtatcaataacgattaccgcaatttttgaacaagacgagctttttttcgatgatagtcaaactaccgtaacatattttagtgctaagtcaggaattaaactaaatagcactttcacgattgataacaccgaatacatagtaaatagaatagatgatgatacaagcggcatctctaactatcactatattcgtaagatcgatttggaagaggaaatataa

SEQ ID NO: 248986 - DNA, 1332 bp, Klebsiella pneumoniae
atggaagatgataaagaaattgaaagtactgaacctgaaatcaaagatgaatcagaagtagaaagtactgaagttgaatctgaagaagaaattactgaacaagaagaagtagaagaaactactgaacctgaagaagtaagtatgagcgatgaagaactactagcactaatgtctagtcgtccagacttgcttgaacaaatgataaataaaagcgaagttgaagaacaacgcgaagaagtacaagaaagtactgatgattctgaagtagaagaatctaccgaagaagtagaacgtaaacgtgaattggaatcaatcggcgtagttctaaatattgatgtgtctgaagcaattgaaaatggaatttcagttgaagacttcaaacgcacactaaatacaaaaacaaatcctaatcatgataaggaaatcaaaatggaaaaatccgtattaaatggcctaattcgttcactaagtgaaggtaatttcgctggaaaaactgaaatccctgctggtgatttcgtccgtacttctaccactgtcggcggtgctgctctagttaaagaagtatacgcagattcttatattgatgtgctacgtgctcagtcagtatttgctactctacctgtacaagtattcgcaaatctagaaggtgaaggtaatctagttctacctaaactatctgctgatttcactgataacttcggttatgttactgaaggtgctccatcaccatcttataacgccgcttttgagaaaatcactctaaagccagaaatctttactggttccgttgaacttactcgtactctaattaaatctgcttctactgctgaacaatatattcaagatgcgatggtaaagggggctgctctaaaactagaacgtctaattcttgctgatgttgttgctaaggctccagaagtaaccctaactgctgctctaaccaagaccgatgttattaatgctctagctactctagctgctgctaatgtccgtgttgaaaacgtagttgcgattgtacaccctactaccgctgctgtattgcgtaccacactagatggttctaacaccgctgctaagtacttgctacaaggctatatgggtgacggtattctagcagattcagtacgtattgttgaatctactcaagttgccgctggtgctgttgtctttggtgattggtcaaacatcatcatggcacaatggggatctgtaactatggatcgtgacgacacaacccaacgtaactctatgggtatcgttctacgtacctttagcttccaggctcatgctctagcacacgatgaagcattcctagtgcttaacctagcataa

SEQ ID NO: 248987 - DNA, 279 bp, Klebsiella pneumoniae
atgacatttagaactgaattcacacattacgaagatgatactatctactttctttatgtaactaacaacatgaggattgaaactgatggtacttcaaaccttgagatacaacgccgttcatcattccgtactgaacctttagatactaacaggtacttaactatagaagatgatgaagcggctatgtttcaggaaagacttataaacccagacttagaggacattataaaagccgtaaaactctttaagtatcatatggataaactatgcgaatcataa

SEQ ID NO: 248988 - DNA, 297 bp, Klebsiella pneumoniae
atgcgaatcataaacaacaacataaaaaatactaagttatactataccctggatggggtagagtgctacgtacatctgaaaccagaccattcaagcataacgttaagtacaggagaggttttaactctagttactaagcctctacttaacggactacctactaaaattgacagtaagcaaaaagaaatggcttttaaaattttgtcattacataagaaaaacaacgagttatctatagataagatttccaagttactaaatccaagaaaaaaatctaaaaaatccctagacgcttag

SEQ ID NO: 248989 - DNA, 954 bp, Klebsiella pneumoniae
atgacatttgacctattcgcacaagtacttgaaaagcatcgctgccgtgatggggaagcgtttgtacgtattcataatttcaaccgttcaattaaacttgaaattattgattctgctagattgactcaattgaataacgcagtgttagtagatggatatattagtaatggaattgaatataataagtaccgtcaaccagtaaactactatttcgctaaatataatccagtaacatatacatatgatgctacaagttatgaagttgtaccagcaagtgaaatcctacattactttgttatggatgatgccacacaggaacgcggtataccggatctaattgccagtacaaaagtattagcagacctaaagaacttccaggaagcggcattactagctaaacgaatctcagcaagtgttacaactttcattactaataatggaagtaacaatgaattagcactaactgaaggtgaacaagatactgcgatttataacgagtacttagaaccaggtgctatctttgaattaaatgctaatcaagatgttaaatcagttgatccacgtaatggtgttgacggcatagcagaattcacagatgtactatttgataatatctcaatgggtttaaacgtcactaagcaatccctaatgggaagtacttcagatgcttcatttagtgcggcaaaacttgccgaacgtctacaagctacaacattcagtacaagaacaaatgtactcataaataaagtactcaagccaatttatacagcttggttaaagaatgaaatgctaaataatgctggtttgaaatcacgtactcaagtaattagcgagatgggcggcgatccacgcgtcgtacttcaagaaatagagaatgagaaaaatatgaacaaggaagttctagatgaaaatcaaaaaccagacgagggaactaaccctaccaacggcgattaa

SEQ ID NO: 248990 - DNA, 2043 bp, Klebsiella pneumoniae
atggcctttaacccggatctggggagcacgtctcccgctgtattggtcgataacgccaaacgtctcgatgagctggtgaacggccccgccgccgatgttcccgaccgtgcaggtgaccctctgtattcgtggcgccagatgatggcgaaaaatgaagccctcacggaggcaacccgccagaatcttatccccctgagtcgtcagtacatgacgctgtcagaggcgcaggctgatatcgcgaatatccctgccggctcgactacatatgtgcgcagccaggacggcagcgcgctggctgatgaatatatgaacgtcagcggaacgctgcagcctaccggacgccgcatgttatctgctgaaccattccaggggttagttgatgctgttctctttgccgaccctgcagagttttcacgctccgggtatgcgtctgcggtagtagccgaggatatgttcattattaccgctgtccggtctgatggttcattttttattcctgacctggatatccccggcattgaccttgacaccctgtctcgtatcactgctgagatcacatttattgaccctattgagtttttgcgatcgggatacaggtcagctgtgctgtcagctgaccgctttattctgtctgcggtggcgctggattccgatgtttatatacccgtcatttctgactcggtcggggttattgaatcgcgcgagttcgcccgcagtggttttatcaacgcagttatttcagaggacagatttattatggcagccaggactactgaggaaaatgctcaggaggggagcagggaaattcgcctgccgacagagtttgagcgttcgggataccggtatgctgatgcaagcgcagatatgtttgttacagacggagaccggctgttaacggaggcatggcggcgtgacgtgtattacgccagggtggtgggcgcatacagtcagctgtttaaatttgatgcgaatggcgctgaaactcagttgacgcatgacaatgcgaacgtgacgaacgtccgggatagcggcgatgaggtgcagtggcagagtgatgtcgatgccggggtgaagggcggcctttggtttacgaaaaaagccacttacgatcaacacccggtattcccacgaaacatcattactttgtgggggcactcatttctgcaaaacccacgactggctaacaaactgtataaactgacaggaatgccggtctggaatttcggccgcagcaatatcacaagcaagggcgcagctctgcgccagggcgggcagcgaatcgaagtatggcctttgacggggaagattccggcaacaacggatgctgtccaggtcacgccatcatcccccggcccactggagcttggcgctaaaaattacgcactgaacgggcagggatatttccgcgggcaaaaggtctgggtcaactggtacgctgacaacacgctaaaaatcacccgctatgccgccggtgcggaaattacggttcccgctgctgaaacgctgacctggataccccagacacaggaggccctgaccgatattgataccgggcaggtgataacgccgcagtatgcaacttatgacaggcacgctgaagggattaatattttctggataggacgaaataacagtgctggtattgcgcaggttatttccgatttgaaagcgatggtggaaaaagttaaggcatcatctaaatatccgcgaatcgtggtgctggctgatttcatggatgccggacagaccaatggcacggcaggccgtgcgcagatattttcgctgaacgctgcgtataaacgcgcgtaccctgaatattattgcgaaattgagggcgttgatattctccagaactttatcaatcacgccaacccgaactatgcagatgatgtggccgacgttgcagccggaacaaccccccggagtctgcgatatgacgacctgcatccgtctcaggttctgcaggaaaatgcattacatattggcgcagacgtaaacgctgaatttatcgttcaatttttgacaaaaaaaggctggttataa

SEQ ID NO: 248991 - DNA, 408 bp, Klebsiella pneumoniae
atgaagcgattaaccacgctggcgctgctggcagggatgctctctgcgcctgcgctacacagtgaagaaccgggctccggctccgctgccccgctgagcttcccgcagctcaacgacgcggcggacagcgagccaggcgacgaacctccggctgcctcgccagaggagggcgcctctccggcagcccccgccaccgccggcgatgcggcggcgacggcccctgcgccggttatgccggacttacccccgccggtgagcggcacggcagcgccggaggtcattcctgtcgctccggtctggggaggcgatctgaatctggcgcagatggggatgccggacgggattatcctcagcggcggccagcgacagggggggtcagctttaccctgcctgccgatcaggtggtga

SEQ ID NO: 248992 - DNA, 648 bp, Klebsiella pneumoniae
gtggtgcgcccgcacctggtggtggcctgcctgctggccctgggggtgatcgtcggcatcgtccgggcgattggccatgactattttggctcggatcccaacgttatcgccctcaacgtcgggtgggggatctacagtctgatcttcctgctggcggcgattgccgtggcgcgcgaaacgcggcaggtgcgaaaaaccattcgtatcgatgtcgatattccggtggtgatccattacgccagcggcatcgtctcgcgcagccataccgcggacctgtcgatgggcggctgccgcgtggtcgcgcctgataatcgccatctggaggatgacatcgaagagattgagctgatcctgcagtccggggctatctcgatcccggcccagctggtcacctctgacgagcgcttcctgcgcctcaagtttgatgaagatattccgctttcgcgccgccgtgaactggtgcgcgtggtgctggcccgcgcggatgcgtggattaatccgccgcgcccgcaggataacccgttccgctccttcttcaccattttacgctgcgtgttcgaactgttctggctgacgtggaaaacccgtcgcagccagcgcaatcgggcaacagtggcgaaaacggcgcaggaggatgggacgttatga

SEQ ID NO: 248993 - DNA, 207 bp, Klebsiella pneumoniae
gtggatagagatttaaacgagcaagtcatgatcgaacgagttgaaatgattgcgcgtctgacggcagagggggtgtgccaggaaagggatcgtgaaattgcattgggattgatagctgaacttgctaagggcaacttaatgcaaaataattcgttctcagttgtattcccacataactctattgaaatcaatgagaaacctaaatga

SEQ ID NO: 248994 - DNA, 1587 bp, Klebsiella pneumoniae
atgataccaatcaaagatctgactcttggttatgctgatgctgaaaattataagagaagggaaaataaagacttacttaataaagtattcatacgtgataatcacctatcggaactatgtgaaccaaatatatcgtttcttgttggagagaaaggtactggtaaaaccgcatactctatctatctttcaaataacaatattaacaacacgctagccacaacaaaatatataagagagacagaataccaaaaatttattactcttaaatccgaaaagcatttaagtttgtctgatttttctggtatatggaaggttattttatacttgttattgtctaagcaggtattagataaggaaggggcaatttcaaaactactaaactatacgaaattctcatcactcactggagctatagatgagtattatgccaaggcattctcaccagaaataattcaagccctcaattttgttcaagagtcaaaaattgcagccgaattacttcataagcatgcagccttaaaaggtgaggaaaaagaatctttgtctttttccgagagcaggtttcagataaatttattttatatacaaaaaaaatttgaagaggcttttagccaaatccgtttgtctcaaaaccatattttatttatcgacggtatcgatatcagaccctcttcaatttcatacgatgattatctagaatgtatcaaaggattggctcacgctgtatgggaaattaataacgatttcttcccaagtataaagggagggaaagggagaatgaaggcagttcttttgattaggccagatatttttgaatccatagggttacaaaatcaaaatgccaaaataagagataattccgtattcctggattggcggacagaatatgttaatcatcgtaactctcagttgtttgaggtgctagatcatctgctcgggactcagcaagaaattgcgcttgaaaaggggcaggcctgggaccattattttccttgggattcgcctaatgttcgtgataattataaccatccaacatcatttattaatttccttcgatggtcatattatcgccctagagatatattgcgaatgctagagattattaagtcacacactaacggtgattgcaggaaaaatcaattcactctggatgactttgaaaatcctagcatgcaaagagattactctaactatttacttggggaaataaaagaccatttgtcattttattatggaagtgagcattatgagatttttttaaagttttttgagtttctttcaggtaaagatacttttgattacgcagagtacctcttggcatataaaaaacttgaagctcacattagatctatttccacgacaaaaccaaaatttatgacgacagcaaacgactttcttcagtttttgtttggtcttaatgtaatatgctacatagaaacaactgaggataataatagatttatgcgctggtgctttagagagaggagttatgcaaatatttcaccaaaaataaaaactgaagtgaggtatcagatattttatggtttggcaaaagccttgaatgtcggaaagattttaaaaaaatga

SEQ ID NO: 248995 - DNA, 270 bp, Klebsiella pneumoniae
ttgctgtttaccgccgcgctggtggcggagcgtcgcctggcccgcggcctgaagctcaactatccggagtccgtggccctcatcagcgcctttattatggaaggcgctcgggacggcaaaagcgtggcctcgctgatggaggaaggccgtcacgtcctgacccgcgagcaggtgatggagggcgtcccggaaatgatcccggatatccaggtcgaagccaccttcccggacggctcgaagctggtcaccgttcacaacccgattatctga

SEQ ID NO: 248996 - DNA, 564 bp, Klebsiella pneumoniae; identical to SEQ ID NO: 222015

SEQ ID NO: 248997 - DNA, 594 bp, Klebsiella pneumoniae
gtgtttctggccatcggccgcgtctcgagcaataagtttatccagttccccatctggctgttcacttacatatttcgcggcacgccgctgtatgtgcaactgctggttttttactccggcatgtataccctggaaatcgtcaaaggcacggagctgttgaacgcttttttccgcagcgggctaaactgcacggttctggcgttaaccctgaatacctgcgcctataccactgaaattttcgccggcgcgatccgctcagtacccgccggagaaattgaagcggcgcgggcctacggcttctcgtcagtcaaactgtatcgctgcattattctgccttccgcgctgcggattgcactgccggcctacagtaacgaagtgatcctcatgctgcactctaccgcgctggcgtttaccgctacggtaccggatctgctgaaaatcgcccgcgatatcaactcggccacctatcagccgttcaccgcgtttggcatcgccgcggtgctttatttaattatctcgtatgtgctgattagcttgttccgtaaagcggaaaagcgctggttgcagcatatcaaaccttcttcgacgcattga

SEQ ID NO: 248998 - DNA, 159 bp, Klebsiella pneumoniae
gtgattgaaattattcaggagtactggaaatcactactgtggaccgacggctatcgctttaccggcgtggcgattaccttatggttgctgatctcttcagtggtaatgggggggcatcctggcggtgtttctggccatcggccgcgtctcgagcaataa

SEQ ID NO: 248999 - DNA, 783 bp, Klebsiella pneumoniae; identical to SEQ ID NO: 209577

SEQ ID NO: 249000 - DNA, 771 bp, Klebsiella pneumoniae
atgccgattcaggttctgccgccgcagctcgccaaccagattgccgccggcgaggtggtggagcggcccgcgtcggtggtgaaagagctggttgagaacagtcttgatgcgggcgccacgcggattgacattgatatcgaacgcggcggcgcgaagctcattcgcatccgcgataacggcagcggcatcaaaaaagacgagctggcgctggccctggctcgtcatgcgaccagcaagatcgcctcgcttgacgatctggaggccattattagcctcggctttcgcggcgaagcgctggccagtatcagttcggtagcgcgcttaacgctgacttcgcgcacggcggagcagcaggaagcctggcaggcgtatgctgaaggccgcgatcaggcggtgacggtgaagccggcggcgcacccggtcggtaccactctggaagtcctcgatctgttctataacaccccggcgcggcgcaaatttatgcgcaccgaaaagaccgagttcggccacattgacgaggtggtgcgccgcattgcgctggcgcgcttcgacgtcactatcaacctcagccataacggcaaggtgatgcgccagtatcggggagtcgctcaggatggccagcgcgagcgccggctggggacaatttgcggcgccgcttttctcgaacatgcgctggcgatcgagtggcagcatggcgaccctgcgcggctgggtcgccgatccgctgcataccaccccggcgctggcggaaattcagtattgctacgttaa

SEQ ID NO: 249001 - DNA, 315 bp, Klebsiella pneumoniae
atgacgattaaaaattccggcttagctgctggtggccgcgctcatcgtgaaatcaggccgggtgataaatggaaagacagtcggggggaaattgtaattatcgaaagttaccaattcaaccgagtgacattttaccgggaaggatataacgcgccctgtgtttgtgcgcctgaccggttggttcgtgaatttatatttgtttcttctgcacctatcgacaatgaaagcgatattgcgcgggtaatgcaggttcatggcgccgaaaggattcgggttatgcgtgaaattattcaggagcggggtagcaaaaaatga

SEQ ID NO: 249002 - DNA, 1230 bp, Klebsiella pneumoniae
atggtgccgaaactacgattcagtgagttcaacactccgtggaagcaagtgacattgggggaggtctgtgctgatgctgcttatggcatgaacagtgctgcaacagcatttgatggaagcaataaatatattagaattacagatatagatgatgaaagtcgggaattcagcccttcaccattaacgtcaccatctggtacgcttgacaataaatatcttctcagagatggtgacattgttttcgcccgaacgggggctagtgtagggaaatcatatctatataaaaaaaatgatggcaaattatattttgccggatttcttatcaggttatcaataaataaagcaaatccatgcttcatttataaccaaacacttactaggaaatatcgtaagtgggttaaaatttattcaatgagatctgggcagcctggtataaacgctgaagagtataaagaatttgatttcgcaataccctcctcagaagaacaaaataaaattgcagattttctgtcctctgttgacgaaaaaatcacgctactgaacaagcagtacgaccggctatgtcagtataaaaaaggcatgatgcagaagattttcaatcaagaagtgcggtttagggatgagaatggtgatatttttccggcatggcaggaaaatatccttagtaacttaggcaatgcttatagtgggttaactggaaaaacggctgaagacttcggcaaaggtacattttatataacctacaaacaaatttttgacaatagaattatccaaccaaaagactttggtcttgtttgtatttcgaaaaatgaaaaacaaaacaaggtcaaatatggtgatttgtttttcacaacgtcatctgaaacgcctgatgaagtggctttttgttccgttttcttagatactgagatgagcgactgctaccttaatagtttctgttttggctatcgattgaaaaatatagataaaaatcatccagtatttctcagttttttatttagaagtgaatactttagagggaaagtgaaaacattagcacaaggaagtacaagatataatatttcaaaagcacaatttatgatgctatctgtgaatattcccgtaacgaaagaacaaacaaaaatcgccaacttcctctctgctcttgatgataaaatcgccataaaaaaagtagaactggaccggttaaaaacctggaagcaggggctgctccagcaaatgttcgtatag

SEQ ID NO: 249003 - DNA, 387 bp, Klebsiella pneumoniae
atgcaaacgaaattacccttcatgcgggtggcatcgtcacgtccgtctcccgtgggcgtctggcagaccctgctgacctgcctgctggcacaccactatggccttacgcttaatgacacgccgttcagtgatgaacaggtaattcagcaacatattgatgccggtatctcgctggttgatgccctgaatttcattgttgaaaagtatgaactggtccgcactgaccggccaggcttcagcatcagggagcagtctccgtttatcacacccatagatatcctccgggccagaaaggctacagggctgatgaaccgaggcacgtataaagaggtgacggctattaccagaggacaacatccgcaggccaacgcttcaggcaagcgatga

SEQ ID NO: 249004 - DNA, 132 bp, Klebsiella pneumoniae
atgaaaatcaacgcccccgatgagttagcctttttgtgcgttagctgctgcaaccctcacagcacaaataaaatcacccataccagcgccaacactgtttccatcggctacgtagtcgccctgaaaatctaa

SEQ ID NO: 249005 - DNA, 153 bp, Klebsiella pneumoniae; identical to SEQ ID NO: 218151

SEQ ID NO: 249006 - DNA, 381 bp, Klebsiella pneumoniae
atgctaccgtcattggtgatgcccgtgacggtggaaacctggctcagcaaacctttgcccgttattgaccctttgttcagtaaattaccgttgctggtgagcatcagcgtgccgttggagataatagaacccttattacgtacgccaaagccgatgttattgccgaccatgctgatgctgttggcctcaatgccgccaaggctgctgacgtcgatgctgtactgcgggttaaccgtcatctggatcagggtggcctttttaccggcggaggtcaccgagccagagctgttatccatggtgaagttgcccgcgctgaccagggcgttgttggcctgcactttaccgttaatcttaatcgcgtcggcgagcagaaccgcgtag

SEQ ID NO: 249007 - DNA, 726 bp, Klebsiella pneumoniae
atgattaccctgaaaaacgtttcaaaatggtatggtcactttcaggtgctgaccgattgctccacggaagtgaaaaaaggcgaagtcgtggtggtctgcgggccgtcaggctccggtaaatccacgctgattaagactgtgaacggccttgagccggtacagcaggggcagattattgtcgatggcaccgtggttaacgataaaaagaccaacctggctaaactgcgctcgcacgtcggcatggtgtttcagcattttgaactgttcccgcatctgtcgattatcgacaacctgacgctggcgcaggtcaaagtgcttaaccgcgataaagcctcagcgcgcaagaaaggcctcaagttgctggagcgcgttggcctggcggcgcatgcggaaaaatacccggcgcagctctccggcggccagcagcagcgcgtggccattgcccgagccctgtgtatggacccgatcgccatgctgtttgatgagcccacctcagcgcttgacccggagatgattaacgaggtgctggacgttatggtcgaactggccaacgaggggatgaccatgatggtcgtgacccatgagatgggctttgcccgcaaggtggcgaaccgggtgatctttatggatgaagggaagattgtcgaggatgccgataaagaggccttctttgccaatccgcaatccgagcgtgccaaagatttcctcgccaaaatacttcattaa

SEQ ID NO: 249008 - DNA, 1797 bp, Klebsiella pneumoniae
atgcgtgatctgatccttcaactcagcaaaagttcgatttattcaacaaagccgcgtatcgcccgtatacgcatttttgatccagcctgtggttcgggcaactttttggtcattgcttataaagaaatgcgtgccattgaagctgagattaactggaggcgaggcgaacctgatcgcccatctgatattccggtcacaaattttcgtggcattgagctgcgcgacttcccggcagagctcgcccgccttgcgttgattatcgcagaataccagtgtgatgtactctatcgtgggcagaagttggccttggccgaattcttgccactacgcagcgagaattggatcacttgtggaaatgcgctgcggatcgattggtatagcttaatggatgtgagtggctcaggagttaaggtggtttcagacgatatcctgcaaactccacttgatcaagctgaaatcgagtttgaacatgaaggcagcgaaacatatatctgtggaaaccctccttataaaggaaccaaaaatcaatccgctgaacagaaggcagatctattgtttgtcttttctaaatatcctggaactttcaaagtgctcgactacgtgagcgcatggttcgtgaaaactgcggagtacctctcccatgtaaatggagcagccgctttcgtcagtacaaactcaatttgtcaagggaaccaagttcctgtgctgtggccactgataatgggactaggtgtcaggatctcgttcgcgtacacatctttcaaatggtctaaccttgcaacccacaatgctggtgtaacagtcgttgtaattgggttgacgcgtagttttggaacgaagtgtagattatttgagcatcaaggtgagggaatagtcgagagagaggtagataatatcaatgcctacttggttccaaatgcagacatctttataaacaagaaatctgatcctcctcctggctgcgccccgatggtacttggtaatcagccatacgaaggcggtcatctaattttcgatagtaaggggattgaagccctttgcatcccaaaggatgttcgagagacgatcacgcgcaaaatcttaggttcgagcgaggtaattaacggtagcgagagatactgtctctggattgagaatgagaattttgcgctggccacatcgtttccagcagtctcagcgcagatcaataaagtcaaagaatggcgcttaaagagcgagcggcaggcaacgcgttctatggccactcgaccgcatcagttttgtgagatgaagtgtggaaatcagtcggtaataattgttccaatccggagttctgagaatcgggaataccttcccgtggctctattcgatgagcggactacagtaaataaccttgcttattcgatctatgatggatctttgtttaatttggcactaatagcatcaagattgcatctaatctggattagcaccgtctgtggaaagctagaaacacgatttagttactcaaacaaaatgggttggaacacttttccggtgccaatgcttacagataagaataaggaagacttaacacgctgtgccgaggacattttgctggcgcgagaacatcatttcccagcaacaattgcagagctgtatgaccccgaaaatatgcccgctgatctacgtgccgcgcatgctcgcaacgacgaagtgcttgaacgcatctacatcggccgtcgctttaagaatgataccgagaggcttgagaagctgttcgacctctatatcaagacggccacctcggctgtaccggctaagggaaaaaagagttaa

SEQ ID NO: 249009 - DNA, 597 bp, Klebsiella pneumoniae; identical to SEQ ID NO: 80551

SEQ ID NO: 249010 - DNA, 303 bp, Klebsiella pneumoniae; identical to SEQ ID NO: 80550

SEQ ID NO: 249011 - DNA, 435 bp, Klebsiella pneumoniae; identical to SEQ ID NO: 80549

SEQ ID NO: 249012 - DNA, 489 bp, Klebsiella pneumoniae
atgggagggaagaaagcaatgagacattttcttaatgctctttcctttgctgttgccctgttgccagctacattgtgtgctgctcagattcaggggaaggttattcgtgtacttgatggtgacaccattgaagtattgcaggagcaacaacctgtcagggttcgtctcctgaatatcgatgccccggaaaaaaaacaaccctttggacgctggtcaactaatcaacttaaagccattcttgcaggacaatccgttaccgtctcttatacacaaacagatcgctacgggcgaatcctgggacgagtgataacagcgaacggcactgaggctaaccgccagcaagtgctaaaaggggctgcatgggtttatgacaggtacaacaccgataactcattaccggctctgcaacgggaagcacagacacagaagcgcggcctgtgggctgataatcaacctgttcccccgtgggaatggcggcataaaaaataa

SEQ ID NO: 249013 - DNA, 216 bp, Klebsiella pneumoniae; identical to SEQ ID NO: 80560

SEQ ID NO: 249014 - DNA, 897 bp, Klebsiella pneumoniae; identical to SEQ ID NO: 97864

SEQ ID NO: 249015 - DNA, 1200 bp, Klebsiella pneumoniae
gtggccgaagataaagatgttctcctcgcccacctgctcagcgatttccacgttagcgccatccagcgtcccgacggtcagcgcgccgttcagcgccagcttcatgttgccggtgccagaggcttctttacccgcggtggagatctgctcggagatatccgccgccgggatcagtttttctgctgccgatacacaatagtccggcaggaagaccaccttcagcttatcgccgactttcgggtcgttgttgatcgcttccgctaccttattgatggcaaaaataatgtttttcgccagatagtagcccggcgccgctttcgcgccgaacaggaagacgcgcggtacgcggtcggactgcgggttttcgcggatctctttgtacagcgcaaggatatgcagcaggttaaggtgctgacgcttatactcgtgcagacgtttgatctggatatcgaagatcgcctgcgggttgatctcaatcccggtacgctgcttcacaaactcagccagatgaactttgttggcctgcttgatatcgcgataagtctgacggaacgccgcatcgtcagcatatttttccaggttgatcagctggtcgaggtcattggcccactcttttttcagcgtctcatccagcagcgaggccagcgccgggttgcactgcttgatccagcggcgcggcgtgatgccgttggtcacgttatggaatttgttcggccacagctggttatattccgggaacagatcttttaccaccagatccgagtgcagcgccgccacgccgttgacagcaaagccgcccaccacgcacatgttggccatccgaacctgtttgtcatgcaccaccgccagcttcgcccagacctgcttatcgcccggccaggttttgtccaccagctgtttaaagcggtcgttgatctctttaatgatctgcatatggcgcggcagcagcgcttttaccagcttctcatcccagcattccaacgcttccggcatcagggtgtggttggtgtaagcaaaggttttgctggtgatcgcccaggcgtcgtcccagctcagctggtgctcgtcgatcagcacgcgcagcagctccgggatggcgatggtcgggtgcgtatcgttcagctggatcacttcgtaatccgccagttcggccagcttgcggcctgccagatgatgacggcgcaggatatcggccactga

SEQ ID NO: 249016 - DNA, 342 bp, Klebsiella pneumoniae
atggttgtcgttcgggtacagcaccttggtcagtttttccgcgtcgatgccctgctgctcggcgcgcaggaaatcgccatcgttgaatttggtcaggttgaacggatgagcgtgtttggcctgccacagacgcagcggctgggcgacgttgttgcgatagccaagcaccggcaggtcccaggcttcgccggtaatgacgaacgccggctgccattcgccgtttttgctgactttcccgccgatacctacctggacatccagcgcttcgttatgacggaaccacgggtagctgctgcgcccccagtcgtcaggggcttccatctgctggccatcgtcaaatga

SEQ ID NO: 249017 - DNA, 921 bp, Klebsiella pneumoniae
atgagtgcaggaaagcgagtgaccagtctctggacaaaaagagtaaacttatggctttactgggatatctttcgctcagaattaatgcatgttgatgagtctcgtgaattagtggaaagaatagacgatgccactcttttcaaagagtcttgcattaactatatgaacaaaaaagaaatggttaaatattggagtgcggaggatttctttgaaaagagtaagcgagaggttgagggtcaattaataccttttagtgaacttgaatggattgattgtgagcgttcgttgtcatttgttgctaattatattcatgccgaatataagctatatgcaaataataacaccccctctcttcttgatgttactttacctgaatggagccttgacactaatcagggtggcgtaaattatgacgggttaattcttatgatcgactaccaatgtcgtgtatcaagctttaaccatattcgctcaaacttagaacgtttgagaaattcttggctccgtatccagaaaaaatttggcaatccgttctggttctcatccaccagatatgatgctaaatacttgacagattatcagtgggtgatgtcctacttcgacaagaacaaaatgattaatggtaatgtggatttttggtttgaaaaaaatatgaacctgaaaattcattcaatctttgatcaatgggttgagaataaatccgatgctgaaggtgaattgtttattataagaataaaaaaggcatggggtcagaaaaaattcagagatagtgttgcaaacaaaaaggttctcaatacctatattagcaaaggcagtaagagacaacttgattatttggtcagtcaaaatgaaatgaaaatcaatgaattgattgagatgctgatcaatgatgcatatacaaaagccaaacggctttgttga

SEQ ID NO: 249018 - DNA, 957 bp, Klebsiella pneumoniae
atgaatagcacgatgattgaattgaaaaacaaattaaaggaaattcttccctttattaaagataagaatgatgtcatttatttagattatccaatgcatcataatgttggtgatttactaatctaccaaggtgcgctcaagcttttaaaagataatggggttactataaaaacttaccgctctgcggatgattacaatatagatgaaataaagtcaaaattaactcctaatacaactatcctgtgccatggtggtggaaactttggggacatttatagtgcccaccaaagcttaagagaaagtgttgttaaacgcttaaggaataatagaattattataatgccacaaactgctttttttaaaagtaatgataattttaaaaaagcaaaggagattttttcctctcatgacgatgttatcttattcgctagagacacgaatacattaaaaatgttcagagagttttcagaaaaatcttatttgatgcctgatacagcgcattatctctacggtgatatgtctatttcaaataagaatattggagcaaaattatatttcatgcgtattgattgtgaagcaaatccctatcagaatgaaatattatctgaatcaggagatgccacagcaatcgactggagtgatattataactgttcgagataaagcggaaagaaagctgttaagaaaaatggcaacgttcgggatgaaatttaaaattccctttatcaataatttagtgtcagatatctggtataatcattgcattaaaattactaaaagaagttctgaactgttctcatcatatgatgagattataacttctcgaatgcatggccatattttatcgtgtttagtggatactccaaataaaatactcgataattcatatggtaaaaatagtggatactactctcaatggacgagtggtatagattctgctgtcctgcttaaaaattga

SEQ ID NO: 249019 - DNA, 1671 bp, Klebsiella pneumoniae
atgaacagacgttctttcctacataatttgattgcaaccactatagttacatctatctatccagataaaactaatgcagaagtgcctatagctgaatattcaaaggaaaatggggaaaataataaacctgagaatttcaaccagatagatcttagctcatcaaacgcttggaaaaaagacatctatgctggtcaacagtcactagaagaacggttaaaagaaaccgcatcgatttttgactttatccaaaacaaagaagacatatatcaattaaaaaatattaccggaatagaaattgatgtttcaaaagcatttgacactgccatttcgagtggagcaaaatctttgttctttcctccagtgccaggggtatatgtattaggcaatatgcgcaaatcaatcccatttggtttttttatttatggtcattgccgaaagccatatataattaaaggtgatgattcatttaataatacaggaacagtaattagacttgcaaaagatgctgaatatatatttccagcctcgtcgtatataaaatgtcaaggtattgtatttgatggcagaaacaggaaaaaaccattcctaaatcatcacaaccaaatacgaggaggtttactcgaggattgtggtttatatcgatttttaataggtgtcggaagctattcatacacctcaatatatatcatccgttgctctataagcgataatgtacatggaatttccaacctcatagattcaaaggtaatagactcagttattaatgcaaacaagggaagaggtgttaatcttctcaaaggtgcaaataacaatatttttattaatgtccgaaatgaatggaatgaaaaagaaaattattattccgacggttcaaaacagaatatagtatctggtgaaatgagcgatcgttccggtttatccagttttgtggcaagaaatggtggtagctggctaattagcaatcacattgtaaaacgttcaggcagatatgcaaacacagagagcccggactcttcacattttaaattagcaggaaataattctaaaatttatcttagcaatgttttaactactacgggagtagatgatgatggtaaaggtaatatttccccagcttatgtaatatcgacagaaggcaaaagcagggataatataataaccgcaacaggttgtgattttactggctcactaaaaacacctataagagatgaatcaaatagtataataacaaacattatatgctgccttggaatagaagatagcgttaactctggcatttatcaatatacaaacggcaaattacacattggaaaaattattgaacatatttgtgttaaagctaattcttcaaccaacatacggcatgttcaaactagtattaaaaacatcattaaaaatcagcctctaagatggacgcttgaaattattggcttcgatgaaattacgaatgcacctatatattattatataccgcttataatccaaaaaactcaggaagatatcatcctaactgttttaaaagaaaaagtagactgctatcctctcaaattatgggatacagtattacagaccactatagaaattactagggaaaatactttgaatataacaataaaaaataatagtgcaaataattatgaaataagttcaactctttcaaataatgcatga

SEQ ID NO: 249020 - DNA, 2172 bp, Klebsiella pneumoniae
atgtcgctgttaaatgaaaaaaaaacaccaactatagataatggtgatctaaccttgggaaggttacttgctgaaattgtcgataacaaaaaactgataatagcaataacaagtttattcacatttattgctttatcatatgctattttagcgacgccaatttatcaggctgacgctttagtgcaggttgaacaaaaacaaggtaatgctattctaaatagtcttagtcagatgctaccgaattcagatcctcaatcagagcctgaaattgctttattacaatctagaatgattttaggtaaaacggtcgatgacttgaatctccaagttgttgttgaaaaaaaatattttccaatttttggtcgtggcttttcaagactttttggcgaggataaagctaatataaaaattagtaaaatgtatgctcctaggattgatggtagagatccagagtttacattaaccgcaggaaaacaaaatgaatatttattgtctgatggtgagcgtacttataaaggaaaagttggcgaaattttacaacatgataatattacacttcttgttgatgaaatcgatgctgagccaggtactgattttgatatagtgtatcaaaccaaactaagtgctgttacaaatttacaaaacacgttcaatgttgtagataaagggaaaaattcagggatgcttgcattatcagtaacaggtgataatcctgtcctgataactaatataataaatagcataagtcaaaattatcttgcgcaaaacattgaaagacaagctgcacaagacgcgaaaagccttgattttttaaatgcccaattaccgaaggttagaacggaattaaatgaggctgaagataaacttaataattatcgtaaacaaaaagattccgttgatttatctcttgaagccaaatcagttttagaccagatagtaaatgttgataatcaattaaataatttaacatttagagaggccgagatatctcagctatatactaaggagcacccaacatataaagctttaattgaaaaaaagaaaactttagaaaaagacaaaggcatgctgaacaagaaggtgtctgcgatgccatccactcaacaagaagtattaaggcttagtcgggatgttgagtctggaagagcagtgtatatgcaattgctcaataggcaacaggaattaaatattgctaaatccagtgccattgggaatgttagaattattgatacgggggtgacggaaccaacgcctattaaaccgaaaaaaataattgttattataattggattggtacttgggggagtgctttcagtaatatttgttttatgtaaagctctgctaaggaaaggtatagaatcagcagagcaattagagactattgggcttagtgtatatgcaagtgtcccagcatcagaatggttgctgaaaaagtctaatcaaacccagagggtaaaaggtcttagaaagcagcaagctcatgctgctagtttacttgcattagataatccggcagatttagctgtcgaatctatcagagggttaaggactagtttgcactttgccatgatggaggcaagtaataatataataatgatttcaggtgcaagtcctaatgcaggtaaaacatttgttagtagtaacctgtctgctgtgatagcacagacgggacaaaaagtattatatattgatgctgacatgcgaaaaggttatgtacataagacgtttggcttaagtgaaagcaaagggctttcagatatactttcagggcaatttgaaattaaagaatgtattaagaagtttcaaaaaggcgggtttgattttatttcaagaggacaaataccaccaaatccagccgaactattaatgagtgagcggtggacaaatttcattgatttgatatccccggaatatgatttaattataattgatacgccgcctatacttgctgttactgacgcagctattattggtcgtaatgttggaacaacattactggtattgaaacatgaagataacactatctctgaagcagaagcagcgataaacagatttaatataaatggtgtacatgtcaaaggtgctattttaaatggtatagtaagacgtgcagtttattcgtatagttatggatactattcctacgaatactctgataaaaaaaacaaataa

SEQ ID NO: 249021 - DNA, 822 bp, Klebsiella pneumoniae
atggaaatggatgaggattgttttgagcttgaatatttcaattcgttagtaggtgaaaacctggtagacatgattttaacgaaggcccccacgaaagtaaaatggcgagtgattaaagctgcggaccatgtgcgaaaagctcacagaattaaagatatcgatatggagatgttttccattcggttgatcgcagctgaagaagaattggttgtagcaatttttgaatggctgaaattaaacactgataagatgccagaacatagggacttagtgggtaaattcaaaaatcatcaagtaaaattgatgtttacacctgttttgttattgatgaagaatgtccttatagaaagcatcggaccgaatttaaatattcatggggttaacgttgaaatgaaacctcgctttgaaaatgggaaggtcgagctatgtttatcaataccctcgactggattcatggcacctcttaacccattatctatgtcaatcaaccatgaagatgaggaacaagatgttattgaaagtttatacgaaacattagaaaaagaagtacaggataatcttggaatacctcttaaagagtttgttatgaaaagagccgattttaggaacttgcttctgtacgcaaatgatggtggttttgtaaattacgtgattgattatgatgagttaatggacggttttaatcagacgtttgaagctcttttgtggtcgctggcggctttactgactaatgatccactatctcctaacttgggcctggttacccagttcatcgatgtatacagacttgttttgattaagacaaaggttctcaaggggtga

SEQ ID NO: 249022 - DNA, 285 bp, Klebsiella pneumoniae
atggaatttttgaaactctatggcaaagagattttttcagtagtagcggcgttactcacatggaccttaaatacttacttcaaggctcgcgtcaggcttgcatacggcgagttgcacaactttacttttctcgttcctgaacctttaaggaatccagaaggtgaagttattcgccaccagcaacttgtacacacacgttcggtcacgttgttaaatgaaggtcgagaagtcgcaacaaaaattgaggtgattttcaactatcaaccgagatatctgtgtaaatag

SEQ ID NO: 249023 - DNA, 237 bp, Klebsiella pneumoniae
atgtcacgggccataaatggcgggatgaattacaaccccgtgcagtacctcagtggctatggcgctcctgttgtttcatccaccagcaaccattcaggggggaccatcaaccagaccaatcattacaacataatcgctggtggcgtggatgcggacgggctggtgaggcgtatcaagcaggaacagtcggaagacattcatcagccaatgaatttgaccaagactgacaaattctaa

SEQ ID NO: 249024 - DNA, 1143 bp, Klebsiella pneumoniae
atgaagaaaactttgattgcaacattagtgggcataacgatgttaaccgggtgtgggccacaagagttaacccccgaacaaaaacaggaagtttctgcacttaaggctgagttgtcccaaactgagggagaaatctcagcagcgaaagaagttgatcaacaattttctggtgggttaatcaagaatttaacgacagcaagattggaggttttaggaactaataaggctcttttagaacagcgtatcaatgctattgagtccggtgccaaaattgatgtagttgtctctggtaccaagccagaccctgaacttgctgcctctattaaaacagagatcgataatctgactgttaaaattaacgaagctaaagcagatgccagccagtacactggtggtttgattcaggtactgaaactatcagcagttgccactgaagagcaaagcatggctatgcttcagcaaaaataccttaccgctaagtatgggctcgctgaagttaagttagcacctgttcaagataatgcagcaaccgccagcggcaagaaggaagcaacttctaaaactacccaagaacaaccccctctgttgccacccgctgaaggcccgttcggtcttgaagctggtctgacccagaaaaatatcgaagatatgatcggggcaaagttaaaaccactaccggatagcgtgaatctgtatacttccgatacactaccgaagcaaaacgcagattttgaaatgtatggcttgttgatctcgcctaaagctggcttatgtcagatcagagctgttggtaaaaacattgataccgatagttatgggctcgctttaaaatcccggtttgaagatttgagtagttcgttaagttcactttatggaaaagctgaaaccaccgaccttgtactggaggggtcgatctggaaagaacctcaggactggatgatggggctaaacaaaaaagaacgcttcttatctgccacctggaaaggcacaaaagaaacgccgctaaaaaataatatagatactatatctattgaagccagggctaacagctcttcaaaaggctatgtctacctccaatactcatttacaaataatgatgtgtgtcaggcagagattgagggggcgaaaaaaagctctctttaa

SEQ ID NO: 249025 - DNA, 801 bp, Klebsiella pneumoniae
atgtggagaacaacttttttaaagacaatggcagagtttagtgataagagatccaaaactggccgaatatccttaagttctgatgagtatcaacattatgatattttttcagtttatatggcagaccctgagaatgaaaaggagtatctatttgatagttataaagatggaaaaatttacgcgctttcatggaatgaagatgcaaagcgcttcgatacccctgtagagttccaagctcttaaatgcattcattttaatttcacaggaactcatttttataaaggtcatcgtatcgagttcaagagtcttgacgaactcttacagcttaaaagaaggctttataaagtaagggttaggtattataattttgtccatacagcaaatcaaaaagcatataatctaaaacgccacgatatcaaaaacagaatggatgtccttgatagggttattgcgttatttttggcttctgatagagatgatggaatagatttctggaatataatgacagaaatgcacacaaaatattggttccgccatcctgaaagctcacaaatgaaaagaaaaatgaacttaattttaagttctttcgttgatggtggagagttaattaaagttgaacacagtatgtataaaccaacagggaaagcatatatcactcaatcatcatatgtcgattctcttcaaaaacatgaacaggggatgaaactgcaaaaacgaatgttctggacagcctttttctcgtttttggctgccgccattagtgctggagctgctgtttatcaggtaatgccaaaaggatag

SEQ ID NO: 249026 - DNA, 1371 bp, Klebsiella pneumoniae
atgatactgacaaccccagataataacttcagcgatggttttactgatgacttagatttatttggaagaaaaccattatttgagcaaataatgagggttgctctccaggcaccagatgaaaatttggtattagcacttgaggataagtgggggaacggaaaatcaacctttgtaaaaatgatgacatcagaaataaaatcaaaccatgacaatcttaatgttatctattttgacgcttacgaaaatgactatcaatcagacccctttatatcattatcctcagtaatatatgaaatggtggaaaatgataaaaaactcacatcgatgtttggtgaaaagcttttaagtgcaagtaaaaaaatcggtctctctgtactttctcatactgcaaaatttgccatttctaccgcaacagcaaaccttttaaccactaccgctattgaaaaagcatctgatgccattgctgagtcattaactaaccctttagaggaatatatagctgacaaaataaaatcagcaaaaaatgaaagaaataacattgttcactttaaagaaaccctagaagaaattcacgccagaacccagaagaaaactctcataattattgatgaactagatagagcaaggccagattatgcattagatttactcgagaaaattaaacacttattttctgtgaaaggctttgtttttcttcttgttgttaatcgtgagcagttcgaaaaaagtattgaatgccgttacggacaaattgattcacgcctttatctaaataaattcatccattactggtttactttgccaaaatttactctcgctagcgaagatgtaaggaatggcttttatcaatccacattggaaaaatatttactatcaattgatacaaagcaaaaattactgacacgagggggatctctagtaaaaatactttccatgttgttagaaaataacggctgttctctcagagaagctgaaagatgctattcagtactatcagtcattgataacaaacatatgatacgcgatttgagcggtaaaaatttccaggtttcactagcactgatttgttatttaaaggtatgtaatccgaagcttttagaggatttaatcttcaaaagaattacggctgacaacatgctgaaaaacctacacattaaaccgcatgaaatcggtacagatgcaaacctttccaaactaaactctataattaactaccatcttttgagtgattctgaaatgagaaacaggagagaaaactcacaacctaaagatttattacttcaagagatagaaggtaatcgaaacgaacgaattgaatatattcaaaatatatatgactcattaaataatatgcgcatatctaatttttag

SEQ ID NO: 249027 - DNA, 597 bp, Klebsiella pneumoniae
atggctgtaatgagtaaatcggcttatgcccgtcattgtggggtgagtcgccagacagtttatgactgggtagctaagggtgaagtagtgatgtccggtaacaagattgacgttgaagctactgaacaaatgcagtacggaaacgaacattctgagggggctgagggcaaggactatctggtcctgtctgcttcacaggtaattgaatggattcataccaatcaggataagttccctgcagcgcaaagccaggaagaagcgaaacagctgctggaagccgccgcccagttaattacatacgatattgagtacctgagtgatgaagacggaggagaagttgtcaggctctatcacgaacccgacgattgcgagcactatttccatgggttccaccaactgggcaatgctatagccttcatacaagattttatcctggcagattgcctgaggatgaaattacgcggcaaaggagaccatatagatccggagtgggaccgttggtcagtgaagcggcttaaggcattgtgtacgccgactgaaacagatgaagctcgtttaaagcccatccacgaatacatgggggaggatgagagttag

SEQ ID NO: 249028 - DNA, 1416 bp, Klebsiella pneumoniae
atgtcttatgccttgattgacaatgcttctttaaccgcagttgaaaggacccttggtgatatcactattaataatacagatactattaatggtgatttggttgcttttgaaaacacaattcaagcaattcttttttacgataacctgatatgcatagataattataaagaagaatatcgcgaagcgcgaaaagaaaagttcgactttattaatttcttatcagaaagtgactatgatttaagtaaattagacaagattgctaaaactgaagctcaacaaatcaaacctgaaataaaaggtggggagtttgttgataatgacttcggccagcttatagacatgttgaaacttaacatggtttgcacatgggatcttaggtccagcgtatattacctaacaatgaagatgctaggacaacctaatacacctgaatatgagaaatatagcgaattaagcgcgtctatatttaatgaactttctgacattgctgtaacgaaaggctattggtcgtctgaagcaaaactaataagctcgaccggtcatgtttttaccgaagctgagttcagacaagaaagagagaaatcatctggtggtaaaggtggaatgacaactgccttggaaagttttattgctgcgttgaattggatggcttataaatcaatttattacagtgttgtcgcaaaacattttcaagcagattcttttattcatccaattagacatgcctatcaattacattggatgaaaaaaactggcgcatttggacatgattataccgctaaaatcataaactccttatctaaaaaaataaacacaaccagatcagaaatcgttgatcatgggcgtaactcgacaacttcgttggacttgccaatattctcagcatggctagcgaatgaatctggaagtgtaagcagcgtaataaaagcggccctagaaattaaaaatgaaaaccatttcaaaacctgtcgagaaataattcgtgaaattgacacagcctacaacgaatccggaattagggatggtaataaaaaaacaacagctttaatgaaggatttagataaaatatccggtgatattaaaaggctatatggtgttccttcaaaccaaggaattcaaggtagttttttaattaaaacatttaactcactctcttctattatcagcataccaagcattccagaaaaagagtttgctcttagcacccccgagttcatgaaatctaaacggcataaagcattttctaccgtattcaaagatgtcactaacgaactcatgagcattgagcgacttgggggactcagagacaaacttgtctctgagtttaaggtacgcaaaggaccagtttactccggtgcaaaaacagagaatccaaagttcaggtatgcaaccactcactggaagcagccgatgtaa

SEQ ID NO: 249029 - DNA, 696 bp, Klebsiella pneumoniae
atgtctagagaactaaacaacgatttcactgagttagttacttatttttctgaatacaaattaaaaaatgtattcgaaaatagcaactcaagaggaaaagtaagcatgatacataagagatattattctttcatgtgtcttgtttattgtttgtatcatttctctagggagaaaatagacgccaacttactggagcgattgcaagaagcttcatctgaccttggtacaactatgtttttggttataaatggtgcatataaaccagcaaatctaatgatgcgcagctgcattgaaaattctttaaaatcaatcggttgcttgcttgaccccttaatactagaagaaaaatcattgtttaaggtaattgaacgaactggggaacatcctgtattcaaaaaaaatcctcaactatatgaaactttaaaagctgaatactcttcgttatgcagtcacgtacatacagcaactgtaaaagaaatggctcacataaaagctttaaatgtttttcctgaaatcgatttgattaaaatagataatatttcaaaggtgattgataaagtaattaaaaccatgatattaactatcatattaatttcccctgatactttcttttcctttgcacttgagtatcgggaaaaaatcctccttagcttaacccctgcacaaagagcctcacttcattccttaagcgattaa

SEQ ID NO: 249030 - DNA, 507 bp, Klebsiella pneumoniae
atgattgacaaaaaaaacaattcaaaagaaattaaacaactgttaaactttttagaggaattttcctttatttcaaaaaaattctcaagaatcaactttattgaattacttcaagatagttatattgataatttagaagttaacgaaagaaatgcaaaggctaaaaataatgatattaaaggtttccttgttgggtaccttccgaggatcttgttggataaagacctcttccaaaagaataaagacatagatgattttgcacgtatgttaggtatcgaaatcaacaggcctgaaaaaagatctagagaagaaatgataggcataatcgtgtgtgacgttcacgagaaaaactcatccgatttaggtaaggcttataatgttatcaattcaatgtcaaataatcctctagttttgagtagaataaaagagaggaagaacctttctagcgcaaaaaatgaggtttatgactggaatgaagttataaaagatatatttaataaggactga

SEQ ID NO: 249031 - DNA, 831 bp, Klebsiella pneumoniae
ttgaaagttattagcttaatcaatatgaaaggaggcgttggtaagtcaacattggctaccaatattgctaatcatctttcagataaacttgggcaaaaaatattattaatagatatcgacccacaatttaacgcaacgcaatgtgtaatggatacaagcaaatatgttgcacatatgaaaagcggaggcgataacatatgtgatattttttatagttcaaaaattcgactatctacaatgacaggtcctttagttaacacgcctaaagaattagccgaaataaaaccaattcaattaagtgataattttcacattattccaggaagccttgggctatataaaattgaaatgaaaccaggggaagggatagaaaacaagcttagacgctttcttaaaatacatgagaatgactatgattatgttataattgataccccgccaaccccatcagtttggatgtcaagcgcattgattgcatctgattattatctcattccagccaaacccgaccctctttcgataactggtatcgatctattagatagcattataaatgagaagagagaaaatttcgaccttaaaattgaatgtgcgggcatagtttttaatatggttgaaggtaacagtactttatatgaggaaagtcttcgttacttcagcaatcaagcacgctggcgtgataagatctttaagtcatatttgagcaaacgcgctgagttagcaagaaatcaaacaagaggcttatttattaataatttaacggatgaagatatgaagttttcgctgtctaaaattgctgacgaacttctctctagagtaggtgacttatga

SEQ ID NO: 249032 - DNA, 1116 bp, Klebsiella pneumoniae
atgattaaacagaataaattcaaagtgatagatctcttttgcggagctggtgggttaacatctggcttttgtcatggagaaatgtcagattactttgaaagcattctggcactagataatgattctgccgctattgcaacttacaatgctaactttggttcacatgggatccaagccaacattgaagagtggatagtttcaaacgaaatacctgaagctgatattgtaattggtgggcctccatgccaaggattcagccttttgaacaaaaatcgtgaaggtgatcaccgaagagctctttgggaaccctacatggatattatcgagcgatcaggcgcttatgtctttgtcatggaaaatgttcccggattgctcaagagtgatgagtttggggatattattaacagggccgagagcatgggcttcatcatgctgaatccaatggtacttaatacagcagattatggggtacctcagactcggaagcggaccatagcgattggggtaaaacgtgagagtttctataccgaacgccttcctgcatttccaccacacccaacacatcgcgcaccagataaaaatggggctttacctgaatggttatgcacacgtgaagctattggggatcttcctgaaccgattggtactgagattcgtttagaagctccgccattgaatcttcacttcggtcgcaatccaactgaattgtcccaagagcggtataaagctgttccaccaggtggaaatcgttttgacttgcagaagaaccgtcctgacttgaccccagcatgctgggttaaaaaaacatcaggaggaactgatttatttggcagactctggtgggataggccgtctgtgacgataagaactgagtttttcaaaccggaaaaggggcgttatttgcatcctgaacagcatcggcctattactcatcgtgaagctgcacgattaatgtctttcccagatagctttgaatttatcggttccaagacggaaattgcacgtcaaataggtaatgctgttcctccaaggtttgcaatgagaattgctaattatgtactggaagttatggatgcaagaaagattaacagcatcaaatcagaaagtgctgcatga

SEQ ID NO: 249033 - DNA, 879 bp, Klebsiella pneumoniae
gtgactgagatatcatcaattgataatgtattgtttgcagaggcaagaaaggaatttcatgctcaactgttacttaacacattgacaataaactcttctggagttgttagcaacgctgatggtagtaatcgaacaagtcgagatattgctagtgagatagcccgcctcttgaaggctgaaaccattggggaacggattgcggggcaaacttcaggtaatcaatttgagaatatctgcgcacaattcgtacaaaaaacgttcataaaactggctcacttacgtcccggaaattggcttataaaccaagtatctggccgcaatagacttgagattgccaagtatgaacagtatgcacatcttgtggagttggatcgcgctgcaaaagaaaatgctcaattagcagcggctttgggtagcgattatacaattactccagatattgtagttgctaggatcccggaagaagattcagcaataaatgctgttcagttattagttgatgataccgttactcgtatgtccgcgctgaggaagtcaaatggaggttatccattacttcatgcgagtatatcgtgtaagtggaccattagaagtgatagggcgcagaatgctcgctcagaagctctaaatcttatccgcaacagaaaaggagcgttaccgcatattatggtggtaaccgctgagcctacacctagtcggcttgcatctattgcactgggtacaggtgatattgattgtgtgtatcatttcgcactttatgaattaattaaagctgtaaaaaatctaggaatgaatgatgcttatgatatgctctcaataatggttgaaggtaaaagactgaaggatatatctgacctacctcttgatcttgctatctaa

SEQ ID NO: 249034 - DNA, 1032 bp, Klebsiella pneumoniae
atgcgagctttgcttaacgtggatattgcacaccatcttggaattgtgctgcttaagccgggtagtgaattaatgccgtcattcggcgcctgccgagttcttgttgaaataccgccagcaagcatgaaaaagataccatgtggacgtcttcctgatgcccggcagcagttgcgggatgatatggggatcagaccttttttcatgaagaaggcagttatcactgcagccggaggggttagtgccctcgagtcatggttgcgtaggcaggttaaaaactgtcagtggatacattccgattaccatcaccatgagctcgtcccgtttcgccatacgaagggtgtaataatcgcatgctggcactgtgctaatgagctgaaaaaccaagcggaacataccctcgatcaactggtaggtgctaataactctgactgggtaatcgacactgctcgcatcgcgcttggtctggacgctcagcgagcattgtcactggcggagttatgctggtgggcggtaggcgctgggattggcgatgaaattacagaagaaatggcgcgccgatccctgcatattaaagacgatggcattaaatcggtttacagggagagtgagattgttccgtcgataccagccagcagaatactttctccccgtctcgaaaaagcaatcaggccaacggcaataacaacgccgggcaaacctgtggtacctgtgaacgtcgatcctgttgcaccggcgacactattcgtgagacctaagcggagccgacggttatcagctggctttatctcatgggttaaaaaacagccatatgtgtgctgtgggcagcttgcagatgatgcacaccatcttattggctgggggcagggcggcgtaggcaccaaggcccacgatatttttacgatcccattatgccgcaagcaccaccgcgctttgcaccatgaccctgccgcttttgagcgtgaatacggcacccagccggtattgctcattaaaatgctgtaccgggcatactcgctcggcgttctggcgtag

SEQ ID NO: 249035 - DNA, 819 bp, Klebsiella pneumoniae
atggataattcaattgtaacaaatagaaaagggaaaggaatctttaaaagagaggagtggattaaagaatcaaaaagcctctatttatcggcaaaattgttacggcagcaaggaggtgaaagcagaagtaaaatatctagttcaaaagaaagggataggtcagtatctgacttgattgatattgtagtggcgacagacaagagtagccgacttttattaggttatgcatttgaattactattgaaatcagcaatcttacttatgaattatggtgctactaaaaacaccatctataaaatatttaaatcttactcccatgatttacaagccatggttatagatttaggattgacactatcgaattatgaattggaattattgaaacttttatctcaagatatagttcagcaggcaagatatcctattggcaatgtcgatgatgatgaatacctgagaatagtaaatgaaagaagccataacttggcaaataaaaaattgtttaatgatatgatttgtttgtatgaaaaaataaaatcaatagtggttgtgtttgaccgggatgtaaataaatgcgctgatttaaatgtgttcagaggtagttattttactctcttcatgcggaggggtggaggtcttagatcaagagccatagtttgttttacagagcttgttagtacggcaaataaaaataaaaaatatattaaaaaaacaattgaaagtgaatgcaaggggctatcagtattttatacatattattgggatacgtttgatttttatgaagatactggtaagtgtttgcgcgaacttccagaacaataa

SEQ ID NO: 249036 - DNA, 741 bp, Klebsiella pneumoniae
atgacaacatacgatgatcaattcattaaaatgcctatgcgcattcttagcattagccatatcaacggaattaaattctctgataactcaaaaacattatattgctacttaaaaggatttgataaagcgtttccatcatattctaaaataggcgaggtttttggtatatccgcacgagcggcagaggaacgagttaaaaaattagtagagcttggccttgttataaaaacacgtcgcttttcatcttctaacctctacgaggtgttagaaatccctgggcaggaagagtctaacgaagtagggcagactccagatatgccggaaattgtagatagttttttctttgatgatacagaagaagatacatctcaagaaatgaaggaagagaagcagcaagctgtgccggaacacgatcctatgtgcgagtttgacgatacgccggaagaggaagcgccagcgccggaaaaagtgaagccagcgccgaagcccgcggcaaagaaagcacccgccaaacaacaaaccctttctccattcgagtttaagagtccacgtgatgaaacgaaggattggttttatctaaagcactatcagggtgcagagcggtttaccacatttacagattttgatctcccgtatttggcactattcaaggcacagggcgcactcactaatgcttatgcgctggattatctacaacttagaacagatcaaatacaacaacagttagcgaggaacacatga

SEQ ID NO: 249037 - DNA, 339 bp, Klebsiella pneumoniae
atgaataactccacctcatacaacactctgcaatctgtattacaaacctatcacgataattacgccgtccctatgctgaagatattgaacgaaatgcaacgtgatagaacgcttgaaagcctcctggcggcgattaacgcgcaagatttagcgcaagcaatgctccaacatattagcgacgtggcgagccgtatagcgactacggaacactccacgctaacccaggaggaggcagatagtatttctggtgaaatttctgattcgctgctgctgctattgtcgtgtattgaagaaacgtgcgaaatggcgctcgaactggcgccgaacaacaactactag

SEQ ID NO: 249038 - DNA, 1854 bp, Klebsiella pneumoniae
atgttagagctaaacgtaagcaaaatcaacaatgtagtgacatttaccgttgataaaaatagcattgccaccgcgaaaaaagcggctgatgatctgcataaatattttcagaagatacaagaccctaaaatccgcttccggcagcagaaacaacgccgccagaaagctcgacaaatagctgatgatgcccgatttaatgataaacctcgtaatgctgccgaaatgaaagcgcaacgagcagaagagaagaaaaaactcagggaagaaaaggccaatcttagagcgcagcagcagctacagaaacgccaggagacagcagagctaaaacaacgccatgccaatctacaaatctccgggattaaagggaaatatggcctagatcctaagtctcaatatgaggcgcttaaatttgtacagaaacaaacagaggcgtttgctcagggaaatattaccagtcagcgaatgaatgcatctattcgtgaacgtataaccctcctgcgcagggaagcagcagccgcacagagagctactcaggcacaggggggcgcgtatgtgcaggcggctaaaaaaagtaaagctgcgcatggtgacaaagaatttggcattgccagattgcagggtgctgcaatgggatttgggagcatgtttgccgcaggaaacctcgctgcacgtatccagcaaacaggggatgaaaacctcgaactgatcaggatgagtgaacgtgtgaaaaccaacccaaacgcgataaaaacaatggtggcatggggacagcaacacggcgttgattcagctaatacatctaaagccgttgataatatgaaagacgttcgtgaacgtctcgctatgacggttaacgatgcccaaatgaaaaatggtgaatggaagggcggagatggtggtattacagccattatgaacaaatttggatggagtaaggagcagatttccaagttccaggattccccactcgattttatccaggcaaccgtaaatgaaggtcaacgtcgagggatgaaacaggcgcagataggtacgctgatcgagagtttaggtgatgacctgatgcattacaccgatatgttcctgaataacggtgcagagtatagtaaaaccctgcaacagcttgttgatagtggtcagacactcaatgatgcgcagattaaacaggtgatggaatacggcgacctatctaccaaaatgacagctctgacaaacggcctcgacctcaatctatttaccgggtttatggatggttttggggcttctggtgatgagttaacagagaatacaaaaaacctcaacgaaagcgctcatcttctcggggagggattggggaatcttgctacacaggtgacaggtgcaacagttcaaatcagtcagagcgtgcaggctattaacgaatatctaaaatctaaattcccgtcctggtttggcggggataacaatcaacctgcggctcagcagttgtataacggggccgtaggtggctcagccgatacagtggcagcatggattaaagaaaacacgggaatcgacacacagagcgtaggaccggctgtaatgtcattgctggggatgggaccatcatcaacagggacggctgcaaacaactacagcctatcagggcaatctctccgcgatggcgctatggctctgccgtcaactccggcaatgaactatcaggtgaatccggtctttaatttaacagtagccccggaggtacctctgaccctggttagtgacgcctctagactcagcgattatattgattttcaggcgagggcatctgcccgtagttttgaacaatcattaacattgcaaataaatagcggtcaatcagccacaggtggctaa

SEQ ID NO: 249039 - DNA, 1104 bp, Klebsiella pneumoniae; identical to SEQ ID NO: 190442

SEQ ID NO: 249040 - DNA, 561 bp, Klebsiella pneumoniae
atgatgcacgcatgtaatgcttttgatgggacgtcaagaaagctgcatcctgaaatgcgaaaacatcatcgcagattcactcagtcacttagagagcattacgacatttttgggccaatggctctgcctaacataaatttggaaacaacgttctggcccgccaaggtgagtgatcagcaaaaggcaactgatcgacctgatattgctgacttagtgtactgtatacacagatgcactcatggtcatggggacgagcttcctgaagggtttgaactaattcctgatgccactaataagttaaccactacaagtattattgcaagcgccggtaagattcgcctttctgatagaactatttttggattacttggcattgcagttctttgcccagaaaacagcggactacgaattcctgatggatataacctcacatttgcaggagaagtcctgatgattaatgactggtggggaagggctgaagacttcaaaatattggttgaaaaacagaggcttataagtgttaaacttgattttgaagattggtgtaatgaactaaactag

SEQ ID NO: 249041 - DNA, 1623 bp, Klebsiella pneumoniae
atggaaaaaaataagagcggtgaaactccaggtttcaaacaatttgagaatatagatattctcttatcgcatagggagtgctacgggaacccaaagacacctgaaaaaataataggagataacgttagcttagagacattatcgcaattatctattttatcatgcgtgagtaacgaagagcgaaagtttagggagtggtctaaaacaaatattccagcttgtaaaggaaatgctatcgacgaacgccgtatatatggaagagcgcagattatagtgtgttggaagctcatgcttatcagcgcaaataactctaacttgttaattgaaaataatgcagaccctacacattcattaagtatactgcatgaattattaacgcatataaatgattacaatatctcagagaatgtccatcaatatgttataaaatcggctatcattcgttcgagagatgattttaaattcaaaatgtatcgtgcgtacaagatttttattgaaggggcgaatatctctcagtacgtccagttatttcaagaaaaatcaggattctcaatagagagttatattaatatcatttacatgataatttgccggtacatcgtaaaacgaagttctgtaagatttgacattatgttatgtagtgactggatcatagatctgcgtaaggctagccaagaaactgggattaagttgcaattactaataaatgtcatgaaatcagtctcattcgacctcaaggaaggcgcagatttttctgcatctaccatcaatgaaccaactaattgtgatatatttagaaataaaccttttctacgactatctgaaacagaatatttaccaatagaaggtagattcattgaggagcttttgtttgacaatttatttcataaaattcacctctactcaggaaaaacaaagggatttttagatgattttggagccgactttgaactatacgtacaatatatatgcaaagaatcatgcgctttagaaagaactggtttgtatgaatacattcctgagttttcttatggtaaatctaactcaaaatcacctgacgcaatgattttatgttcgaaaaacaaaacacttcttgcatttgaagttaaagcggcaaggtatttagactcaatactttcttccgaaaataacagtaatgctatagaaaaaagttttaataagctcaaatataacccttggaaacaagctcacactgcaatagaccggatagtacttgaaggacgccacccgaagattatagaaggtctttcttgtatgtttgttagtataacaatgaatgagattccgctctctttgcatgatcacaaaataactataggagaccgtgatataagttattgtttctattcccttggtcttcatacatttgagcttcttttatctgttataacccaaaaacatgattatacggcatatgatattttaagaaatgcctacgaacaaaggcataaaatttccactaaaacgtatttattgaggttttacagaaatcaatcaaatacaagtaacttggatcataaagttgcacagtttataagtgtaaggcaccgaaaatttatggaaagctgtaagtattccacccaagtggacctagatctatga

SEQ ID NO: 249042 - DNA, 294 bp, Klebsiella pneumoniae
atggcaaaaaaagatgagatcatacacgaactgatcccactcaatcgccagtatgtgtcccttgctgatgctcaggttaatattgtgaatatcctggaggacacgacaacctatgttaggagccctggcgataaagccaaggcattagaagccataaacaatggcggagagcttgaacctacaaggctagcaatgccttttaacgagtatgtcaaattcattgttgactatgtgacaaccaagctttttaacaatattaatcctagcgatgctgccatgagagttgataagtaa

SEQ ID NO: 249043 - DNA, 1083 bp, Klebsiella pneumoniae
atgtcaactcaagagaaaaatggtactatattatgggttaatacactaaaaggggcttgcattcttttagtaatacttcatcactcaataattacgaccttgacaccttcgatagaatacctttcagcaggggtcttacctgcagagctatgggatttatttaataaatcaatatccccactccgtatgcctgcattcttttttgtatccggacttcttgcgtcaaattcagttttaaagaaaaaatggtcagatgtttttacaaaaaaaatctcaaacttattatacctgtatatactttggggttttttgcagtggctgtttataaaaaaaataattaccgaaccaatgggggcgcaattatcaaatgctgacaatagcgcctatgcaacttctgtttacgactttttaaatcttcttttcaatgcatctacaagcctttggtatttgtatgctcttgcgggttacttttttataagtaagtcacttaacagactaaaatatatcaccatagctctggcaattattttgaattacattccaagatttggaataatagaaagctggagtataattagcattagccaaaacatgattttctttgtaataggcgtttactttagcaatgccattgtgagattaacagagataaaaaaagagaatctagctgcatgggccttaatattagtaatggccttagtgaacgtaaaactaggcattggcaaaaatatttttgtttgtgtggcctctattgccttatcaataaaaatatgccagtacatgaatgataagttcgatatgtcatggctaaactggatcggtaaaaacacgcttcaaatatacgtcattcatcgtatctacgttgaggtattcggtataatcctgcttcgtctcggaattgacgaaggatggtttatgaataacacatactctttaatgtggagcataacatacccgatagcatcagtatttacatatgcaacactttccattttaacttggaaattattaaacaatggtcttgggagaaacttattctcttatccaagtcttttaaacaaacaacctcagcggttatcataa

SEQ ID NO: 249044 - DNA, 702 bp, Klebsiella pneumoniae
atgcgggtcatattgaatacatatattaataatgatgaattaccattcattgagccggccatgcagttgattcgcccttcatcgcttgcagtctatgatatgcagagtaaggccgatcttacaggaaatgccgttatggacttttctggctccttcaatacgcaaggagctgtattgtcatctatcaatgattctattaatactaaaattaatgaatcagataatatgactttaattttctgctggaaccttgcggaaaggtcaggacaaagattttcctctctatcaaacttaacgccttcagccgctccatactccggaattaggctggcaactgatactacaggagtaacgacttggtcatctgctacaggcctgtcatcaccttctgcgaccatgatgtaccctataaccatcttaggatcgtggacggtgcaaacgcttaccgtcagtaatactcaaatcagacgcattacacgtggaggtagcattactcaggtagctgttagcgcaagagcaaagtcaacatatccaatttttcttaacgcagtcccatcaattccaaccggcgtcaccgaaggtactacgggaacaattggatttttctgcgcttacaacgagatactcgcagatgcagatgcgatttcttcaatggatactattgccagcattatggcaacaaggggagtcgcagttccttaa

SEQ ID NO: 249045 - DNA, 237 bp, Klebsiella pneumoniae
atgcgcgtaactgtgcttgatgatgattcgggagagcgaatcatccttggtcgcgaacgtatcacggtttatctcaatggcattaaggtaaagcacgctttttctgccgacgatgataaaggcgaggtgattgccgccgtgcttgatagccggggttacctcactgctgagaacggcgaggttaagcggcagacgctgttcggtcagataaggatcgtatgcccatccaagcaatag

SEQ ID NO: 249046 - DNA, 477 bp, Klebsiella pneumoniae
atgaccagatatgatgagcttcggagtgcggtattaaggaaaaggcagaaagaagacttgtattggagtggcttatataaagtctataataaattcaataaggatttctcagaattccttggtgtcgacaaggaaataatcaaagattcaacaaatgaacgaattccagtgctaacaactggtgtttataatgaggaaaagcaatgcgttgatgatgcctttgacaaccagctgccaaaggataatgaatttttatgcttttgctgttgcctgagagtgggtgggttgagtgcatataatggcacatcaaatatattatttgatataagcgtctacagaaacggtgatgaatacaatttcgtatccaacatcttattaaatacaattaaatgctatgaagttgacggcaatgtagatataactcgtttctttgaagctatatacaacaaaatcattacggatttaaacgcacagtag

SEQ ID NO: 249047 - DNA, 537 bp, Klebsiella pneumoniae
ttgagtggcttcgataatgtttttcgatacaatcatcctaaattgcatggggtgatcatgaacgcagaatacatttcatatgaatcattgatagcggcacgggatgcagctgaatggggtttttggtcgatgattggagcttgggtgtcagcaatggctactttaacggctgctattgttggttttctggctatcaatgtctggcgtaagcaggaagaggcgaaggagttaaaggactttagggttgcagcttttaggtatcacaactcacttattttcgcgccacaatatatgaaggttaaggaaaacgactctcatatggctagggcaaagaatcttttcgatgagcaccaaaacctatatgtttctacccttatgatgcatgatgtaaggactagaggtcatgcatcacgaatccttaacaatatttcagatatatataaaagatatagggattcggagattagcaatcatgaagctcatgaagagattatgcaaataattaagaccgagccactatttggcatgtgtaaataa

SEQ ID NO: 249048 - DNA, 333 bp, Klebsiella pneumoniae
atggtaatagcaaatgatccggtaatgatgctcggccagatgataaacgctgttctgattagtgataccacggcaaaggtgaattcgatcctctgcctgctgataatcggagcgttaatgttctatcagcgtcgaggcgcaagacaccggccagcaatatcgtttctggcttacctgacaattctggtgtacgccactatccccttaaaactaattttcggtctgtaccctcagtcccactggctggtggtaatggcaaacgtgatgatatgcgccgccgtgctgtgggcacggggtaacgtggcgcgtctggtcgatacactgaggcactaa

SEQ ID NO: 249049 - DNA, 564 bp, Klebsiella pneumoniae
atgactatattaattgagttcataaagtatttcactcctatccttacattttcggcaggtatctatgctgctccattcattgaaagaagaaaagaagcaagagttattaaagaaaaaataaaaagcatccaaaacgaaatatccgatgagtataaaataataatcaaatcgatttactctaccgataaaagtataaaaatgagaatcggaaaacccgagggatacaaatatctatctttaccaatggcacttaacctaagattaacagccaacaatcttgaccatgtttacgcttatgtgactgaagataaaaggaaagcatttaaagtacttttactttgtcaaaaaaccattacagaatatcataaccagattgaaggtgagtataaaaacaacaacattctttgcctggcaaaggaaaaagcgatgcttaaatcaatgctttccgcatattacttactaaatgctttgacaactaactgggatacattttcctacccaaaaaattcaaatcatgaaatatgggaaattgcagccaaatcgctaaatatcaccttggtataa

SEQ ID NO: 249050 - DNA, 252 bp, Klebsiella pneumoniae
atgcgcggtggctatgacgtgctgtctcaggccctgcagcgggcggatgagatcaagcatccggtagggcgcgtccgcgacatagaagcgctggacgaactgctggaaacgctgagcgatgacaaaccgcggatcatcgccctgcagccgatcagtcagaaagaagatgcgacgcgcctgtgtatcgacacctgcatcgcccgcaactggcgcctgtctatgcagacgcacaagtatctgaatattgcctga

SEQ ID NO: 249051 - DNA, 396 bp, Klebsiella pneumoniae
atgcagtacccgattaacgagatgttccagaccctgcaaggcgagggttacttcaccggcgtgcctgccatttttattcgtctgcagggatgcccggtaggatgcgcgtggtgtgacaccaagcatacctgggacaagctggccgatcgggaagtgtcgttgttcagcatcctggcgaaaaccaaagagagcgacaagtggggcccggcaagcagcgaggatctgctggcgattattgggcggcaggggtggacagcccgccacgtggttattaccggcggtgagccctgcattcatgatttaacgccgttaacctcgcttctggaacaaaacggctttagctgtcagattgaaaccagcggcacccatgaagtacgctgcagccccaatacctaa

SEQ ID NO: 249052 - DNA, 294 bp, Klebsiella pneumoniae
atgccaacttcatctatcactgaagcaacatccttatcattgtctatctcatctgaggcctgggaaaaggtagttagttttccacccgatccctctcagggagacgaccgcctcgaaaacctgattgtcgcgaccatactgacattcaaaagcgcaggcccggaccgtaagagtattaatttcggtctgtactgctttcccgccgacggcagcagcaatgtaccgctgatgacgccgctgcgcttaacccttgaagatgatcacttattggttactgcccttcacaccagctga

SEQ ID NO: 249053 - DNA, 873 bp, Klebsiella pneumoniae
atgatatctgtcgaagcgctgcaatcagccatttccaacgtttctgtatggcgtcagggtgatgtgtgcgcgccgcataagccgatgctgctgttgtatgtgctgtcgcagtacaaagcaggccacccgcgcttgtttaactacggcctggagatccacgaaccactaactcgtctgctaaaagagtttggtcccaagcggcgcactgactatcccaatatgcctttctggcggctcagaactgacggcttttgggaaattgccaatgcagaaggttgtaaaccccgtaaaggcaacacccaaccgaccaagaaagaactgattgataaccaggtagtgggcggctttgatgaagctgcataccaacagctacttgcacatcctgaaatgatcgaccaactgacccagcagatcctgatagatcgcttccccgaaagtattcagcggatcctcgccaaccaactgggtctggattttatcgatcgttcgaagaaccgcgatccgcgcttcagagatatcgttctccgagcgtaccattcgcgatgtgctttctgcggttacgacctacgactggatggtgcgctggttggtattgaagcagcccatatccactggaaaacctatggcgggccgtgtgtggtaaacaacggtctggcactgtgctcactgcaccatgatgcttttgatatgggcgcattcgggctggatgaaaacctgactatccgcatctccggcggtgtcagccgtagccaagtggtggataacctgttctggcaacgaaatggccagcagttgcatcttcctcacgacaaaacgctgtggcccactgaacaatacgttggctggcatcgtaagcagatcttcaaagcctga

SEQ ID NO: 249054 - DNA, 1362 bp, Klebsiella pneumoniae
atggaaaataaaaaaacgtttactttcattgacttatttgctggtctgggaggttttcatttggcactgaaacgattaggtggggtttgtcgttttgcagtcgagtggaaagaatctctccagaacttatatgaggataattttggtattcgacctcttggcgatataactaaaataccacttgatataatccctgatcatgatgtcttaaccgcagggttcccatgccagcctttttcaaaggctggtgaacaattagggttcgagtgtacaaaacaaggaggattatttttcaacgtagtcgaaattttaaagcataagaggcctaaatttttcattcttgaaaatgtccctaacctgttgaaacatgatgatggaaaaacgtggataaagatccaacaattgcttggcaaagatgggcttggctataatattgatgcggcaaaactttcaccgcatcatttcggtattccccaaattcgtgagcgaatatatatagttggctcattgttgccgcttgacgattttaaatggcccgaagctctgaatatcgaaacctcgatagatagtattttggacaataatccgattgatgcgaaatcactttctcctcaagttatcgattgtttaaatgtttggagtaaatttttagaactctgtcctcctgatattgaaattccttccttcccattgtggtcgatggagtggggggctacctatccttttgaaaatgaaactccttatgcgagaaaaatgcgtttaggaattaatgggttaaaaggcttcagggcgagccatggttgcaaaattggccttcgaaaaagtatggatgatcgttggatggcattgccaagtcatgctcgaacagaagaatttgaatttccaaagtggaaaaagaattttattagacaaaatagaaaattttataacgataataaaagctggatagatgaatggttacccgatattttaaggttcccgtcaagccttcagaaacttgaatggaatgttcatggtgaagagaggaatatttggaactatgttctacagtttagagcctctggagtgagagttaagagaagaaccactgctccaagcttaattgccatgactgatacccaagtcccaattattgcttggcaaaggcgttatatgacacctcatgagtgtgctaagctccagtgtcttgatgaattaaacaagctccctgaaagtccaacccaagccttccaggctttaggtaatgcggtcaactcaaaagttgtcgaatgggtagccaacgcgttattaagtacctcacttgatgaaagctataacaatcatttgaattttttagaagatagatgcatttcctataattaa

SEQ ID NO: 249055 - DNA, 1515 bp, Klebsiella pneumoniae
gtggcgctttcaaaggttgatattcgtccaggagtaagtatattagccgttttgcggcacctcaattataaaccttggtttgctttgggggaatttgtagacaatgcattgcagagcttcttggcaaaatcggcaacgagttctttaaaaaaagtaactatagaaataaatatagactcaactgaacctgcccgaatatcaattaaagatgacgcttttgggattcctttagaggactttccaagagctttcaaacctgcatcaatccctccagataatactggtctatccgaatttggtatgggtatgaaaagtgcagcttgttggttttctcctaaatgggaggttcgtacatctgtgattggtgaaccaataataagaacagtatactttgatattgaaaatatgattgcggatgagtcatatgaactatcaataaaagaaactcaaggtagtgaagaacaacattttacggaggttattttaaatgatgtttttcatgttccagttaaacgaactatccataaaataaaaagccatctagctagtatctatagatgctatattaggaaggggcttttaatactgaaggttaatggggaagtattaagttatcaagaccccaaaatacttagcgccccctattttaaggataaagagggagagccacttatctggcgaaaagatattgactttaagtttggtgataatatttccgtaaatggttttgctgctatacgtgctgtgggtaatactagcgaagccggattctcgcttttcagacgaggtagagttattcaaggaagcgccgatgaaacctatcgtcccgcctatatttttggtaattcgaatagttataaatatcagcgtgtgtttggcgagctatatattaatggggttgaagttagccatacaaaagacggctttagatggggagagttagagcaaacttttctaaaattgttacgcgataatttagatagcgatgatatgcctttattacgtcaggcggaagggcatagagttagagggaatgataataggctaatatcacttgttggacacgctgttgatagctcagtggatgaactgaggaatcatttgccgttgataattcctagtatacttgactctgcgctaattgatactcctgtcgagcatactgaatatcaggctcagctaatgaaacgaacttttgatatttcgtttcgtgatcaaaattggtctgtatgtattgaaatatcgaacgatgtttctaatagtgagtggttagcattgagtgatacagggaggataggtgacacatgtcgacagttacatattcagatgtcgatgtctcatcccctaatgattcagttcgctcaaaaggatggagatgtttctgaaattatgtttcgcgtgggggctgctcttgctatagctgaagtattggctagggactcaggtgtcagtaaagccggaacagtcaggcgaaacatgaatgatatcttacgagatgtattttcgaataggtaa

SEQ ID NO: 249056 - DNA, 2178 bp, Klebsiella pneumoniae
atgagcttagaaactagaaatgatttcattaataacggaatgaattggtctcctgaaaagggtaaagaaactgaagcctttttagaacagagtggtatgccggatggcgctaaagaaaaattacttgaagatgctattgcaatattatcccgcggagtttctcctgaaatagaaaatgggcaagaaactggtcttattgttggctatgtgcaaagtggcaagaccatgtcctttgagactgttgctgcgcttgcaagggataacggttttcatatagtaattgttgttgcagggacatcaaatcctctacttgcacaatcctcgagtcgattaaaaaaagatttggggctaaatgattcaaaacggggccggagatgggtacaactagaaaatccgtcctcttatgatactgctgggcaggtcatccgtagtacgttatccatatcaaaagattcgtctactgaggatatatataaacaaacaattcttattaccgtccttaaaaatcacaaaagaatcaataagctagctgaaatacttgaagctttagatttgaatggaacatcggttcttattattgatgatgaggcagatcaggttagtctaaatactggagtttctcagggagaagagagtgcaacatatggttgcttaatgagactaagaaaggctttgccaaatcacacctatttacaatatacagctacgcctcaagcacctcttcttataagtattatagtttccttatcgcctaattttgtgaaagtattagaaccaggcgatgcttatgttggtggccgtgatttttttgggtcgaactctgcatatattaatattattccaccaagtgaagttccgacgaaagataatcctttaagccatccaccttcatcattgctagatgccctacgcatattcatggttggagtaactgtaggcattagtgagtcaggtaataccggtaaccgctcaatgcttgtgcatccttcccatctgacttctcagcataaagagtattatagctgggttagaagtatattcgatgaatggcacaggtgtttagcgttacgtgatgatgatccggataagatagatctcctaagcgaatttagagaatcttataatcagttaaatacaacggcagcgctaccatcatttgataagattataaattcttttagcattgcatttaaaagtacccagatagttgaagttaatgcaagaactaataaaacaccggcgatagactggcaacataaatatggatggattttggtcggcggaattgcggttgaccgaggatttaccgttgaagggctgactgtaacatatatgcctagaggtattggtgtcggtaacgctgacactatacagcagcgggcaaggttctttggatataaaaaaagctatttggggttttgtagggtttatttagaacaaagtacacttgatgcctttagaaattatgtcacacatgaagaagatattaggagacaacttaaggaaattgaagtaagtaataagtcattaaattcctggaaacgggcattcttattagatcttgatttgaagccttgtagagatagtgttcttgaatttgattacatgcatactaaattttctgacaaatgggttgtcccgaaaataacatatccttcagaagctgtagtcattgaaaaccaaaatacagtgtcagaatttttgaatcgtctatccatgcgttgtgatgagggacatgtagaccgtacagaaactcagaaacattatgtttgtgataatgttcttgtaagcgatttgttcgaaaatttacttgtaaaaataagagttactggaaattctaactctcagaataatacggctttattattgcatttggcaaaggcaattgaaaggaattcgacagagagttgtgttgtttatagaatgagtccaaatgagaaaagggttcgtaatgtagattcttatttattccaaggtgcttaccctgcaacaaacgctagacgtggagaaatatatcctggcgattcctcaattaaagataatgaacgagtgagtgttcaaatacattttattgatttaaaacaaggtgataaaataattattagcaatgttcctgtcgttgcggtgtggataccagggcgattggcttgttcaattatagtacaacatcaaagttaa

SEQ ID NO: 249057 - DNA, 1176 bp, Klebsiella pneumoniae
atgagagttggtatttcgcgacttagttatcctgagaaaagatgtattgctaacacttctctctatgaagtaaaaaatcttgaatatattaatgctaatagatatattagcataacaaatgataaacttttgaaaagaggtcctatatataagtttaatccattatttggtgacttcatggttgatgcgtatgctgtattcaatgacgtagtcgttacaaaaaaaaaatgggtcactattttcgaaacgatggtgccacgatatcaatcaataattaactttcatagaacttcaaatgaagattatgaggggatagccaaaagtaaagcaataaatgaagcgatatacagacttgctgatgataattgcttgagtataaatgctttgtctgaaaacgctatgcgcattcaagcgaagttattggatacatatccagaacttaagccaggtattatgcgtaaaattacagtcaccaaaccaccgcaggcagtacgtgattttagctctgatattaattataaagactttaacaactcattgaatctcgtttttatcggaagagatttttaccgtaaaggtggtggagaactaattgttgcgattaatgagttgctggatgaggggttttttaccacagttgatataaatctaactatagttggtgatataaataggagagataattattgtatcggtcaattcaatgacagggcagccttttttagccatgtagacaatatcataaataaaagagaaaatatctcagtctacaaaaaattagataattccattgtcatgaggaagttaagcgattctcatattggttttcttccaacatgggctgatacttatggatactctgtgcttgaaatgcaatctgaggggatacctgtaataacttcaaatgtccgtgcgctatccgaaattaactattcacagctactaattaatatcccaaccaatcaatttggtgagattgttatcaatagtgaaaaacaagttgaatatgtgagcagattaattattgatgggattaaggataacatcaaattattatttgaagatagaaggttgctggcaaaactctcccgtgtcgtcaggaaagaaataattaaagaacactcaccggacgactattttaaaagattgttaaatacattcatctctcatgagtag

SEQ ID NO: 249058 - DNA, 798 bp, Klebsiella pneumoniae; identical to SEQ ID NO: 225887

SEQ ID NO: 249059 - DNA, 606 bp, Klebsiella pneumoniae
atggatgtcatttataataaagcctttgtttattttgatgatacattagatgatattgttccgcatcgtgcattaaatagccatgaagatattagtgattatttgttctttagtaaagaatacatgcagacatctaccctaacagttagacgaagtttcttcaatgcttatggatttaatgaaaattataaaaggcatcaggactatgatttatgtctgacgtttcaacaaacaggaatgagaattgcttttcttgatataccatgcaccaacattatatggggaggaagtgagcgaccaataatgaaaggtgaatcatttgagtattctttgaattggctaaatgagaacagaggtagaattacggatttagcgtacgatagtttttattggagctttatagttattaaggctgcaagaagttctaataaaattcaaagtatcaagtattttctgggtatgaataaaaaaaatattagatttaaagatctcttaatatatttaactattctttcaatcccttcaatattacagcataaaatttatttggcatacaaaaggttgaatacctatgaaaggaaaaataaatccggtatcacttcttaa

SEQ ID NO: 249060 - DNA, 1362 bp, Klebsiella pneumoniae
atgggacacaaaaccattcgtcataccactagacgtaacgggatctactacgttcgctttcgtctgtccggcaaaaaatatttccgtaagtcgctggaaacagacagctacgcccaagcgtactcggtaatgtcttttgcctctcctgtcattcacttagtgcaatgcggggctatcaagcccgatcaattttccgctcgcctttctgcgatcaccagtcgcttgaaacaacaggctgaccactggttagcacaacaattcctcaatgatgagcggcgtgaagtccaaactcagccgataacagcgcatgaatatcgagatgctgtcgctcctgctgtagttgcggaccaaaaagagctaaccgagccagaaaacgctttaactctggctggtgcatggaacatgtaccgaagcgagaaggggcgaagctggactaaagcaatcgcccaggccaatgagcgttttatggaagtactgctcgtagttttgggtgcatcaacggacgtaaaggcagtcaccaggcaagatattaagcaggtgatggaagttgtagaaaacctgcctaagcgtgttgttcagccgtatcgctcaatgactattcagcaactgatcgaatgtgatgatgttccaccagatgatttggtgggggccgaggcaattcataaacatctcaaaatttacaaatcgctgttcaagacctttcttactgatagcaaagagattctggataaatctccgactgatggcgtagtggcggcaccatcgaaagcacggtttggtgcgtacagcgcgacggagatgagaaaatttgtgggttgggcgctcaagcagcctgacggctggcagaaatggattacgttattattggcttacactggagccaggagaggtgagatagccaagctggaaaaatcgcaaatcaaatatgatgaagacagccagcgtcattaccttctgattgccgaaggtggacagggcaaaactgaaaacgctacacgccaagtagcaattcatcctgacttgatcgagtggggcttcatcgattttgtgaatcgtcagtggaaagagaaaatattttctccagtggcgggtaagaatatgccgaagattggcaaggttttagctgatatccgcgatcagcttggtatcccgtaccttgatgattatggacaacggcggctggtgcatagtttccggcacacaatgatctcgacctgtctggctggatgggttggaaacttggcgcacttgcaacaggttgtcggtcatgagaaaagcgggacggggatcaccagacgctatttgcatacgtttccgctatctgcggtttgctatgtgatcgacggattatgctggtattaa

SEQ ID NO: 249061 - DNA, 687 bp, Klebsiella pneumoniae
atgcttgattttttgatttctcatctcgagaaatggagtacatttataagtgcggttgcagctgtcttaaccgcagtagcaacgtttttcctttggcgagtaacaaaattgcttgccaaggaaacaacacggatggttgaatcatcctcgcagccccatattgttgttactcttgaacctaatgcttgggctgctttttattttgatataaatgtagcgaataccgggaatgcaccggcttataatatagaagttgaatttgatcccccgctgattaatgcagaatatagggaagataaaaaacactctatcccgtttcggaaaatcagtgtattgaaaaacgggcagatgttatcaagtaacctttgcgaatataatcaaataaaagacaacgtttacaaagtagttatcagctggtcgaagcgagcgaactcgattgaaagagaattcaacgaatacgagtatgacatgtcatcatttgaaggaataaattacttgggtgcacgaaacccaatgacgcaaatagcagaacagatcaaaaagattagagaagactggagacccatcacacaaggctccaaaaaaataaaaactgataactacagttcagatgatagagaaaaagaaagaaaagatcgtgacgagtggtatcaaaaaactatagaatcaagagagaaaaggacataa

SEQ ID NO: 249062 - DNA, 225 bp, Klebsiella pneumoniae
atgaaaaaatgtacagtttcagttttaactttgttgggcctgctggcgtgtcagccactggtggcacacgcaagccgcatcacgatgcagttaaccgaacaggaagagaccgaaagcggcaaaacgctttgccggtatgaaaactccgtttactcattcagctatgtgacgcgaagcaagcgttgtccaagcgtgaaaaccttcgacaccgtggattccgactaa

SEQ ID NO: 249063 - DNA, 768 bp, Klebsiella pneumoniae
gtgaatacattctggcttgataaacttgatcgtcgtgtgcttcttgaaccacatgatttttatgtatcacaggcaaagcaacgtctgttgtctcagttcaatgagatctcacgagaagctgatgaagtagaagaacagcattatgaaaaacttgggcaatttttcgatcctgatcgagatgacccagcagattcatatgaagccgcacatcaagaaggcatttcacatttcatcgcgcttgatgaaatgcggaacactgtcactttggctatgacagcgagtgtatttcatcaatttgataaagcactgcgtgagaagatggctcgcgagtttagccactggcaaccagcagcagttgacccactcatctggagtgttgatttccctaaattagtagagttactggaatggacaggtatcgacataaaatcgaagccattctatgaaaaaatagaagcatgtcatctacttgtgaatgtttacaaacacggaaagggaccgtctcacacagaacttgctaacaaatacccgcaatactaccccagctatacaccgagaacagggagaaaacataaccttccacgacctgaacaactcaaggtaagtgaagcacagttcaccgatatagctgacgccatcagagagttttggctgaacattcctgaattccgtaatgagtcacacttgcgtgatcagcctgaatggttcgacaaacaaatgaagcgttacgacagctatctgaataagaatgctgcgaagaaaccataa

SEQ ID NO: 249064 - DNA, 204 bp, Klebsiella pneumoniae
atggcggaccccctcaccgccatattcgagatgagagcctgtgcgcaagtacgggcttttttttcgcatgtggcacccgccgggggggatgagaacccccgaccggggttcgacgagtggcaacgccacccggacagaacgaaaaagacaaacctaatgatactttctcacttcgtgttacaggggcttgttaagcaaaaataa

SEQ ID NO: 249065 - DNA, 630 bp, Klebsiella pneumoniae
atgcaggcgcagaatgacctgatggcgctgcttgcccggaaggaaatcagcattgtcagcacggaggatgaaatcaaaatcatcgcgaagaagaagctgaccctgaatggtggggggagttatatcagacttgatgcaaatgcgattgaatctgctactgcaggcgaatatcgcacgaaagcaggatattacgggcgtcaggaaagcgcttctgaaaaagtcaaaatgcctgtatttcctgtaatggagcctggagagcacagtttacgttttgcttttccaggtgcggatagtgtcagccagagtatgaactggctgataaatcagccgtacagtatttctgatagcgctggaaaaattctgtctaccggaacagtagacacttcaggtcgttttcccaaaatagtacttcctgaaagcgatacattaaatttaatcattggccgagaaacttggagtaaagaggagctttctgtctcatcaactgaagacgacagtatggaggattttgaggatgaagcacctgatgccgatcttcatttaagtgaaatgggttttgaagatgatagaacatcagcattgactgaatcaatgatttcaactttattaagtttaacaaaggatagttga

SEQ ID NO: 249066 - DNA, 123 bp, Klebsiella pneumoniae
atgacgccggaagttgtagagcgtggaaagagaatgctggcgggcggcgcaacccggcagcaggtagccgatgtgataggggtagacgtgaaaacaatctacaagtacctcccggcgacttga

SEQ ID NO: 249067 - DNA, 1791 bp, Klebsiella pneumoniae
atgaaaattacaattgatagtgcttataaatccattcctaaaggtgtgacatttgatcttccagatttttgtgtgattacaggtataaacggaaccgggaagagtcaccttcttgaggcaatagcagatgaaaaaatatcgacagtgctggatgatggcaagccactaaaaaaaattcatattattggctttggtggccttacgtcaacaattgatgacacctatagcgctgaaaatgttttgcaaagtacaaaatattggtgggaacggatacagtcacttcagtggcaaatgaaggcggatgcatcacaattcgatagtagcacagacccaactgaaattgttcttaaaaatgttgatcatgaaatacgtctaacaattagacatgttatgaaaaaaacctcaaagcgacttgatgagttaaacgaggaggatgtttattataattctgactttttgatagggaattcaaatggatctttttatatgcaaatggcctttgcatttaagatgtatcagatgagaaaggttaataatgacttcaaggcttttctaaatgctaaaaacaaaacctcattgccggttctaactgatgaggaatttttagagcgttatggtccagagccttgggtgatgataaataaaatgctggagagtgcaaacattgattatgaagttgtaattcctgatggggggctgatgaactccacgtataaatttaatttaattgataaatctaaagggacagtgatttccgttaatgaattatcaacgggagagaaagttataatttctcttgcatcagcaatatacaatcctattgaatctttaggtaaaccagacttactggtttttgatgagccagatgcaccactccatccatattattctaagatgctcattgataccttaacagaatttgtggtgaaaaaatcaggtgttagagtcattttaactacacattcaccttcaactgtctcagtatgccctgacaattcattgtttgagatgagcttagaagacagaacccccaagatgattagcacaaatagagctattgaagttctcacctgtggaataccttacttaagagttatccttgatggtaggttgcaagtatttgtagaaagtaaatatgatgttatatttttcaatcaactatttcaaatcacatctaaatttatctctttgccatatcatccgattttcttggaacctaatagtcactcatctaattgttcggatgttattaaaattgccactactctttcaaagtatggtagtgatatggttagaggagtaatcgattgggatggagaaaatgaaggttgtcacccaatatatatcctgggcggaggacaaaggtatgcaatcgaaaactatattcttgatccgatatttattgcaatagctcttctaaggtcagaaaagaaaaaatactctgatttttgtttgggtaatatgtctacttattttgacatgttaagtttaaatgtgattgatgttcagcgaatggctgataccgtgctgtcactaacaggcattgaaataaaaaacactaaagaatgcaagcttatgaatggttgggttgtccacttgccagaaaagtttcttcatatgagagggcattcttgggaagcgcttttgcttgagcgaattggtgagttaaattccttattttcaaaggggagagggggtgcgcaatttaagttgtctatattgaaagttattaatgagatgccccatcttttgtctgctgatattaaggaaacattttataatataaaataa

SEQ ID NO: 249068 - DNA, 810 bp, Klebsiella pneumoniae
gtggcaatcaacatgattgataaaatactgagttatgcatcatcttttggcacattcatttcagctattgctgctttatatgcaatttggttaactatttttcaacgcaggatttcatacagaccgatattgataataaaagacttttatactcaaacatcaactgaaaatttcaatggatttgattttgaagtccctgaacaagagggaaatttaccgatagaaataaacaacataggtttgggtaccgccgtatcgctaaaatatcactgggagtatgatgtagaaaaaggtatagagcaataccaatcactattcaaagatacattttcaaaaggcgatgacagtttcgttttatatagaaagaatagcggttttaattttgacgtcggtaaaacgacatattactatcctaaccgcacaatttcttacactatagatttcctattaccctacaactcaaaatcgacaaatacattattggatcttccaccgctacctataaaaataatagaaaacataaacttcctaacaatatttaataataaaaattacaatgtaagaataaatggcccaacacttattgtcgaatttcaggacattgagggaaaaatcaaaataaacaagtgggatacttacctagaaaaacattattcatcaattaccacaactggagaccttgaatgcaactatgcattaaggtttacacccagacctcatggctggacacaaagaaaactgcaaaagatacgcaaaagctacgcagatttcattaacgagcatgattttaataaaaacagagggttataa

SEQ ID NO: 249069 - DNA, 1176 bp, Klebsiella pneumoniae
atgggctcgacaaaatcgcctaagctcccgcgcggcgtaaccatcaggaaacatagtaatggggaaacgattaatatcacctttacgtataagggggtgaaatgccgggaacctttatcgaaccttgaagttaatagtaaaaacattaaatacgccgagcgaacactcggcgaaattcacaataaaattgagcgaggaacgtttaactatggtgaacactttccgcgctctgcacgcctaaagatatttggtaatgcttctactggaaaaacggtgaaggtatatctcgaggaatatcttgttatttgtaaaactagaaaattatcaccttcaacaataggcggatacaagaagtgtttaaacgctctggaatctctacacgtttttccagccagcgaattgacacctgcggccttaaaaacatggatccagagccagaaaacaacattgaagacgatcaggaatcagctttctttccttcgttctgccctagatgaggcagtgactgatggtgttttacagattaacccagtgtcactggtgaccgcctcacgctaccagagcagtaaaactgatgaagaaagtgattacattgttgatccgctttcgccggccgaggttgaagcacttctgcatgctgctggtaataagcaatgggaaaacctgttccggtttgctattgaaaccgggatgcgtagctctgagctatgcgcgcttcgctggcgcgatatcgactttattgggaagactgcacatgttcagaatgctagcgtcgtgggtgttataaaagggacgaaaacaaaagcaggtacacgtaaaatcgagttaacagaggaagcgctgtatgcactgacttgccagaaacccttcacatttatgaaagatgcgatggtttttgaggatccaaagaccgaaagcccctgggccggcgcagatgcgatcagaaagaaagcgtgggttccaacgttgcgtaaagcagggatcaggtatcgcaatccataccagaccaggcatacgttcgcgacccggcatattagtcgaggtgccaacctattctggctagcatcacagatgggacataaaggaccagaaatgttgtttaggcattatggtagataccttaaagagtatgataactcgacagcaataaataaattgcataacaaagtcaaataa

SEQ ID NO: 249070 - DNA, 567 bp, Klebsiella pneumoniae
gtgaaccatttaatgatcgacctcgaaacaatgggtaacaagcctactgcgccaattgtcgcgatcggcgctgtattctttgaccctacaagcagtgagttgggcgcagaattctatgtggccgttaacctcgccagcgctatggagcagggtgcaaaacctgacggtgacactatcctgtggtggctgaagcagtcagctgaggccaggtccgcgatttgtaccgatgacactcatcacatcgatgaggcactttatgaactgagtgacttcattagccgcaactctgataacccgcgttatctgaaagtctggggcaatggtgccaacttcgataatgtcattttgcggactgcgtatgaacgagcgggtcgtatatgcccttggcagttctggaatgatagcgacgtgcgaacaattgtattgcttgggaaacaactgggtttcgaccccaaacgcaatatgccatttgatggtgtagcccacaacgcattggccgacgcccaccaccaggcaaaatatgtctctgcaatctggcagaaactattgccttcaagcgacgaataa

SEQ ID NO: 249071 - DNA, 357 bp, Klebsiella pneumoniae
atggagaatcaagacagtatttatctcttcctcgatattattggcgggatgttggggccggttattggtgtaatgatggctcactatttcatcgttatgcgtgggcaaataaatcttgatgaactttataccacaccaggagattataaatattttgataatggttttaatgttaccgcattcctggtaaccattatagcagtcattttatcgctcggtgggaagtttattcctttgcttgaacctttctcccgtgtgtcatggtttgtcggtgttattgtcgcttttgttgcgtacgctttgctgaagaaacgggcgcaacccaataatctgacacggcctaatactgttagttaa

SEQ ID NO: 249072 - DNA, 600 bp, Klebsiella pneumoniae
atggtcgtactggtcagccgcccgcgacgacgcagggaagccagagagccggggttaaatggggtgccctgtgctttcccgacgattttcagaccaaacgtgcgacgatattcaaccgctgtaccggtatggtttaccccgtacagcgcgcgacaggctcgcggtgacagcgccgtccagccagaaccatccgcatcattcgtccgtgcggtaacatcagccagcaccgcgcgtacggcatcaggtggaacatcaaccacgtcctgtgcaaacggcagaacggcgcttttcagttcctcggtcaggttgtccagggtaatcacgtttttaccaatggacagcagcgggatttcaaccacgccattctgtttcacccgcagtgcgcagcgtttggttttcgggtcaacccaggcgaggacaaaaccgcttgccgggtcgagtgtcaccggcattaacccctgcacctctggcgtcagtttctccagcgcgatcgaaccatcacccagcttaatcagtggaatttccacttctcctgaagttgtcacccgcagggcgcagcggcgggttttcggatcaatccaggcgagagaaaacccgtag

SEQ ID NO: 249073 - DNA, 984 bp, Klebsiella pneumoniae
atgattgaatgggatgaggtagaagaaaatgacagctataaaaacttactattaggcaatggattcagcatcaatattagcgatagattcaattacaaaaacctactatccgaagcaatcagactaactgaagcgggtgagataagcatctacccagacacattcaaaatattcaaagaattagacacaacgaattttgaagaggttttaaaaatttaccaccatgcttacattgttcataactacaacaagccagctatagagactgcttataaaaaactccaagaaggactattctctacgattagaaagaggcatgtgccaaaagaaaacactccgctaataaaaatctacgatagaatcaagctatacaggcatctatttacaacaaattacgacttaattccatactggagtttttttgaaaatcgcataggagatatgaaagattttttttggggaggaggtgaaagagtctcatttgataaaaacagcacggaagtatatggtggcaacgaaacattagtttattacttgcatggtgccttgcatcttgaagtgaatgaggccgggagagtacaaaaaagagaaatagccagaacacttgaagatgagattgacaaactcaaatcatcttttagtgctaactcagggaagtacccattatttatcacggaggggaaaagtgaccaaaaaatgagaaaaataagatctaatgactacctttcattttgctatgaacagctaaagaaaattcgcggcaacttaattatatatggacactcactatcagaagagtatgacaaacacatcgttgatgcaataaaccagaacagtgaattaaaaaaaatagcaatcggaatataccctttccaatccgggctggaaatagatgaaatagaagcatccatgcgaaggaggtttgaacttaaggaggttgttttttttaactcaatctctcacccattaaatgtcaatatttaa

SEQ ID NO: 249074 - DNA, 456 bp, Klebsiella pneumoniae
atgaatgacttcaaaccctttgaggacaagctggccgggttaatagcggccctttctcctgccgggcggcgtcggatgaccgccgacattgcgaagaaactacgccagcggcaacagcagcgcattaaatcgcagaaagcccctgatggttcgccgtttgctccacgtaagcgccagcccgtcagggcaaagaaaggccgcataaagcgcgaaatgtttgcaaaactgcgcactaaccgatttatgaaagcgaccggtaacgacagcgcggcggtggtggagtttaccggaaaagtgcagcgtattacccgtgtgcatcagtatggtttaagcgataagcccactccaaatagtgtggaaacaaaatatatcaagagacaattattgggcttcaatgaagatgatgggaagatagttgagggaataatgatcaactatctttcggatattaaataa

SEQ ID NO: 249075 - DNA, 885 bp, Klebsiella pneumoniae
atgaaattttatactccattaagataccccggcggaaaaggtaagctatcttactttttgaaagatgtcattgaacaaaattcgttgaatgatggggcttatgctgaaccatatgctggcggggcaggggtagctttagagctattattagaggagtatgtccgtaaaatttacattaacgatgcagatttcgcagtttattcattttggtcgtctgttattgatgatacagataatctttgtaagctcattagctctgcaaaaataaatatggaagagtggtgttttcatcgttatgtgatctctaatccttcagaatttactaagctcgaaattggtttttctgcattctttctaaatagaactaatcgctctggtattttaaaggctggcgttatcggcggtaaagctcaaagtggaaagtggaaaatggacgttcgatttaatcggtgtgatcttatatcaagaattgaaaatatagctaattataatcagcgaatagttgttacgaaccttgatgctttggattttcttgatgcgttaaatttcatggatagtgtgggtaaggctgataaaaataaaacgcttttatatttggatcctccatattatattaaggggcaaggcctgtataggaatttctatgagcatgatgatcatgttttggttatggaaaaacttagagatataaatttccctaaatggcttgtctcttacgataatgctaaagaaattaaagatatatatagtggttttcctcaggttgagtactcattgcagtatacagcacaacaaaaaaaatctggggaggaagtgatgatattttcccctggaatggcgatccctgacactcttaaaggtgtctctatgccaatttccgcataa

SEQ ID NO: 249076 - DNA, 1500 bp, Klebsiella pneumoniae
atgaatcaaataaaatcaatgaatatcaataagttgttattagatgttgataaccctcgtttccctacatcagcagaaaaccagcgtgatgctatagcaaaaatgcttgagttacagtatgaccgtatctatcgcttggctaaggatattgttgccaggggactggatccatctgaaaatatcttagtctatccaagtgaagaggatgacggatttttcgtggttgcagaagggaaccggcgagttacagcactaaaacttttattatctccgaaattagctccgagcgaaaaagcaaggaaagcttttgaaaaacttaaaattacgcaacccaacgatattaaaattataaataactgcgttctctttgatgatgatgattacgaacattgggttaatctgaaacacactggacaaaatggtggagtcggcagggttgagtggactgcgccagaaaaagcccggcatatggctcgtatgggtaagcagtcatttggcaaccaagtacttacttttttagaattaaattctgacttctatagagatataatagataaaaagagattgttaagaattacaaacatcacacgtctttttggtgatttaaaagttagagattactttaacttaaaaagtatcaatggaatattatattcgtttcagccttatcaacgttttcgagaacagcttaaaaacatcttgattgtaatggttgaggaggatgaaaaaggtaaggcttgttttacagttaatagaattcgtagtcaggatgatagggttacattcattattgaacaaaaaattaaggcatctgaaaaccttctgaataaaccgtggagcttacttgatccgaatcccggtgtttctgaagaggatggtaaggttgaattagaagaagatgattcccctaatactaaaggaggtgactttcctggaggtagttcctttggtgggaaagatgaaaaggatgatgaatattttaaaggtgaggatgaaaaggaatctaaacctgagcaggatgaagaaccaaaatcgaaaggcaagggtaaaaatccgcctaagatggatcgtaataatttaattccttcttatgtgaaacttaattttagaggtcataaaaagtgttctcgcatattcaatgaacttaagagccatttaaccttcgatacgactcccaatgcaatttcaatattgttgcgcatatttattgatctctcagtaagtgcttttatcgaagataataaaattgaatcgaaggatccgaatagaaatccagggcttcatgataaggttataatgtgcgctaactttcttcgtgataataaaaaattaacaggaagtcaatgcacagctgtaataactcattctagtcaaataactaagaacaatggttctttgcaacagtatgtacacaatcctcatttgattctttcgaaagaggctgtgaacactgagtgggataactttgagttgctgctcagccttatctggagtgactga

SEQ ID NO: 249077 - DNA, 783 bp, Klebsiella pneumoniae
atgtccagcgtctttctgagtcataattctaaagataaaccttttgtcagaaagcttgccgattcactaagaagtgaaggtcatgttgtttggattgatgaggcagaaattaatatcggtgactctcttgtagaaaaaattagagatggtctcgataaagttgattacgtagctgcgattttgtcagaaaattctatcgcaagtgcctgggttcaacgggaactggacataagttcaaaccgtgaaatagcagaaaaacgagtcatcttactccctctgatgctacaacacgtagatttacccgggtttctcttggggaaaaagtatggtgacttcaccactgatgaaaattacgaacaatcgttgaaagagttgttaaaagtgcttggcccagtggataaacatcttcctgttgagcctgaagatattgaagagttaaaagcacaactgcaagccgcaaaagattacgctgaagctattgccagattacaggaacaccaaaacagttctttttcctccacctggacacctgcactcaaagcaatggttgaagagaaaaacaagcaatttcctcaacataaagttatcaatgatgcatatgcatttaacgcaataaatgatgatgttccggtgacactcgattatttgctatgggcaatagcaaaaaccatgcgcaaaggtgcgcatccattagatactctaatgcaaatgggcaacacttatgataaagccgaagcaatgattgaagcttatatggcatacgtgggaaaccaacaacattga

SEQ ID NO: 249078 - DNA, 2238 bp, Klebsiella pneumoniae
atgaatgtcgagcaaattcgcccgcgcattagcaaaaatttgaaaaatttatttctagatcctaataactaccgttttgttgacaatgaccagcacaagccagtctcagaaaaggacatgctagatccaacaattcagcgtaggactcgcttttttatagaaggaaatagacaagagaatattaaagatctaatagcaagttttaaagctaatggatacttagatgttgatgttattcaagtaaaggatttaggagataacaattatttagtccttgaaggaaatcgtcgtgtaacggcgctgaaagcattgcaggaagcacatgaaaagggttttgatattggaaaactagacccatctatttttagaagtgtgcctttcgaaatccataataatcaagatgttgaaaaacatctgattgtgatgggattgaagcatataagtggcaataaaaagtggtcaacatttaaccaatccaaactgctttatgattttttaaaaccatatgaagacaaaactcgagatgagtatgttgaaaaagaagatgagctagttagttcgctcggtatttctaaaactcgtcttcgctctatgcttagagtttataatctaatttccttatataaaacaagtgagtatggtgagcaattcgaaccaagtatgtttggtatttttgaagaaataatcaaaaagcctgtaatcaaatcttggttagactggagtgataacggttattatgctcgaaatttagtgaatcttgataggcttttttcgtggatctctaaaacagatgaataccttgagaaaaatgagctagaagatgacattgaagaggaaagtaatggtgaatacgttgagctagatccaataattactaaatctcttgagatacgagatcttgctctgttcatcaataatgaaaaagccttgaaggtaatggaggatgagcgtagccttgcaagaggattagctgcgagcggttcagtaaatcagcaaaactataaaaatgctttaagcaagcttgaagactccttgaaggatttaaatttatatagtagcctcataaaccaagaagatttgcgcttattagatgatgcaaaagaaaaactaacacaaataatgccaaaacagacggctataaatatcgaaggaggaaactatacaactaattttgagtatggagtaaaaaaacactttaaatctattcatatcaaaaaatataaattctttaaaaatttctcattggataatttcaataagattaatatcattgctgggtttaataatgctgggaaaacttctttacttgaagcgatttacttattgacgcagcgtaatgatatatcatcgcattttaatcttattaggcaaaaaaataaaatcagtactttgagttcaacattgttgaatgctcttttccaagataaaataatcttatcaggagtgtttgatgatagtaatgttactgttgaaatgattaaatatgatgattcttcaattgataaacaagatgactatatagcgtcttatagcttaaagtctagcattgatggagaatttagaaataacacagtccatacttttattcatgaacgtatgagaaggaatgctgatcaagtttcgcatttgtgttcatcgtcatttaaaagcccttatttctacgatatagacgatttgctcactgattataacaaaagtataggtgcaagtttaacgtctgtaactgactcagagtcagatgatttaaatatacaatccgctatcggcctggttattgaatttatgaataaaattgagccaacgataaaagatgtcagattcactgaggacatggagctcaaaaggtttatcgtagaatcagcatatgattttaacagaagtttcgatcttacctcttatggagagggtattcagcgcatcttttatatagccttatcttttgctgcgtgtcgcaatggtgtactttttattgatgaatttgaaactgcgattcattatagtttactattggagtttactaaatttacgcaacaacttgcagaacgtttcaatgtgcaagtgttccttacgtcacattcgggggaatgtatcacagcttttttaaataacgattataacaatgattgtattactggatttcagttaagcaaagttgacgataaagtagtcgtgaaaagggctgatggcgaaagatttggctatttgataaaaaatattgatcttgatattagaggctaa

SEQ ID NO: 249079 - DNA, 843 bp, Klebsiella pneumoniae
gtgagtgtatcttataatagagtcatagttgccttttgtgaaggacagcatgacgtcgcttttcttagcagaattcttttagttaatggattcctacttcaagatctcaaaattggtcaattacctccaccgtttgataaacgctttgaaaaagaactaagtcaagtaagaattccagataaaaaacttggttttcagccaaacgggccgaaactaccttctgtttgtttctatcatgatggaaacttaatttttatacataatctaaatggtgatggcaaaagtcgtgaaagggctgagttagttactatgtataaagaactttctggtacagatgacttcagtatagaaattgcatatagatttttatacttttttgatgctgatgaacttggcattgatgcaagaataacagatattaaaaatgagataggtttagaagaagctactcaactctccaatggtagtattattgatttcgatgggagtgaatggggtggttatatttttcatgatattcaaactcagcttggtaccttagaggatcaattgttaggttattttcataacaaaggccaacaattgcagcaggatattttgagttttcttcaaactaatttattgatacaagaaagaacgaagcgatttataagttctaatgctggtgaaagttatagtggaagatctcagtattacgaaaaaaaatccgttttaggtatgtatgctcagctccagttttcaggtgttagtaatgctgttttgattagtaacacagattttttaaaagctgtcgatattaatggatgtcagcaatgtactctaattaatagactttttatgtga

SEQ ID NO: 249080 - DNA, 291 bp, Klebsiella pneumoniae; identical to SEQ ID NO: 5978

SEQ ID NO: 249081 - DNA, 165 bp, Klebsiella pneumoniae
atgttgatgctgatcgtcgtttgttgcggcccgcaatgcttgaggctttgctggaacatcagcctttatcacgttccgagtttgttgaacgaatacctcattatctgcggcaagcaacagatgtatacgaagcgcaacgctttcttgaccgagtcttggcattaa

SEQ ID NO: 249082 - DNA, 330 bp, Klebsiella pneumoniae
atgaaagattggacagaagacttaatttccgcactcgttgattgcgaagccgatagtgacattattgaaaccttaagagaccttggcgatcaaggacggcttggtggatggcgtattgagcctctggatattcctggaggctttccatggtgtttgtcagatggacaagtcaaagtggcgctgagtaagtcaaggaaaaatattgctatgacctcaagtgttctcccttttgagcaagaagaagatgctaaaagttgcaataaatacatcacgaaactccatacggtcttcaatagtactaatggtgtcgtgaatagtagtttaatttaa

SEQ ID NO: 249083 - DNA, 192 bp, Klebsiella pneumoniae
atgaaatttttcttagtttgggaatgctttgatgaaaaattcaaacttatagaaaagggttatcactttctagctgtagatgatccggaagatgttgatattgaggttagtgactttgttaataatatgtcagaagctcgaaacatgaacccattaaattttgtcgtaactacatgtcagccgatgccttaa

SEQ ID NO: 249084 - DNA, 291 bp, Klebsiella pneumoniae
atgaatgatgattcacgtaaagacctacaattgtggtttggtttgtcgcatgcaagcacctgcgtaatgccccgtgttttcatggaggccatgcatgcagtgtggcaaggtaagatagcaggcctgctgtttgagtataacgacaaaatcaaaacggacgtatgcggcattcatagctgttttgtaacagcgaaggacggtaactatcggttcatgaaaatgctgaaggatatcttgaactatcgacatccgttgataccgcctgcagctgggtgcggatcatctacctga

SEQ ID NO: 249085 - DNA, 189 bp, Klebsiella pneumoniae
atggaagaaaaattcgaacccggcacccttgtgcaattgaagtctggtggtccaataatgacagtggaaagattcgataaaagtcttgataaatattgttgcgaatggttctccaatggaaaaagaaatagcgaaatgtttaaagcaacatcaattcaacaatttaaaccatctgttggtatcttgtaa

SEQ ID NO: 249086 - DNA, 477 bp, Klebsiella pneumoniae
gtgacgaaattaactctcaggcagcaggaggttctgaacctcctgatcgactaccagcgtaagcatggttttccgcctactacctacgaactgaccggcatgctggggtgccggtcccccaatgcggcggcaacccacctgaaggcactggagagaaaaggggccatcacaatcacccgcggggtatcccgcggtatcagcatcactccatcactttcccgaaaggagctggtcgttaacctcaacagcatcgtgaaagtgaaacttaatgaagtttccctcagtcatttggaaaaacaacacgaggaaaaccgtatacgttatccggggatattcggcgagtttgtaccgttggcgacagacgaaaatggctactcgtcaatgaccctgtggcgccttatgtctgacctgggacagctttgctattgcggaggggaggctccctttgagctcaaattgattttggaggatgaatga

SEQ ID NO: 249087 - DNA, 1059 bp, Klebsiella pneumoniae
gtgcgagcattgcttactccggaaattgtaccgcgcctcggcgtggtactgttcaaacccggtcgcgaactgatgcgtctcttctctgccgggcgtgtcctggtggaggctgagccacaaaatatggcccggttgccgtctggccgcgtacctgacgcgcggcaaccattggcggaggatcccactcttcatgtgttcttttccgacgagcgtgtgatacgcgctgctggcgggttgccggcgctggagcgctggctcaagtatcagcacaagtcgtgccagtatcctcactccggataccaccacgatgagctggtaacgatgcggcatccaccaggtgcgctgcttatgtgctggcactgcgacaataatttgcgtgaccagacgaccgctgagcttcaggcgctggcgctgaacaacgtcgtcgactggattattgataccgtgctgatcgcccttggttacaataaagaacgctctctttctcttgctgagctgtgctggtgggctgtgcagtcaggtattgctggcgccattaaggagacgatggcgcaacgtgcactgcggctaccagaagaaccatttttatctgtctataaagagagtgatatcgtgccatcgttgccggccaccagcgttctgcaggagaaagtgaaacctgcaggagttgggattgagtgcagaagtaacgaagtcctgcaggcggagccgcaacggaagattctggcgttaaacgtggatcctgaatcaccagagtcattcatgcttcgaccaaagcgccgccgctggacctgtgagcagtacacccgctgggttaaaacgcagccatgtgagtgctgtaggcaaccatcagacgatccacaccatataatagggaatggtctggggggaactggtaccaaggctcatgatctcttcgtgataccactgtgcagagtgcatcacgatgaattacacgccaatacatcagcgttcgaaaagaagtatggcactcagttagaactgtgggctcgttttctggatcgggtaatgggtataggcgtcattgtaaaagcttaa

SEQ ID NO: 249088 - DNA, 804 bp, Klebsiella pneumoniae; identical to SEQ ID NO: 6089

SEQ ID NO: 249089 - DNA, 264 bp, Klebsiella pneumoniae
gtggaggtaataattgacgatatgatcatttattctgcctcccagagcctgataaaaacggttagcgccggggttggatttttcagcgttccagctaaggctaaggcattcctgttcaagcgcaagccgggctataaagcgcattatcgctttacccgtgcccttatttcgatcgcactgagaaacatacagctctttaatatgcagctgacggcactgttgcaaatagtcggtggtgataaacttatcatccccttttgctga

SEQ ID NO: 249090 - DNA, 141 bp, Klebsiella pneumoniae
atgattggtacggtgcatggccacagcgttttcatcatggttaatggcaatatcgacactacgcccaagagccatctcaatcccggtagaagcgccgccgcctccggcaaagttatcaacgataatttcacgcatagctaa

SEQ ID NO: 249091 - DNA, 501 bp, Klebsiella pneumoniae
gtggataaaccggagtttacgccggttaactctgaaacgatcgccacagctcaatccctgatcatcaaacaaactgcgaaacaagcgctggtgggctggcttaacggtgttggtctcggatccacaattgcacgtgaagaaaccatagaacgcatgaactcggtgtacgcagagtttgtcgacacatgtccggtaactgagttcatcgatattgtcggtagactggatcaagcgagctggttcaacagcaggctgatccgcactcatgtccgtgaagctctctccgttgccaaagaggccttacccgaaaaccggatatggccactggaagtaggcctggtttttgagcgagtcgaaggcgtgaatcatcttaatgagtctcagcaaaataagctgaaggcacacatcaatcagctgtggcttgagcgtacgcccagtaccgaaatcataactattgccagcgggctggtcagcagcatgcagggggttagctatgcgtga

SEQ ID NO: 249092 - DNA, 267 bp, Klebsiella pneumoniae
atgcggttgcagcattcgcatcccgatatcaacgatgcggtacatcactccgccgatatccaccagcccggtgctatcctctccgcagtattgctgcaggaacgccagcacctgctgtgcgcgttcttcgtcatagtcctcgatcgccagagtcgttttaacctcccctacgtgctggccgccggcagtgatagtcggcatcggctcgtcagtagactggccgtcacggcaagtaccgcgcagtttaaccagatgagaagcgactaa

SEQ ID NO: 249093 - DNA, 285 bp, Klebsiella pneumoniae
atgtggctgcagcatgcgcatgccgatgtcgacaatgcggtaaacgatgcccttaatcgtcaccagttcgctgacgccaaaagaattgaggaactctttaacttgatccgcacgccgctcgtcgtaatcattagccgccaacagcgcgctaacctctcccacatgctgacctccagcggtgattgtcggcatcggttcatcggtacgctgaccatcacggcaggtaccacgcagttttaccaggtgcgatgtcacaagagcgtgatgatcaacggtagtaactga

SEQ ID NO: 249094 - DNA, 267 bp, Klebsiella pneumoniae
atgaccaaacttcgactcggcaaaggtgtactcggctttatctccaaaagccgcaaccacgcaagcccaggatcgtatgccgcttttcgcgaggatttcgtcctgaagaagtgggatttcagtttcagcttgctctgtatgaggctgatccattactggagctgttgcctgtttacccacggcgtactgggccagggccatactcgcgcgccccttggcttcaagagccacacgatcgatatagctaaagcgctcccctcgccatga

SEQ ID NO: 249095 - DNA, 510 bp, Klebsiella pneumoniae
gtgcgttttctgtatgctaaatcctttttatcgagcaagaccgactttcaaatcgcgggttaccgttactcaacggcaggttattatagcctcagcgatgcggttaacgagcgtcgacgctggcacaatggcctgtacgaaaatgattactggccctctgacgaagacgaaagctggcaggcaagcgctccccaacactattacacgtcctggttttataataaaaagcatcgctttgatatttctgcccggcaaactctcggtaagaacagcgctttcttccttaacttcagccagcaaaattactggaatagctcaggaagcgatatctcgctgcaggcgggctttaacagcactatccataacgtgaactatggtctgtactatcagaatacgcgtagccacttcacccatgacgacaatagcatcacactgcgcgtttccatcccttttactctgcaagaaaaccgccggatcaataccgcatttaccctcgcccacagtaaatag

SEQ ID NO: 249096 - DNA, 177 bp, Klebsiella pneumoniae
atgaacaacatcgaaaaaatgaagcctgaaactcatgagacggcagcggttgagagggttcgtacatggcaagaggatttagccaaccaaccccagcttgatagcaatagcgatattgtagagaggcaattacggggaagcattaacggaatgattgttaatgatatgttaagatga

SEQ ID NO: 249097 - DNA, 219 bp, Klebsiella pneumoniae
atgctgaaaataaattctggcttaattgccagcgggaaaactcaacctgaaatcctgcccggcgataaatggcaagataaaagcggattaccaataattattgaaagttaccgattcaacagagtgacattttatcgagatggctatgggtatccttgtatttaccctgagcaacgatttatcaaagaatttcagcctgtgaaggataataagcaatga

SEQ ID NO: 249098 - DNA, 321 bp, Klebsiella pneumoniae
atgagcctgtataacgatttagttcgccacgaattcggcaaaggcgccaccattgatgagctggaaggcattcagaaccgcatgaatgaggccgcgagtaatttggtgcttggcattagtgccattggaagcctgatgttctgggctacggacaatgacaactacgccgaggaaaccgcaaagggagacatgcgcaaaataggcgcaatgctgggtacggttggtgaggtagtacgggcgttgaatgatacctcagagaacgcggctgcatttcgttctgactgcatgaaagggtcaaaggtgagggaaggtcgctcatga

SEQ ID NO: 249099 - DNA, 201 bp, Klebsiella pneumoniae
atgcatgaattgagattccagaagcccgctgaaaaagcatttcaggcagaaatcattctcagcatgatgaaaaaaaggacagccgctagcatggaggactgcgagatagatgcgttgctcgcaatgcttaaagggttgattggcgatataagcggttttcttggtgaagaagcatcacgcgaggaggaagaaaatgtttaa

SEQ ID NO: 249100 - DNA, 1077 bp, Klebsiella pneumoniae
atggatgcgaaaacaaacttaacaaaaaaatacattttaaatcttgaggcattaaagccgggagatatcatacttgagcatggttacaaaccacatagtttagcaattatgaaaattacaagtagccattattctcacgccatgttatatgaaggctcaacaataattgaggcgacatctagtggcggagtttttagtaaagttccgaatagatttgcagttgtaaaccaaaatgatttaaaggtacttcgacttgagaaagagatttccccacaagacatggagaatatcacaataagagcaaggactttgatagggtcaagttacgataaatctgaggcagttaaggcaggaaggaaaaagaaacccgctcaaaaaaaatccaatggacaattttgctctagattggtagcacaatgctataacaaagctggaataaaacttgttgaaagcattaattactgctctcccgcagatttagaaaaatcacctttgctgtcagaagttgaaaatgccgtcaaagaggcatccgaggccgagttagctcacgcgctagcaccaagcattcatacgcagcatctcaaaagttcggtcgaatgggttaaatccgcaaaaaaaattctcaaaaagtcaggggttgaggctgaaaccattaatgatatttacagtgcgactcttaacctgagaaaccctaaagttgataaattaatattaaaagagattaaagcatctgggcattatgatttttacctagaggataaaaaagtcaatccatttagatacgatgtaactaagttcgccgaaaaaatcggaaataatattgatgcaattgatgctgaaatatataaagagatatcaattgtaaaggttcaatccacgaatttgagcaatgttaaagagtattataaaacttaccctagttgtctcatggcagcggaaattgatttgtacacaggaatattaaatatcaccaatgaaagattgaagattattattgagcattgtgataataataatttaacaccagaactccttacaacagccctgagcatgattaactatattgataacctttaa

SEQ ID NO: 249101 - DNA, 306 bp, Klebsiella pneumoniae
gtgccagtggtgtccattgttgacctcaccgtcacgcttgagcgagatgtgacggtcgaagaggtgaacaatgcttttcgcgaagccgccgcagcgggacctctgaaagggatcctgggttatagcgatgaaccgctcgtctccagcgattaccagggagacccacgctcgtcgattatcgacggtctatcaacgctggtgattggcggtaatatggtcaaaattctggcgtggtacgacaatgaatggggattctctaatcgtctcgttgatctggcattgatgatggcaaagcgtgaaagctaa

SEQ ID NO: 249102 - DNA, 681 bp, Klebsiella pneumoniae
atggtaaaggtcggtattaacggttttggccggatcggacgcaatgtactgcgcgcagcactgaataatccggatattcaaattgtggcaatcaacgatttgacggacagcaaaacgctggcgcatctgctgaaatacgactcgcttctcggtaagctggatgcagaggtcaccgcgggtgaaggggggcttgttgttgatggtaaacccattaccgtattcagtgaacgcaacccggccagtattccgtggcgtcagtgtgaagtcgacatcgttattgaggctacaggattattcacggaccgtgaaaaggctgctgtacatatccacagcggtggcgccaagcgcgtgattatctctgccccgggtaaaaacgatgatttaaccattgtgatgggcgttaatgagagcctttactccccggataaacactacgtgatcagcaacggaagctgcaccaccaatggtcttgcacctgctgcacaggtcctgcaccagcatttcggtattaagcatggtctgatgaacaccacccatgcctacaccaacagccaggcgctgcacgatcagccggaaaaagatctgcgcggggctcgcgccgccgcattgtcgattgtgccttactccagcggcgcagcgaaggctctgggtaaagttattcctgagctggatgggcgttaa

SEQ ID NO: 249103 - DNA, 942 bp, Klebsiella pneumoniae
atgtcaggaaaagtctgtgtttttggttcattcaatttcgacatggtcgccagggtggatcgctttccggtaccaggtgagtcgttagtggcctgcggaagtatgaccagcgccggaggtaaaggggcgaaccaggccaccgccgcgctaaaagcgggagcaaatgtccactatatcggcaagattggcaatgacaccttcggccattttgcccgccgtcatctgaaaggcgtgggcttcaatgctgtgacgctgctggtcgccgaagagatccccaccggcaatgcgctgatttatgtcgccggtaacgatgccgaaaacatgattgccgtcgatcccggcgcgaatatgacggtgaccgatgatgaaatcgccggctgcattcccgctatcggctgcgcggatgtggttctggttcagctggagaacaatctttctgctattgaacaggtcatagacgccggcaaacaagccggggccttggtaatactcaatcccgcgccctggcagcccgttgagcacgccgttctaagcaaagtggatttacttacaccgaacgccacggaggccgggttaatgaccggacgccgggttgacagtctgacggccgcggctgaggccgccgacgtgttacatgctcagggcgcgcgcaacgtcattatcactctcggcgccagcggcgccctgctgagcgagcatggggtgaaatcccctattccctgctttccttctcacccccgcgacaccaccggtgcgggcgatgccttcaacggcgcgctggcggcgcggctggcctgcggggaaccgctacaggccgcagcccgattcgcggcggcctatgccgccgtcagtgtcgaaaagcaaggcgcctcatctttacctgagtacctggaggcacaggaacggcttctccgtgccgccgctgattatgaaatggcataa

SEQ ID NO: 249104 - DNA, 1335 bp, Klebsiella pneumoniae
atgagtacgctaatcacggataaggtcgataacgcagcggtccaaaaagaaaaactggacaccagtgcgtatttaccccataccccctggctgcaatttttactggtctgttgcctgtttgcgctatgggggatggcgggcaacctgaatgatattttgatcgcccagtttaaaaagggcttcgatttaacggatacccagacagcgctggtgcagtcgatttttttcctcggctacttttttgtcgccctgcccgcggcggcgctgattaagcgtttttcctataaagcggcgattattattgggctgtgcctgtacgccctcggctgcttcctgttcgttccggccgcacagatcatgacctacggcgcattcctcgcctgcctcggagtgatcgcctgcggactctcttttctggaaacgtcggcaaacacctactccagcctgctgggtccgattcaatcctccacccagcgtattaacttttcgcagatcttcaactcgctgggcgtgatctccggcgtattaattggccagctgatggtctttggcgaaaacgatccgagtcatgaacaactgctggcgatgcccgccgccgctgcagacgttgcacgccatcagatggttggtcaggtggtcgggccctatctgattatcggctccgtactggtggtgctggcgctggtgttcgtgtttattaaattcccgtcgtgcaagggcgcgcccgctcaacaacagcaactcccgacggaaagcatggggccaacgctgaaacgcctgtttgctatcccgcgctttcgcctcgggatcctgtcgcagtttttgtacgtcggcgcccaggttggcgtatggagcttcacgattcgctttgtgcagctcgtgcagcaaggcaccagcgagcactccgcgacttactggctgctggcttctctggtgatttacgccgtgggaaaaaccgtggccacctggttgatgaaccgtctgaatccggcgatgctgctcggaacgtttgccctggccgccaccgccctgttactgattgccgttttcagcggttctatgctggcggtctatgcgctcattctggtcagcttctgtatggcgccatgctggccgacgaactttggtctggtgatcaaagggatggggaaagatacccagaccgcaggctcgatcgtggtgatgtcgattatcggcggggccgtaattcctctggtgatgggcattatctcggatatgaacggcggcaatatgcaaatcgcctttatcgctccgctcctgtgctttgtgtatgtcgctttctacggcttctggtgcgtgcgtaagggggtataa

SEQ ID NO: 249105 - DNA, 531 bp, Klebsiella pneumoniae
atggctggtgatacggcggtggctatggacgcaaacatcaatacttttgcattcatctaccagctaccttcgggtgctttgcctgtggtcggtacagacaaagcagttatcgcaacccaggaaagcatacctcatggggtaggtattcgcacaacgggggcggggtcattccctatttttctgaatggaggggtcgaggccgacgtgccattttctcctaacaatatgggggctggtctgttttgcgccgtggttatgtgctctaacaaaaacaagggggcttacgcaattgcataccaacggtctgaccagacaacggtaacaaccagacaggtaactggctatacgatacctgcatacaccacgtctcaaaaaatgaatttaggcggtgctggagatggggctatttcacccctgacgtctgtgctgtcagacgcaatagtgatacctggtttgtattcctacgggaccagtgcccagggtgtcatttttgcatacctgatggagagaattgggaaaataacaggctaa

SEQ ID NO: 249106 - DNA, 468 bp, Klebsiella pneumoniae
atggcaggagatgttaggatatattatcaaatcgacgataaggagtattcaatagaacaatggttgaatacagacactctagataccagcgatcccgaagtattggaggctgttatgagtgtagtccctccaggcagggctcccagtatattacgtgtcattgatattggttcggatggtaaaccagtggagtatgatgaatatcttatcaaagataagttagaaatgccgttcggattggtttttaagaaagtaggatatgaaggatggttctatttggctgatgccgaaaattatggcgacagatcaggaaccagaattgcgggaaataccattatgttagaagctaattcacgttatgcatttcccggtaaagacaacttcccggttaaagccgttattgattgggacaggagaagtcttaaggccggagaaaaggagttttatttagaaccttgctcaccatag

SEQ ID NO: 249107 - DNA, 204 bp, Klebsiella pneumoniae
atgaaaccattaatcgtgttaatgctggcgctattaccagccctggcgaatgccggacagataacccttgttcttagtgacgaacaggagacaggtaacacgaagatttgcatctatagcaacgccaattacacattcacctacgtcactaaggggaaatgtccgtatgccaaaacctttaatacagaggattcagaagagtga

SEQ ID NO: 249108 - DNA, 150 bp, Klebsiella pneumoniae
atgctctcggatggcagctacaagctgatctggagaatcaaaagtttcttctttctcaccttctggggcatcaggatcgtaggtacggtaatcaccggtttcgttattcgcaaaaatttgaacttctttctcaccctgtgtagattttaa

SEQ ID NO: 249109 - DNA, 132 bp, Klebsiella pneumoniae
atgcagaacaatcacattatggcgttagcgctcgcgctgtgcaacgccggagcagggcaagcggttaaggttccagcaatgaccgggggtcagttgcgccagttgctcgcatggctggaagtgttgaggtag

SEQ ID NO: 249110 - DNA, 192 bp, Klebsiella pneumoniae
atgttaaaaaaagaaactttggagtctgccattatcagtgcagcaaaatggcagggccatgaacttaacgggcaggataagctggtaatccgcactaaaacagctatggtgttggccgctaaacagcggcaccgccagcgcatggaagcgccaccctatcagtggcgaaagccagataaattaaggcgttga

SEQ ID NO: 249111 - DNA, 408 bp, Klebsiella pneumoniae
atgagcaaaaaacaacgtaacgtattaaaacgactagagcagcaatccaatattctccctccagctaaatcactagccagccgtaaagagtttcaggaactcagtcgattatccagagaatataacgccacccctggcgaatacaaaacagaaatcatcgaacatgatagtcctccattaacagaagaagagcaggcagcattaaatgatattctctcttcctgtgctggtgtgtatttcaatcctcgtaaacgaaaagaatacatcgtcgatagttcagatttgaagaagtggcaggttatgggatttgaatgctataccagctttaccggatatctcagcgttaacgggctaaataacctcgtacgcgattttgacgcagtgtacggtgataaggagagcgagtaa

SEQ ID NO: 249112 - DNA, 309 bp, Klebsiella pneumoniae
atgcgccagtcgctgatatacgggcttgaaccctggaaggcatcgggctgcatacgttttgccaaatctaatcgtattaattttaatcagtcttcaagatacaaggaaggcagtctcactgcggttgccgcgggtgaacaggttgtacccgcgtcggagctggcatctgcaatgaagcaaattaaagagttacagcgcctgctgggcaaaaaaaccatggaaaacgagctgctgaaagaagccgttgaatatggccgacaaaaaaagtggatagcgcacgtgcccttgttgccggaggatggcgaataa

SEQ ID NO: 249113 - DNA, 249 bp, Klebsiella pneumoniae
atgattaggggcagcgtcaccgctcagagcatcaataaactcttcagtaatcacattatttttatcgaaaatcgttatctgattcagtgcttcaaagtaatgctggtcaatcaaagcagcggtcctgtcaacatcagtttcaccgtgttccttgccgtactccataaagccgaaaccggacggcccctcctctcgccagagcttaagatcaaaaatgtcggcacgccgtggcgtttcccactgttctga

SEQ ID NO: 249114 - DNA, 372 bp, Klebsiella pneumoniae
ttggcgagagtgttccgcaccgtttaccgcatcattagcggaaacatcatcatgcaggtcgctatgaatgttaggtacgtcgtctggttctccagcagcaggcgaggcaggttccacgacatcacttttttgttcttctttaccgcgctcatcggttttaaccatctgttttttagacttaaaattcttatttgctctatcgtggtcccaagctggagctcctttccactcctgatggatcacctcaagcccatctgcaacatcactgaaaaaatggacagtgtaggactcactattccccttccatcctgctgtctcaacgattcccagttttttcaactccgccagcactttactgaaagtgtcccgtga

SEQ ID NO: 249115 - DNA, 309 bp, Klebsiella pneumoniae
atgatctcacatctcggacttattcgcaccttccttagccgcacatcgatcagaaatacagccatacgcgagcctctcgtgttcgtagtgccggatttagcctctgctgaatacatcaaggaatactattttcccggtgcctctatcgaatgtttcaactttgagaaacctagaaaaaaacgggatacaacgaaaggattaaacactcgtgaactggtgcaggactgtaaagcacaggggatgacgcaaaaaagcgcagcggaactgttgcaagttaatataaaaacaatcaaacgtaattggaactaa

SEQ ID NO: 249116 - DNA, 408 bp, Klebsiella pneumoniae
atgggaaaaaaagaacgcaacgtattagcacgtattgaacgacaatccaaatccctcccgccagctaaatcattagccagccgtaaagagtttcaggaactcagtcgattatccagacaatataacgccacccctggagaatggcacacagaaataatcgagcatgactcccccccattatcagaggaagagcaggaggtcttagatgatatcctatcctcctgtgatgatgtatatttcaaacaacgtaagcgtaaacagtttattatggacagctcagacctacgccattatcaagtgctgggattcgaagactatgtacattacaccggatatctcagcgtcaacgggctaaataaccttgtacgcgattttgacgcagtatatgcagataaggagagcgaatga

SEQ ID NO: 249117 - DNA, 1032 bp, Klebsiella pneumoniae
atgactaaacttgctattgggagcgaagtagttgatctggctccaatgttcctagcgcttcctgagcgcaattatttgctcaatgctctagatttatttgatggcgtaggaatcacctctccaaaagttattgtttcgcagcttgtagaagataactattctctgttcaacgagcctacagcacgcggatcaagccagcacaatgttacggcacgccagaacgggcaggaatatctgattgaagcgccgttcttcctgcgggaagacatgttcaccccggcctctgtacagggcaaacggaaacaaggcaccccattcgaggaaactgtagcagacctctacgctgaatatacagctaaacacaaaatcgcctacatgcgaacaagggaaagctatcttgcacgctgtctgttcaaaggccaggtgtacacgcctaaaacaaacgacctgttaatcgattattccaccctgtttggtgtctctccaatgactcacactgtgagtgcagctaccccagctaaagatctggatgatgtgctggataaaatccaacaggcagcaggcggattagccgggcagattgaacgtgtaatcgtatttgctaaaccagcagcttttagctctctgcgtttttctgatgcaatggcgacagcattccaatacgtagccccatacgatagccgtaacatcgtattccagcgtaacgagctattaccgggcgtgagcacattctctatgccgggcagccctatcgacgttatcaaggtgacagacccgctcctgatcgcacagatgccagatgatgcagacatgatcgccatcccggtatttagcaaaggcactaacgtatatcaagtgatgtatggagcagcaagctctacgtttgctctgcttgatgcggctccggctgaattctatagctggggataccagaatgagcgtggctcagagtggaacgttatcactgaaaatacggcgttatgtgtcaataacgggttaagtctgcaagtgaaaatcacgctcggcgcgtaa

SEQ ID NO: 249118 - DNA, 270 bp, Klebsiella pneumoniae
atgtctgtaacaatccgccgtgagctggaaaagcaaatcacataccccggcttgcgtcttaccgttcccggagggacggagtcagtggatgtgacgtacaccgcgaccggaattagcaactttgacggaaccaacgtaaccgcgctgttttctgttgctgtaggtaatgagaaaagcccgtttgattactctttcactttccagtacagcggcagcggtaacccactggatgaggccgagccagcgttggaagcagaactgggcgcgtaa

SEQ ID NO: 249119 - DNA, 1833 bp, Klebsiella pneumoniae
atgggagcgggtatatctaagcttgagcagccaggaaatgtacagaacgcactgagggaattttatgccgacgcgtttccgggaatagacccgaccggacagacgagctcaacccagggcattctggacgccatcgcccaaatcaacagccaggtcgacagtacctttaacggtgatatcaccacctatccccgactggtattccgtggtggcgtgtttctcgcagcgggtttgttggtaaagtccaatattgtaattgagggcaatgacggtacgttatttgttccggaggccgggactgatgcgtctcacgtctggatcaccaaaggcaccgaggccaccacgcccagcggcggtgcaaaacggctattcaggcccgtctttcgtaattttaaaatcggttatggtttccagaataaatttgatgatgctgttattgcagagaatgtgggcggcattgagcttgagcatagttcgtatgcgattattgaaaacgttgaaatgcgttatctggatggtgaggggttaactggcgaatctgcgtgggactccacgatttataacgttcgtatcatgcactgcggtaatacgcgtgaccggaataatattaaatatggtttgaattttggcccaggcaatgacggtaccgatggctctaatgcaaacagattcattggattacatattgaaacctgcccggcgatgatgaaatttggtaagcgttcacggcataactttattatcggtgggaaactggaggggattcgtaataacgacccgttggcttacggcccatccgtttttgagggagtagacggccttcagtttattggcgtggagttgtcatggagcaatatcggtcatcgtatgtttagggcggttggcacgacggtcatgaacgacactagcgatgatgatacatctgactatgataatgaccactgccgcgggattgagtttattgggtgtcatacaatagatagccagaacctctcaggggattattttgaatactcatctaagcgggggcgtcttaatattactggtggttatatgcaccatgtacgctacctgttgacgggttctgatataaaccttcggggtgtgacgcttactcagtgcggaccaactctgggaaacattgtcgataacgtactagtggaaggcctgaccgttgagaatcaccgtgtgcttccgtctggcacattcaatgtgttttccgtgtcgggtaaaaacaacattatcaggaattcccatttttccacaccatacggaagtaacagcaatggctgtgcctggattgcgcagagctctgtagctgaccttcgggtagagaacgtcacttttggcgggaaaatgcagtggggtatcaaaggagcgccttctgcattccagtacaaaaaattcaaaaatctggtcctggccgacggcgccgattatggcgaaatcgttcagggcggattcagcgttgatgggttccctacccagatgaacaagaactctggcggggcggtaacagaccagaaagacatagcaaatgatgcgactggggttattagcgggtgtatcaaaggcgggtgtcttatttccatctctgttgaaagttcatcgtctgtgtttattggtgcaacggtggtatcaggggatgcacgcgttagcacactgaagattgccgacaatttgagtctgacttctaacttttcagtatctggaacaggaacatccggtgacggtaaaatttatctttcatcatcgaatggaaatctatctgtaaccaaccgaactggaagcactattaaagtttttgtttccacatttaacgcaaaaatgtag

SEQ ID NO: 249120 - DNA, 162 bp, Klebsiella pneumoniae
atgaagatcaatattgattctgaaacttttggcaaagtgcttgctattgctaaaaaagaaaatacaacagtaccactgttagtaaaacagcttatcaatcaattcgtccttgccaatgaggaaaataatgaaccaaaaaagaccgatagtagcctacgttga

SEQ ID NO: 249121 - DNA, 1077 bp, Klebsiella pneumoniae
atgacgcttaccaaggttgagttaaatgagcctgaatttattccggttgctgatcaaggagcattaagtcctttcaccactacctcaatgggatgggaacctgtctggccgtttaagccagatgtagtttttgagggggggaatgcagctgctaacacagaatttgtcgataactttgcgagtttagaattactaacaacaagtgcttcatcccaccgccaattttggacaactaatgcaactagtgcagcttctgcgctgtgtgccagaatggctgcaaggttaatggcacaatatcctgagtatcgcccagaaacgatccgtgctctgatcacacactctgcgcaatggacacctgctatgttgcgtatgtatcctgctcgcaataaaagtggcttcgcacagcttatacgccattgcggctggggctcaccagatgttgaacgtgcgctctggagtgtgaaaaatagtctgacactggtagctgaagacagcttgtacccctatcgtaagactcgcgacggtattaaaactcgtgacttgaatttacatgcgctaccttggccactggaacagctccaggagttacaggatacgcaggtagagctcagggttacattgtcttatttcatcgaacctaacccttcagcacgggggagttcatcaagatatcattacccatcccaccgtctacgctttgcgatgaaaagacaaacagaatctttagacgaatttaaaactcgcatcaatgcagcagctgagtctgaagagagtgagcatgggactaccggtaacgatgataactggtcattaggtgctactcaacgacataaagggtcgttgcatcaggatatatggcggggggcagcagcagagcttgctagttgtggttatttggctgtttatcctgcacaaggttggtggagaaccagaggcgctttgcaacgatttgattctgaagctaaatacagtctggttgtatcgattcatgcacccgaagcagacgtagacctttatgccgcagtggaaaccttggtcgaaaatatggttgaaaatcctgttgaaataatgggttag

SEQ ID NO: 249122 - DNA, 393 bp, Klebsiella pneumoniae
atgcaatcccggatgacaaaggacattgtcctgaacgcactgctgatggctgtatggcggcgtaatccccaaaaacaggtgctggttcactcggatcagggcagtcagtacacaagccatgagtggcagtcgttcctgaaatcacatggcctggagggcagcatgagccgtcgcggtaactgccacgataatgcagttgcagaaagctttttccagttgctgaagcgtgaacggataaagaaaaagatctacggaacgcgggaagaagcccgcagcgatatttttgattacatcgaaatgttttataacagtaagcgtcggcatggttccagcgatcagatgtcaccgacagaatatgaaaaccagtattatcaacggctcggaagtgtctag

SEQ ID NO: 249123 - DNA, 189 bp, Klebsiella pneumoniae
atgaaattaatactcaaatcacacaatattcatattttccttgatgccaacagtgctacagacctgataagaataaaagctctggctgcgatgctcgacattagctatccagcgttaaagcagcgtattcacagagggcaagacgtagacacagctatcagagaactcctggctaaagggggtgagtaa

SEQ ID NO: 249124 - DNA, 1200 bp, Klebsiella pneumoniae
atgtcgttagatctgaacgttagcacaatccgcaacacggtcacatttgtggtggataaaaacagcatagctcaggcaaaaaaagctgctgatgacctgcacaaatatttccagaagatagccgatcccaaaatccgcttccagcagcagaaacaacgccgccagaaggctcgccaaatagctgatgatgcccgatttaatgataaacctcgtaatgctgccgaaatgaaagctcagagggctgctgaaagacagaaagcaagggaagaaaaggccaatctaagagcgcagcagcagctacagcgccgccaggagacagcagagctaaaactccgtcatgcagggctacagctaggcgggattagaggaaaatacgggatggaccccaagcaacaatacgaggctctccgctatatccgtcaacaaacagaggcctttgctcagggacaaattagctctcagcgaatgaatgccctaattcgtgagcgcatcaccctggagcgcagggcagcagccgccgcacagaaagccgctcaggctcagaaaacaaattatgtgggggctgcgaagaagttcaaagatcctaatagtaaggaatacggcattgccagattgcaaagtgctgcaacgggaattgggagcatgtttgccgcaggaaacctcgctgcacgtattaaacagacaggggatgaaaacctcgatctggtgagaaaatcggcccttgttaagactaatcctaatgctatcaagacaatggtggcctggggtcaacagcatggggttgactccgctaatatcgataaagcaacggataacatgaaagacgtccgagaaaggctgggagagtcgatttcaaactctactttcgatcagaagtctggaaaatggaaaggtggtaatggtgcggtagacaacgttatgaacctgttcggatggaacatcgaccagcttaaacaattccaggacaatccattagatttcgttcaggcaacagtaaacgaagggcaacgccgtggcatgtcccaggcatccatcgggcacctgattgaggattacggggatgacctgatgcactacaccgacatgttcatgaataacggggcggagtttattaagacgctgcgccagcttaaagagagcggtcagacgttaaggaaggtgcgaataagcaggtcatttcttcccaagctgactcgctga

SEQ ID NO: 249125 - DNA, 1077 bp, Klebsiella pneumoniae
gtgcatttcgaaaattacattcaggattatttgactgagaaacgccgcgcagacggggtttccgctgaccataaatcgttaataaatacattatcagcaatacgtcttgcagaaattaaatctctttggacagacgatttgagtttattgccatctgacccggatgaggcattttggtgggaagtatggctaccagtgaggggtaatagaaatgccgttgttactgattttcatcgaataagccatgcgactggatgccaggtcagcgaacacaaagtcgattttcctgagcgaaccataacctggatgtatggttctcagagccaattttctcaagctaggttggttttaaactgtgtagcagaattgcggcgtgcaaaagatacagctgagtttttcgaaggactaccagcattggaacaacagctttgggtggatgatgcactgcgacgtctccaggttccttcacccgaagacaatgtaccttatatctgtttgttggattcaggcattaatcgcgggcacgctatgcttgcacctgttttgcaccagcaggacatgcatacagtcaatgacgcgtggggagtcaatgacaccgcaaaccatggtacggggttggctggagttgcaatctatggcgatatgattgacgctttgtcttctactgatgcaatagaagtaggacaccgactcgagtcagttaagcttactccaaattatggggccaacgttggtgacgcaaaacagcatgcatatctgttcagctcagccgttacacgtcctgaaattctcaatggtcagcgcaaacgtatttttagttcagcagtaacagcaactgcttatcgtgactttggtcgcccttcagcttggtcatcaatggtcgattcactggcagtagatgcgctagcagaaaccccttttccccggttgtttgttctttccgctgggaacatagttgatcgcgaccattggggaaactatcccgccagtctttcagttaatcaaatccatgatccgggccagtcatggaacgcattaactgtaggtgcatttactgacaaggttggtaagcgttaa

SEQ ID NO: 249126 - DNA, 885 bp, Klebsiella pneumoniae
atgacaatgattacggattcactggccgtcgtattacaacgtcgtgactgggaaaaccctggcgttacccaacttaatcgccttgcggcacatccccctttcgccagctggcgtaatagcgaagaggctcgcaccgatcgcccttcccaagagtcgcgcagcctgaatggtgagtggcaatttgtctggtttccggcaccagaagcggttccggaaagctggctggagtgcgatcttcctgtcgccgatactgtcgtcgtcccctcaaactggcagatgcacggttacgacgcgcccatctacaccaacgtgacctatcccattacggtcaatccgccatttgttcccacggagaatccgacgggttgttactcgctcacatttaatgttgatgaaagctggctacaggaaggccagacgcgaattatttttgatggcgttaactcggcgtttcatctgtggtgcaacgggcgctgggtcggttacggccaggacagccgtttgccgtctgaatttgacctgagcacatttttacgcgccggagaaaaccgcctcgcggtgatggtgctgcgctggagtgacggcagttatctggaagatcaggatatgtggcggatgagcggcattttccgtgacgtctcgttgctgcataaaccgagcacgcaaatcagcgatttccatgtagccactcactttaatgatgatttcagccgcgctgtactggaggcagacgttcagatgtacggcgagctgcgcgatgagctgcgggtgacggtttctttgtggcagggtgaaacgcaggtcgccagcggcaccgcgcgcctttcggcggtgaaattatcgatgagcgtggtggttatgccgatcacgtcaccctacgtctga

SEQ ID NO: 249127 - DNA, 906 bp, Klebsiella pneumoniae
atgattttggttataacatcaagctttgataaaaccatagattatttaattaaaaaacaaagtgttgataatttctatattttcaacgttgataaattttcagaatatcaaatctcttataccaaaaatggattcgaaataaaaaataaagatcatggtcatatttcggaaggtcaatgcttgtctatttattacagaaaaccaagtccagaaaatcttaatgatgtaatcggtgtgaaatatcacaaccattgttatagagaggttttctctttggttgatggaattactgaagcttttgatggaaaatgtttatcccgtccatctattcttagaaaggcagacaataaaatattacaagctaaaatagccaataaaattggctttttaactccagattattgtttaacaaatagtccgtacctattaacatcttatttaaatgaagatatcatagttaaacctttgtctaatggagtcgtggaggatgagcggcacaaagaaattgttcaaacaaatttgttcgataaaagcaaaagcatcagcactctaaaattctgccctgcctatttccagaaatattcaaaaaaacaatacgaagtaagaattactattattgataaagttttattttccgttaaaattgaatctgagaataaaattgattggagaaagaaggataatagaattacatatagcataatcgataccccgcaagcgataaaagataactgcttgctttatatgagttttttcgggatttatttcggttgttttgattttatagtttttgatgatgaatggttctttttagaaatgaatgccaatggtcaatgggtatggctcgaacacgaaactgggcttgacctttcaaaggaaataatgagatatttaaatgataaataa

SEQ ID NO: 249128 - DNA, 1047 bp, Klebsiella pneumoniae
atggtcatgatcggctactctgactccgctaaagatgccggcgtgatggccgcctcctgggcgcagtaccaggcgcaggacgcgctgatcaaaacctgcgaaaaagccggtattgaactgacgctgttccacggtcgcggcggctctatcggccgcggcggcgcgccggcccacgccgcgctgctctcgcagccgccgggaagcctgaaaggcggcctgcgcgttaccgagcagggcgagatgatccgctttaagtacggcctgccggaagtcaccatcagcagcctgtcgctgtataccagcgccattctggaagccaacctgctgccgccgccggagccgaaagcagaatggcgcgacatcatggccgagctgtccgacgtgtcgtgcaagatgtatcgcggctacgtgcgtgaaaacaaagatttcgtcccttacttccgctctgcgaccccggagcaggagctgggcaaactgccgctgggttcgcgtccggcaaaacgtcgtccaaccggcggcgtcgagtcgctgcgcgccattccgtggatcttcgcctggacccagaaccgcctgatgctgccagcctggctgggcgctggcgctgcgctgcagaaggtggtcgaaggtggaaaacagagtgaactggaagccatgtgtcgcgactggccgttcttctctacccgcctcggcatgctggagatggtttactcgaaggccgacctgtggctggcggagtactacgatcagcgcctggtgaagccggagctgtgggcgctgggttccgagctgcgcaagctgctggctgccgatatcaacgtcgtgctggccatcgccaacgactcccatctgatggccgacctgccgtggatcgccgagtctatccagctgcgtaatatctataccgacccgctgaacgtcctgcaggcggaactgctgcaccgttcacgccaggctgaagaagagggcaaggacccggatccgcgcgttgaacaagcgctgatggtcaccatcgccggcgtcgccgccggtatgcgtaacaccggttaa

SEQ ID NO: 249129 - DNA, 339 bp, Klebsiella pneumoniae
atgagtaaaagtaaacagggagattttcttgaaagtgaggagagaagcagaaaaccacggatagaaaaaacaataaagcaaaaaatagcttcggcacagatgcatttaaatcgtttgaaatataagtctaagcaagaatccaagcagattgaaacacggcagaaaattattttgggggctgaagttgccaaagctcttgattgcgacatttttactgttgataaggaactggtgttaggggttttattagatatccctcatttacatcctgatgataaggtaaggtttagaaagaacggtctgttatttctggcgagtatgaagggaaggaagacgtaa

SEQ ID NO: 249130 - DNA, 288 bp, Klebsiella pneumoniae
atgggattgctaaccaagtctgatcttaaatacgaaaatgaatatagctggaaagcaataggggatgataatcccaaaataactggtgttcccgatagcactcttttaaaccgtgaagaaggttatgaagtattagcattcatcaatcgttttgctgtgaagcacgcacttaagcaaaaagatagtggcctcaaagttgaaactatgattcatgatcatctccccggtgatactcgtagccatgctaatgttgaaaaatggcttgtagataactggaagaaatattaa

SEQ ID NO: 249131 - DNA, 213 bp, Klebsiella pneumoniae
atgactgaacgttttttaattaccgagcataaaactacggttactcataaaattagtgatgaaaaggaattcactcaggaattagaaatttatatagtattcgatactaattctcaggcagttgttggagtgtatggaactttagaagaagctcagctaaaaatagcagagcttaaagaaaacctaaaatctagtccaaagcctcgcatgtaa

SEQ ID NO: 249132 - DNA, 441 bp, Klebsiella pneumoniae
atgaaattattaattaaattgagtaatgactggcctgaacatttgagtggcaatccagtccttgatgagtgggttcatgaaattccttggtatgggaatgaatattttttattatgtgaagatggtaatgtttatcagtcatatataaaaatgcctttttcaactgtaatcaaggaattccagcttttcaggcatacacatgtagatgaaacttcatttattatcgaaacaactgatgaatggcctgatgatgtgaatataagggaaggattcatatcaaaagtagataaaagacatttatacagtaaaaaggaaaacggctgctggtatgtctcacctgaagggaatgacgccgtaattatctttgatgcccctgagattcaggagcataaaaataaatacaacaggatgcctattattacatgcgaggctttggactag

SEQ ID NO: 249133 - DNA, 198 bp, Klebsiella pneumoniae
atgcagaatattatcttatatcaaaccatcatatttggtaggctgactatgactctggccgttcctgattacttttggttacatcaagtaaacgaatcaagacacaaaattatttacagtgagcacgctaaactgaaaaaaaatagacacacaccgattgtccatataaaaaacattgttaaacaacttacgatatga

SEQ ID NO: 249134 - DNA, 531 bp, Klebsiella pneumoniae
atgaaaaaaatcttacttatggcaggcgctgcgctggtgctggcggggtgtggtgaaaaaggtgactatgagaaagcgatcaacgcgaagattggtcaatcgaaaacctgtttctcactgagaaacaacgatgtcacattccctatccagctctcgaaaccacggtttgatgaaacaggcactggaacaggatctgtgatcctcgacggcctcgttgaacagggcttaatggcctttgttaaaggctgggataacaatacgcttgggataacagatgaaggtaaacaagccaaaatctggaatgccaaggaaggtgtttgtattggtcgccgggttgttgatgaggtgaaggaatggactgagccgggaaacggtaatcagaaagttgttcgcgtctcctacacatggaaattaactgatattccatcgtgggtggacaaaagtgcattctctggcgtgaaagggatgaacggacctgctgatggtgccacgaatcttgttaaaaccagcaatggctggaaagcgatctaa

SEQ ID NO: 249135 - DNA, 255 bp, Klebsiella pneumoniae
atgacaattgtttatactattgatgctttcgaacgtgtagatgaactactcgtcttcgaaatcgatataccaaaagaaaaactcccggaaatagctaaagtcatggtttggacggatgaagactatagtgactttactgcagggatcggtggatgggatcttaacagccaacaggtcaaggcaattgagaaaatcttggataaaaactttttccaagaagatttggattttcaaatatcaggtggggaactctga

SEQ ID NO: 249136 - DNA, 1569 bp, Klebsiella pneumoniae
atgggtcatcgatctgactgctatggaagaggaacagcactggaaggcgataaaacaaccacgggtgctgaatgtattgcctcaatgtccaatgatactgaacatgggcgcagggttgttcgtgttggggataaaacaaccccgtgccctaaatgtggtgaggtaggggttatcgtttccggtgaaccccgtgataccaataatggaaaaatagcggcggttgatggttcaatcgtgcgctgtgcctgcccttccgggtctaactggattattgcaccagcaggacaatgggttggcagaggcccggacccttctattgcagcccttgcagcactggttgctgaacgtaaggccgcagaagaagaaagaactaaacaactggctgaagagcgtgaccgcaatcgggtattcgccaaatcctgccttcggggtgaaggttgtaatgatgccggggaagagcaggagcctcataccaattttgcggcgatggcattttatcaggctgttccacctgccgaacctgcatcagataatgatgttatccagcacgcccagaccgccaagaaaaagaaacctgctgaagatattccaaagccgaaaaagcgaagcgccctgtataaatggctgaatggtaatcatgaagagatcgaataccagcgggcaacagcagcggctacgagtgctgctaatactcaggtggctgttgaaggtgccagtgttcttaccctgattggtggaaatgccattacatcaggaacatgggcgcttaaactcggtaggctggctggaggtcttggaagaattgcgctaaatggtcccggtggtgcgatagttctgggaatgatgcccggaagactcaatgacggtgaacaggactttattgaccggatgcgtctggaacagatgcgtgaagcgccaagccgcgtgcgttatacatgggaacaggatgataaaggtaacccggttcctcatggctggcatacgccaccgggtaaagatatggtgcgtgtgcgcaaaatggagtgggacagcagccgaaaagcctatacgttcaccacagaggaagacccacgcataacgatcatctggacgccagacagttcaggtatcaatgttccttcaaatacaggtaaccagaacccagtaaggataccaaatccggtagttgtcgatccgctgccagaaaatgccagtattgaggcaacgaccactccgaccccggaagagaagaattttgcggattatattcttgttctgccactgcctaatattccaccaatatatatttatctgaatgctgatcataaatatcatgtggctccaaagggaaatcctccattacctgccttcccagatgctaaaacggctaaaaaaaggaccccggttaagagcgggggatcattgcgttcaagatggaaagattctaaagggcgaatctatgaatgggattcacaacacggtacggtcgaaatttatgatcgttcagggcgcaatcatttaggcgagtttgacccaataacaggtgagcaaactaaaccagcagatccgacaagaaaggtagaaaaatga

SEQ ID NO: 249137 - DNA, 489 bp, Klebsiella pneumoniae
atggatcgtcaatacagcaatgaactgaccccggaagtgctggcaacaatggatcaatcaccgtttacggcggaacaactgtccgggatgaatgatgaaacacgtgcgctcatctctgagcagcaggaatattaccgccagcatcctgttaatgccatataccgtattgcagtggatggcagccttaccagagagggtgggacagtccgtgctacatacaacggaaacgaaatcgaactttcagacggcaggaaggttaatgttgcactggttggtgatgacgttgtttaccctgatgggagaacggcaaaaattgtcactggtgcgggtaaaatgagtgaagtgaatggtcgtggtgtagcgctggtcaacagtcgtctggataacggagatgagattatcagcactctgtgcgatggcccgatgattgtaggtcgtaaaggagaaaagatgccggaggatttcctgttatctgtagaggtggcgtaa

SEQ ID NO: 249138 - DNA, 270 bp, Klebsiella pneumoniae
atgaaagttataaaaataataaacatctttaaagcgaaagaaaaaattacctttatgaccagtttgatcaccagcatggaggaaaatgaaaaaggaataaacctcacgctggaaaacggtgaaaacatttgcattaaagattacggttattacttcctgtcagaagccgatggtgatttggacagggagcaaatggtaaacagctatcgaaggttgatttctgaactcggccagatgagtgaagaaacgataacatcattaatgccctaa

SEQ ID NO: 249139 - DNA, 735 bp, Klebsiella pneumoniae
atgaacacaaatgacgccgaactattacacctttttgaagcattaacgactgagcaaaagattgatatcgcgcgaaccctgataaaaaacaaagagatcaaatccaccaccgttatttccacagaagacgataaagcgatttcattttcacaaccttatgtctttgcttttacatctaacttccgtgttttttccgatctggacatctctaaaaatgaattccgtgtcttaacttatatcttggaatacatggagtttggaaaccttatcaatctttcacagtcatcactctgtaaggctttaaatattgcctccgggaatatgtccaatatatttaagaaacttagacaaaaaggaatactcgttgaacatcatggacacctgtatatcaactccaatatttttgccaaaggcatgagtcatcaacttgatgagaaacgtaaagaacatttgagtaacgccaaaaacatttctgctgatattgaacaatacccagaaaactacactgaccttacaaaacaggaaagacgaagtttagtattagaaaccgaaactaaagacatctacacggatgcatttatttttagtaagaagaaaaaaaaccacgctgtccctaacgctaaaaacagcataaatatcgataaacccagaaaagtatataaacgaaccaaagagaatgaggaagcacgaaaaatcccgactgacgctgccccccatttgaaagcagtgtcctga

SEQ ID NO: 249140 - DNA, 480 bp, Klebsiella pneumoniae
atgagaaaagtaaaaacagacaacagtgatttaatccaatatttagatacagtaaaagaactaaaaaatcatattccgatagaggaataccgaaatgaatatcgtaaactatgctctgataatattccgtggattaagattcaaaaatttaagtctgcccataccgaacttcgcagactggataaaaagagagaatctcttattgaattgtttattgatgaacttaacccaataagcagttcaaaagctaacacatcagcgaagtcatcaggtaattttgagctgtttaacgaacgcgttctctaccgtaaagcaatctcagaaaaaagtgatgaagaaattgttgccttggtcgtaaaacagcgtacagaagccgctctggagtttcagcgttctattgaacagagccttgagcaactctcccgcatttcgtcagagttcaaaccatcaagtcagatacgcaggaaaatgcctctgtaa

SEQ ID NO: 249141 - DNA, 381 bp, Klebsiella pneumoniae
atggaaaaaaacaaaatgaataaaaaagatgaaacgatgatctttgcaatatcagtgacattaatgttatacgtaaacaagatttacggtatggcaagtgtaaatgatgaaaatgtcatgactttcgttaaggagcaggatgccgttgattttgcgctacgagttcatatgttagaggttctaaaggagtttgattattacaaaatcctttttggtacggggaaagaaagaaaggaatatatcgatatggcagagttattgaatagagtaatgttttatcatggtaagtatattaaggatatgttgataagaaatctggaggaaggaatatctatggatgattatggtgtgctgaactggaatctggatataatgagataa

SEQ ID NO: 249142 - DNA, 819 bp, Klebsiella pneumoniae
atgagccaaagtaaaagcaccaaaactaatgaactaaaagaaaataaatttgaaaacttaaaaaaattagactcccttttcgttctttttataattgttggtgcatggattttcggtcaaataattttaaaagaccctcgtttaatattattttttgaaaaaattggaaacatacccgatcttttaagccttttcccaattttttctagcagcttgcttatagccacttggtttctttacagaggtaaatccgttaaatcactaaatgatataattctgtttttttctgtgagttatgcattatatcttttcctgttcgacaatcaagaatatgaaaaactaaataatataaaagaagtggttagtaacttaccccttttcttagcaaaaatagcaatacttaattgctccgttgcaaaaacaataattacgctattcgaattcatcattgaatgggctaaagagaattcagaaaaaaagattactttgcaagaaaaacaaaatgccgaggacaacaaagcatcatcctcattcgataaagatggtaaagtggaaaattttgaatttaattacaagtatgaaaaaacacaaggaaacaaaattgagcatgaagaaatttccataatgaaatttgaaagcaatctgcaaaaagatagcaactcaagtgttaaaaaaccaagcaaagatgatcagaactcaatcaaccaaataaaaacaaaccctatcaaagataaattaataacttctttaattatattgtctttgataattttagccttcccatttttatataacatatttattcactttcatcgctag

SEQ ID NO: 249143 - DNA, 342 bp, Klebsiella pneumoniae
atgaaaccatatgtaatgctttatagtgaaacctacacaaaaccaacccagccattagggcaatctattgacactacgttaagaacattcacgattgaatctgatgatagtgattcgataaatgccggaacaataataacaaaagtaaatgaaaatggagatgaagatttcattcttatgtctacgattgaaacaagagagattgaaaatagcgatcaggatttttcttgcgaaagcacaatagtcacagctacaattgaaaatgacgataataattacttatcatgcgcaactctaattacgaacgttattgagtcaaatgataatgatttttatttttag

SEQ ID NO: 249144 - DNA, 177 bp, Klebsiella pneumoniae
gtggcggatgtgtttgccgcctataagatgaagctgcagtatccggtgacactgcaggtgaatgtgaagaacctgtttgataagacctattacacttcctcgatcggcaccaataacctcggcaaccagattggcgacccgcgcgaagtgcagttcacggtgaagatggatttttaa

SEQ ID NO: 249145 - DNA, 1110 bp, Klebsiella pneumoniae
atgtctataggaagtgaacagggttcaatatcaatgcctaagtcaatttgctttttcaatcacaaaggaggggttagtaaaactacgaccaccttcaatctgggatggagtattgccagtaagggcaagaaagtattaatggttgacttggattcccagtgcaatcttagcggcatggttcttggatttgaaaaaatagatgagggtcttgagtctttttacgagagtcgtgaaaatctgactatggggccaattgtcgactatctcatcaatggcgggcagccagaaacttatttatctcaagataaagggaagctgactccaacgttaaataaaaatctgtttttacttccaggtcatctaagtgtctctgatttagactctcaaattagcgtttctcttaagatagctgccggtattcctgcaactagaaatattccaggaaaccttcctaagcttctgcaactcgtagccgctcataatgaagttgattatatcctttatgatttaagcccaaatgttggtggattgaacgaagtaatgcttatgtcaagtgattactttattgttccaactgcgcctgatttcttctgctggcaagctgtaagttcattatcaacaaacattttaaaatggtatcgcgagatacgtaattttaaagaacaaaatgaatctcatgcaagtgcagcaagatctattgggaatagccctaaattcttaggaacgatacagcaaagatatcgtccgcgtaatggttcgccagctaaatcatttgaaaaatggatcgataatattagtcaagccgtcgatgaaaccctcgttccgcaattgttggatttaaattgtgccatgccaagagataaggtgcaggaggcattagccagcactgattctgatttatcggcctataacctagcgcacatttctgatttcaattcattaattgcaatcagtcaacgtctatcaacacctgtattttctctgaccaaccaacaaattgctgaagccggtcagtttgggcacgcactaaatactatgcgagaaagccgagatcaatttgcttatcaattcgacaaattagccgataggattattatccttacctcttaa

SEQ ID NO: 249146 - DNA, 678 bp, Klebsiella pneumoniae
atggcaatttgtacttttttacaggttccaaacgccgttaatagcggtattcagtccacctataccgagcgcgatgataaaacagccaggtggaacccatcgcactattttgactggcgagtatcaactcttgcagaccgcgccggcgatatgaatatagcactgggttctgcaatctcagcgtcgacgctgaacggcatcaaaaccatgaaaagtgcgctaaccgcaaatggtggcgtcacatctgaaaatgtctaccccgctacagcggcaaacggctattgctacgccttcgctttcaagcgagataacaccacacaagctacctttttaatcgcggggccccatctgcggctgcaggcacagacagataacaaactatattattacaaaaccgggtcatctacccagcagggaggggtggccttatccacaggcattgaccttgtgatcgtgaactacgacccggtaactgacactgagacggtgtatgtcaatgacggcaccatggcagtgaccgctgcatcgtctattacctaccagaatgctccgctaacgctggcggcaactgccgcgaataacgttaactatgcagaggtccttatcttttcaacgtcaaagtcgatatctgaaatttcacaaataaaatcatactatagagaccagtacggcaactga

SEQ ID NO: 249147 - DNA, 537 bp, Klebsiella pneumoniae
atgacgtcaaaactgagtggcatcttcgatgtagacttttgttttatcagagttcataaaacccacgcttttacattcagcgccacccgcattgattttataaccttgatcgcgtgtgatattcacaagcgtgattttttaatcgtctcgggcttccatttgttcataaagaaatcagtacaaatactgtcaaggaacgaatgggccatctcttcagtaacttcaggcctgccgtatctaactgttaactccccgttttcaaggctatgcgtccttgtgtcaaatattgcaatcacgttttcgatagaggtaagtatcttgtcagcgaaagcgttacctgtggtcaagagtaacagcatcaaaagagattttttcatatcggtagtcttttgcattgataaatgtctgccgccattttgccgccaacgcacaaaaaaaagggctacgttttcacgtaaccccttgttttatttggtggagctggcgggagttgaacccgcgtccgaaattcctacatcctcggcactacatgcttag

SEQ ID NO: 249148 - DNA, 1341 bp, Klebsiella pneumoniae
gtgtccgaatcggagtcactgtcagagtcagagtcgctgtcggagtccgagtcgctgtcggaatccgagtcactgtcggaatcggagtcgctgtcagagtcagagtcgctgtccgaatccgaatcactgtcgctgtcggagtcagagtcgctgtccgagtcggagtcgctgtcggaatccgagtcactgtcagaatccgagtcactgtcagagtcggaatcactgtcagagtcagagtcgctgtccgaatcggagtcgctgtcagagtcagaatcgctgtcagaatcggagtcgctgtcagaatccgaatcactgtcgctgtcggagtcagagtcgctgtcggaatccgaatcgctgtccgaatcggagtcagagtcgctgtcggagtcagagtcgctgtccgagtcagaatcgctgtcagaatccgagtcactgtcagagtcggagtcgctgtccgagtcagagtcgctgtcagagtcggaatcgctgtccgagtcggagtcactgtcggaatccgagtcgctgtcagaatcggagtcgctgtcggagtcggaatcgctgtcagagtccgaatcactgtcggaatcggagtcgctgtcggagtcggaatcgctgtccgagtcggagtcgctgtcagagtccgaatcactgtcagaatccgagtcgctgtcagaatccgaatcgctgtcggaatcggaatcactgtcagaatccgaatcgctgtcggagtcggaatcgctgtcagagtcggagtcgctgtcagagtcgctatccgaatcggagtcactgtcagagtcggagtcggagtcgctgtcggaatccgagtcactgtcagagtcggaatcactgtcagagtcagagtcgctgtccgaatcggagtcgctgtcagagtccgagtcgctgtcggaatcggaatcggagtcggagtcagagtcgctgtcggagtccgaatcgctgtcggaatccgaatcgctgtcggagtcagagtcactgtcagcatccgaatcgctgtcagagtcagagtcgctgtcggaatccgaatcgctgtcagaatccgaatcactgtccgagtcagagtcgctgtcagagtccgaatcactgtcagagtcggaatcactgtcagagtcggagtcgctgtcggagtccgagtcgctgtcggagtccgagtcgctgtcggagtccgagtcgctgtcagaatccgagtcgctgtccgagtctgtatcagaatcggcatcggcatcactttcgctgccgccagggtcggtatcgctgtctgagtcagaatccgaatcactgtccgcatcagaatcagtatcatcgttcggagaatgcgacgaatga

SEQ ID NO: 249149 - DNA, 897 bp, Klebsiella pneumoniae
atgcaattgttcgccttacgtgtgttaatgagaccgcgcgatcctgatcttttttcaaagggagttgttcaaaaagacattgtgcattttgaaaatgccatagtatccagcgcgcaaaagttacatctaacatcatctacaccgtccgttcataagaaaaccagctacaccttgaagctgagtataaaacccaccgaaggcgtcatggctggggtcatatcaaaacagcaaaaaattaaaggacatgataaggattttcgcgagttcgatgttgacaattatccacctatcgtatggatctgggatagagaagagcaagtgttattggtcgagaagaaaacgtcggtattcaaggatgtacatcaagttgctaaggcatttgaagatcttgccaacaacgactatttggctcaattggggctaagagtatttatcgaagcttgtcttgaaatggaagacttttggtcagaatatcatagactccagtttattgataaagttagttttacgttgattactccgaatatttttggaagtagcaagcaagccttaactgatgatttgcgcaagcttgaggctgatactaatgcaaatgctgtaaccacaacatttgaaaacaaggatggtaatttaaagcttaaaggttctcattgggcatctattcttgttgattgggtaaaagatggtggtggttcttgggtgattaaaggtcgaaaaacactcaagtcaaaacctacaactgtatccagtaatcaaacggctaagatagtgcttgtcgaaggtgagatctcagaaattcagttagatggttactccccaagtgatatcaaagaaatcatagcgttacatcaaaacaggtacacgtacaaaaatgaagaatctaggcgtctggattaa

SEQ ID NO: 249150 - DNA, 375 bp, Klebsiella pneumoniae
atgcttgagcaggcatcggcaggggtgattggctcaattcttggagggattactgcagggatctctgtaatttttggcattctggcgatcatcaataaggggcaaaaacgctcaagttttataagttacttgggaagtttagaggctgacctgaaattacttgtgatctgcttaggcgcaacaatttttttaccgtaccttcgaaattatgacttacctctaataaattatcccaagcatgagttgattccttctaaggataagttatttactgcggcagagctgtttgcggtagcgctgtctcttaatctcattgttgaagtgataagttgcatgattttagtagttaaacaaagtcttaaaacggaatcttga

SEQ ID NO: 249151 - DNA, 789 bp, Klebsiella pneumoniae
atgaaaaaaattaataagctagatgagccaaatcgacttggtgtgttcaaagctactcatcctaatgctttgtgggagagggataaaaactcaattgaagaggctttccgttgttgcactgccagatatcaagaaactctgcaacaattacgtacggaccaaggtaatttatgtgcatattgtgaacaggatttaatgtctggaactaatggtgcattagatgactgccgtattgagcattttcacccgaaatctaaacgggcactgggagaacctaattgggctttggaatggagcaatttgttagttgtttgctgtggcggaaatcaaagtaaagttgttaatcctgagcaaagatttgatgctgatccaaaaaactactcttgcgatgtaccaaagagcgacaaaattttagattccattatattaaatccagttaatttacctgaattaaatatttggaagtttcatcgttcttcggggcaaatgtccgtaaatgaagattcctgtttagaatttggtataaatgttgaaatggcacaccgaacaattaaagagttgaatttaaattcccctcgactaattagatttcgaaagactattctggataatctcaacattttaatcacagaaagactgaagaagggacaaacaatagagcaagctgttagatttattgccatatcgctctttcgaaaaaatggagctggtgattggccctctttttttagtgcaacacgatattatttaggtcagcaggctgagcttgttttaacccaacctatttaa

SEQ ID NO: 249152 - DNA, 2538 bp, Klebsiella pneumoniae
atgacaaatgaccatgaagaactagaacttgctaaagctcaggcaaaagaaatatggaagatccttgattatgttcgaggagcatcacctatatctaattatcgctcattagcgtattcaatattcttcgtacgctatcttcaatccaatacaggtcagcattttgaggcaggaaggttcgactcttttaatgttataaccctgtattcctacgatcttataaactatgctgttcaactaggattgattcatagcgacgtatctcaattcttaattgattatttagaaaacacgctccattcatttgtcaatattgatgaatcttttgttcgctatgcaattagagatgatctactcaataaaaccactacaatagcgtctctttctttgtcagaactggatttactttttgccgagaatgaaggtaagtcaggaggtgaattttatacccctatagacgtcaacttattggttaaaacattagggttgagttatcaaccaaagtcaatatgtgatccatttgcaggtgctggaaacacagcatttccttttgccaatactggtattgaaaaagttaggattgacactcaagaaattaatagagatgcttactttaaactagtaataagtagaactatcaggaaaatagaaggtcgagactatttcggcgattccctatcacaacccttatatcaggaaaataaatatgatctaattgtttctttcccaccttttggcatgaaaatacctaaagctactcgaaataatatttactataaaactagtaataagtggctagatattgctgaaatcttgccagaaagtagaagtgattggtttataacattatcaatgcttccagcccttactgaggggggtaagatactagtaggtatgtcacttggagctttgacaagaacaggctctgaggcaaaggtccgtgagtatttagtctctcgcggaataatcgaacaagtgattcttttacctaaaaatattcattactctacggctatctcaactgtactacttgttctcaactcaggaacaagtaacataaatgccagaagtattaaatttgtcgatgcttcactattttacgagcctgctcgtggtcgaaacaccctcacaacgcaaaatatcaatgaaatcgttgaagcttgtcataaagatggccgatttagcattagctcatctcatacccaaatagcaaatagagactttaatttagacccctctctttatgtacgtaaggatctcaaaatcagtgagatttctttaaaaaattttagagggtactctgactttaaagtttcgatacatccttctttaaatgtattggttggtgagaacggcgttgggaaaacctcgatattagaagcattagcatgtggccttggtcctttccttactgctatgcctgatgctaaaggaaaactaataaaaaaatcagatatccatataagtacaaaaggaatcgcaaattatgctcgaatatcgattgaaacaacatcaagtttaagttgggatcttgtagcaaaggggattgatgtttacgagccccctaagataggaacatcagcattaacaagctacgctactcatcttgtagatagtcagtctgaatatccactcattgcttattatgggactaaccgtgcacttacttctaccagttctaaagttgcaataaacccattcgaaaaagaaaatcgtggggaaggatatgactttgctttagatgctaaagttaactacggcatcttaaagaactggttttcaaaaatagaggttgatgagcttcgaaaacgtgatgaactaaaagaccataaattcattcatccggctaagagacttgtttcagaggctgtttatcagattgttgatcgagctacatgcttggagttcgacaaaaatagtaacgatgttatagttcattggaaaaatgagcagggagagtgcgtaaaacttacattagaacaactaagtgaagggtatagaaatgtggtatccctgaccattgatctagttagacgtgcttatttacttaatcctactaagccgaaaccgctaacagttaatgggatcgttttaattgatgaaattgaacttcacttgcaccctagatggcagcaaaagattttaaatgaccttactaagctatttaagaatattcagtttattgtcacgacacatagtcctcaagtcttaacaaccatcagtgctgattgtatccgcattgtttccgtcaatgctaacgaagcaaaattagtgacaggaactactacttacggttctgaaagctccagaatgctggaagatgttttaggtggaaacaatcgtgcccaacaccttgatatagttaaaaaattaaaccgttatacggaattagtagaggcagaccaatgggataccgatgaggcattagagctcaaaaaagagttatataaatggggggggcagacagaagacgagcttctaaagttagaaactgatattcgaattcgcgagttcgagcgtggcaatgaaaaaaattaa

SEQ ID NO: 249153 - DNA, 1359 bp, Klebsiella pneumoniae
atggctaagtataaggcgtatccggagtataaggattctggagttgagtggttgggagttattcctaagggctggactatcagtaaagtaaagtatctagccccatttcaggttggttggaccccgccaactaagaatgatgccaatttcattggtgataatctgtgggtcaatatttctgacttaaaagataaatttatttcatctacagcaaaatgtatctctgataaagctgcaaaagaagcgtcaatggatatcactcctaggggttctctgctgtatagttttaaactatcggttggcgcagtttcatttgcaggatgtgatctttatacaaatgaagctatcgcatcatttttggaccaagctcaactgcctctatcatatttgtactatgcactcccgatatttattattgaaaatgcatcaactaatatctatggtgcaaagatattaaaccaagagcttataaaaaactcatttttacttgcaccttcacatagtgaagcaaagaaagttgctaaatttttggatcacgaaaccgcaaaaatcgataacctgatcgagaagcaacagcaactgattgaacttctgaaagaaaaacgtcaggcagtgattagccatgccgtcaccaaagggctaaatcctgatgtaccgatgaaagattctggtgttgagtggttgggaaaagtgccggaagactggcaattaaaacagatacgtcatttgtgcacttcaaatggcggtggaacaccatcaaaaagcaatcctaatttttgggttggtaatattccatgggtttctccaaaagatatgaaagttcagtatatttcggatgctgaagatcatgtgagtgaagatgcagtcaagcaatcttcaacaaaaaaaatacctataggctctgttctgattgttgtgcgaggtatgatattggctcactctgtaccagtagcaataaacactaaagtagtgacaataaaccaggatatgaaagcgttggtgcctaatgaaaatatatcctgtgattatctacatttggttttgagtgggctaaaacgtattttattggaattaactgacaattctgcgcatggaacaaaatgtttacgaaccgatctttttgaaaagttatggattccgttaccatcattaacacagcaaaaaacgattatttcagagattaacgagaaagtaatcaagattgatgacctaattcatctacaggaagaggctaaggcattacttcaagaacgccgcaccgccctgatctccgccgccgtcaccgggaaaattgacgtccgcgactgggttgctcctgacacgcaggacgttgaggagccacaggaggccaccgcatga

SEQ ID NO: 249154 - DNA, 123 bp, Klebsiella pneumoniae
atgaaacgattggtgttagccctgcttttatttattttcaaagaattggctgtagtttccgttctcacgctgggagtggatatcactctggtgaattcgtcaatgtttgctcgtgaaggatag

SEQ ID NO: 249155 - DNA, 1239 bp, Klebsiella pneumoniae
  misc_feature (710)..(717): n is a, c, g, or t
atgaaggggatgcagaagataaagcgaggtaagaacttcgctggcgtagtgttttatgcattgagaccagcttctcatcacaaagttgatccagttgtcgtaggtagcaatatgatggggtgcctcgctaaagagctaatagctgagtttggtgctacaaaaacacttcgccctgatgtggctaaacccgtttggcacaactcgcttcgcttacctaaaggtgaatcactaacggctaaacagtggtcctacatcgcagatgactacatggcaagaatggggttctctgaaacgcatctcagatgctacatcctacatgacgacgaagacggccagcacatccatatcatcgcaagcagagtttctcttgatgcaggaaagctctacttaggtaaaaatgagaaccttatcagcacccgtatcatccaggatcttgaacaagactatcagctaacaagaaccaaaggaccgaaagcatctccagcagcgccctcacctaaaccgaagctcaaaaaatcccgtaatgagatgatgatagaaaagagaactggtgagctatgcccaaaaggaatcatccaaaacgcccttaacgaactgcttgataccaggcaatcgattaccgacttcgtgcaacagcttgtggcacaaaatatcaggccaatccctaacattgcctctactggacgcatgaacggcttctcattcgaatnnnnnnnntattcctggtctgccttgcaaagcagaatcgactaccaacaggaacgtgataatgctttcctgtttaaactgaaatcatctgtcagagaaacatctgttagtgcaactcatgatatggccataactacagatgctcctgaaaccacgaaagaatacgttaaccgccctatagaagcacttatcgtcgataaacgagctgctggtcaggacgaatactctatcgcttctgtcgaagcgcttctcccagaagctgttgcaactaacaaagaagcgatagcaaccgaagcgttaaaagtagcgcccaagcgaagctatgcagtgtcagcgttcaggtggttggaatacatcccctacctcgatgtaatttatcgtatgttgagaaacctcaaaatccccccccttaaacgccctcgaaaacacaaaaccatcactggcgtgagaatgatagagataacatcatcaccccccaaaactgccattgaaacaccacataaatcgcatagagcttcgctttcaatgtag

SEQ ID NO: 249156 - DNA, 522 bp, Klebsiella pneumoniae; identical to SEQ ID NO: 202481

SEQ ID NO: 249157 - DNA, 522 bp, Klebsiella pneumoniae; identical to SEQ ID NO: 202481

SEQ ID NO: 249158 - DNA, 867 bp, Klebsiella pneumoniae
atggcaagagtagttcctcgtgctggtgaacagttccaacgtataaaggaaatgacagagcaaggattaaccaataaggaaatatctaactcgactggattatcattacactggataacaagtctgacaatgcttatcagtaaaggtgaaaataaattattatccgctgtagaatcaggaagcatacctatctcgcttgctgttgagattgcaagagtcgattttgaaggtggtcaggaattgttaattaaagcatttgataaaggtctaataaaacacaaagatgtaggaaaaatacgtgagatacttgattcaattctggtcgatttaataaaagcaaaagattttaatgacatatggctgggtgaacctgaaattgtagattgggagaatcagataggctattgttttgagaagcggcaaagaagcatgatttatgaaagtttgtcggttagtcatatttgtgagtattttgaaagcaaaaagattgaaattactttaaatgatctcaaaggaagcagtttgcatgttttagatgcagattatcagtctttaaaaaaatggtctctttatagatgtctgtatgctgagataaaggaaggtgatcaaaactatatcctgagagattcaatttggtacgtggctgatagaaaatttgtttccaccattgataatgaaattaaacgaattaagctgtatgaggaagccgacaaattcccgatttattcttataaaagagaagagcaatacaataaagaaacttgtcttgctgatcaaagctttactcatatggatcaaaagttcatatatcatggtggtgggcgaagtaaaattgaattttgcgatattattagaggtgcaaaatga

SEQ ID NO: 249159 - DNA, 507 bp, Klebsiella pneumoniae
gtggctttaggcgccattatattagtcaatttcgcccgggtggttcactggaaggatatagagaaaacggctgactggggcgtgctgttattattcggcggtggtatctgcttaagtaatgtgttgaaagagacgggcaccagcctgttcctggcaaaccagattagcgggatggtggctcatatggggatatttattattatcctggtgattgcaacattcgtggtgtttctgaccgagtttgccagtaatacggccagcgccgctttgctcattcccgtatttgcctcagtggccgaagcgttcggcatgtcgcctgtgattctgtcggtattgattgccattgcggcttcatgtgcttttatgctgcccgtggcgacgccgccaaacgctatcgttttcgccaccggccatatcaagcagcaggagatgatgcgcgccggcctgtttttgaatgtcgcttgtatcgtcgttttgaccggatttagcatgttgttttgggtataa

SEQ ID NO: 249160 - DNA, 195 bp, Klebsiella pneumoniae
atgcaggttgccaccatcgatcactcaatgtggttccaccgcccgttcaacatcaacgactggctgctgtacagcgttgagagcacctccgcctccagcgcgcgcggttttgtccgcggcgagttctacactcaggacggtacgctggtggcttccacggtgcaggaaggcgtcatgcgtaatcgcaacgcataa

SEQ ID NO: 249161 - DNA, 180 bp, Klebsiella pneumoniae
atgggccatcaggttctggtacagctggaaagcatcggtatcaccattgtctggtccggcatcgtcgcctttatcggttacaaggttgccgatatgaccgttggcctgcgcgtaccggaagatcaagagcgtgaagggctggacgtaaacagccacggcgaaaacgcctacaacgcctga

SEQ ID NO: 249162 - DNA, 195 bp, Klebsiella pneumoniae
atgtgccgctatttttctggggtaaaacatctgctgctgcttcctttatgcggcctgtggggcgcggtgctactgtgcggcggtgatatcgtcagcaggacgctgctggctccgcaggagctgcctatcgggatcattacggccggcatcggcggactcttcattattattctgctggccagaaaccgttcataa

SEQ ID NO: 249163 - DNA, 252 bp, Klebsiella pneumoniae
gtgctgtatgtctatcccggcccggcgaccgagcccattcttgccgccgcgaaagcacagttaaccgcctatatcaccgagcagcgccgtctcggtcgggatattcgactatccgccatctatgccgctctgcatgtgcagggtgtccagcgcgtcgaactgcgcgagccgctggtcgacgtcgtgctcgataaaacccaggccgcctactgcaccgaaaccagtgtcgtgatcgggggctccgatgagtag

SEQ ID NO: 249164 - DNA, 201 bp, Klebsiella pneumoniae
atggggaccgccctgtatgccaccggcctgggcattgctattgcgctgctgtgcctggtgggcaataactatttgcaaagccgcatggagcgaatcaacgaactgctgaaggtgctgctgatccgcgccggcagccctgtcagccgtccggagcagggcggcaaacgctgggaaggccacgaggcgcagcgctatgcctga

SEQ ID NO: 249165 - DNA, 258 bp, Klebsiella pneumoniae
gtgatcatcgtaggtctggtggataacattctgcgacctttactggttagtaaagataccaaaatgccggactacctgatcctgatcaccacgatcggcggaatggaaatctacggcatcaacggctttgttatcggcccgctgatcgccgcgctgtttatcgcctgctggaaccttctctccggacgcgatcacgctggaaacattgatgagcttgatgaagatttcctcgaagaaggtaaaaatcacgaagagtag

SEQ ID NO: 249166 - DNA, 135 bp, Klebsiella pneumoniae
atgaagattcgcgggtttagaacgatatttcgccagcgcatccaccacatccaggcgggcgtgattaagttcctgaaccatcccgatggcatcatccagcacaatggcatgcaccacaccgtactgctcctgtaa

SEQ ID NO: 249167 - DNA, 240 bp, Klebsiella pneumoniae
atgacggccgccgatgcggctagcctccagcatcagttcaacgtcatcgctaaaggtctgcccgttcagcgcaaccggatggccctgttcaaagcgaacggtgacttcttccgcagggattttgacgctttcatcccagaacttgacgcccataatcgggttcacaatcttgacgctggagttcaggaattcaagatctttagcttcgtgcgtcgcgcccagcatattggagtcggttga

SEQ ID NO: 249168 - DNA, 201 bp, Klebsiella pneumoniae
atgaagcccaacgccggaaccctgcgcggtgtcagcctggccgacgttgcgcgctctgaagtggatgccctgattaaagtgctgccgcgtatgaccagcccgtcactcaccgagtcggatgtcgtcatgatggatttacccgatttgatggcgctggcaacaaaggtgatcggttttttgtcgccgaatttggcggattaa

SEQ ID NO: 249169 - DNA, 159 bp, Klebsiella pneumoniae
atgatgctgagcttttatcaggcggtgcgcgccggtgagatgccgccggcatcgtcacggcgtttcgcctcgttctacgagggggcggacgtgatgtacatcattgcggcgatagtgaaaagccatcagcagcagcgctgggtgaaggtggaaagataa

SEQ ID NO: 249170 - DNA, 147 bp, Klebsiella pneumoniae
atggcggcccgccacgctgtcaagaatgtaggattccagcatggtatcaaaggcaataccgcgcagttcaatgccgtagttagccaggataccgcggtcatatttgaggttttgcccaaccttcagaaccttgtcatcttccagtag

SEQ ID NO: 249171 - DNA, 198 bp, Klebsiella pneumoniae
atgaatattttccgcaagctggaatttacgctcaaaattgcgttcagcgatgccctgatacaggtaagtgcgctctttctgctcggcggcatgggcgccttttacgataagcagattatcctgcgcggtaatttccagttcgctctcggcaaaaccggcaacggcaatcgcgatgcggtagttgttctcgtctactaa

SEQ ID NO: 249172 - DNA, 147 bp, Klebsiella pneumoniae
atgggtattccgggtaataacggcctgtccatgatggaaggtcagataattctcgctgatttcaggagctatgtattatgcgtaatttcgatctctccccgctgtatcgttctgctattggtttcgaccgccttttcaatctgttag

SEQ ID NO: 249173 - DNA, 156 bp, Klebsiella pneumoniae
gtgctggtgaaacgtcttcagttcacggcggatgggctgctcgttcactcggataacagcaaatatgcggactggacgattggcgaaagccatgaacagtatctgaagatcattggtcgcgtgatttatagccacagcgttaaacgctttgtttaa

SEQ ID NO: 249174 - DNA, 210 bp, Klebsiella pneumoniae
gtgctggcaaccggcgaggccgacgcgattttgcagggcgcgaccctactggcccgggtacaggaagcgacaattttcgccctcacccccgccaaccacgcgttaagcaatatggcctccgcgctgctgcccctgcctgagaatgctcaggccgcgcgttacgccctgctgctgctggttgacctgcttaacgacgcgctgctcgcctga

SEQ ID NO: 249175 - DNA, 162 bp, Klebsiella pneumoniae
atggaggcgcaggatgcggaggttcctcgcggcccgctcagtacgatggagcagcatttgcagcgcatcctcgggcatctgaacaccatgcacaccatttcatcggtggcatggcgtcagcgtccgcatcatggcatctggctgcgcgccactaagcgctaa

SEQ ID NO: 249176 - DNA, 168 bp, Klebsiella pneumoniae
atgctgcgcggcggtatcagcgctggcgtagtagcgctcgcgctggtgcttaatccagttgagtatctcaatacgttcgctgtcgctaacgccgccggcccagtgcagcgcgacgtatcgcgtaggcggcatcgtttgatgctgcataacccactcaatcttgtttaa

SEQ ID NO: 249177 - DNA, 147 bp, Klebsiella pneumoniae
atgttccgcgtaaaagcccgtattccgccagagctgctggcggagcatctggagtatgtgaagaccggcctgcccgggatggcctgggttcgtctggataaccagcaggcgtggcctgaagcgctgacggtgaggttgccgcaatga

SEQ ID NO: 249178 - DNA, 171 bp, Klebsiella pneumoniae
gtgctcaacggctttggggtgaaaaaaggcaatagcgaagtgaaaaccgcgctggaggaagggctgaagaaatacagcgcgacgccggaatacgccgcgctgctgaagaaatataacttccaggcgccgacgccagaggatctgcagactctgatgccgaaagcggagtaa

SEQ ID NO: 249179 - DNA, 132 bp, Klebsiella pneumoniae
atggacgagcaggccgccggcctgaatatcgtgaccgagccgaccgaacgcgcgctgacgaccgtgatgtctaacagcttcggctttggcgggactaacgccacgctggtcatgcgcaaataccgcgcataa

SEQ ID NO: 249180 - DNA, 126 bp, Klebsiella pneumoniae
atgcaacgagtatggcttaagcgcacgttatggatgatggtcctgtggggaggcagcgtgctggcgctggcggcggtaagcatgggatttcggctgctgatgacggccgccgggctgaaggcctga

SEQ ID NO: 249181 - DNA, 186 bp, Klebsiella pneumoniae
atgcgcggacatccggtgtttatcgcccagcatgccaccgcgacctgctgtcgcggctgtctggaaaagtggcacgcgatcccgcgggggcgcggcctcagcgacgaagagcagcgctacgtggtgcaggtgattcaccactggctggtgatccagatgaattcgccggaccgcagcagactgtaa

SEQ ID NO: 249182 - DNA, 1170 bp, Klebsiella pneumoniae
gtgaacagtaacgttaaatttatcagctcgatctcaactgaaggtgaatttgagacccttatcaaaagatatgctgaggaattgtttaaaggaaatgcatatctagttggcgggccttacgataatggtaaggacttagttatcaagcgcaacgaaagagagattcgccaggccgtgcagataacaatacaagaaaaaaaacttgaagaaaagttagaggcagatctattaaaagttgaaaaattagttgataacaataattatcctccagtattacattttttttggagtcaccctatttcagaatatacattggataaacttagaactcgcgcaatgactaatcatctgatttctttagaattttatgatgcgaaaagaatagcacaagatttaacagatcattatccacaccttcttaattacctcataaaaggcattcataaaattgatatccagaacgatgagccaataaacttccaacaaagggctttttacgagtatcttcttctgagtaaagacagtacaaatttaaaaaatgctattatagatgcaagcatactttcccatttgaatgaaggtggtaaaacaattgaagaattgttagggttactccaaggcgttaatttaaaaataggtagtttaaaaggtaaactactaacactcacacgtaatggtaaaataatccatcaagatggtatatatactctaagtaacgaggaagtatctaaacttgagaatatcaaactaagagatagcacgcgcaaacaagaattaattaaaactattagtgaaaagcttgctaagcatactgataaagatttggcttctgaggttgtgaagctaatcattacggcatacgaagaatcaataagcattcaaataaccgaaagtaaatttgaacctcctaaattaaaaatattccaagcgacaattaataatcttaagatattaataaatgaaagatgcggtttagacagagagcaatctgaagcattggctggtgaattacttgaaatagcaggtgaaaatgaatatctgtcagaacattgctcagcaaagttgtgtgttaatttcctgagtgacagtaagcttgaaaaatatattgaagataaaagcttctatatttatcttgatgcacctgtattgctgtctcttatacacatctga

SEQ ID NO: 249183 - DNA, 1434 bp, Klebsiella pneumoniae
atgtccggatttaaagcaggttttctgtggggcggcgcggtcgcagcgcatcagttagagggcggctggcaggagggcggcaaggggatcagcgtggcggatgtgatgaccgccggcgcccacggcgtgccgcgggaaattaccgacggcgtggtggccgggaaaaactacccgaaccatgaggcgatcgatttttatcatcgttatccacaagacctggcgctgtttgccgagatgggcttcaaatgttttcgcacctcgattgcctggacgcgtattttcccgcatggcgatgagctggagcccaacgaggctggcctgcagttttatgatgatctgttcgacgaatgcctgaaacacggcattgagccagtcattacgctgtcgcattttgaaatgccttatcatctggtcaccgagtacggcggctggcgcaaccgcaagctaatcgactttttcgtgcgctttgccagggtcgtcttcacccgctatcaacataaagtgaagtactggatgacctttaacgagatcaacaaccaggccaacttccatgaggactttgcccccttcaccaactccggtttgaaatatttgccggatgaagaccgggaaccggtgatgtaccaggccgcgcactatgagctggtggccagcgccctggcggtgaaagcggcgcgcgagatcaacccggcgctgcagattggctgcatgatcgctatgtgccccatctatccgctgacctgcgccccggacgatatgatgatggcgatgaacgccatgcaccgccgttactggtttaccgacgtccacgtgcgcggtcgctatccgcagcatctgctcaactattttgcccgccgcggctttactctggatatcaccgaagccgatcgtcaggcgttaaccgagggctgtgtcgactacattggctttagctactatatgtcgttcgctaccaaagccaccgaagacaaccccttgcttgattatgatgaaaccaccagcctggtctccaacccgtacgtcaaaaagtcggactggggctggcagattgacccggtcggcctgcgctattcgctgaactggttctgggatcactaccagctgccgctgtttattgtcgaaaacggctttggcgcgattgatgtccgcgaagcggacggcagcgtcaatgaccagtatcgtatcgattatctctccgctcatatcgcggagatgaaaaaggcggtggtcgaggatggcgtcgatctgatgggctacaccccctggggctgtatcgatctggtttccgccggcacgggggaaatgaaaaaacgctacggctttatttatgtcgataaagataatgaaggcaatggcacgttggcacgcagccggaaaaagtcctttgcctggtatcagcaggtaattgccagcaacggggagaacctgtcgtag

SEQ ID NO: 249184 - DNA, 906 bp, Klebsiella pneumoniae
atggacaaactggatgccatgcaggtctatgttgcggtcgtggatgcccacagcttcgcccgcgcggcggaggtgctcgggcagccgcgctccacggtatcgcgggtggtgaaggagctggaagcctggctcggggcgcagcttctccagcgcaccacccgcaagctcagcgtgacggcggagggtcgccggtattatgaggagtgtaaaaggctgctggccgagatggcggcgatggaagcctcctttcccgggcgctcggctcagcccgccgggcggttcaaggtagggatgccgcaatcccttgcccgccactgcattctgccgaggatcggcgagtttttgcagcagtatcccgatctggagctgatcctctgctcaagcgacaacgtggaagatattattcaggagggattcgactgcgtgatccgtaccgggcggatcgaagattccaccaccctggtggcgcgtcctctggcccgctatcgctggatggtcctcgcctcgccggcctggctcgcggcccacggccggccgcagagcatcgacgaactgcaccagcatcgggcggtgggctacctgaatcaccgtaccgggcggaccatcgactggcttttctccctcgatgaaggcgactgcgcgatccgcatgcgggagacgctggtggtcgacgataccgatgcctacattcaggctggcattcaggggctgggcctgatccgcgtcgccagctatctggcgcaaccttatctgcagagcggggcgctggtcgcctgtctggagcaggccgcttctgatcttcccttgtcgctggtctatccgcaaaaccgctatctgccgccggcggtgcgcgcgttttatgactggagcaggcgcgtgctgcaacccccgcacagcgaggcctga

SEQ ID NO: 249185 - DNA, 246 bp, Klebsiella pneumoniae
atgagcctgattattgtcagcaatgatttatcggaagaagtacacctggtgacggtggagaacggcgcggccacggccacggagcgactgagcggggccagcgtatcagcggaggaaatggaaaccctgtttcccggtttcgccagtgcagttgcaacggccggagatactgccgaactgctggggacgctggggtcactgaatgagcgttttatctgggcgcaggtgtctggctccttacagtaa

SEQ ID NO: 249186 - DNA, 993 bp, Klebsiella pneumoniae
atggaaaaggagcaaggtttttggaaggctgaaacggttgcttttttggcattgcaatcattaaatggtgttgggtttagagttttgtataaggttgcagcacaaaaaattagttttcgtgaactaattaaaaccgacgacattgattactttgagaaaatgcttcgatataaaattgatgattcaatcaaacagtctcatgagtcgtggatgcagttcaaacttaatctatggaataaagggattgaacttgctcgtgaatattccaaaaaaaatatctggattttattttttgaccaagagattttccctcaacaattgaaatctattccggaaccgcctttgtggttatttgttgaaggtaattatcgaatacttcatcaaccatcggttgcaatagttggtagtaggaaatcatcagaagatggtttttggttaacaaaatatattgtttcagcgatggccaatttaggaatagcatctgtcagtggccttgctgatggcattgatcaaaaagcacatattgagtctataaaatttaatatacccaccattgctgttttaggtacaggcataaataataattaccctcgaggttctgaggagttaaggtcactgattgttgcaaatggtggggctatagtaacggaatatcttttaggtcaaagttatagcgctcaaaattttattcgtcggaatagaattcaggcaggtctggctcaaattacggtgccagtagaatggaatattaagagtggtacggcgcacactgttaattttacgaaagattatggacgctctctggttatgctttatctatatgacccagatcttgaaaatgctgaaatacatacggtaagatcatattttcgtggaaagattttcaagattccaactcaaacaaatgagctgattgagtttttaaaacaaccagaagaaggtgagttaacaaacacgctaggcaaacaagaccaaatctcaatggatttgtaa

SEQ ID NO: 249187 - DNA, 1245 bp, Klebsiella pneumoniae
atggtagctaaacgacttaaaggagtaattcttagtacacaggatactcttgttaattctggtaaaattaaagctgatgtgtattctgaggttaagaagcttataaaattcttttccttgagaggaattacgcctgttttactttctaatcgaaactggactattactgatggtgggggaaataaaaaaaatttttttgatgatttagaaagtaaatataaagacctcgtaatattctcgccacaccgcgataagcaggtaccatacaaaccaagttctgctgcaacacaatatgtattggatcaaatgggttgggaaccgaatgaaacagtatatatcggtagcagtgaagccgatatgcgtacggctgttaatggtaagatactatttttacgagccacttggtacagtaataacaccacttatggctttgaattcagccaacctaaggaacttgctcgttttattgatacactctgtctgcgtgaacacttttggagtcatgaaattaaagatggggatttcgaatactatgcacttgcaccgtttagtacccttaaagcagaatttaaaaaatactctgaaaatgcgcgcgcagcagctaagtttgggcatggtgacgttgatttttggttgggcgcacttgtaactagtatgtatttcactggtattcatgaacgtatcgatttcattgcagcctaccctggccataaagtcggggttggtaatgacaaaatgaatgatgacttaatgacatttggtaaatgtttcaataagggatatttacatgacttaattgaaaggcatagtgatgctataaaatcacagacagctaggcagcgagggattgctattgaccaccataatcaacttaatactatccgattgaaaaaattcccaactaaaaattataatcgagtataccaaagtgcaccactcagaacgggtaaaacggtattgctagttgatgatatttgcactaaaggttggtcattggaagcagctcgtaaatatatagagagaactggcgcaaaaacaatcatggttacttggttgaaaacaattaataccaatattcaatgtattgcaagaacaggggattttgatccttataaggcaaccattttttctaatatccgtatagataaaatatataactatcatgcgtatcatgttgacggtgcagcctcagaagagcttacggaacagttacagcaatatattgattgggactggccagaataa

SEQ ID NO: 249188 - DNA, 543 bp, Klebsiella pneumoniae
atgttgatcactttggatacttctcaatacctcctaagaaatattattcggaaagaaaataaatatgctgagtggcttatctatacgcctcagcgtgcgattgaaagactttccttagttggattgaaaatatcttccgagtctctcaaagatggtgttttggcaacaatatctgaagaatacttctttaaagaaaactcaatgagtttactcgatactttatcgatcatcatagacgataacaataatggtgaagcagatgtaattaagtttgttacttcgttgagaagaaaagttaatgaagaagcattagatttttcagaaattgatgtgggtcattataataatatcagttatgtattactattcatacatcgtgaatttaaggatgagttcaagaatataattaaaattttctctgatgctagctatcaagatactctaactaaacttctactgtctagcataaagggtgagtttgatgagaagcaaagggatctgctgcgtaaagaaatgcaggaaatacttttgagctacaaataa

SEQ ID NO: 249189 - DNA, 945 bp, Klebsiella pneumoniae
atgacggcatacggaacggagtttttctcgatgaacgatgtaaaccgactcaggatcctgcaggacgttatcgaccggcatcttaccacgcgtcttgctgcaacccgacttgagatctctgccaggcactgccgccggctactcgagcgctatcgtgaacacggaccgctatcgctggttaaccgccgacgtggtcagcctggtaaccgacagttgatgcctggcttcgctgagcgtgcgctgcgcatcattcgcgaacgttacgccgactttggcccgacattagcctgcgagaagcttgctgagattcatgacctttatcttgctaaggagactgtgcgtaagctcatgacccgggacggtttatggatccctcgtaagttacggccacctcgtgtgcatcatccacgcccacgtcgggcctgcaccggcgaactcatccagattgatggcagtgagcatcgctggttcgaggaccgtggtccggcctgcacgctgctcgtttacgttgatgatgcaacaagtcggttgatgcagcttctcttcgtcagttcggagtccacgttcacctattttgaagccacccggggatatctggagcgctacggtaagcctctggcattctacagcgacaaagccagcgtcttcaggatcaacaacaagcaggccaccggcggagatggccagactcagtttggtcgtgccatgaacgagctgaatatctctggtatctatgccaacaccagttcagccaaggggcgtgttgaacgtgctcatctgacattacaggaccgcctggtcaaggaactgcggctctgcggtattagcacacctgaggctgcaaacgcctttgctgatgagttcatggaaggggtccgcttggaaaacggaaattatcccacgctaagactgttttttgtacaaagcggtatcgactgtacgtaa

SEQ ID NO: 249190 - DNA, 774 bp, Klebsiella pneumoniae; identical to SEQ ID NO: 195090

SEQ ID NO: 249191 - DNA, 672 bp, Klebsiella pneumoniae
atgattatcatgggaggatggaagtccatcaccaccatgtacgataacgctcaggtaaccgattcggataccatagaaatcaaagcgccgaaaactgtttcagaggagacgctgggctatctgcaggactgggacgcctttgcgaacctggcacaagccgattttacggaacaggcaccggcgcatctcgatacccgcaatattgttgatttttatttgttgctggccgccatcggtgcgacagacctctttgccggcgataaggccaaaaacgcgattttttatacctgggacgggacaaagtggtatttcgggccgtatgacctcgataccacttacgggttgcattacaacggcacgcagattagttatgccgctgattcagcaccgaaaaccgacggcggtacgttctggaaaaaaatactggtcacgtatgctgacgagctggccgcccgttacgccgaactccgcgataaagatattttcagcgtgaattgcctctatgacattgccgccggactgtccgcgaaatatacccacgaactggataaagcggaaatcaataaatggccgactaaaccgtcgctaaccgtcacgagtcgcgatcagatattcagctggtttaacgaccgtctggcgtatctcgacaataaatttaattacacccgataa

SEQ ID NO: 249192 - DNA, 672 bp, Klebsiella pneumoniae
atgattgtcatggggggatggaagtccatcacgaccatgtacgataacgcccaggtaaccgattcggataccatagaaatcaaagcgccgaaaaccgtgtcggaagaaacgctgggctacctgcaaacgtgggacgcctttgcgaatctggcgcaggctgattttacacaacaggccccggaacatctcgatacccgcaatgttgtcgatttttatttgttgctggccgtcgtcggtgcgacagacctctttgccggtgataaggccaaaaacgcgattttttatacctgggacgggacaaagtggtatttcgggccgtatgacctcgataccacttacgggttgcattacaacggcacgcagattagttatgccgctgattcagcaccgaaaaccgacggcggtacgttctggaaaaaaatactggtcacgtatgctgacgagctggccgcccgttacgccgaactccgcgataaagatattttcagcgtgaattgcctctatgacattgccgccggactgtccgcgaaatatacccacgaactggataaagcggaaatcaataaatggccgactaaaccgtcgctaaccgtcacgagtcgcgatcagatattcagctggtttaacgaccgtctggcgtatctcgacaataaatttaattacacccgataa

SEQ ID NO: 249193 - DNA, 762 bp, Klebsiella pneumoniae
atgcagtgttacgcgctgggattcaaccctaaaggaaataactattacgggcgggatgcaaccgacagcacgcaatacggccgccgggtggatggggtgagcgccacagccggtatcacaaccggcacgccggtgatttacacgggctctggccctgtgtcgttccggcacaataacgcgtacaacggtatcagcgatgtgaacggaaactacaacctgctgacaccagatgtccgtctgtgtggtgccaccggtgagctgcatatttttgcaaacaataacgctgctgcgggggcggtcgatttgtcagccacttcgtcagcctggaaagcgatcaacgcagtcaccggcgagttaatggagctgtcatatacgggcacaccaggcgtggattttgtttcgaatctggcgaacagcgtgaagatactcaatgcatcagcggtgggtaataactacacgctcaccgccactgacggcgctgcgttttcatccatggccaatgctggcgcgatcccggtttcggcaacggcgttggcggtactgaaaaagtacggcctttatccgctggtagccaatgccgccacgctgggcggcgacaaaattgtgatttccgccaccactgcaacggctgcgaccgagcgcatgttgcgccgccagggttcctatacggatggtgcgtctgccggtgtctggatggctggttttaacggtgttcgtgctgcgagcggagtatcggcgtttcgtgtggcgtattacgcataa

SEQ ID NO: 249194 - DNA, 330 bp, Klebsiella pneumoniae
ttgcattacaacggcacgcagattagttatgccgctgattcagcaccgaaaaccgacggcggtacgttctggaaaaaaatactggtcacgtatgctgacgagctggccgcccgttacgccgaactccgcgataaagatattttcagcgtgaattgcctctatgacattgccgccggactgtccgcgaaatatacccacgaactggataaagcggaaatcaataaatggccgactaaaccgtcgctaaccgtcacgagtcgcgatcagatattcagctggtttaacgaccgtctggcgtatctcgacaataaatttaattacacccgataa

SEQ ID NO: 249195 - DNA, 330 bp, Klebsiella pneumoniae; identical to SEQ ID NO: 249194

SEQ ID NO: 249196 - DNA, 894 bp, Klebsiella pneumoniae
atgagaaaattaatcttagttgctactgttgccgccagttttctgctcgggtgcgaccagaagagtactgacaagcgtgaaaccttgtctgaagcgcttgttgctaagtcactctctaacatggttcccgttaagggcggcgagttcttaatgggggattttggcccattagtcggtcaaaaactacctttcagcataaaccaggatgataaggtattacataaggttgtattaagtgatttttcgatatcaaaatttaaagttaccaacgatgattataataaatatctgcaaataacaggggtaaaaaaatcacccatccatatttttttaataaattatccatccttgcaaaaaggagattattctgttggtgttacctggcaacaggcaaaagactattgtcagtggttaggtaaggggtctggtaaaaagattgatttaccaacagaggcgcaatgggaatatgcagcaagatccagaggtcaatactttcagtttccaacaaataatggtgagtatttacctggaaaaaatgttccgggtaaagatgaattagataaatatacagatggttttggtttcccattttacccagtaggcaagtatcccccaaaccccctgggtctgtatgacatgggacttagtggctcagaatggaccaatgactggtatgcgtcagattattactctcattctccggtaaacgatccccagggacctgcgcagggtactaaaaaagtcctgcgtggatatattggcggcgacagacagtacgctttaaccatgttcaggcaatcaaaattgccagttccgaagatcgataaagacgatgactatgaaaaatatggtgttggcccgcagtatgtatttcgttgtgtcgttaataaataa

SEQ ID NO: 249197 - DNA, 699 bp, Klebsiella pneumoniae
atgaaagaacgtggaatgatttttaacggggagatggtacgggccatcctcgatggccggaagacgcagaccaggcggattatgaaactgcagccgaagccatcgaaatcacggccaggggatttttggttttcatcgaaaaaattagaaagcatggtgcacgtttctgaccttgcgccgggcaactcacctattgccgattatcaccttttcattcaggagcattgctgcccgtttggtgctgtcggcgatcgcatctgggtgcgggaggcctttcgggtgcatagccgggctacagacgtcgccaccctggtatacaaagccagcgagcgaaattcatggactgagcaaacccaccgtgtacctgtagctgtctgcaataagccggcaacgcctgagaaatggactccttcgctgcacatgccgcgctgggccagccgcattctgctggaaatcaccgacgtgcgggttgaacgactgaacgctatcagcgaagaggatgcgcgagcagaaggcattattgacggtggctgtcttaattgcggagaacctgagccatgtggatgcgccaacccagagcctgacgctaccgatgcttttgcctacctgtggcaatcgatctacgggcaggaaaactggaatgctgatccctgggtttgggttatcgagttcaagcgcgttgaaggcggtgaatcatga

SEQ ID NO: 249198 - DNA, 495 bp, Klebsiella pneumoniae
atggtggcctgcgacgctgttgcagcagcgcccatgatggattggattatgagcccgtcatcaggtcaggccattattgggtggggacagtacgaatgcattttgcattctggccgttctgtctcaatgagccattacctcacagctgccccaagcccgaccaaaggctcttgcaagtctaatctggctcagggctctgcgcggaagggctttaacgtgtcgtgcagcacgtctctacccaagagccctgaccggatcgcaggcataaaaaagccccgcacgatggcgaggctcggtgttctgataggtcaaacgcaaatacggcaacctacactaaatatattgctcatttgttcattgaaatgcaagcacgttatgactattttttgcaattttcctcacgctttcgcgatcgttaaacgcattttgcagcggctggtacaggcagaagagcgccgcgttgataatctgcttaacttcccggcggatggttga

SEQ ID NO: 249199 - DNA, 567 bp, Klebsiella pneumoniae
atgggctggtcttcgttggttaggataaccattggtacatttctgttagctgggttgtcgttctctgcatacgcgaagaattgcaagaagggtataccatgtggtaattcgtgtattgcagcatggaaaacttgtggtggaagttctcgctcctcttcggcttataatagcaatttatactcttacccttcatcttcacttcaaagttcaattccaaagtcgtctgttcaatcttcaaagaaagtagatggaaaaagcacggcttcaacctctaaaacttatctctgtcagtattcaatagcagcaataaagaatggcagaataggcgctttacgagtgcagggaagcgccgaagtaacgttgtatgttgatagcttcaaagctaaccgtttaaacggtacatacctgctttcgccaaaattgaaacctaacggcaatttgatgacagcagatgataaaagcaaagtgtatgcttatgattcgtggttgaggaactttgcaataagcgaccgtatagcaagaagcactgagcaatgggatcattgtaaactggttcaaaataaataa

SEQ ID NO: 249200 - DNA, 405 bp, Klebsiella pneumoniae; identical to SEQ ID NO: 105114

SEQ ID NO: 249201 - DNA, 177 bp, Klebsiella pneumoniae
atgaagtatttcagtagtgaccaggttttttacgaactggtgagtggtaaagccacaagagatttaatctacgcatctatgtacgtagccagaaaacgaaagtatttcgaacgtgaacagatgtttaaagaagcactatcccgttttgatgaatttaagaaggattccaaagaatga

SEQ ID NO: 249202 - DNA, 159 bp, Klebsiella pneumoniae
atgaagattaacttcacccctgaaacttacgaggctctgatcaatcgggctaatcgtgaaaataaagccgccgccgcactggtgagcgaattaataacaacagtccttaacaaagaggaacccaatgaaagaaaagaagcaagtagtaaaattcgttga

SEQ ID NO: 249203 - DNA, 1458 bp, Klebsiella pneumoniae
atgaaagaaaagaagcaagtagtaaaattcgttgatgcaatttgcggatctggaaaatccaccacgttacagcattacatcaaatcaagtttattaacaaattccgaagcaatcccccctcgttatcttctggtgatgccaacacatgatttatgtaagcaagtaaaggaagaacttgagggccgaagggtaaagagttatcacgtagacactgaaacagaagcggttaatctcttaatttccactctggagtatgattttcagcattcggttattatctgcacacatcaatgtttcattcattattgttatcgtgcagcgcttgaaacggaacttcaaaaccttctccgtaatttcagtatctttgttgatgaaatccctgatgcaatgtttggcgcttacatcaaagtgcagcatacaaatcggacggaacaaaatttcccattcctggattggctggaagagcgcgacggattgttattcctgagtgaggataagcgtgaagatttttacgcatactggcatgaaaaacaggcaagcggtcaggatttaaagcgcctactctgggcgattatgcaaggtgctggacttctctacgaagaaaataaacacctttttgctttcaccgcttcaccaattattagatccgtggaatgggctgaacaatttacactcttaggtgctggctcttctcgaagtttgtttgtctgggctgctgaacatctgtctaattacgaagtagaggaagcaggtgaacaattacagccaccaattgaaagacgtaagcacaagcgtgtgccgatctctctggtcgccgtatgtgagaacagatgcactctgacagcattacagaaagtgtttcaggagcatttgcaggaaattatccagcgtgtgccaggtgaatttatctttgctaccaacagagataaatccttgtgcgaatttaagactattggagacgagattctaacccgtgctgaacgcggcaagcgtgtttcaatggcttcctatggcctgaatcattaccagcacatgcacaatgctgtgtttcttggatgcagtaatctggatcacgatttccagggcaaatggcggcagtatgcagagcttaacggatgggatgttgaagaatttgaacagaagcaacgcgccgcgatgaattatgaaaggtgctaccagtttattagtcgcacatctgtacgtaatgctgatactgatcatccgctggtgttcgtagtgccggatctggctactgctgaatacatcaaagcgcattatttcccaggtgcaaaggttgaatgtctgaactttggaagagtaagaaagaaacgcgatacaacaaaaggcgataacacccgcgcagaagtgcagaaacataaaaccagtgggctaactcaaaaacaaactcaagaaattatgaatgttggaatagcaacaatcaaacgaaattggaactaa

SEQ ID NO: 249204 - DNA, 345 bp, Klebsiella pneumoniae
atgactaatacatacagcaccatccaaactaaaattatcagctttgaagacaattggcatttgccaacattatctttagtgaatcaggcgcatctatcaggaacgcgctccgcgcttctggaagcggtgaagcacaccgatcaggcaatcacagcgcttgagcatctccaaacgtctgtagcgcgtttggtggagcgtgaggggagcaccatcaccccggaagaagcctggcgcgtagctaacgacctcgaagagctggcttgcagcctccagtacataacagccgaacttgcggagcttgccatagagatcgcagaggaatgtgtcttatgcgaaactgaataa

SEQ ID NO: 249205 - DNA, 225 bp, Klebsiella pneumoniae
atgtttctattaaacaatcgcgaccgaatcctaaaatacaaaaatgaagtgattaaagttaatcctgagctaatagctaaagtggctgagatggcaggatgcaccgtagaagaaattgaaaaagctgtagaacagtatttcccttctgaaaacaccactccaaataaattaagtattcaggaacggatcgccaataaagtaaaaaaggaatcaaccaaccaatga

SEQ ID NO: 249206 - DNA, 1032 bp, Klebsiella pneumoniae
atgattatcggaaatgaacgtgtggatctaagtccactattccagctaaccagtacccgcaattttttactgtcgtcactaaacatctttgacggcgacggcgttacatctcacaaagtgagcgtgtcccgtttgctggaagataacaccagtctgtttaaccaacctacggcgcgtttctcgaacgagcataacgtaacagcacgtcagaacgggaaagaatacttgattgagcttcccttctttatgagggaggatctcattgtcccggcagacattcagggcaagcgtaagccaggaagcgacattcaagaaactgtgacggacatttacagcgattacatgggtaaacacgctgtagcgtttatgcgcactcgtgaaagctatcttgctcgttctctgttctccggtcaggtttatacacctaagaccgatgatctgctgatcgactttggtgatctgttcggtgtggctcctatgaccgccacaattgacctcaacgctacagacagcagcacactacgtcagattgatgatcttgttagccagattacggaagcagcccaaagccaggcggcagcgattgaacgcgtgattgtgtttgctcgcggtgacttttacagcgatctacgcttctcgcaagggatgcaggtagcaatgcagtatgtttccccgttcgatgatgccaacgttgtgatcactcgtcgtgacctcctgccaggtgttagcaccttctcaatccccggcacgaattgtgacgtgatcaaggtgacggacggtctgatcctccagcacttcccggaaggagtagatgctattgcaattcctgtattccagaagggtagcggaatttataccaacatctacggggcggcttcttctacattcgacctactgaatgcagcacctgcggaagtgtatagctggagcttcgaaagcgagcgcggaaacgcgatcaatgtgatttctgagaactccgcattgccagttaaccacggcctgaacttctccgttcacatctcagcggcttaa

SEQ ID NO: 249207 - DNA, 195 bp, Klebsiella pneumoniae
atgctacttattttaaagagcgcccaaggaatgaacattaacattcagggtgacacagcggcagggttattaaaagtaagccagctttgcgagttattagacattaactataacggtgtgagacaacgtatttttcgtggtgaaactgtagagcaagcgattcaccattttttagatcagaaagtcggtgaataa

SEQ ID NO: 249208 - DNA, 672 bp, Klebsiella pneumoniae
atggcaacaccaggaagtttaacaattggtggtgatccttctgggattaattccacttcaaacagtaataacagcagtgctacccgtactaaaggtgaaaacggattcactattcttgcatctgtttataattcagcctcagataactacattcaaaactatcaggcgattgtatttgatgctgtcacagatacgggaatacgtagacaggcagacataacaagctatcccgtcgagagcggggcagaggtgagcgatcacgttcagattaagaacaatacattcaagctatcggggattatttcagaaactccgattaggctggaaaaggatttattatacagtgctggtgtaaatggcacgcgtatttctcaagccatcacttatcttgataaaatctttgatagtcgtcagcctattacgttagtcacagagcatagggcgtatgagaatgtcattctttctggtatcagttacgattataaatctgaatttgctatgcaatttgatcttgaatttgaacaaataaagcttgtaagtaaagcagaggtgaacgtaattgccacaaagacgcagagtaatagaagcgttggcggcacggtgaaacagaaagtagtggctccagctaataaagtacaatctgacacggtgaccacagaatttaaaaaataa

SEQ ID NO: 249209 - DNA, 510 bp, Klebsiella pneumoniae
atgaaaaaaattatcaccctcgcacctgttgcattaatcctggggctggctagcaatgtacaagctgccactcaaggtgatgtaacactgcgcggtaccattgttgatactacctgtgaaatcactgttaacaacggtgcggcagagctgaatgtgggttcctttggtaaaaccgcattcaacactgctaaaaagcaggttggacaggagtcgctgctggtttctctggctcagtgtactcctgaggagcagggcagcctgctggtaaccggtattgttggtgaagacaaagaaattttcatgagcaataccgcccaatctgctggctttatgctgactgcgggagatgaacagacgcaggttgaaaacaacaaggctatatcggttacggctgatgtagatggtaacctgacttacaccttccaggcaggtatgaccgtaatggatctcactaatattgttccgggcgaatataacgcgccgatcaagatttcttacgttaataactaa

SEQ ID NO: 249210 - DNA, 756 bp, Klebsiella pneumoniae
atgcgtttgcctctgacgtcagccctattgctctccgcattgtcctgtacgccgtcctgctttgctgtggctccggaggcgtccggtatttcgctgagccagttccggattatctatccgggcgcggacaccaaaggcgttacctggtcgctgacgaataacactgaccgcgcctggctgatccagtcctggatgcgtccagtggactttactaccggcctgccgatgcctgaaacagagagtagtgcttccagcgccaaaatcccttttctggtgacaccgccgttaaagcgagtggacgctggggaagggatgacattgcgtattcgcctcacggaattgtccctgccgaaagatcgtgaatccgtgttttacctgtcggtaaaagcaatcccggcgataaccgatagcgacagcgcgagtaatggaaagctggtagtggccgtagtgaacaatatcaagctgttttatcgccctgaaggattacctgcagggggagtaaagaaagcggccgcgcagctgcgattcagtcgtcagggtgagagtctggtggtcgataacccgacgccattttacatcaatttcagccaggtcacggtgggaggaaagccgatctcagcggatggcttgcgcaagctggttcctccttatggtcaacaacgttatgaccttgtcaagggtatgagcggcccggtggagtggcaggtgctggatgaggatcaccgtcccacaccgcttcagcaccaggctctgtaa

SEQ ID NO: 249211 - DNA, 846 bp, Klebsiella pneumoniae
atgcggatatggctgacgcgcaaaaaaccagaaaccacaccatccgacggcaagccgaacgccacggagggatggctgcatcctgaatccgcgcagatactactggctgtttcatcacgccagcaacttatccagtttattcgccagagcaccgccgttcccgcctcactgtttgaacgcttctggctgataccaatccaccgcttcgcagaactggcgcagttgttcccagcctcggaaaactatcaccactcccacgcaggtggcctgctcgatcacagtctcgaagctgcctgctatgccgcacgactgcggcagagttatcttttcccgcctgatgcagcgccagaagatcaggcggcgcagtccgaacgctggaccaccgttatcatctacgccgcgttgctgcacgatctgggcaaacttatcaccgatattgaggtggaagatgtcagggggaaacactggtttccgtggcatggcccactgacccagtcttatcggtttcgctatctgccgcaacgtaattatctgcgccatccggctgcggtagctcttctgctcacccaactactcccaccggaaagctttgactggctcgccgccaatgccgctgcgttatccactctgctgcactgcctgaacggacagtatcagtatgccgggctggcgggtgaactggtgcaaaaagctgaccgggcgtcggtggcgtttaatctcggcggtgatccggtcaaggctatccatcgcccacaaacctcatttccatcattgctgctctgcgcgacttgctggcgcatgagttccgactcaacaatcccaacggtggctctgacggctggctaa

SEQ ID NO: 249212 - DNA, 1305 bp, Klebsiella pneumoniae
ttgttccagaataatgaatatcagtttggaaaacgcttccttaaagaagcgctccctctaatttctagctacttctcaggcgagagtgttcggcttgccaatatttctgtttctattgctactccccctgaaaccgatgatactgaatttattcaatatataagattcagacatgcaatagcttgttgtgcacagtttattccaatcgttcagaaaattgagaatggtttatctagtgtagcaagccttacacgtactgaaactaaaggagtaattcgtggtagacttgatgtgcctcgatatgtagcaagaaaatccaactctttttcttggcctaagagctatcctattttagtaaacacagaaagtgctagcacgcccgaaaatgaattagtagtacgtatatttaggacattactacaaagattaccactattgcaatttcctgtgaattcagctgaaaccctattaggtcgcagatataagagctgggtattgagccgactgaaacgtgcgccctggtcttctatttcttccacgtcatctctctccaggctttatatggagtcatgtcgccgtgtagccagaaggcagacaggtaatgaaaaagcatatttatcacttataaaatttataaaagattggcatctggttggagagacattttctagcccagagtcatcggataaatttgtagacgcctttctttcatttccggctgaacaatatttcttagatcgaatttatgaaatatggtgcatttattcaatttcagatgcattttcaaaaatcggcggtaaattagtagctggaccatgtaaactgactgaaagcaataaaaaaccaatctatacttttagcatggaatcgaatgagtttgagatatggtttcaaacccccttgcctagcgaagaagcagaatggttttatgattcaacagcaagttcattgcgtggaatacctgatatcacaattatagcgaataaaaagcatcgccttattattgatgcgaagaataggatggtaagtggaacaacaagatccgaagaaacatacaaaatgcttggttattttgaaaacttcaagaaaagcattggaaaaacaacggattgggggattttggcttttgtatctcttaatgggttctcccgttctattagggcacgtaatggccgctcacttgaattaattagtgctaacccggctttattatcagattgtaatttctctgaaaaaatagaactaatactgcgatcttggattaacaacattaatggtggcgataccaacacgcctaaggattaa

SEQ ID NO: 249213 - DNA, 1239 bp, Klebsiella pneumoniae
atgcctgatataaatgaaaacgaacttgtcaatagtggcgcgatccccccgactgattttcacgactcaatagatcgtttgcgagaaattgctcaatatgatctagaattaccaaacaattttgatgccctcctagcagaggcaacatctcagttggtagttcctgatgatattcttcgagcagccgctgctgctatccacgtcggacatattgtcctacaaggtcctccagggacaggaaaaagttcgcttgtacgagcgctagcaaaagcctttaatgcgtccaccttcgcagtaacagctcatgaagattggacaatttacgatgtgattgggcggcttgaattaaggataacagaagaccgcaaggaagagataacaccggttaacggtgctttaactgaggccgtaattagatgtggtaacaatgtagttcaacattttgatgatcctaaccatcctcaggcagaatggttattaattgatgagctaaatagagctcatcttgacaaagctttcggagagctattttccgtattgggaaccgatgaactagttccaattaacctccctcaccagagggatggaaatagaggattagttatacctagaaggtttcgaataatagcgaccctaaattcttatgataaacaatttgttcagaatctcagccaagcaattcgccgtcgcttcacatttataactttagatgttcctcctcaaaaatctccagatgatacgtggaaatttgatctcaataatatttccccagctattagagagttttcatttgttattctcagagcagcgcagcgtgttgctcgacgcgaatgttccatgataccttttaaattaaatgcggcaattgatgatatattagaaaatgcaaaaacattacacatatcccgtattgctactttgttcaacatcgtcgaatacgttagatattcctctaacggtgaaggagtaccgtaccttcctatagggacagcccaacttattgatacagtagaactatttataacaagatttaggcaagatggacaggtagaggctaatgcagatcataatatcgattgggctgcctcggtaaagttggcgccattatttgagtctgatgtgttagaacctgatcagctaattaaatttgcaggtactctaccttcacccttctcaaatctttttgcgcgccaattactaactattgctgcatcaggaatgtattttgttccagaataa

SEQ ID NO: 249214 - DNA, 1194 bp, Klebsiella pneumoniae
ttgacaacgttccctcttatatccagggtccatgatttttggcgcgtaaatagttacggctatccttgtttttttagtgatagtgaaaaatcgttagaggcttggacaaccctgctctcatttttcgattttacagactatgaggcactgaaggcctattggtcatctcagtatgcacctcgtcaattgagctcacatgctgttgaaagctggaaggctacatttgaagaatttggaattctttatgttgagtcgcgttctaaccgaattaccattactcctgcgggaatacagttacgggaagcagctgaaaggaatgaccgcaatgaattcgcatggattggactgaatctattgctgcgctaccctctacgtggaccccgtcggccaaaaagtgatgcccataaagattctgatctgctcctttatagattttggtatgcagcattactagatcttgatggatatatatggtggacagaactggaacggattttatgtagagtattccagactagtcaaacgacggatgctattaatgatatccgtacattacggatgaatcctgagttagcttctcacatagacttgcctgttgctcaacgagctggtgccttctataactcattaaatcaagtagcagttcatgctggcatgaatcatttgattcttggaagcgatgatgtcgaatgtccttatggtgttactgagccaaaaagacgccactttattaagcacgattggttaggcatggttagaaaagcactatccaataatggtcaatctgaacaatgctcaactggagggcttgcaattgcgcgccttcccgctgcaccagaccttaccagcgaacgcgagtatttcgattacctaggagccttagtaccgcctatggaaacaaacatagcctcaatgcttgcaagtgtagaatttcagggtgagcgagtgctatttctttctttagataagcattatcaagttctaaatgatgatacaataatgggcgcagttgcatcgctttgccaacttgctcgtgggcagaggattatactcagtcacgatgaacattggacccatttagttcaaggcaaagaattaatagatgccagtacagtaaaaatccgaattcgccgtgcaagaccaatatcaaattttcaagtaattcgtatgcttcagggagagagtaatgcctga

SEQ ID NO: 249215 - DNA, 1425 bp, Klebsiella pneumoniae
atgaataagtccaacttgcagaataatacagcatatcagaattcccttggtttagagggttctaatcatgcaatttcaaatagtaagtctaatgaacaatctgaagttcttcgtgaggtagaagaattcccacgacatgacaagatttcacatggggagttactaagtttaactttgtctgcaaagacctcaggcctcactcatgggctacatagattcccagcaaaatacataccacaggttcctcagtgggcaattagaaattttgctaatgagaaaagtgtcgtatgggatccattcatgggttctggtacaactttagttgaagctctatgcacagttaatcaaagctatggtactgatatcgaccctcttgctcgtttaatttcgggagctaaaacctgtgagcttgaagtatctcgattgatttctttgtccgagcatttgcatcctagccgattgcctatcataaccgactattttcttccgatgagcggtgtcaagaacataatgcattggttttcagaggaatgctggaataatctatgtagaattttcactgcaatcgaaaaattaaattgcaatccaaacgaacgtaactttttcttgacggtttttagttcaatccttcgttgggtttccaatgcggacgatcaaacccagaaaacttatgtttcaggaacattgaaaaaaaacccgccagaagtttttcctacttttgaaaaatcggtacaaaaagcgattcttggagtatctaatttagctgcagttagagggaaaagacatgcaagtatcctcgacggctccgcattatctgtcccattatctgataaggtagttgatttaattgtaaccagtccaccatatcttgattctgtggattacatgtacaattttatgcttgagtatttttggctgggaccaaaacttggagtatctagccgtacagaatacaaccaccgccgtcgaatccctgttggctcgaaaaatcctttgatcaaagttgctacagtgcatgattcgataatagacttggttaatcttcaggaaataccagagtatagaaggagtgctgcaattgcatattttgacctaatgcaaaagcactttattgaagctgcaagggtgatgaaagatggtgctagatatgttttggttataggaaatagccaagcctccacaggtatactaccggttcatgattgtctacttcgattagccaaaacagcaggcctacatcttgagaaagctttcgcatatagaattcgccgccactatatgaaatttccccgcaaggggcgtggtggtataattttaatggactgggttattacactcagaaaaagcgacaatgctctcattgaagaggaagatcgtcttccgttgccacatgtgacaatcggagctaacgaggtggcaaattga

SEQ ID NO: 249216 - DNA, 1446 bp, Klebsiella pneumoniae
atggaactatcatataaaattaacacactgtcacggccaaatatcaaagttgtacaaaaagatactggcatcaaatcaccgagcgatactgcatcggtcacaaaattggaacgagttgtatcaaaagtgcatcaagaacttaaaaatatattagaacctctggatgcgttgtatccaattgaaaaacgccttgatctaggcccatatgtacattggcgtggcaatgcctcttcacctatgcatcgttggttacgatatagggaggcttactctcccgaactcatagataaattgcatctgggaaatcacattctcgatccatttagtggttgcggctcaatcccaataggtgcagccattcgcgggaaaaaatcggttggcatcgatttaaatccaattgcagcattttcatcaaaggtgaaactaacaccgttgacacaaccatctattcagaagataagagatttcctcgcagatttgccaagtttagtgctgtcagcagagcgttggccgctcccaggattgagcatatctgaaaaagtgtttgagcctcaaatgctggatattgtgttgagaacaagaactgctatcgaaaatgaatttaatgcagattctcttgcacgtaattttgtttttcttgcttgggtttcaatccttgaaggagttggaagctatttcaaggaaggtaatggaattaaatatagaaataaaaaacgtaaaagaggaaagtatgaagatcgcatcgatggagaatggcaactagaaagatttggcccaaatcaacatgcgttctatctaaatacattttcccagcaacttgaaatgatgctggaagatattactgagtggcagtcaggtgactgggcaggccaagagataattgaaggtagtgcattcaatttggctagtcttctcaacggaaaatcctttgactcagtaatttttagtccgccatatgcaaatcgctttgattattttgaggcatttaaagttgaactttggtttggcaactttattaactcctacgacgatctaaatgttcttcgaaaagcgtcattgagatcgcatctcaacgccgatttcaaaaggcattctgataatttgcctgaacttgaacagctattgtctctaatggatcagactgcaagtagttggcgcatgggggtaccagacttaatgcgaggctatttccacgatttaggcatggttctaacccaatgcaaaagtgtattaccaaatggacgctgttatgttgtggttggtaattcagcatttgcaggtgttattatccctactgatgttctgacggcaagaatgggtataaatgctggatttagtaaagcaaaaattattgaaacccgacatcttaccgttgcacctcaacagagaaatattcttaagggttttgaacaatacatgcgtgagtctatagtggtatttgaatga

SEQ ID NO: 249217 - DNA, 1272 bp, Klebsiella pneumoniae
atgtacacctcgttgctggtcattatgttcacttgcgtgccaatgttgaacatcgacctcgataccatcaaatatgacaccacacgctcaaagcagtgcggcatgtcggtgccgcagcccgccgataccggctatcaaccgattataaactcgctgggcggtaaaaccgccgccgtcccggtctggtggtattttattcatgtgatcagcaaaggcatcaccagcgcaacggttgccaccctgccctgccagcctgacctgcgtcagatccgttttgaggtacagcacacccggattaaagatccggcactggctcaggaactgcgggatttcgttgaagagtgttatgccccttcccgagctcgtctgaaatttcgcgccggagagctggacgatgacaccagtgacgatactgcctggctgggatcatcgtactttctcaacacgactggttactacgattccgaccatgcgctttcaccgcacagtgcgtggccgtacagcacatcacgcgatgcagggctggccgataccggcgcgggcggctatcccacctgtaaacagtggtgggccgacgacaccgtaaggctgaaggcccggcttctgcaactcccggctccggatatctggacagcgtttaaaaagatcggccagtcacaggctgtatatgaagaggccgtgctgcgctcgctggtcagtgaacgcaatatgcaggtatcacaaaacggacgtgtttatcccggttatggtggcaatgtcgatggcaccgtcgccaataccgccacccggctggcatccagcgcagggaatattctcggcagcatagcggcgttcccggcatttgacagcgtgcgtcaggcgctaccaatggtacaggcgctgctgcaaatggcgctggtgatctgtattccgctgataacgctctgctcggcgtgggatgtaaaagtagtgatgacgctgacatttgtacagttcgcgttgttcttcctgactttctggtgggaactggcgcggtggctcgatagctggctgctggatgtactctacaacagcgatacccacagtagctggaatctcgccgggattcagaatacacaggatgacgtgattattaatctggtgatggggtcgatgtttctggtgctgccgacattctggctaggagcgatgacgtgggctggagtgagggttggcgtggcggtgaatggggcgctggcgggaggggttaaggtggctcaggatagcggggggaaggctggggagatgatttga

SEQ ID NO: 249218 - DNA, 150 bp, Klebsiella pneumoniae
gtgacaaccaacagctatctggaatactttctgacgctgctcggctgggtggtcaataacgggctgtggaacgcgatcagcgccaccgggttgttcgccctgccgctgctgattaaactactggcgctgtggctacaggccagaagctag

SEQ ID NO: 249219 - DNA, 258 bp, Klebsiella pneumoniae
atgaaacggctgatgctctcctgcaccctgctgcttctctgcatcgcagcgacattttacctggcatcaggcaacacgccgcaaattaaccgcagcgatctgctgctctggcgcatcacgctgtacggcgtgatcttttgtacaggctggcgtctgtatgacagatttccaacgtatcgcccggccatccgccgcatcgcgctatggtttatcgtactgatcgcactcaatgagattgtgccggaggtgttccggtga

SEQ ID NO: 249220 - DNA, 603 bp, Klebsiella pneumoniae
gtggttggcgagcagaccattaacgtcgccccggataacgatcaatccggcgatacgagccagcaaagcggcgcgcaatccggcgtcgggctgacgccgctgattcaggaagagcaggataagatccagccgctgattatcgatatggtgaaccgcagccagcccgttaacgatgacacgctggcgcaggccagtggtggcgagctgcacctgacacgcggcgtgattgaagcgctgcgtgacgatcccgatgcagcggtgcttatccagcgcctctccagcgaactggcgctctcccgcgtgatggaacaggcgctgatggcccggcgcacactgctggcagggatgcgcgaacccaatatctccggtgagaaagaggcgcaaaccgcgctgacccagaccaccgcccagctcgaccaggaactgtcgcagcttaagctggaactggatatgcgccaggcgctggcggataacgcggcgctcacgatccttgaacgccagaccatgcgggcgaagaccaaaggccaggcggtcggcgtagaggacgacaccgataaacgggtggacgatctcagcaaacccagtggcggggatacgcaatga

SEQ ID NO: 249221 - DNA, 759 bp, Klebsiella pneumoniae
atgcgcccggcattctgtcttttattcgtcgcctttctcgccccggcggctgataaataccagtatcagcagcagggggcgatcagcgactggatgtattaccgcatcggcggcggtgcggccattcccccttccgcaacccgacgtaacaccttcccgctgacggcaggcgtaagctggaacagcgacatgatgtgcggcaatttcgatatcgataccacggtgcgtaatcagctcaacggggtgacgaacggcttccagcaactgatgggagaagttatcgaaagcgcgaccagcgcggtcgccagccttcccgcaatggtgatccagcgcgccaatccccagctctacgatctgctaaccaacggcgtacttcagggacggctcgacttcgataagtcgctgttaagctgtcagaaaatggcgggcaagatgaccgattatgcattcggcccggcctggacacagagcgcccaggcggagaattatcaggggattgccgccagtgagaaagacgccgttccgccgagcaacgcgccgcagaagaggcggcggagaaagggaaactgtgggtgggcggtgaacgtcgtggcggcaaaggccagccgcctatcaaactggttcgcgatacaacggtcgcaggctacaacatcctcaataaccgtagcgcaaccagcaccagttcggtatccagcaacgactgtcagggtgagctgtgtcaggtctggagcaaacccgacgacgctgcacaatggctga

SEQ ID NO: 249222 - DNA, 933 bp, Klebsiella pneumoniae
atgctcaggcgtagattgttcttcataccaatactgtgtctgtccagcttcgcgcaggccatcaccacgccagaaattgccgcttccgcgctgtcgccggaatgcgtgcattaccagatcgtgggggtctgctactggctgttctgttcaccgtttggctgctcggtgcgcacatcggtgaaggtacgccattttcgccctgacctggtggtatctgcctacagcgtgaccgggcaaaacccgtgggccgagatgtcgccgttaagccctccgctgcccggtgtcgccgaagccggtggcgatactaatccccgcgccgtcgggcagcacagcaaagtccggtttaaaaacgctgatgcgattggctttcctgccggtgatgcactggcaaatttcttctctcagtttggctacgtctgcgccccgtcgtcacggcctttccttccctactttctcagcacgctggatgcgctcgcctggcgtagcggcgtaccggaaatgttctacccggaggcgttaacgcccggactgcgcgaggtgagtaaagatggcgatatgtggggcaatgtctacccgcgagctggggcgctcagccagacgcatgactacaaggccggggcggtcatcgcccagcgcgttgccgatctggtaacgcgtagcggccagtcacatgtctatataccgctgactgccacctcacacgatggctactggccgccggatccagttacggagggcgacagcagtaaccaccagtggcagatgctggttcctaaaaaatccgcctcctgcgcgatcttcccggatggctcagccaccgactcctacgccgataaactggcagaagatggcgcatatgcctggacgctgtggcgaccctataaatgctgcccgcgtcgtgggcagacctttctcggcagtagcggaggttaa

SEQ ID NO: 249223 - DNA, 1608 bp, Klebsiella pneumoniae
atgacaacttatctatcaaagaatatcagccggtataaggggagtaatctgcggtacaggttattctttacggcactcacgctgttattttctttttccctccacgcacagtcactttatatagattgctccgctaccgttgacggtgatggcactgccagcaatcccattaattcgatcagtacgcttaacaaccatgagttgcatccgggagacagtatactgtttcgccgtggcactacctgtaatggcgaagtggtcgccgcaacttccggctcagagaatgccccagttatctatgatgcctggggcgaaggaacggcgttacctcgcatagaagcaaacggcaacgaagcggctttccacatgacagatgtcagttgggtaacgttacagaatctggagctttcggccagcggcgatggaaaatccccccgccggggattatgggttagcgccaccgacagtggagaacatcaggggatccgccttcagcacctgaatattcatgatgtccgtggagaaatgccagccacaaaaaatccttcggacagcagcataggcaaatatgcccatgcttccggcggcattgtggtggaggcgctcggtaacaccacacccacctggtttaacgggctggatatcagcgataatattattcacgccgtcgatcgcgagggtatctacacctggtccaactggtgtcagcgcccggaactggtcgagttctggtacagcttatgtactgcgaaatggcagccattcaacaatactcatatcagccataatatactttctgacattggtggcgatggcatcgcgcccatgaccagtacgaacagtacggtggaatacaacttactgaacggttttaatatgcgctccggctcgccaaatgccggaatgtggtcggccaacagcgacaatatcgtttaccagtacaatttcgcttcaggcggccataccacacaggacggcatgtcttacgatgtcgatcactcaacgaatggcattgtctatcagtacaatatttcctcgggtaatgaaggcggctttttcctgctttgtccctatgggtacgatgtacccggcaaatcgcgcaacttcataatccgctataacctgtccgtggtggacagaacccgcactttccaggtatgcagcggcggcgtgattaacggccagatctacaacaacactattttgctgccgccagacacaaccagcgcccatcttattctgacagaaggggcaaccaacgatggtgcagttgagcttaagctgactaacaacatcctgatgggcgatggctctggcgttactccagtctgggactacaacgactccgccattactggcgaccacaatctctacaacaatgttccggtaatgccctctgacagttatgcgttaatcgacgatccacgactggctaaccccggtccggagaatgtgctctggagagactatttgccgcaacccggctcaccggccattaatgcggggatcgctgttactggcgctcctgcacacgatgcgttaaatcaggctatcggaacaccaccgactatcggcgcgctggagccggaaagtagctcccgacgataa

SEQ ID NO: 249224 - DNA, 1245 bp, Klebsiella pneumoniae
atgattaaaacacatgacacccgatggaatgtgatcctctggggattctttttcctgttctattactacaactggtcttcctgcttcttgtttttacccatgtggctaacccggatggtggggctggataaaacgcatattggtatggtgttttcttctttcgccgtggctgctatctgcctgcaaccactgctgggctgggtaacggataagctggggccgaaaaaacacctgctgtggctgatcgttattctgatggtgctattcgcgccgttctttatctacgtgtataccccgctactgcaaagccattttgcgattgggctggtgatgggcgggctatatctgggatttatcttccacgcgggctatggcgcggtggaagcctttgtcgagaaagtcagccgtaatcgtggttttgaatatggacgcccccggttgtttggttgttttggatcggcggcctgcgcgacgatctccggtattatgtatggctttgatccgacatggatttactggattggttcggcgctggctttattgctggtgatgatcctgctgattgcccgttctgagccgctgccgggcattgaagcggagcaggtccgccaacagaaggtcagcgtgctggagctatttaaactccgtcagttttggtatttcacattatatgtattaggtgttgcctgtatttatgatgtcttcgaccagcagtttattaatttctttatccgttttttcgaccatcaggaacaggcggccagagcattcggctatatcactaccgcaggaaatcttggcgatgctgctgtgatgttttttattccactgctgattaataaatatattggcagcaaaaatgcgttattaattaccggcaccattatgacgattcggatcgtcggttcatcatttgccaccgggccgattgaagtgcttttcttacggatgctgcataattttgaagtacctttcctgctgattggtattttcaaatatattgctgacgtttttgatactcgtctgtccgggaccatctacctggtgggcgtgatgtttatcaagcagtccgccgctattattttatcgaccgtcgcgggtcatctctacgacaccatcggtttccatagcgcctatctgatcctcggcagtatcaccgccgcgttcactctgctgtccgctttcctgctgacttcaaccccacgccagaaaacggcggacgcccgcatgcccgccacactctaa

SEQ ID NO: 249225 - DNA, 1293 bp, Klebsiella pneumoniae
atgcaaccgaatattctggtctttttcaccgatcaacagcgctgggacacggtaggttgctacaaccccgccgtcagtaccaccccggtgctggaccagcttgcccgcgagggcgtgaagttcgaaaacgcctttaccgtccagccagtctgcggcccggcgcgctcctgcctgcaaaccgggcgttacccgacgcaaaacggctgttaccgtaacaatatcgccatgcgccaggatgaagtaacgctggcaaaactgttcaatcaggcaggatatgatactgcctacatagggaaatggcacctagcggatctggatgaaaaaccggtaccgaaagcactgcgcggcggctggcaatactggctggcggcagatgcgctggaacatacgtcacacccttacggcggtcactttttcgataacgataaccagccggtgcatttcgacggctaccgggtggatgaccagaccacgttcgcgctcgattacctgaaaaatcgccagcgggataatccgttcctactattcctctcttacctggaaccgcacttccagaacgatatggcgcgttttgtcgccccggacggctacgccgaacgcttccagaccgcatcggtgccgccggatctgattaaccgccccggagactggccgcagaaccttcctgattattacggcatgtgccagaacctggatgaaaaccttgggcgtatcgtcgattacctgaaggccagcggcgaatacgacaacacgattattttgttcttcagcgatcacggctgtcatttccgcacccgcaacgatgaatacaaacgctcgtgtcatgagtccagtattcgcattccctgcgtggcgcggggtggaccatttagcggtggcagaacggtggagcatcttgcaacgctgctggatattccggtcacgatgctgagcgccgcaggcatcaaggtaccggatgccatggttggccgtgatttgcaaacggctctggatgcagatgattgggaagaggaggtgctgatccagataagtgagtcggaagtcgggcgggcgctgcgcaccacgcgctggaaatatgaaattgtcgcgcccggcagcaatccgtggaatgagtctgccgcgatgatttacgtggagagccagctttatgacctgctgaacgacccgtgggagcgccagaacctgattgccagcacggaacatgcgcggatccgcgataaattacgtcaggatattggccgcaaaatgacagagattggtgaagacctacccgtcattgttccggtggagtaa

SEQ ID NO: 249226 - DNA, 801 bp, Klebsiella pneumoniae
atgactgcatggatgattgccgcactctgcggctgtggtatggcaaccagtctgctctcggcgctgttcggcgtcgggggcagtatcctgctcgtgccggtgctgcatttgctatttccgcaatgtgctgtgcaggtgctggccgcgacgtccctgacgctggtgatgctgagtgcgttgattaacgtctgcgccttctggcggcaggggatccggttgaattcacgactgttggtgctctggtcgctgggaatggcgacgggaatgcaggcaggcgtgtacgccagctttttgctgtcagataaggtgctactgatgttgtttgcgctggtcctggtagggctggcactgcgctgtggatgtttgcgcccgacaactcaggaaaacgtacaaccggatagccggacgcgcagcgccgggatgctgttgtgtaccgctggcggtgctgtggctgggttaactgggctgggcggcggttccgtgctcgcgccgttgatgtcgcagctctccgggatcccgcgccagcatatcgctgtgtactgcaactggatgatgctgttcggtagcgccggaacggtcatcagctatctgtatcatactgcgccagataccggtgcattactaccggcgatgcagtttggttacgtcaacatggctattgtggccgtgatttttctctgcacactggcgttccagccgatcagcatgaggttgcgcactctgctacctgaatgctggctacagtgcgttttctccggagtattgctgatgatagccacgttgattctggtgacgctatga

SEQ ID NO: 249227 - DNA, 1152 bp, Klebsiella pneumoniae
atgaaacacgcttttcatctgatggcgaagcctgcgggctggcgctgcaatctggcctgcgattactgcttttatctggctaaagggcagggcgtgctgcgtgatacctgcggacagcggcatatgcccgataaggtgctggaaacgtatattcgccaatacatcacggcttcgtccgccccggaggtgcactttacctggcagggcggcgagcccacgctggccgggctggatttttatcgccgggccatggcgttccagcagcgctatgccggggataaacgtattaccaacagccttcagaccaacggcgtactgattaacgacgaatgggcggcatttctggctcagcatcggtttcttgtggggatatcgctggatggcccggcgcacctgcataatcattaccgtaagacgggcagcggtaagcccgtgttcgatcaggtgatggcggccctggatacgctgaagcgtcatcgtgtggaggtgaatatcctgaccgtggtgaacaacgtgacggcacaggctccgctggaaatttaccgctttctgacgcgtgagatgggggctggatttctccagttcattccggtagtggagcatgatgcgcaacgtgggctgttgccctggtccgtgacgggggaagagtacgggcgatttatgatcgccatctttgatgagtgggtacgtcatgatgtcggacgggtattcgttcagctttttgataacacgctgtcggcgtggctgggcgaacgcccggtgatatgcgtaatgcagcccacctgcggacgcgggctggtggttgagcagaacggtgatatctacagttgcgatcactatgtggatgcggagcatcggctgggtaatctgctacagcagccgctggaaaagctggttgcgggtaaagcacaacggcgattcggccagcagaaagcgcagctcccggataattgccatcgttgtccgtggcgctttgcctgccaggggggttgtccaaagcatcgggtaaacgatcgattgaatcatctttgtgccggatatcgcatgatgttcagccatatggatccatacatgacctatatggcgcagcagattcatgtgcagcagtctccggccagggttatgacggtgatagatagcctgaagaagtaa

SEQ ID NO: 249228 - DNA, 1200 bp, Klebsiella pneumoniae
atgtcggggctacattcatggcttttagataagtcaaccagtgacacctatatgttcatcaagcgcctgtcagccaacgatactggtgcgacgggtgggcatcaggttggcatttacataccttctggtattgttgagcatcttttcccttccattaatcatacaagggatcttaacccgtctgtgacgctgaatgcgcatacctcctcgcacagttgcccggacaccgaggccagggccgtttattacaatggtcgtttctttggtaagacccgaaatgaaaagcgtatcacccgatggggaggtggaaggaatcctctgcaagaccctgaaaacacgggggcgctagcgttactggcgtttgatcatcgtcagggagcagatagtcaattcgttgatatctgggtgtgtcatgacgctgaagaagaagatattgttgagtcatcgctcggagagattgttcccggttcgctggtctatggccccgcaaatgagattctgggcggtctggctttaaaagaacctgtctccagtgagtatcgtcttccggaagagtggagaacgcatttcccttctggtaaggagattatcgagtatgcagcagctcactattctccaaatgttgttggcccggataagcaactgattgaacgtcgtcgtgttgagtatgaaatttttctactggtggaggaaatgcatgttctgggtatggttcagtctgggtttggttcagtaaatgaatttattgcactggcgaattccgtgagcaacagacgaaaatcacgagccgggaaatcactggagctgcatcttgaacagctttttaatgagcacggactgacaacttttgagactcaggccgtgacggaaggaaataagaagccagattttttattcccctctgcgcaagcttatcacgatgaagcttttccagagcagaagctacgtatgttagcggtaaaaacgacttgtaaagatcgctggcggcagatattaaatgaagcagacaggattcaggatatttatctttttacccttcaggaaggtgtttctgttgctcaatttcaggagatgcagcaggaaagggtcaggttggttgtgcccagtagtcttcatgataagtacccgaaagctatccgagaatatcttatttcgttagaaacatttatcgatgaaactaaagcattgtatgtcgattaa

SEQ ID NO: 249229 - DNA, 1425 bp, Klebsiella pneumoniae
atgtctgaattcgatttatttgcgcaggagctgctcgaaaaagcagaagctgaagaaaaacaacaacaagagcgcgacaggaagctgattgatcgggtacttgaaatttacgaccagaagtatgtcgcagaactgctaagaaaaataggtaaaaatgagtggagccgcgaaacccttaaccgctggataaatggcaagtgtgagccaaaatcgcttaccatggctgaagaagcgctgttacggaaaatgctgccagagcaacccgctcatcatcctgactatgatttccgctttattgacctgtttgccggtattggaggtatccgtaaaggattcgaggccatcggcgggcaatgcgtttttaccagcgaatggaataaagaagcggtacgtacctacaaagcgaactggtacaacgatgaagacgcacacacattcaatctggatatccgggaagttacactgagtggagaagaaggcatctctgaagagaaggcctacgctcatatcgatcaacacatcccggatcatgacgtcctactggccggttttccctgccagccattcagtctggctggagtgagtaagaaaaactcgctcggacgcgcacatggatttgaatgtgaagcgcaagggactctgtttttcgatgtcgcccgtataatcaaggcgaagcaaccagccatttttgtgctggagaacgtgaaaaaccttaagagccatgacaaaggcaaaacgtttaaagtcattatggatacccttgatgaattaggctatgaagtcgctgatgccaatatcacagggaaagatgatcctaaaattattgatggtaaaaatttcctgccacaacatcgtgagcgtattgttctggtcggattccgccgtgaccttaatatccatcagggattcacattaaagaatattgataaattctaccctgagaaaagacccacatttggtcagcttctggaccctgcggttgacagcaaatatatcctgagccctaagttatgggaatatctctataactatgctaaaaagcatgctgccaaaggtaatgggttcggttttggtctggttgatccgaataatgaaaacagcgtcgcgagaacattatccgctcgttaccataaagatggctctgaaattctcatcgacagaggatgggataaagaactcggcgaaatcgatttttctaatcctgagaatcaggaacaaaggccaagaagactgacgcctcatgaatgcgccagactgatgggttttgagcaacccggtggcaagccattccggatccccgtttccgacacccaggcctatcgccagttcggaaactcagtggtcgttcccgtttttgaagccgtggcaaaactgcttcagccttatattatgaaagtcgctgcaagcaaggcgaccaaaaaataa

SEQ ID NO: 249230 - DNA, 738 bp, Klebsiella pneumoniae
atgattatttccgacgccagcctccacagtatctttacgccagctcaggttcagcaggccgccataccaccgccagcggaaatgccgtttctcgcagctccggtgcgtaatcgctccatcttccactacacccacttttcccgtcatgccctgctacgccctatcgctcgtgaaacaggaagcaaaatctatctacaggaagaacccatctgcggtttttggtatctcaaccatggcgtcgtcggtttacaccacacgctggaaaatggcaaagaaatgctggtacgcgcctgccaacaaggggactggtttggctatctggggttgtttggctcggagttctaccattgccacgcctgcgttttgcagacagcatcgctgtgccacgtcattcctcactcaaacagcgattttctgcgtcatcacccgctgttcgcccaatttctgttaaatcaggtggtagcaagtctgtccgatgcggagcatcgcatggcctggatcgcccgttaccgtacccgtcatcgggtcctgagcagcctctggtatctgacgcggtattttcccggctatgactggacgtggcgtgaagtggcagaatttgccggatgcgagacagaaactgcattacgcttcagcaaagaactaagactggccgggatactagatgactcacagcgccgcttgcacgtatgtcacccagaacaactggcggcactacttgctggcactcataattag

SEQ ID NO: 249231 - DNA, 261 bp, Klebsiella pneumoniae
atgactaaacaagactggcacccggccgacatcatcgccgccctgcataagcacggcaccagtatggcagcggtctcgcgggaagcggggctggcgtcctccaccctagcgaatgcgctttcacgtccctggccgaaaggcgagtggctgattgctcgcgcactcaccatttacccggcaaaaatctggcctagccgctatgaggaagaaggcgaactgcggcaaccgaaaaatccgctccccgtcaggtgcaggttatga

SEQ ID NO: 249232 - DNA, 285 bp, Klebsiella pneumoniae
atgattccgaagcgtcttagaattgcgagagagttggctgacatgtcccaagaagatctcgccgctgccgcgggtgtttctgaagaaacggggtcctcaagaatttcgcattatgagcatggaaggcatcgaccaaaatttgaattggtttgccagttggcaagggtactcaatgttccggaaggttatttttacacgcttgatgatagctttgccgaagcgatgctaaagctctacgcaggcgaaatcgtgcagtggaaaaaaccagtaagtgaacctagttag

SEQ ID NO: 249233 - DNA, 1296 bp, Klebsiella pneumoniae
atgtcagaaagtctgcaaactaatgtcactcaagcgttacctgacgacagggaagaactttaccgtcttgtctggcgcgagccagcggagagaatcgcttctctctataacatcagcaaagagcaactgacaaaacgatgcgctgaattacggatacccaggccgctcgctggatactggaaagctctggcgaaaggaactgcaccggcggtacctgctttgcctgatttgaagagtggcaaggtagaaaaattccccagaaaaaccagccaagccattcctcctcccacaaaaatatcatcgaaagtagcagcgccagcaccgcgaaagcgagcaagggctgcgggtagtggctattcactgatcgatgatctcaaaacttaccttcccgtctcttccgtcacaaaagacggctactacaaaccaacaaaaaagaagctactcgatctgaatgtttcagaaacgggattcaacagtgctatcgattttctgagtcggttctttgctgcactgggaaagcaaggttattgggtaaggttagctgaaggaaatgaaggacttcattgtcaaggcatagatatcaaagaagacccaaaagagggaggtttgcgctatgacagtttatggcgcccttgttcagccagtattatctgcgttggggatatgttgttcgcctttaacctagctgaaatgacggaatatgttccagcaaaagaaattaatggtcgatacattcgtgatgaaaccatggtccgatgtatgagggggaagaatgacaagccatttcgttatgtcgttaaacacaccttaccgaccggacgatttctgctacagctctactcgccatattcattaacattctggcaggtacagtttcgccagacaaaacagtgtggacttgtaagccagatcccgaagattatttctgctatgcatgatgctgttccgctgattaagaatcagctggaagaggcgagagtcaaagctgaagctcagcgaatccagtgggaactggatgaaaagagatatcgggaaaaggagctgatcagaagggaaaaagaggcatacaacgccagcttagccgaattgaaagctattatggtgcagtgggcagaggataagcgtatagagcagttttttcgtgaggcggagttggatgcggtggattttgatgagcaacaaaggttaaagattatggagcgcttacaactggctcggcagttcttgtcggtggataaggcggctgagcgtttgatgaaatggaggattccgcaggaacggttagataaagcgtag

SEQ ID NO: 249234 - DNA, 978 bp, Klebsiella pneumoniae
atgagtcagaaagcatggtcttttaaagcagtaggtcaggatgatctccggtacttcgggaataacggttatcaagatgactcaactagtttttatcgatatgacaactttgtgccaaaccataagcaagtcaaaaaaggagatattgtcatagtaactgatagaaaaaatgttcagggtatatcagttataaccaatttatcttcagccccatacataaaagctcgtaaccgatgcccatatgaaaattgcacgccagcaaagttaatccttcggaaatctaaaaaaccaaagtggcgctgcagcaatggacatgaatttgaacagcctaaagtagaagacgttcctgcatttgaatttaaagctgaatataagaaaaactacatgcccgttaattctatctccataatagatttaatatctcatacactgcgctacaacgttcaaagttctattcaagaagttgattttgaatgggcaaaaagtctattttgtaatgtcattcagttggattctactgaagcggacattgatgatattcctctcgatgtagatgatcagcgaaaggttattctacggcaaattaagcaaaggcgtgggcaaaaaacttttcgcgacactctgatatcccaagcagcaaaatgtgcaataagtggttgtgaaatcattgatatcctcgaagccgcacatatcaccgcatacaaaaatgatacacataaccatataagtaatggactattattgcgttgtgatatgcatactctttacgatctggatctatttgcaatcgatccggattcattcgttatttactttgctccacagatccaagataaagagtatgtaaagtatcattggaaaaagctgcacgtaacgtacaagattaatcacggagctcttgtcgaaaggtggaaacgatttactgaaaaatatgccttgactgaagtcaatttgctaaatcttactatgcatgtttaa

SEQ ID NO: 249235 - DNA, 1527 bp, Klebsiella pneumoniae
atggttgagatttacttaaatgatatagatgtcgatgatataaaacatatccggcagtcagatgatattgaggtatttattcctttagagagtgttggtttctcaaactcatattttgacttgtgcgatgactatcttgaggctatatgggcaggagaacgattggcaagcacttgtcaacacgcccgggcagtctcatattacaacagtgaaaatcataaatcgttcattaaattatctttaacaaagccaaacgaaaaatttcatgaagcgctaagggattgtatagtactttataaaagatatgatgacagtctttatagcgaacctcccttagaatacagtaaaatcatagatgcagtactctctatagaaaatgatctagataatttaaatataaaggtacctgccttgcatgatttttattatgcaaatttaataggaggtaaatattttgagatgatgtctgatgttccagatgaatatcgaagtgaaataaataagtatcctgagagagctttgggtttctggaagagcgcttacagtagcaagattggtgatagatgttatacatcaccagatgcttgggttttaccaaatactgttgatataaataatttttttaaagttaccgagcaaaactacaaatttgaaagttttataccctctagcattgtagtgttaaaaggggtctcttacactacctctgatgtcatcatttcttatttcccaatgaatcattactttaaatctaaagtttgtagtagtattgagttgtcaagagatgaatatagatggccaccagatccatttgattggtctaactctacatttacttattcgccctataataattttttgagagagctgatagacaatgatagtagcttactctcccaaaaaccgactcatgagcaatgttatgttgatccaaacggaactttagtaatagttgatgacggtaatttttaccatctcctttacgataccgctgagttgaacttatctcagataaaaaactttaacgaaacattaggtgaagtcattttatctaccggtattaacataggtttttccgcagggttaacatataattggtccgaaattgatgacgagcaatttgaacaactttgctatgatataatctatagtcatccacattttaataatgaaacgatcagaaagttaggtaagtctcgttcacgtgatggaggtagagatatacaagtatatgatattcctaccaaaccattaatggagcccaaaaaatggattttccagtgtaaattagtcaccggagcaggatcactttctgcaactaaacttacagatgttggtgatatgctagattcttacgatgtcgaagggtttggtgtttttactaacactataatcgacgcaactctttatgacaaacttgataaagtatgttcaaaaaggaatgtagaacaactcaatttctccgcccttgaaattgagaaacaattaataaggaagccatatataaggatgaagtatttcaaatag

SEQ ID NO: 249236 - DNA, 2655 bp, Klebsiella pneumoniae
atgatgcgcagtggcaccctgaccgaacggacggtggacagcctgtaccagaaaggcgcgtcgttcgtcgattttctgccgtgggtggagtatcagccggaaagcaaaacgctgctgctggatgacggacgctcggtcggcgcggtgtatgacatcacgccatttggcaccgaaggccgctctccggcacggctggaagaactgcgtgatattctaaaggacgcgctccaggacagcttcacggaatacgatcgccagccgtgggtggtgcagttttactgccaggatgaggacgacaccgcaggctggctggccgcactgcatgactacgccgtaccggaggcacggaactctgattttacccgcgcctggctgaacgagatggagcgtcatctgcacgcagtttcccgcccggaaggctacttcttggacgatgccgtcagccatacccgctggcgtgctcagcagcgccacacgcgaatggtggtctaccgctggctacccaataaatcccgcgatccgctggaagacaccccggaagaggcgctgaacaccgtttgcgaacgaatggtctctgcgctggcgggcgcgggcattcatgcccgcaggctggagtgtgaggccattcgccactggctgttacgctggtttaatcccgccccgcagatggccgattcaccccggcagttctggcaacaaatggcgcagcaggatgacataccagagttacacgactttgccgagagcctgttgtgtagtgaacctcgctcgcaagccgtgcagggcacatggctgttcgaccagcgtccgcataaggtcgtcatcctggacaggctgcgcaaaccgcccaccgtcggccatatgaccggagaatcagcacgcggcgacggcattaacgcgctgttcgatctgttgccggaaggggtaattatggcgctgaccatcgtcgtctggccgcaggatcggctggaggagcatttaagccgcctcagcgaccgcgccatcggcgagaacgtcgactcggagtacaccaaaaaagactgtcaggaggtgcgccactggctgaaggacggccacaaactctaccgcagcgcgctggcgttttacctttccgccccggataacggtgaactgacccgacgcgtacgcagcctgaacagcctgctgctgaacgcaggcatggttccggtacaggaaaatgacgaactcgccccgctcagttcgtggctgcgttggctgccgatgtgcttcgatcctgcgcgggataagcgccagctctacacccgattcagcttcgtacagcacctcgccaacctgctgccgctgtttggccgcgagagcggcaccgggcatccgggtgtcagctatttcaaccggggcggcggaatgctgtgctgggatccgctcaaccgtgaggaccgcgcccagaacggccacctgttgctgctcggcccgactggcgcgggcaaatccgccaccctgaacgccaaaatcgcacaactgatggcgctgcatcgaccgcgcctttttatcgtcgaggcaggcaactcgttcggactgatggccgattacgcccgcgagcacggcctgacggtgaataaaatcagcctgaaacccggctccggcatcacgctgccgctgtttgccgatgcgtggaagctggcggaaagcgatgcaccttcagcagaaccagatgacgacgatcccgaggatgccgacaacgaacagcgcgatctgctgggtgagatggagatcacggcccgactaatgatcaccggtggcgagctaaaagaagatgcccgcctgactcgctctgaccgggcactgattcgcgaagcgattctgcacgcggctcggttcaccgcccgagagaaaagacagacgctaacccaggatatccgcgatgctctgtttacgctggcacaggatgcagcgctaccggaatcccgccgtaaccggctgtgggagatgggcgaaacgatgaatatgttctgctccgggtttgaaggggaactgtttaaccgcgagggtgaagcgtggtcggaagcggatataaccctggtggatctggcgatgtttgcccgcgaaggctacgaagcgcaactggcgatcgcctatatctcgctgattaaccatatcaacaaccttggtgagcgtgaccagcatctggcccggcccatcgttaatattaccgacgaggcgcatatcatcaccgtcagcccgctgctggcgcggtttctgaccaaaggctcgaagatgtggcgcaagctggggatctggctgtggctggcgacgcagaacctgagcgactttccggatgatgcgaagaagctgctcaatatgattgagtggtgggagctactggtgatgccgcctgaagaagtcgagcaggtcagccgctttaagtctctgacgccggaacagcgccaactcctgctcagcgccactaaagcaccaggaaaatataccgaaggcgttgtactttcgccgcgtgtggaagcgctgttccgggtggtctcccctgccctgtggctggcgctggggatgacggagaaacacgagaaagcggagaggatgcggattatgcgggagtttgggtgtagtgagctggaggcggcgatgaaggtggcggaaaggtgttgtgtcaatgattga

SEQ ID NO: 249237 - DNA, 390 bp, Klebsiella pneumoniae
atgcgtatcctgatactgcttttatcgctaatgctggcagcgtgtagcaccgaccagaaaacgctgctgccagtggatgaaaacaccaccatgcttaacatctggggccgacagaataacgatgcacaggcgctgtatgacgcacgctcagtcctgcgccgaccgctggatgacgccacgatgaccgcacaacagcagcagaccacacgcagcgatgacaattccacgaaggcgctgttccggcgactgccgaacccggatttggagatgtatatcttccctcatctggcaggcagcgaaggcgtcccggtgccgggctacaccaccgtcttccccttctataaccgggtgcagtatgccctccccggcgagcggaccgatccgctgtga

SEQ ID NO: 249238 - DNA, 1338 bp, Klebsiella pneumoniae
atgaagctccaggccaatatcctgctgcggggtctgacgccgctcatcctgctggcgggcagcgttctgctgtttcatgcctgtcaggatcgtaaaaccacgccgtcaaaatcctcagcgcctgcaacgcccctcagccacgacgagctgaaagcgctgggaattgagggcgacacgcccgccgataccgtcgccacgctggtcggccagatgaagctctggcgcaaggagctggaaacggtaaaggccagcaacgccgcgctgttacaggaaaaccagcgcctgcgtgaacgcgagcagaacaccgacagccgcatcaacgacgccattaaccgccagcagaccagcgcctcgcagcagcaaaatgaattgctcagctcgctacagacacagatccaacagcttaagggcaacagaacaacggacgactcgctggccgggctggggattgatgaatcggaaacggcctccggcgagccactgcgctggatagcccccgctgacgccctgccaaccgataaaaacggtcgtccactgcaacctgcgctggcctttccctccacgatgcagaacaccgcgccacaacctgaaacaccaccgccagccgccgtcaaaccggtctacaccctgccgcagaacagcaccttaatcggatcggtggcgatgaccgcgctgctgggccgcattccgcttaacggcagcgtcaccgacccttacccgttcaaggtactgattggccgcgataacctcaccgccaacggcatcgagttgcccgatattgaaggcgcggtgatctccggcagcgccaccggcgactggacgctctcctgcgtgcgcggcagtttaacgtctatcacctttatcttccgcgacggcacggtgcgcacgctccccgccgaaggcgacaaagctggaagcggcacggaaggcaatatcggctggctgtccgatcccaacggcctgccctgcatccccggcgaacgtaaatccaacgccgccgaatatatcggctcgcagttcctgctggccggatcgtccgccgccgcgcaggcgctggcgaacaaccagaccacttccaccgtggaggatggctccgtcaccaccgcgttgacgggcgacagcgggcagttcgtactcggtcaggcgctgggcggcggtctgaaggagagcgccgactggtttaagcagcgctacggccagatgttcgacgccatctacgtgccacccggccaggccgttgccatccatatcacccgccagctcgccatcgactacgaacctgacggacggcgggtgaactaccgcgtggcgggcgagcgcactggagacctagactga

SEQ ID NO: 249239 - DNA, 789 bp, Klebsiella pneumoniae
atgaatgcccgcccgctgttgatcctgctggttgctctgcccctgcacgccgtcgaactggtgaaatgggagcgcatccccctgccggtggcgctgaacatcgggcaggagcggatcgtctttgtggatcgtaatgtccgggtgggctatcccgccgcactggaaggcaagctacgcattcagagcagcaacggcacgctgtacctgctcgccagccagccgtttgccgccacccggctacagcttcaggacacagagaacggcgagctgattttactggacgtctccgccagcaagggcgagcacatcctggagccgatgcgcattgtccgcgaagagaagaaaacaccggatacaaagcccgatacaattcctgagcccttaccctccacgccccttccggtcgcgctcacccgctatgctgcgcagatgctgtatgccccgttacgcaccgtggaacctttgccgggcgttcagcccgaaggcgtgcggctggcaaaaaccatcaccactttgctgaccgccctgcccgtcagcaccataccgatcggcggctggcgactggatccttatcacctggcggcgatccggctgcagaataaaagcgccacccgactgaaactcgatccgcgccagcttcaggggcagttttacgccgcctcctttcagcatcgttggctggggcctgcgggcagcgccgaagacaccaccgtattctatctcatcacccgcaatcagcgttctgaacaggcgatcctgccagagcctgcgccggagaagaagaaatga

SEQ ID NO: 249240 - DNA, 627 bp, Klebsiella pneumoniae
gtgagcgcctttaagcacgcgctggccgcgcgggatgcgcatatccgcaccctacatattgcgctggtcgcgttattcctgctggcatcagggatgggattcggctggtacagcgccccacgccagctcaccgtttatttgccgccggacctccgcgccgccagtcagcgtccatggtgggaagtgccgcccgctacggtgtacgccttcgcgttttcggtgtttcagcagatcaaccgctggccgaccaatggcgaggccgattatccccgcaacctcagtgccctgcgggcctatcttacccccggctgctacagccagattgaccgcgaatttcaccagcgactgcaaaacggtgagctgcgcgaccgggtgcgcggcgtgtatgaaatccctggtcggggattcagcgataagcgggtacagatcctcgaccgcgacaactggattgtgacgctggatctcaccgtcgatgagtatttccactccgaacccgtcaagcgggcaatggtccgttaccccattaaagtgctgcgttataacatcgatcagcagaaaaatccgtgggggctggcgctggactgcttcgcctcgccgccgcagaagctggaggcggtgaaaccatga

SEQ ID NO: 249241 - DNA, 354 bp, Klebsiella pneumoniae
atgagcaccatctcctttcttccggaacggctgaaccgcgagcctgcggtgtttcgcggcctgacggtcagcgagctgttgatagtactgcttgccgggctggccgctggcgcagtcgctggaaccattccggcgatactgtggcgcaactggagtcttatccccggcagcgccttgcccggcggtgcgctggcgctcctctgcggcggacgctggctggcgcggctaaaacgcggacgcccggagagctggctctaccgggcgctggagctgaaactggcccactttggtataggcgctcagcgttttgtcctgcacgatggcacctgggccattcgccggagccgacggtga

SEQ ID NO: 249242 - DNA, 327 bp, Klebsiella pneumoniae
atgaaaaaatggctagttagactgctgctgtggctcccgaccctgcccgtccaggccgatctgccggagatggaagatccttcacgcggtcagggcgacggcatcatggagacgttgcagaactacggttatgacatcgtgatcctgatgacgctgggcatctgcgccgtgggctttctggtggtcgccaacaactgcatcgccacctactctgaaatccagggtgggcgcaagcagtggaaagatttaggcgcaatggcgggcgtcggcgcggttctgctggtgatcaccatctggttgctcaaccaggcctcagacatcctgtaa

SEQ ID NO: 249243 - DNA, 234 bp, Klebsiella pneumoniae
atgagtcctgaacaaatcagcgccttccaggccgccagcctggtgaaacccgatgccgttagtctggtgatgctcggactgttcagcgccttcctgctgctgtgggtggtctgggtgctgaatgatgcctaccggggcgtggcaacctcgcgggtaagctggcgggcgctgggcagcatcggcgggcgaaccatcttactgctgctggtcagcttctggctggtactgagctag

SEQ ID NO: 249244 - DNA, 1797 bp, Klebsiella pneumoniae
atgagcgacaacattataaagaacaagataatattagggattcttaatgaatttaagaacgattttggtttaaatgatgatgagtcgaaatcctttgaaaaattagttaattatgtcgtattatcaaagatagatccagaggcattctcagatgtaaatgtttttgattcaattgatgttgacaagtcgggtacattcggtatagatacttttgcacttgttattaatgaccatttggtaactaataaagaggacatcgctttatatcaaaaatctaatagaatggacactagatttatttttattcagacaaaaagatcttcatcagttgaaattggtgaccttttaaaatttggtaccgcagttgagaattttttctcatcaaagccatcaatacagctcactgaggaattgcaggatgctaaagatctagttgacgagttatttaagccagaaaatgccagaatcgttgcaaatggtagaagctcctgtgaactatattatgcaacatctggaaaaaaaacagaagatagtaatgtattaggtacaatagacttaaccaccgaaagattaaaaacagtaatagaagaaatacctgagtttagcattaaacatattagctctgattatatcattgattcttacaatgaaattgaaaacacatataaagtaaatgttgttttcgataagaatatttcttgcggccatataaatggtgtagaacagtcgtttattggatatatgccagtcagtgagtttttgaaattaataaaaggacaagacggaaatattagaaaaaatttgttctacgaaaatgttcgtgattttcaaggtggaagcaacgccgtaaatactgaaattgcaagcaccttattaaatccaaaccaaatagatcaatttcttctgttaaataatggggttactattgtagccaaaagcttcatcaacctgagatcaacagagtatgaaatcagcgattattatatagtaaatggttgccagaccagtaatgtcatatatcaacacattgaaaaaatagaagatccttcgtcattgaatatcccaataaaaattgttcacactaccgataacaatatcatagcaaacttaatcagatcaactaataggcaaacacctgtgcctgatgaagcttttgtttcattggagaaattccataagagattacaagaatactacaagagatatggacaaacttgtcatgaaagaatttattatgaacgtcgttcaaaagagttttccaacagtgaaaacagagttgaaaaacagcgaatcatcaatttgcacgcacaaataagatcattcatctcggttgttattggggaacctcaattagttatgagcaataacccaacatctatattaaaagaacacaagtcaaaaatgttccaagatgatcatattttcacaccatactatctttcttcattactgctattcattttttatgaattaaatcagaaaggtaaaataaatggacggtatacaatatccagatactggatctgctggatagccagaattttagcgttcaatagtctggacatagggaatatgaattctgccaacacagaaaaaaaatgtgaatctgttataaataacctagcagataacacttacacacttactttatttcgcaatgcaatagatatatacgataagtgcaaaagagagtttaaagaaaaaaatggcagacaacgcaacgctcaattagtaagattaaaggcatttagagatttaataaaaataaacttagcatcacatttaaaatcacaataa

SEQ ID NO: 249245 - DNA, 408 bp, Klebsiella pneumoniae
atgaaataccttattccagccatattgctggtcgctactgccgctattgccaggcctgccgttcccatgcaggcgctggatgaggcccggttactgccggtcgtcacccacaatctgcatcccggccagcaaccccgtctgactctcaacctgccggggatgacgccgttgtttttaatcggcgacgatccgctgtccacagaatggctgcgccagcaccgggacgcattgaaaaccctgcacgctaccgggctggtcgtgaatgtcgccacgctggcgcggttgaatgccctgcggaccatcgatccagcgttaacgctgttgcctgtcagcgccgacgatatggcaaaacacctgcccatcaccgcgtatccggtactgatcaccgacaaggggctggcacaatga

SEQ ID NO: 249246 - DNA, 534 bp, Klebsiella pneumoniae
atggcgtcccgtttctgccccctgatagtcggcctgcttatcagtgctcacgcctgcgccgtgccgccgctgtatgcgcaaatcgcccgccaacagcaggttccagctgaactactctacgcggtggctcgcgccgaaagcggcacccgactcgcgcaggggctgcatccgtggccatggacgctgaatatcgccggaaccggctaccgctaccccagccgttcttcagcctgccgggcattgctcaccttcgcccgtacccgcagtctgaaacgcatcgatgccgggctggggcagattaacctcggctggaacggccagtggtttccctcgctgtgcgccagcttcgatccggcggacaatctcaccgtcaccgccctgctgctgcgccagcactacaacgcttcccccggaagctggctggacgccgccgctcgctaccaccaccccgccggaggcaaacccgccgccatttatcgccagaagatcagccagcaaatccggttactctcagcatcagggacgtcaccatga

SEQ ID NO: 249247 - DNA, 651 bp, Klebsiella pneumoniae
atgcgcagatatctgttgctgagccttttgctactgccgctgtttgccagcccgcagcaaacccgtattgaagaacagaccatcacccacacgcaggcacggcagtggggattaactgacagtgaatggcagcactaccagcaactgcgtcagggcgagcgcggcatctggtcgccgggactcgatcccctcactacccttggagtggaggccgacagcgacgccgaacgccagcgctatgccgagctgctggcccgtaaagagcatcaacgggtggagaaagagctggcattccagcgtgcctacgaccaggcatggaagcggctttacccgacgctgacgcctatcaataacgtcgtccagccacgtctggcgctgttcgtcagcgagaaatgcccggcctgcgagacgctggcgcagaagcttatcaacgatgaccgcccgctggacatctggctggtcaacagccgtaacgacgatgccagcctgcaacgctgggcgcagcgccagcatattgatatgcgcaaggtcgaacgcgggcagatcacccttaatcacgataacgggcgctggcaacgtctcggcggcggaaagctgccgttattgctggaacaacagggggagcaatggcgtcccgtttctgccccctga

SEQ ID NO: 249248 - DNA, 609 bp, Klebsiella pneumoniae
atgcttaaacgtctggtttacctgtttgctggcagcgctctccttctgctgacaacggcgatgttctggtgcttcaaccgtctgaataccctgacgctggcgcagcagcagacacaacgccagataacacagtggcgcaatcagccgcagccagacagcaattatcgcgagctggaagttgccgttagaaatatcaccgatcgcacagaagatcttgccaggcagcttaatgatgccacccgcactcaggccgaacgatatcaacccattaccaaacagctcaaggaaatggaggaacaagtccagaccctgagcaccagttatcaacacctgcaacaacaaaccgccacgcgcagccgcgcaaaggcaaaacaccccgtcccctctccgctttgggccgcaaaggcccctttttcccttatcaacagcgagttccgcgccgggcggcagttcgccgtcatcgcgccatccggctatcgctcgctctcacagcttcagcttgttgcccccggcgacagcgtggagggctggcaactgctgcaactggacgacaaccgcgccactttccgtaaaggcgggcggcggctgacgctgaacgccggagagtaa

SEQ ID NO: 249249 - DNA, 429 bp, Klebsiella pneumoniae
atgctgggcggctgcaccgcgccgcaacagccccctgtgcctgcgccaaaaccaacaaccccgcccgtgcctgaagtggtgcgctatgaccgctatctgctgattaatacccgccccgatgaagcccagcgcaacccgctgcaccagatcgtcaatatcaacctgccgctgaacctgaagctcaccgttggcgacgccttcgcctggctgctgaaacagagcggctacagcctgtgcgtcgatgaccatccaacgcagtttctggctggaaacccgctgccgctttcgcaataccggctcggcccgatgcggctggaagaggcgctgaaaacgctggccggaccgggctggttgatgcagaccgacgtactgaaccgcgaagtctgttttcatctgaacacaccaggaacgggggaccatcatgcttaa

SEQ ID NO: 249250 - DNA, 417 bp, Klebsiella pneumoniae
atgagcgagaaaacttacttcaatctgtacaccagcggtctgggttacgttaaccgtgtccgcaccgtcaccccaaaacgcggcgaaccctttttatgctgtgacattgccgcattaagcggggctgccgatgacgtggactatgtccgctttgactgcaaagttaccggcagcgaagcacgtaagctgattgcccgctgcgagcaggcggtcaatgaaaagcgcaaggtgctgatccacttccggttgggcgatttatacatcgatatgttcacctacagcaaaggcgagcgtaaaggcgaaacgggcgtcagcctgaaagcccgactgctctatattggccttgtcaaaatcgacggtgaagtcgtctggcaggccggaaatcaggaagcagaggcggaagctgatgcagcctga

SEQ ID NO: 249251 - DNA, 495 bp, Klebsiella pneumoniae
atgatgaataaccccataaccggctatcagtcgctggctgatgaagactataaaatgctggcttgcgtctcctcgctaaaaggccttttaaagccttttaagagtaagggggagcttgagctgctggagagcaacgcccaaagcgtgcgcgagatgatggaaccattgatgcaacgcctgatccagagcgccagacgctaccctgtgcgccagcttccgctgatattcaccatcggaccggcaccgtccggtgcaaacttcctgcgctggcggaaccagcaaaacaacaaatccggcaccccggcattctgcaacctgattggcgatcccaaaatcccgcaacgtgccagagatgccttgctggaaatcgagcgggatcgcatcgttttcaatatgcagatgtcggtactgaccttcatcatccgccaggcgcgtgagtgtcaggaaaagatgaaccaggcagaaatgctgtatcaggggcggcaaaatagctga

SEQ ID NO: 249252 - DNA, 699 bp, Klebsiella pneumoniae
atgtcggactacaccttcaacatgggtcccctgcgtagtgcgatccatattcagcttcatactcacaatgccacccggctgtggaccgggcgacgggcgaccgagaacggccctgcgccaatcattggaatgccgcgctttatcgaaatccttaatcagatgcgcattgccgcagaacataacgatccttacgccgatctgtggatgctgcgtatggaagagaaactggcgcagtcgcgtaagttgatgcaagtgatgctggatcaggcaaaagccatgttcagcgaattgccagaaggcatcgatattgaaacctgcttcaatgttcagcctgcccgctttccgctgtttatcaacgccccgctggcctatcagggtgtttatctgctgaccgacttcgaccagctcgcacgccagcttctgctggcctctcatatcgccgtcatctcccgcagggagatgcacaaccggttaaataatggcgcaacggttattcgcagcgccttcggtctggcgcagaaatataacggctccgggctgacccgtcaggattttatcgacgatacgccgcaggccagagccgccattgaacgtttagtcccgctaccggaagcgatactgagcggcaagctgcgctcatcgttttcatcaccattgcctggcaaggccgaaaatcccggagttgccgatgatgaataa

SEQ ID NO: 249253 - DNA, 2034 bp, Klebsiella pneumoniae
atgcatcgcactatttctgagttttatcgcattccccctttacttattcgggcgctaaaaagcggaatttcctccgtggtggagtatcatctcaacaggggattacccaaagattcacgagattctctgggaaacagcccattgatgattgcggcccagtatggacatttcgctatttgcgaaatgttgttgagtgcgggtgttgatgttgaacatcaaaacaacctcgggcttcgcgctagtgaccttgcgcaggagcaaaaattgcgtgatctgttggcccgttatcgtcagcctctttcacttgccgaactggaacgctctgtggtttcagtcgaggactcagaaacagaggcagaattacccagcgctgaaatcccgatggattttatgctgtgggatgcagaagttgaattgaagcccgccgaagataatctgacgttaagacatgcttccgctgaagcccagcaattattatcacgctatcgcccgaaagataactctgctgagtggagcgatatcgaactcacgctccctgaaccactgacgccagtttctcactctccgcaaaattaccctcatctctcaacgttgctcattggcgcactggatacggggcgtatctctttgcgtgacatctggcatgccggggaagaggatttcggtatgcagtggcctgaattccggctcagcgtagaggcattgatcagggacttaccgctgattgtggatgacgatgatattattccgcctgacgctgctccggcgacattagctgtgagtgaacctcttgaaccttggtttgatgctttcaatgcattgcggcagttcggcatcgttgaaaactatctcgtggatatccgccagtgggatgtcgtggataaaacaaaagaagaacgactcggccagcgcatggatacggcgctaatcaatctgataaaaatcctggcgggtttatccgaagcggaatatatgcagttgctgcagcccaattaccttccggcgccagcgcctgagatttctgaagaggaagacgtcgcagaaaaagcggatgaggaaatgcctcccgtatccgatgacgataacgatgacactatcagctttatcgagctgctcgttctgctgagaagtgggaaagcaggcgagtatcaggataatcatatcccccgcccggagtatgccgacctgcaacagatagttgagcgcgcccgaacgctcatccctgatgaaggtcataaaataagtctgtatgtcagcagttacagagaggcttgggaggggctgatccacgccaacttgcgtctggtcgtcaccatcgcgaataaatatcgcgggcggggattagatgtcgaggacctgatccaggaaggtaatctgggtttgatcaaggccgttgaaaaattcgactatcgacgcgggtttaaattctccacgtatgccacctggtggatccgccagaagatcagccgcgcgattgccgatcaggcgcagctcatccgtttacccgttcacttctatgagcaattcaggcgctggcgaaacagtcgggatcaattgctgtatcgccaggggataacgcccacgatcaaacggctgcaagcattgactgaccttccagaaaatcaactcaatcggatggcaaaatatgaagaacagacggtgttgattggcgattttcatgctgacgcccaggacagcgaagcggcgctgtcgggagacgcgatcctgaccagaaaggatttcaccagtgctcccgttcagtatctcgagctaagagaatgtgtttcattggtgctggaaacgttgttgccacgcgaaaagcagatcataaaaatgcgttttggcatcggtatgacgcaagattttacgctggaagaggtgggtaaacagtttgatgtcacgcgagaaaggatacgtcagatagaagccaaagcgctccgtaagctccgctatcacagccgggcgtcgaaattaggcggcttcgtcgaacagtgggaaaccgcattgagcgagatgcaggaagaagaagaatga

SEQ ID NO: 249254 - DNA, 1503 bp, Klebsiella pneumoniae
atgacgaccatgcgccatgcgccaccgaatgcagccattatgatcgaagcgctgcgagggctcggttacaacaccgccaccgcactggctgacatcatcgacaacagcattagtgccggtgcccgtaaggtcgatctgacctttcactggcgtgagtcggatagctatatcgtggttcgggataatggttgcggcatgtcggccgctgaactggatgttgcgatgcggctgggggtcaaaaacccgctgacaaagcgttcaggacacgatctgggccgcttcggtctgggactcaaaaccgcctccttttcgcaatgtcgccgtctgacggtcgcctccaaaaaagaggggataacgaccatcctgcggtgggatctggacattctcgccgccagtacggacgacggttggtatttgcttgaaggtgctgacccaggaagtcaggaggcgttagcaaatgcggaacctgactcccacggtacggtggtgctgtgggacgttttagaccgaattgtcacccccggctacggtgagaaagatttcctcaatctgatggatggcgttgaacaacatctggcgatggtatttcaccgattccttgaggggaacgctccccgactcactctcaccctcaatggtcgcaaaattaaagcctgggatccctttctcagcgggcatccttccaagccctggcattcgccttcggcaatggcgccaggcgctcctgccgtgaaggtagagtgtcatgttctgccgcatcaggatcacctgacgacgcaggagtatcaacaggctcaaggaccggcaggctggacggcccagcaaggattttatgtataccggaatgagcgattgctggtggcgggcaactggcttggactcggaagcccccgggcctggacgaaagatgaaacccaccgccttgcgcgaatccgtctggatatccctaatgatgctgacatagactggaagattgatattcgtaagtcgatggcccgcccaccggtttcgctgcggccttggttaacccaactggcgcaatcaacgcgtgatcgtgcggtacggacatttgcaaaacgcgggaaaatgaataagcgcaagcccggcgaggaacttgttcagctctggcaagcgcagaagacgccatccggtgttcgttatcagatttcgttacaacatcctgttatcagcaatgtcctttcgcaggccggtgagttatctccacaaattcaggccatgctaagactgattgaggaaaccgttccagttcagcaaatctggcttgatacggctgagacaaaagagacgccgcggacaggttttgaaactgcaccgcccgcagaggtgttgtccgtattgcaggtcatgtacaagactatggttggacagcaggcgatgtcaccggcgctggcgaaacagcacctgcaaaatatggaacccttcgataattatcccgaattaattgcacaactccctgacgatcaacatgagaaatcgctatga

SEQ ID NO: 249255 - DNA, 2859 bp, Klebsiella pneumoniae
atgagtcttaatcccttggatgacacgcaactgagtgtattgcagattgtgcaaacgttcctgcaaagtcaggataaaagcacgatcacgcccggtattctgcgccaacatattgatatggtttgtcagatgaaacctgagtggagccgccttgatagtcgggagatcttggtcgaagagttgatccgccgttacagcatctggatgggagaagattcttctctgagtaatgacgaagggcatcaaccctggctgaccgctgatgtgaaacgcgagtggcgctactggcatcgatatcgccagtggcttggcaaaacgatgccttggggagtcctggatacccttgaccgttcaacggatcgtgttctgggattacttgagcaaccggggcgggaagggcgttgggaccgacgtgggctggtggtcggccatgttcagtcggggaagaccagccactataccggtctaatctgtaaagccgcagatgcgggatataagataatcattgtgctcgctggtttgcataacaacctccgctcgcagacccaaatgcgtcttgatgaaggatttcttggttacgagacgagcccactcagagaaaaagtgaccatcattggggtgggcgatattgatagcgatcctgtcattcgtcccaattacgtcactaaccgatcagaaaagggcgacttcagcgccggagtggctaagaatttggggatcagccccgagcaacggccctggctgttcgtagtaaagaaaaataagtctattttgaagcgcctgcatacttggattgagaaccatgttgccaccagcgtcgaccccatcaccggaaagcgttttgtttcggaattgccgctgctgatgattgatgatgaagcggacaacgcctcagttgatacgggggaaattgtctacgatgacgatggaaaaccggatgctgaacatcagccaacggcaataaatagtctgattcgtaagctgttgatgcagtttagccgtaaggcgtatgtcggatataccgctacgccctttgccaatatttttattcacgagagcaatgaaacacgtgacgaaggtccggatttgttcccttccgcctttatcattaatctcggcgcaccctctaactacatcggccctgcgagggtatttgggcgggccaccgcggaaggccggagcggagagttgcctttgattaggcgagtgagtgatcactgtagcgatgacggaaaaagggggtggatgccggtttctcataagagttcgcactatcccacactggatacgctaactcatttcccggactcgctaaaacacgccatcgacagttttttactagcatgctgtgtcagagaattacgcggtcagggagaaaaacacagttcgatgctggtccatgtgactcgcttcaataaggtgcaatcggttgtttatgaaaatattgatgcctacattcaggacgtgaggcagcgactgacgcgaaggattggacacgaaccttttttacatcagcttgagtcactctggcaggccgattttttgccgacgaatcaggcgatccgcgacgttatgccgcagcaggttccggacgacgccttcgaatggcaggagatcgtcgacaagctgtataccgtgatagaaaacgtgtcggtacgaatgataaacggaacggcgaaggatgcgcttgattattcggacagtgcgacaggcttaaaagtcattgcgattggcggagacaaactggctcgagggctaacgcttgagggattatgcactagttattttttacgcgcctcccgcatgtatgacacgttaatgcagatggggcgttggtttggttatcgccagggatatctggatgtatgccggctttataccaccgatgagctgattgaatggtttgagcacattgcggatgcgtcagaagagctgcgggaagagtttgacaatatggtcgccagcggcggcaccccacgtgatttcgggctaaaagtgaaatcacaccctgtgttaatggtgacctcgcccttaaaaatgcgtagcgcgcgttcactatggctctctttcagcggcacggtggtcgaaacgatttcgttgtttaaagaacaggagtatcacaagcgtaactacgtggctttccagcgtctaaccgggcgcgtcggtgctggcgcgccgatacctgagagacgacgcggagataagattgaaaaatggaatggggtcatttggcaaaatatctcccctgagccgatcatcgatttcttaacggaatatgagacccatgctcaggccagaaaagctaacagcaaactactggcggattttgttacgcggatgaatcgcgttgatgaactcacccaatggacggtggcggtgatagggggcggcatcgatcgccatcacgatgtttgcggcttttccgtaccgcttatgatgcgtaaagcgtctgaaggggtcactgaccgttattccattggccgtttactttccccacgcgatgaagggattgactgtgatgaatcaacttggcttgctgcgctggaagaaacgcagcgtatttttcatgccgatcccggacgcaatgaagggcgagaggagcccgtcgttccaggtggcgtggtactgcgtcggattaaaggatttggccttaacgacattccagcacagcgtcaaaaaggtttattgctcatttacttactggacccgcagcaggcattgccggcagtggaatatcaggacgatgccttacctgtggtggcttttggcatcagttttccgggaagccgcagtggggtaacggtggagtacaaagtgaacaacgtactatgggagcaagagtatggtgcggctgagtaa

SEQ ID NO: 249256 - DNA, 1029 bp, Klebsiella pneumoniae
atggtgcggctgagtaaagacgatctgctggcggcctggaaagccttagatcgatctcagatagacgaactgcctggcgctcagggctggcgcgggattcggctttttacgcaccagggctgtagctttcatgccgggcgtcgtcagcctgataatgaagaaatgctgattgccgtgtttcctcatcctctttcgcttgggtcggcggcgctgccatcttgtaaaggattcctcgttgagatggccggaacagaggaggggtggcagaacggtttgatgatccgtcgccagcaaacagggaatgtggatgtctttacgacgatgattctggatattctccattcgctcctgaacgtttcgaggccgtgcctgtttgaaactctgcttcgtcggattcgtttatggcaggcgtttatggagcgcgatacccgtccactcagtcaagaagaagaagttgggttaatcggagaattgacgtgtctggagcggttgatcgagagcggtcttgctccgtcaacggcagtcgaagcatggataggaccgcagcatgggctacaggattttgcactcgatgaacgcgccattgagataaaaagcaccacggcagcacagggcttttgcgtaactatccactctcttgaacaactagactggctgcgggcaggatcgcttgtattgtgtggtttgcgcttcagcgagcatcccaacggtgcaaccctgaatgacatcattagccgtcttcgtcaacggcttgagggaaacgctacggcggcttgtctttttgagggatcgctttgtcacgtcggatatttcactgaacatgctgaattctatacacgtcatttcttgctgacagaggcgttcgcactccccattgaagcggattttccctctttgacgcatgcaaatgtcccgttgccggtggtgagtgcgtgctatcaactcgaactccagacacttattcctcaggcccaagattttaaccattgcttgtcacactttgcaggattaccgcatggaacttattga

SEQ ID NO: 249257 - DNA, 1806 bp, Klebsiella pneumoniae
atggaacttattgattttttacgtcaaacccagaatgagattcgcaaggaatatcaggatcaaatggctcagccaggggttgagtcgccttttccggagctgatttttaccgatattgttatgcgtcatatggccgatatcggtatgacattcgatgatgccgagacgtgtcactttatggcgaaagtcagtggacacaatgtgcgtctcagcggttatgctttctcagaagatggtgatcaacttgacctttttgtcagcatttatcacggtagcgatgagctttgccacgtcccggatgcagagacaaaagcgattgccggttactgcattcaatttttgcagaagtgcgttgacggtaaattatcatccacgctcgatcagtccaatgatgcctggcaactggtgacgaccatcgagcagtcctatgcagaactggagcaaatcagaatttatgtactgaccgatggtcaggtgaaaacccgctggtatcagtctcgtgatgtggccggtaaaaccattaaattagaggttatggacattgtccgcttgtttaaccactggcaggaaggtaagccacgcgatgaactgcaggttaattttgatgaggtggcagggggggcgcttccctgtgtctggatcccggatgaaatgggtgagtacgattatgcgctgacggtggttccaggagagacactgcgatttatctatgaaaaatatggcaaccggattctggaagcgaacgttcgctcatttctgagtcagacggggaaagtcaacaaggggattcgtgacactttacgtgagcagcctgagcgttttatggcttataacaacggcattgtgattgttgccgatcaggtcaggcttggtgaggcaccgggaggtggccctggtattgcgtggatgcaggggatgcagatcgtcaacggtgggcagacgacggcttccatgtttttcaccaaaaagaaattcccggcaaccaatctgcgtaacgtgcgtgtacccgcaaaagtcattgtgctgaaacagacgaataatgcacaagaagagatgttaattgcggatatttcgcgcttctcgaatagccagaataaagtcaatatttccgatctgtcagccaatcgaccggtacatgtacagctggaaaaaatggcaaacacggtgtattgcccggacggatacagtcgttggttttacgaacgagcaaacggcagttataaggtcatgctggaacgagaaggtaaaacaccggcgggcattaaacggttaaaagacgcaattcctccatcccgtcggataacgaaaacggatttcgcaaaatatcactgtgcctggctccagcgtccggatttagtcagcctcggtgggcagaaaaactttgccgcattaatgacgatgattgacaaggatactgagcgttatggggatgaactgaacattgaaacttttaaaaattacattgcacaggctattatttataaaaaagcctataagttgattaattcacttttccccgcatttaaggcgaatatcgccgcctatactgttgccgcctattcacatctttatggtaacaaaacggatctggcagagatctggaatcaacagggtatcgaggaaactatggggaatcgtcttgtcagcttggctcaccgagtaaatagccttctgactgaatcggcaaatggcaggatgatttctgaatgggcgaaaaagccggagtgctgggactacgtgcgcagtaaaatctatttctacgcacagggaaaaaaggatgacttctcgcatggtgaaattgcatga

SEQ ID NO: 249258 - DNA, 528 bp, Klebsiella pneumoniae
atgctgaaaggcaatctgtttaaccagcacctgaatgcccacatgagttccggcggccatgccgacggaagttacaccatccccggcttaggtggcagcctagtttccgggtataacgccagattcgccaataccacactttctccctttgtcagtttcacgggcttcatctcgcaaagtgatgattactggctatcgaacggaatgcaggcacatccttgtacggctaaatctgcgctggagcaagtcgggtttcggctgcgccagaatattactactcacagtggtatgcagttcattccgtggctgaaaatcgcgctggagcaggagtttgtgcattacaacccggtcagggttaatgacgataatttcaataacgatagcgccggaacacgaggaagctaccgggctggcatcagcgccactctcacgccgcacacgcatatttacgccaacataaattacgagaaaggtgatgggatggaatcgccgtggaccgggaatgcgggtttaagctaccgcttctaa

SEQ ID NO: 249259 - DNA, 1134 bp, Klebsiella pneumoniae
atgacaccgtatatccaggcgctgatcaacatgaccggcgataaactccagcaacggatacagaaggatccgacatccgcttccgatagcctgctgtttatgggcaatcaacatgacacggttccgcgtcgtctgttgcaagatccgctgttatcgcccagagataaatttgcctggcaggtgatccgaatgcaggcgcaggacaacggtggcgcggtgttcccctcttacagcgaattgcaggtgcagctatctaaccgcccgcaggatgaaaaagcctcgcgcagtaccgtcagccgggcattgctgatgctacgcctgacgcgctggctcagcctgtgccataaggcgcgggatcgggtatccgggcgcatcctcgggaatatctatgccctgcacgatgaaccgctgagcgtgctggacgccgtgcgctttgatgccagctatcttcatttgctggagcagtgctcgcgacatgaaaacaagtccatccgcgccactgcgcaaggtattttgtacgacattcgccaggacaccagtctgcgctatctatcctcgcgtatagagttgctggaagaacgcgcccgctggcagcagcgccagtctcctgaggagactaagccagaaacgtccggtctcaatacggtaccaggcaaaatttcaccgagtaccgaatcgggactaagccggaaaccggggcctggcggcttagtctcaaatcaggaccgggattctgtacgtactgtatctacagatatttgtaatagtactaccgcgcgcgcgaacaactcgccgccgaactggccgctggaaattccattaacccgtcctgaaaaacagcttgttttacaggccatgcagaatctgccgcctccgctgcgccaggaagtgctcaatgacgcagctcaacgcgttgcccgtggcggcatacaaaacccgctcgcctatctgctggcgacactacgcaaggttcagggcggtgagtttaatcagtatcggcgaggcaaagcgacagtgccggagtttgtgcagcctgtggtttcagagccagacataccagcaaggccgcgtcaaaaacgggatatcagtaagttggttgcggagattcgggcgcagtgtttggggagtggctga

SEQ ID NO: 249260 - DNA, 540 bp, Klebsiella pneumoniae; identical to SEQ ID NO: 128885

SEQ ID NO: 249261 - DNA, 1485 bp, Klebsiella pneumoniae
atgaacaacaagctgacttcgacggaactccagtcccgcctgctacagggcaattttgatcggggaagatcgcccgatgaacggttcgccgatccgctaacggaaacctcgatgatcgtgacgctggaacaacttcgcccttacgatctcaatccgcgactgatgcgtaaccccagctatgacgatatcaaggaatcgatccgtcgtcgtggactggacacgccgccgccgatcacccgtcgtcccgatcaggagtggttcatcatcgccaacggcggcaatacacgcctgtcgatcctcaacgaactgtggcacgaaacgcatgacgaacggttctggcgcattcagtgtctgtacaagccgtgggccggtacatccgatcaacccatgctgggcgaactgcgctgcctgatcggccatctggcggaaaacgatatgcatggcaaactcagcttcatcgagcgggcgctggggatcaacaaggcgcgggaactgtaccagcaggtggaaaagtgccagctttcgcaacgagaactggcggagcatctgaagaacgacggttaccccattaatcagtcgcatatcagccggatggaacaagcgctggaatacctgctgccctgcatccccgaagtactctacgccgggatgggccgctcgcaggtggaaaaactgctgtcattacgggcggcatcattacacctctggcagcgccacgctgatggagatgcctgttcctttgataatctcttttcctccgcgctgtcgctgttcaacgaccagcccgaagacttcgccatcgaacgggtgcaggatgagctgctggggctgatgagccaagagctgaacgttgactacaatctgctgttgctagacgtcgatccctcagagcaaaaacgtcaggccgtgctcggccctacgccggaaccaccgccttatgttccaccggaagaacccgaaccgcgcccgataacgcgcaggcgtaaacctgaaacagatgaagaggacgttggcgcgcctgctcctctgcctgaaccagaggaagcaccatcgctattgtgtgaagggaccgaacccgtcacagatatctggcgcatcccacaactgtgggataccacggagtccttacgctcggtcagcgatcgcctggcgtgggatctggctgagcattacgccatcgacgaccggataatttcagatgccgatgtaaatggcattggctttcatgtgatgccattcgcatcagatcaccccatgttcacccggccacagtcacgcgcctgttgggcgctgctagcggcgctcaatgagatcccgctaacggaagatctagcctctgcactgacgcctgggctcttttttcaacgtaatgcagacggcttcttcttcagcgaagaatttcttattaaagcattccggctgatccgtattgtccgccggatcaaagagttccagcaggaggcacaacatgctgccgacgattaa

SEQ ID NO: 249262 - DNA, 1356 bp, Klebsiella pneumoniae
atgagtaagcgcaagcggccacaaccgccccactccgtcgaagcggaacaatcggtactcggcggactgatgctggataacgatcgctgggatgacgtcgccacgcagatttccgcgcaggacttctttatctcctcgcaccgcactatctataaccatatgcaaaccctggtcgaacaagggaaccctatcgacctaatcaccctgagcgaatcgctggaacagcaggagcagctctgccaggtgggcggcttcgcctacctggcggagctttccaaaaacacgcccagcgccgccaatatcattccctacgcgcaatacattgccagctatggcgaactgcgccagcttctgttattaggcaatgaactgagcgatatggcaggccagccgcgcagcaatgtggccgatgtgctggccttcgccgaacaaaagctgtttgccattgcgcagtcacatcaggatggtggcctgaccgatatcggcacctgctttgacaacgtactggcaggcatcgctcagcgctacgaggctgaacgcggtagcctcagcggcacgccttccgggctggaacagctcgatgccctgacctgcggcttccagcctgccgacctgattatcgccgctgctcgtccctcggtcggcaaaaccgctttcgccctgacgctatgcgtgaacgcgctaatactacgtcccacacagccggtgcaaatctacagcatggaaatgtcgtcggagcagctactgctgcggctggtttctctgattggtcgcgtctcgcagacccggctacgcagcggcgatctcagtgatgacgactggcagcagattggcgtcagcgccagtatcctgatgaacgaatggaaagatcgtctgctgctcgacgactcagggatcctcaccccatccctgctacgcagtcgggccagacgatcgctgcgccagtacgggcttccttcactgatcgtggttgattacctgcaactgatgcgctgcggcggcgcggagaatcgcaatcaggagatctcaacgatctcccgctcgctgaaagcgctggcgaaggaactaaattgcccggtgctggcgctatcgcagcttaaccgggcgctggagtcacgccttaacaagcgcccctgcaatgccgatctgcgcgattccggctctatcgagcaggatgcggatgtcatcttattcctctaccgcgacgaactgtacgatcccaacacgctggatcgaggtatcgccgaagtgatcgtcagcaaacaacgcaacggcccggttggcacagtgcgaacccgctttatcagcgatcaaacccgcttcgaatcgctcagccagcagggagtcgggtcatga

SEQ ID NO: 249263 - DNA, 375 bp, Klebsiella pneumoniae
atgaaacggaaaatctggcgggtattttgctcttattacgcccagcatccctttgagaaagacgatgaagtgatcgtgttctttgaagccgccgatcgtgaagaagcgcgggaaacgctgccggtattaatgtcgctgctctggcatatcccaccggagaaggtggactgctacaacctggaggatgaaaacgaactgcgtgatagctctgactcgctgaccgcgcccagggactggccgctgtttgaaatcggctggtccaacaataagccgctctactccagcgatttaccgcttttactgctaccgccgcatcaacaaatccggcagtgggaaacctttctggcctgtcaggagggtaatcgagatgagtaa

SEQ ID NO: 249264 - DNA, 885 bp, Klebsiella pneumoniae
atgaaaaacgcagatgcacttgatttacctacactaattgccgccatcctctccaccaaaggtggcgtggcgaaaaccaccgatacggcgaacctcggcggctacctggccgaccaagggctgaaagtcctgatgattgacgccgatatccgccagccgacgctcagcagctattaccctcttgataacgaagcccccggcgggatctacgagcttatcgcgcaaaacgagctggatccagccatcatcatctcacacaccaccattcccggactggatatcattatctccaacgatccacgcggcgaactgatgagcctgcttcaggctgcgccggatggtgtgatccgcctgcgccatctggtacgccagataaccggctatgatgtcatcctgatcgataccattggcgcacgcaccatcgcgctggaaatggtgctgttagccagcgacctcataatctccccggtattgccggaaatgctctccgcacgcgagttcctgcgcggcacgctgcaaatgtaccgtgacctccagcccttcacccgctacggcatcccactaccgccactgaaggcggtgatcaacaagctcgaccacactaacgatgctcgcgaaattcaccataacctgcttcaggttctccagcataagcagaaagaacaggagctactggtgcccaccgagatactgatgacgccggtttacgccagcgtggcctatcgccgggcggcatcgctgggactaccggtacatcgtctcgatacttcccgcgccagagggcgggcaacaccttgcgccgccgaaaccatgcagatgctggcgaaagaactgtttccccaatttctcgccctgccccatcagcggatggagggtatcgcatga

SEQ ID NO: 249265 - DNA, 123 bp, Klebsiella pneumoniae
atgaaatatcaggaaaatgacagctttgtcattttcccgtcacgcgttgaacagagcccgctgcgtaaagtatccgccattgataaatcgccgaaaaaccgtctgccgccatgcgcccaataa

SEQ ID NO: 249266 - DNA, 294 bp, Klebsiella pneumoniae
gtggcgcacgtcttcggtgaacgcactctggccacactggagcgtcttctgagcctgctgtcggcctttgaggtcgtggtatggatgacggatggctggccgctgtatgaatcacgcctgaagggaaagctgcacgttaacagcaagcgttacactcagcgcattgagcgacataacctgaatctgcgacaacatctggcaaggctgggacggaagtcactgtcgttctcaaaatcggtggagctgtatgacaaggtcatcgggcattatctgaacataaaacactatcagtaa

SEQ ID NO: 249267 - DNA, 198 bp, Klebsiella pneumoniae
atggcgcgcctttatatcattaacgcaactgcattaaaaccgacctgtaaagcgggtaggcgaggcggggaaagcactgcgcgccagcgtacttttgcgcatttattttcgcagcctgagcgcgtcgctgtgccgctcaggttcgcgagggtgtcggtgggtggtgcgggggtgtttgagggcgtggcgggcttctga

SEQ ID NO: 249268 - DNA, 1434 bp, Klebsiella pneumoniae
gtggagtttgccggcataccggacagcccggacgtcggctaccggcctgagcccggcgcgcgtccggtgatggccgggacgctgccggcccgcgtgaccagcacccgggaaaacgacacctacgggcatatcgacaaacacgggcgctaccgggtgaatatgctgtttgaccgggcgcgctgggaaaccgggttcgagagcctgtgggtccgccagtcgcggccgtatgccggagacacttacggcctgcacctgccgctgctggcggggacggaggtggcgattggctttgaggatggtaaccccgaccggccgtatatcgcgggcgtgctgcacgactcggcgcacggcgaccacgtcaccattcgcaatgacaaacgtaacgtcctgcgcaccccggccaacaacaaaatccgcctcgacgacgagcgcgggaaagaacatatcaaggtcagcacggagtacggcggtaaaagccagctcaatctcgggcatctggtggatgctgaaaagcagccgcgcggcgaaggctttgagctgagaaccgacagttggggagctatccgggcacagaagggtatttttatcagcgctgacgggcaggtgcaggctcaggggcaggtgctggcgatggagccggcggtcagcaatctggctgaagcccgggagcagatgatgtccatctccggtgacgcgcagaaggcgaccgcgaacccggccgatctccaggcgcaaattaccctgctggagcagcagctgacggacctcaaaaaatcggtgctgctgctcagcgcgccggaggggatagcgctgaccagcggggagcatctgcaggtctcagccgggcataacctgattgccacggccggaaagaatgcggatgtcagcgtggtgaaaaatctgttcatcggggtgggcagtgccctgagcgtgtttgtgcgaaagcttgggatcaggctgatagcgaatcagggaccggtacagatgcaggcgcagaatgacctgatggcgctgcttgcccggaaggaaatcagcattgtcagcacggaagacagtatcgaaattattgcgaaaaaacgggtcacgataaacggcgggggaagttatatcacgctcaatgccagtggcattgaatcagcgacggcaggtgagtacagaacaagggccgggtattacgtcaggcgggaaaaagcgcagcataagcctgacattgcacctttagctaatgcgataaatgacgacagccataatattcgctacctgtgtacagatgataatgggatgccgatgctgaatacaccttacagggcctttctggctgatggctcggtattagagggtgtcagtgatggcgaggggtatacgaagttgtttacttctgcacaggtacaggatgttctgctgcatatgataccggaggccatcaatgcctaa

SEQ ID NO: 249269 - DNA, 2691 bp, Klebsiella pneumoniae
atgcatgccgctaaccgtgccgacctcaacgtcctgccttcggcggtgatgatctacgatgagcgcgaacgactgcaggcctggaatgataaggtggcgctgttttatccaacgatcgcgccctggctcgccgtcggcgcttctcttgagagcctggcggagaagtttatcgatgccggttataacattgaccctggccggcaacagacgctacgcgagacgattatccgcaactgccgccaggcgaaccattgcgaagtccgccagtcgggcaaccgccagatttacgttcagcatcagcggctggcggatggtggaattgtcagtctgcataccgacatcaccgagcttgacgaggcccgacgcgcacgtcaccagcttcacgacgattttttattcactgcggagtcgatccagatcggtatctgggactggcaggtctcccacgacaacctgcaggtgaatgacaccctgctggcgatggtcggccagtcgcgggcccagtggcgctatccgctgcgttttatactcaatctggtccacgaggacgatcgcgctaccctgcagcaggcgatgatcgcctcgcaaaacgagcatatgccggtttttgaatgtgaacttcgcgtccagcacccgacgcagggctggcgctggatgctgctctccgggcagattgtcaccctcaatatgcagcagcaggcagagcgggtgatcggcacgttgcaggatattacccggcgcaaagccgcagagctgctggccattgaggcagcgaaggaggcccgcgaggcgaacgaagcgaaaagcgccttcctcgccaatatgagccacgaaatccgcaccccgatgaacggcattctcggcatgacgcagctgtgcctcgacacgccgctgaccgcggagcagcgggagtacctttcgctggtgatgagttcagcccagtcgctgctgcacattattaacgacattcttgatttctcacgcattgagtcgggcaagatgcaggtggacgaagagccgctggagatccgcccctttatccagtcgctgatccgcccgcatatgcccgccgccagcgaaaagggtattgagctgctggtggatatctcccctgcggtaccggaggtgctgatcgtcgatggcccccggctgcggcaaatcctgactaacctgttgggtaatgcgctgaagttcactcatcagggggaagttctgctggcaatagcgccggccgacgacgaaagccgctggcgctttcgcattcgcgataccgggattggcatcgccccggaaaagcaaaaggcaatcttcgaagccttcagccaggccgatagctccaccacccgccgctacggcggcaccgggctgggattaaccatttcggcccgcctggtcagcctgatgggcggcgagctgacggtggagagccagcccgggacgggcagtgaatttgccttcaccctgccgctggcaggtctgcacaccgcctccgctaacgccccgccgggccgcttcaacaatgagcgggtgctggtggttgacgacaacagcaccaacctgcgcctgctcgacaccatgcttcgccagatgggactgataccgatctgcgtggacaacgccagcgaggcgttacgtcgggccgccgaagggccgccctggccgctgatcctgctggatgcacagatgccggatatggacggcgtatccctggcgctggagctttccgccctgcctgaagcccggcaaagccagattattatgctcagctccatgagccgccattttgacgccaatatgcttaagcgcatcggtatcgcccactatctgcataaaccggtggcgcagcgcgaactgcatcaggttatcgccggtattctccttcccacgccggtggtggcgacagcgccagcccccgttgcggaaccggtcagggaccagaccgggctgcatatcctgctggctgaggacaacctggttaatcaaaaggtcgccagacggctgctggagcagttgggtcaccgctgcgaggtggtgagcaacggccgggaggcgctggagcgctggcgcgcagcctgctgggatctcctgctgatcgatctgcaaatgccggagatggacggtgaaaccgccatccgtctgctgcgcgaagagacgccggcgctgggcaggcaacatcagcccgcgatggccatgaccgcccatgccatgcagggcgatagagagcgctgtctggcgatgggcttcgacggctatatcgccaaaccagtgagtcttgaggcgctacgggaagccatcgcccgcgtcggcgcagcggaagatagcgatttggaggaagagaaaggcctgccggacgaggcccacctgctaaaacagtgcgcagacgatcctgagctggtcgaggagctgctgggactcttcgctgaagggcttgatgctgcgatcatcgccctcacccacgccattgatactaatgacagggagacgtggcgccgtaccgcccacaaactgcgcggcgaggcggtcaccctcggctttcaacgccttgccggggtgctccagcaaatggagagccgggcgaagtcgcccggccagaccgtgccagatgacctgcgcgacgcgctggccgaggcaaccacaggctgccaccggtggctacatcgcagatcgcaggaggtcctccgtgatcgttaa

SEQ ID NO: 249270 - DNA, 351 bp, Klebsiella pneumoniae; identical to SEQ ID NO: 180567

SEQ ID NO: 249271 - DNA, 3381 bp, Klebsiella pneumoniae; identical to SEQ ID NO: 200126

SEQ ID NO: 249272 - DNA, 339 bp, Klebsiella pneumoniae
atgagcctgaaaccgggtgatatgaactgtcgcattgtgattagctacgttcagtccggtcgggggccgctgggcgaaccgctaccggaaaagcaggttgaatcgggaaaagcgtgggcaaaacgggagctggtatcggggcgaaaagtccgcacgctggatcagcagcaggtggtggaaacctgcctgttcacggtctatccgggcgtgctggttgatattgactggaaaatcacgacgaaaaatctggtttataccgtccggaatatcgaccgcaaaacagaccggatcattatcacgggggaggctgacgggcggcatgatagagctggcgattaa

SEQ ID NO: 249273 - DNA, 780 bp, Klebsiella pneumoniae; identical to SEQ ID NO: 248553

SEQ ID NO: 249274 - DNA, 930 bp, Klebsiella pneumoniae
atgtcatattttgagcctgttctattctcggatcctaaagagtttgaacgatatgtctgcgaatatttttcaattttatatgacacgaggttttcaacatatggaacaccaggtcagaatcaaaatgggatagatggacttcactttggtccatcaaatgatggtaaaaaacatgtaattcaatgtaagaacttgaattacagtgacttaacactacagattatccaagacgatattaataaagctaaagaacttaaagtagagttcgatgtttttcattttgtcacttcagcaaaaaagaagacaaagattcaaaatgatatatctaacaaaatggatgtacttactaacaataatgactatgaatttgagattcatttctatagtgacttctttaatgattcaattaaaataaaagagatagtggataagtattttaacttcttatcaacaaccacggttgaaagcaaatataaaagagatgtttccaatattgttcgtttggcaaaaagtatcgactcagcatttgtggatgttccttattatatttcaattgcaaataaagtgatcactccggcttattctacgcttgaagctattaactattttgactgtagaacttcaagttgtggtttttatgatcaaaaacttaatttatatattgagatgtttattgattacagggaaagaataaataggtatcatttattttatacatatgaaccaagtcgttctgaatctgaatttggttttttaaatctggtttataatggggagcgaaatgaactatcctgcataaaaggacacttgttaaacttagtagagaacttttctgaaacatttcaaggttttgtttcttatattagagataattactatgaatttgaaattcacaagaattactacatatatcctttccagagaagatag

SEQ ID NO: 249275 - DNA, 162 bp, Klebsiella pneumoniae
atggcactcttcgccatcaaaatcttgctggcaactatcatcagcgagctcgaacgccgctccgcaaacggtgagcagcatttcaataacgcgacgatgttctgccgttacgcaattcaccgacgcaaccggctcgctgtcagccttgcggcgttcctgtag

SEQ ID NO: 249276 - DNA, 174 bp, Klebsiella pneumoniae
atgcgttatattaaagaacttgaaggactccgcgggctaatggctctttgggttgtttttggacatagtcttgcggccctgccacttattaatacgcatttgcctccaaccgcgttaaattcgtatgccgtcgatgtttttattatactcagtggttttgtcatttttttatga

SEQ ID NO: 249277 - DNA, 237 bp, Klebsiella pneumoniae
ttgacgtttcgcgggaacctgctgctgtattccctgtggtatgaacttcacccgtttgagaaccttcgccgcaaggggcatcactgccacggcctgacgcacctgtcctgggcagaacgcaaaattttttaccgggttttaggtaaaaaattttgtgggctgttcatttaccctggacagtcagtgcggcaggttgtggctgtctatgcccccggcgacaggggcttaaacaggtga

SEQ ID NO: 249278 - DNA, 420 bp, Klebsiella pneumoniae; identical to SEQ ID NO: 11035

SEQ ID NO: 249279 - DNA, 453 bp, Klebsiella pneumoniae; identical to SEQ ID NO: 7641

SEQ ID NO: 249280 - DNA, 126 bp, Klebsiella pneumoniae
atgataaatgtctacagtaaccttatgtccgcatggccggccacaatggccatgagtccaaaactgaacagaaatatgccaacgttttctcagatatgggactatgagcgtagactggccccctga

SEQ ID NO: 249281 - DNA, 666 bp, Klebsiella pneumoniae; identical to SEQ ID NO: 7649

SEQ ID NO: 249282 - DNA, 264 bp, Klebsiella pneumoniae; identical to SEQ ID NO: 7651

SEQ ID NO: 249283 - DNA, 240 bp, Klebsiella pneumoniae; identical to SEQ ID NO: 156680

SEQ ID NO: 249284 - DNA, 213 bp, Klebsiella pneumoniae; identical to SEQ ID NO: 7709

SEQ ID NO: 249285 - DNA, 906 bp, Klebsiella pneumoniae
atgagtaaagagctttcatttacaacagaactgccggaatggtttgatttagagcagtacatcccttttaaaagcatgagtaataaagaattagctctgcaattacattatcgattgcatacattgatgataatgaatttaggctcatcggatatattcgattcgatgtataaggatggcgttgttatccccgaaaatgaaggctctaaaaaatataattcttgggtaaaagaaaaacgctcagaaggtaggagacttagccaaagtcttgcaatttctccgataaataggactgaattatcatggatggcgatgcaaaaggagagtgattcgtataaacacccacttcctgatgatgttcaaatcttgttatctggagtaaaaaagaataataatgcagaaagaaatattgttctttcagttgatgatataatggctctgaaagataatatggaagaatatcacaagattgaaaaagaaagtatagatttgctattgcctaagaatagtaacattcatgttaatatcgacttatccatgcccgacaggtttattatggaaggattgaaaggattgttgtctgtatggcgaaaacaattaaatattccatcacccaatccaaagcttggcaaatctttatccattctgagaagtaatctcataaattatcgggcgtttcaaatcattgacctaaaactttgggcgaaatcgaaagaattgcgttatagggcttcttttctacatacagttatattcccagatggtgataaaacacttaacttggatgattttaggaagaaggccatcccattcgctgatgatgtgctagatccaagactgccatctgcaatgttggatatgtgtcgcacggaagaaaaaaacggggaaaaatcttccgaagaataa

SEQ ID NO: 249286 - DNA, 516 bp, Klebsiella pneumoniae
atgctgacgctgaataaaacaaaggcagctttgcagagctgccaatgtcaccacgaaaaaccgaaacagattaagcataccagggttaatgctggtggtcaaagaatgagccagcgcaattctgcgcctgctgattatattcagtttttttcttcgtctttggcttttttacgttggcggcgtttgatctcacctttgattgaggcaacaacaaaaccggccgtgctttcgccttcttctttcactttttcaagttcactaatcaactctaatggcacccttgagacgatttgttgtgatttgttatttcttgaacctgttgccatgtctgtgtttccttctgattggtggcattcagtatatgcaaaaagaaaacacaatcaatacttgaaagtggcattcactttgttctatcgtaagtgcatgccacctgttatggtgaagcataaatggcaacgccccggagtgcttggaaccactaccgaggcgtctaaccaaaaacgttatcagaggtaa

SEQ ID NO: 249287 - DNA, 345 bp, Klebsiella pneumoniae
ttgacctcaacgcccacgctgccaacgtttgcagccccgaccgatacggaacgcgcgaccctcgcggcgatcctgaatgataccggcctacgtgccacagtcccccggattaacatcctgcattacctgaacataaccgacactcccataactgcggagatggtttcgcgttgcgtggacttgccgctctcaacggcatacagaacgctcaccgcgcttgagattaaccatctggcaggcgtgactttcggatgcggggacgtgactcgctggttcagatttacaccggatactccccagcattgcccggcgtgcgggcagagtttttacagcgaatattcctga

SEQ ID NO: 249288 - DNA, 246 bp, Klebsiella pneumoniae
ttgaaaaaaatacttctggttgtgctgggattgttagcggggaatgtttacgcggatgatgatggttcgccggaaatgaaggcagaagcgaaggccttaatccaggcagcggactaccaatgtaacaaggtgaacggggtttaccccgcccactttagcaacgctttcactgtgtactgcgatgatgtgtatcagtacaccatcaaggatcgcggcggtcgctggactgttgaagtcaacgattga

SEQ ID NO: 249289 - DNA, 1413 bp, Klebsiella pneumoniae
atggatgggaagatttttacccgcgatggcgtgaatcagaatcccacggatctgatgttgtcaattttgctcttcatgagagccaacgaggaatccctcaccaagcaaaaacgtgcctttgaaaccacgcttaaactgattgaacgatatcgatccgggcttcctgtaaatataaaaagtgcgggttcttctccctggtggatcgacgcttccgggccgaataacgaagccgtaaagccccactctgtgcacttcaaagccgcaaaagaggcggtaaggctcttactgtccggctggggtaactatcgggtgaccaactacctgaatgataacagtgagatttatccgccaccggtagggaagaagagtaagaaccaaagaaaagaagtgcgctggacggtgccgaatattaagaaaatgcggttgaatagcgcgttgatgggggagaaggttttaaccctgaacaatgttacccatcgcctggaaaactattttccgcccgtctgtacacctgctgagtttgcaagacttcaagatgtagccagtaacaataagatgccgcagggggagcaaaaacaggtgatcactctgctctctggtatggggattctgcgttgtggtcactgtggtggtgccatgacctcttttagtaagaagggcaaaatccgctacatgtgcgaatcaggtaaaaaacgcatgtcgtcttgcaaggcatggagtgtctcgggggaattagttgagcggtgtttgttacagccgttaattactggctatatctcgctggtgatggataagcaggattcagagcaatccatttccgggctgatagattctaaacggggtgaattggaggctatacagtcgcaaatcgataacaccacaactgcgatctcaatgggcggaaatcttgactccctggtggcgatgcttcaaggatttgagtccagaaagtccgccattttggttgatctggacaagttaactcagcgcgaattattgcaaggttcccgtgatcagcagattgaaaaaatcgttgatacgatggagttgataacccccgaattgcttgaggacacaacagatccagaccggttgaatatccgggaggttgtccgggcggttatagctcgcgtcacgatcggtaagggcgaagataaggccttaaagctgatttttgatgtttatgatcgtcaacagtttatttaccaaggcgagattcagaccgatgatagaggctggattcgccgagggtactccttacatatcgaagatcagagtgttgagatgcatgatggcattgagcctgacctgtcttcaaaattgagcgagttgataaagacgcagcatgacaaagtggatgagatgttatctgcttttcctccgctgaaagcgtcatggtttgttagcaagtag

SEQ ID NO: 249290 - DNA, 264 bp, Klebsiella pneumoniae
atgataaaaattaacacttacgagttttttatatcccgcacggccgccgacgcgccccgtcgttcaggaaataaaggccagtcccttaccaaagattgcgcgaacgggcaggtggatcccctgctggcgtgccttgtgacgcaggcggctaaccaccacgtcgatccggtgcaggtcaggctcgctttcatgggaaaacaggcaggcatggagatccagtttgctgcacacttcgttgcgattgcgcatcaggagctggactag

SEQ ID NO: 249291 - DNA, 444 bp, Klebsiella pneumoniae
atgctgggctactggcagcgccctgacgcgacggatgagattatcaaagacggctggctgcacaccggggatatcgcggtgatggatgaagaggggttcctgcgcatcgtcgatcgcaaaaaagatatgatcctggtgtcgggttttaacgtctatccgaacgaaatcgaagatgtggtcatgcagcatagcggggtgctggaagtggcggccatcggcgtgccgtccggcagcagcggcgaagcggtgaagattttcgtagtcaagaaagatgctgcgttaaccgaagaggcgctgattacgttctgccgtcgccatttgaccggatacaaggtgccgaagctggtggaattccgtgacgaactgccgaaatccaacgtcgggaaaattttgcggcgagaactgcgtgacgaagcgcgcgctaaagtggacaataaaggctaa

SEQ ID NO: 249292 - DNA, 1242 bp, Klebsiella pneumoniae
atgacgacgaataactatttcagaggtgatgcagtgaaaaaggtttggctaaaccgttatcccgcagatgttccggcggagataaatcctgaccgctatcaatccctggttgaactgtttgaacatgccaccacccgttacgccgaccaaccggcgtttatcaatatgggtgaagtgatgacctaccgtaagctggaggagcgtagtcgcgccttcgccgcttatcttcaggaggggttggggttacagaagggcgatcgcgtggccctgatgatgcctaacctgctgcagtatccggtggctctgtttggcatcctgcgcgccgggatgatcgtggttaacgtcaaccccttatataccccgcgcgaactggagcatcagctcaacgacagcggcgcggcggcgatcgtcatagtctccaactttgcccataccctggaaaaagtggtggcgaaaactcaggtccagcatgtgatcctgacgcgcatgggcgaccagctttccaccgccaaaggtacgctggtgaactttgtggtcaagtacattaagcgcctggtgccgaagtaccacctgccggacgccatctcgtttcgcagcgcgttgcagcacggctatcgcatgcagtacgtcaagccggagatcgttgcggaagatctggcgtttctgcagtacaccgggggcaccaccggcgtggccaaaggcgcgatgctaacccaccgcaatatgctggctaacctcgagcaggtcaatgccacctacggcccgctgctgcatcgcggcaaagagttcgtggtgaccgcgctgccgctgtatcacattttcgccctgaccatgaactgcctgctgtttatcgaactgggcgggcaaaatttgctgatcaccaacccacgcgatatccccgggctggtgaaggagctggcgaagtatccttttaccgccatgaccggggtcaataccctgttcaacgccttgctgaacaacaaagagttccagcagcttgatttctcctcgctgcatttgtccgccggcggtgggatgccggtgcagcaggcggtggccgagcgctgggtaaaactgaccgggcaatatctgctggagggctacggcctgacagagtgttccccgctggtcagcgttaacccgcacgatattgactaccacagcggcagcattggcctgccggtgccctccaccgaagccaaactggtggatgatgatgataacgaagtggcgccgggttag

SEQ ID NO: 249293 - DNA, 177 bp, Klebsiella pneumoniae
atggcacacacaataaaagcgctggcgatctcgatcggcgcagcattagcgttaacgtcattgccttcccacgcggagattacgctgctgaaacaagatccgcaggcgggcgatccgttaagccggcttaactttaccgtcggcggggctttgttgaataaatcgaacttttgctga

SEQ ID NO: 249294 - DNA, 267 bp, Klebsiella pneumoniae
atgcgcaggatccgattcactgaacaccagatcatcgccgtattgaagtccgtcgaagctgaacgtaccgtcaaggatgtttgccgtgaggccgctatttcggaagccagctattacaactggaaggcaaagcatggcgggatggaagcggtcgatattaaaaaaatcaaagatctggaagacgagaatcggaggcttaaacagatgtttgctgatctcagtcttgagtgccgggcactgaaagacttcatcgaaaaaaagctttaa

SEQ ID NO: 249295 - DNA, 447 bp, Klebsiella pneumoniae
atgaacaaaccaaaatcccaacgcatcaccccagccgccatgtctggcgagcagatcgcagacgccatcatgtacggtacgtacaccaaaaccgcgctttggtctttcatctccagaaatggtggagcggatgcggcatatgctaagtacccgcaactggccgttgcacttcatatcctgaaacaggaaaagaagaaggcaaagagtgctcgtgcggtcaaggcgatccttaaaccgttatcccgccagtacgctgacggtcagtcgctgactgagatattagccccggtgctccagggttaccgccgcctgtaccgtgagaaactcaatctggacatgacgccggagcaggtgattatgttcctggtcgccactgatggtgtggagaacctggaacaacacggttacagcgttgcgggcgacttcctgacagctacgacagcgtga

SEQ ID NO: 249296 - DNA, 135 bp, Klebsiella pneumoniae
atgtcgaacagcagcattatggcgttagcgctcgcgcttcgcaaccgcgccaacggaagacgggttaaaatcccggcgatgacggggatggagttgcgccagttgctggcgtggctggaagcattgaaaatatag

SEQ ID NO: 249297 - DNA, 180 bp, Klebsiella pneumoniae
atgaatcttatagacgcctggatcgttgaaatcataagcgtgagtcgtggcgagattgcgccgtattggttggttgaggcgaaagtaacagcttatggaagggagtcaataaccacaattctgaagaaatcagaagaggaagccaaagccgttaaagtaggggatgtagttcaaatatga

SEQ ID NO: 249298 - DNA, 441 bp, Klebsiella pneumoniae
gtggaagtgagtaataacggcatcaacatgctgaaaggttttgaagggtgcaggctggccgcttatcaggattctgtaggcgtctggacgatcggttatggatggactcaacccgtcaacggcgtgccggttggcaagggcatgaccattacgcaggaaattgccgatagcctgttgcgtagcggtctggtgcagtatgaaaaaggcgttacggggctggttaaagtcaccatcaatcaaaatcagttcgatgcgctggtcgattttgcctacaacctgggcgtaaaggcgctggaaggttccacactgctgaaaaaactgaatgctggcgatttcgccggggctgcggctgagtttccgaaatggaataaagcaggtggcaaggtgttgccggggctggttaagcgtcgggaagcagagcgcacgttatttctggcctga

SEQ ID NO: 249299 - DNA, 534 bp, Klebsiella pneumoniae
atggggatgttgtcacgctggaaagtgattgtttgttttgtgctggtcgctgctgctgtatgggggtttagccactggcgttactgcgccggttacggtgatgccaatcagcactggcgtgaaaagtgggcgcaacgtgatgcacgcgacgccaccgcgctggcgcaaagacaggctgaggccagggcagaagagcaacgccgacaaggtgaaattgatgcgatcagaaaacaagccagccagcagcttgctggcgtgcaggctgatgccgatcgtgcccgtgctgcttctcgtgggctgcacgacagggccgacaaactcgccaggcaactggcagaccgtgaacgcgcctgcggtgccggaactcccggcagaagcgaggcagaaaccagcggcgccgtactgctcgccgacctgttccgccgcgctgacgatcgagcggggcaactggcaaaagatgctgatgaagcaagagccagaggattagcctgtgaggctgcatatgatgcggttaagtccaggagggataagtaa

SEQ ID NO: 249300 - DNA, 600 bp, Klebsiella pneumoniae
atgacaagagcagaacttaatagcgatctgattgccacggtggccggtgatattaccgtgtttaattatgatggtgagacacgcgaatatctttcttcatcagttgaatatctgcctgttggcgttggcatccctgccaactcatgtactgacgccccgggcgaggttaaagacggttcagccatttgccggacagtcgattttaccgcctgggaatacgtcgccgatcatcgtggtgaaacggtgtacagcactgaaacaggcgaatcagtgatcatttctttgcctggcgattacccggaaggcaccaccacgctggcgcctgccacgccttacgatacgtggaacggtagcgagtgggtgacagatacggaagcgcagcacgcggcggacgtggaagcggcggagcagcagaaagctgcgctactgcttgaagcgcaggcaacgatcagcttttggcagacggagctacagttaggcattatcagcgatgaagataaagccagcctgaacgcttggatgatctacatcaaagccgtacaggcggtggacacgtcgaaagcgccggatattacttggccggataagccagaggagtga

SEQ ID NO: 249301 - DNA, 1050 bp, Klebsiella pneumoniae
atgattcttaaaggggtgatagtgaaaaggatcttttggctggatgcagcaagggccatagcgattattcttgtggtatttacgcacgctcatgaaagggccgggatccatagtgaaatgctaaggagttttttctatagcattgaccgattgggtgtaccacttttttttatgatttctggtggtttaatattacctaaattagctaattgcaacttgctggagttttacaaaaaaagaatcccacagtttgttattttactggtggtctggtcgataataacaaactgcataaagtattttgtggaaggtaaggggttttgggaatctttaaccttgtctgctgttaataataatgggatttatccaagtaattatggtggagcatcacagatgtggtttatgtattcaataatacaactatatttgattgcgccatttttagctaaattgttaaacaaagcttccaacaaagagataattgtatttcttttggtttgcatactatttaatcagtttaaacacacagctactttcttcggtggtgattggggtgcgctacatcgcatgggaacggattttacaggtccctacctgatttattttattattggctatttaattatcgaacgttctatttggtatggagagagatttagatacttgattatatactctctgataacaatgattcctattgcctctttggtactgactgattatttgagtgggaaggttaatgatgggttgcattggtacagcggatccctgttcatcttggtatctggggttgggctaattcttcttataaaatggatttttgtgaatgcgaataataagtttgttagttatttaagcttgtattcatttggaatttatttgacgcattatgcctttatttatgtatctcaaggaatcatgagtgcttcacttcctttgatgagtgatattgaaagaatgatgctttacttttcattctctctttcgtctggggtggtgattacctgcttgatgatgaaaaacaaactaatgcggtatctggtttcttaa

SEQ ID NO: 249302 - DNA, 327 bp, Klebsiella pneumoniae
atggaagtgatgggtaacgttcttgataacgcctgtaagtattgtctggagttcgtggaagtttccgtgcgccagaccaccgacagccatctgcacatcctggtggaagacgatgggccgggaatcccgcagagccagcgccgggccgttttcgaccgcggccagcgggctgataccctgcgtcccggccagggggtagggctctccgttgcgcgtgaaattgtcgaacaatatgatggagagatcatcgccggggaaagcctgctcggcggcgcctgcatggaggtggtgtttggccgccagcagatggaagataaacagagttaa

SEQ ID NO: 249303 - DNA, 837 bp, Klebsiella pneumoniae
atgaatgaagctgataacctttcaaagtcgatgctaataatggttgctactatgaaattcaataaagcagttgatgttattattaagtttgtaagagtaagtttatcatctattttatcattcttctttggtgtcattttagtactttgctttgttaaaactgataaattatctgactctataagtgctttagcaaatgttgttatggcatttgcggctataatgggtttagtgtttgctaaaagatggaagcgtgatgctactaaggataaagttattgatagatgcgtaaaaattctatctgtacatctattagatattaagaagaattttgtaccagctttacatatcagcgtgtttaatgtttggttttcttcattcgtaaagaaagatgttactacatataaagatgtgcgttccatgaaaaaaatggcttctaactatgtaggtctgataaaaaaagaaagtgaaatatatactgaatttgtatctgaacttgagtacttaaaaattttatcatgggatgttaagaaagaacatattgaagaagtagataaaattagaatgtacatgagaggtataatcgctaaggatcaagaactaataactcttatcaatatagtttttggtatgtggaatcttaacgtttataatgatgatgaaagtaaagcctttaccgaacttccattcaatttatcaagagatccaagagtggagatggcattaaagctaataccagagatgacgcgagaaagagagaatttacaagcactcattgaagatatgcttagtaaacaattgaatgttttttcatttattgaacaagtgggacactaa

SEQ ID NO: 249304 - DNA, 840 bp, Klebsiella pneumoniae
atggactatcaggtaatcgcccttgatctggacggcactttattgacgccagaaaaaactattttaccagcctcattaactgccctacaaaatgcccgtaaatcaggggcaaaggttgtcatagttaccggacggcactttgtagccatccatcctttttatcaggcattagcactgaatacaccagctatatgttgtaacggtgctttattgtacgattacgccgaaaaaagagttattgcctcagacccattacaaccagaacaagctactcaattagtaaacctacttgataattacaatgttcatagtctgatgtatgccgatgatgccatgttttatcaaaatccaacggggcatattatccgtacagaaaattgggctaaatctcttccagagtcacaacgtccaatcttcaaacaagtaccctctcttagtgaagcatcgcaaaatgttgatgctatctggaaattcgcccttactgattctgatactgaaaaactacatagctttggtcagatagtagagcgtgagcttggccttgcttgtgaatggtcttggcacgatcaagtagacatagcacaagccggaaacagtaagggtaaacgcttgacacaatgggtagaatcgcaaggcttatctatgagccaggttatagcctttggtgataatttcaacgatctaagcatgttgaaaaatgctggcttgggtgttgctatgggtaacgctgttgatgaagtgaaagcgtgtgctgatttagtaataggtaacaatacggaaactggaattgctgatgtagtaaaccagtacttcgcaagcctaaaagaagagataatttag

SEQ ID NO: 249305 - DNA, 582 bp, Klebsiella pneumoniae
atgatagggctattttcaaaacactggaccactaattttgacggcggagaaatcccctcctggctgacaattagctcggaggtggtcaatgccgaaggagctgctccgtggggcggtctgacgctgacgcgaccagaaacgacaggcagtaaacttgttttaggaggcgcgatttctggcaacaaagaaactggtattgagctggattgtgttgttaacggttttacgacaggagaggggacgtttatagctggttttttctcggatacagatggctggtttttgcgaacaagtggtgatatttgctatctggtatttcgcaagggcggagctgaaactacaaaaaaagtgtattttcaattatttacaggggggtcaaaaatatatcctctaaaactggaatgggacatcaaaaataagcgcctcagtatattcaaaggggcgggcgcggcatatatttctttagatcatcttgatgttggcaatgccatcggcactcgcccaactgtggggtggctaagtagcccagcgggtgagcaaaatacagtggctttcctctcaattaccagacattttatgtga

SEQ ID NO: 249306 - DNA, 1197 bp, Klebsiella pneumoniae
ttgccatactcttcagatgtagatgccctgggagggtttgcaaaaactgatatcgtagaagctttacaaactaaaggggatgaagaagttagattaggtgaagtcatactaaaacaaagtgcactcaatgaaattcgcttacataaacttagttttaaagccaaacatttagaagatggcgaacaagttttctttagaaccaaagcagataaagcttcatatattaagagaaaaacagcacttcaaagaatattagatcgtgaaagtgttataagtaatttatctcagtattttgatcctgactgtaatattgatgctactcaatataatattgaagttacagatacggatttttcacgatacgatcgacaagatgatcatggaaataatataatccttaatcagcaacagcgtaatgctttttcaaaattactaaacaatggcccattatccttactacaaggacctcctggaactggaaaaacagagttcattgctgcttttgttcattatcttattgaaaagcagaaatccaaaagtatcttattagttagccaatcacacgaagcagttaatactgctgctgaacggatcagaaagcactgtatacgcttagggacacctttaaatattgtgaggtttagcaatcgcgaaggggctgtatcaacaggacttaaagatgtttactcaaatgctataattgcagaaaaaagagaactttttagagcagagtttaaatatcgagtagaattcttagcccaagcattaggattacagcctgagttcatttcctctatagttgaagctgaactttttctatttaaacaaatcgaaaatttgagtaagtgctttgatgctatacaaaatcaagagctagaaaaagacgagcaacaccagttgaaattgaatattgcatctcttgatgcgagtatacgaaaatccttatctcaagtttattttctagattacccagcagataaagatataagaatggcgaaacgtgaagtcattaatcatttatgctcacgatactcagttcgccctgatgaggcaagaaaagcgactgctttggctactgtatcacgtgacatgatagatgttttagaaacagaacgtgtaaattatgaagaattttttgcgcgctcaaggcaattagtcaccgggacatgtgtaggtatcggaggctttgttgaataa

SEQ ID NO: 249307 - DNA, 1815 bp, Klebsiella pneumoniae
atgaaaaaagtatttgtttatcatcgtgttagctcggatcagcagctagacgggtcaggtatcgcacgccaagcagaactattagaaggctacttagagcgtactggcatttgtgcggacatggatgatccagccccagtagtactatcagatcaaggtgtctcagcctttaagggtttaaacatctcagagggtgagttaggggcatggatggaacaagtacgtaatggtatgtgggatagttctatattggtagtggaatctatagaccgctttagccgccagaacccgtttgatgtgatgggttacatcaatgctctaatggcacataacgtagctattcatgatgtaatggctaacatagttatcagccgtagtaattctaaagatctgccttttgtgatgatgaatgctcagcgggcatatgatgaatctaagtataaaagtgatcgtattcgtaaagggtgggcgaagaaacgcgaacaagcattcaacaaaggtactgtagtaactaataaacgtcctcaatggatagaagtagaaaatgataagtatgtgcttaatcataaagcggcagtagttaaagagatatttgctctttatcaaactggcatgggatgccccacgattgctaaacaacttcagaaaaaagaaggtgagcaatataaatttaatcgtccgtggactggtgagcttgtacataaaattcttactaatcgccgcgtaactggtaagattttcatttctgaaatcatacgtaatcatgatgatattgataatccagtaactcagaaaaagtatgatatggacgtgtaccctgtagtgattaatgaagaagaatttgaattagtacaggaattgctaaagtctcgtcgtcctaatgctggtcgtattactgtgaagaaagaagggcaggaagaagtactgattaaaagtaatttgtttagtggtatcgcacgttgtacagaatgcggcggatcaatgtatcataatgtggttcgtgctaaacgtacaccaaaaaaaggcgaaccaaaaatcgaggaatatagatacattcgttgcctcaatgaacgtgatggactttgcgaaaataaagctatgacctatgaaacagtagagcgttttgtagtagagcatttattaggtatggatctaaacactgtaattaaagcacaagaattcaatcctgaaattgaagtgatacgtattcaaatcgatcaagttaaggatcagatcactaactatgaaaatggtattgaacggcgtaaaaatgctggtaaagctgtctcttttgaaatgcgggaagaattggatgatgccaagttagagttagaacaattactagcacgtcaggcctcattagctacagtacaagtagatgtgccagtactacaggatgttaacgttactgaattatataatgtgaataacgtcgatatacgcacacgttatgagaatgaacttaacaagattgtttctaatattcgccttaagcgtaatggcaatttttacacaattgacattatctacaagcaaaacgagctgaaaaggcatgtcctttttatagaaaataagaagaaggaacaaaagttaatcagtgaggtgatcattgacgatgttgatggtgctaagttctattacacaccatctttcataattagtgttaaagatggtgagatccgttttcagcagactaaagaagatctttcaatcgttgattactcgctattgctgaactatgtagatgctggagatggcattgatgccgtaggtgtatggatgcgaaacaatatgagtttcttatttactaattaa

SEQ ID NO: 249308 - DNA, 471 bp, Klebsiella pneumoniae
atggcaagaaaagaaacaatacacaataatcaaatgatccagaatgaactacgtttcatttgctttaatacactatctagtgaagcaaaagaagtaatgcgtggaataatccaggaaagtacttttctaggtaaacaccgtgtaccggaagaagatgtatttgcgatagtaaagaatgctcctgaattcagtgaagtgatggtatttgaacatctaaaactattcagacagaataaaaatcaaaactatccagatagtaaatcatcgcgtgaaaagtacaaacgcatagcaaccctagtatcacaggcgtttgaagtactagtaaaggaagggaaatcccttaatagaatgaagcaatacaaaccaaagaaaaccgtaactgaagaacatgtagcactagttgaactgctaaaagatgaaggtgcggatcttattaccctaattgaacgactagtagcaatgaataagtaa

SEQ ID NO: 249309 - DNA, 705 bp, Klebsiella pneumoniae
atgaaacattttttcattgtggagccattggtagaccccatttctatgaagttaaaaggtgttgaaatcttaactcgtttccaagatcaggatggaaagtacataccacctgatgccgtcattgacagcatgaacaatgaagaaaggtgcttgttactcaaagaacaaatcatcgccatcagagagaaaagtgcgttcttcatagaaaacaatcttctatgtagcctcaatgttaatagggatatgatcgaatgtatcaaccgaacacctgaagaggactgtttactaaagggtatggattatgtgcggcttgagatctcagagagcctagccacatgcgagttacaaacccgtactaagctaatagaagcactctgtcttagattgggtaaggtatggctggatgacatgggggcagggtactgtgatataagcatggtcgatgcctctcagtatgaactaatcaagattgatcgtgaatacttctggcgggaagccaagaaagagcaaccctttaatggtcttgtactctataaaaagaaatgtgacaaaattgtctttgagggagtagagacagatgaacaacttgaactagcaaggcgtttagaggtgtggggtgtacaaggttacttgtttaactcttgtaaattaatcgatattgaaagtctaacacttcgctatgactttataaggctgacaaattaa

SEQ ID NO: 249310 - DNA, 567 bp, Klebsiella pneumoniae; identical to SEQ ID NO: 162758

SEQ ID NO: 249311 - DNA, 606 bp, Klebsiella pneumoniae
atggatgcaaatttatctaaaacttggttcgcaaaggaagatttccataatgatattttatcttgtaggctaaagaacaatatttcctctcaaaatggaaatattgtttttgttacttcgaagaataactgccctaacaaatcaaaatattcaaccacatattttgattattataaagatgttcattatggatattaccaagcgaggattaaatcagcatctaaaggggtaaataatgctttttggttcaaatcatataatggatatgaaattgatattgctgaaatccattcgccaaatattttaaatattactattcataaatggattgatggtaaacctctttcttatgggtttatattcaagacaaaatctaacttaagtagtgaatttcatttgtatggaataaaatggcgaactgataatatgattttttattttgataatgagccgattttaacggtgtccgggtttggggacaatatatatgctggcaatctaaaactttctactgcagttagtagatattctggatatgattcaaagttcaaaattgataaaaatatgaccgtatctaatgttattgtcgcccccacttctgaataa

SEQ ID NO: 249312 - DNA, 903 bp, Klebsiella pneumoniae
atggaaaatccttttttttcagttattgtcccaatgcataacaatagtaaaacaataaatctgacattagattcgttaaaaaagcaaactttcacttcatttgaagttatatttgtagatgatgcctcggatgatttttctaatacagagaaaataataattgattccctatctggaaaagttccattcactattgttaggcatattgaaaataaaaatggagctgctgctcgtaatttaggtatcacacttgcaaggggcgaatatatagcatttttagatgcggatgatgaatggcttcctattaaattatcatattatcatcaagtgattaaaaaagttgatatagaaaacgagaaaaaagttttttatagtaaattgaaaataagagatattgaaacagggaatattatggctattcgacctagctatggagttgatcatgagccgaatatgagtattgcggaatatcttttctccttaaatgggtttatacagacaagcacaatcgtggcccatagatcaatacttgataaggttatgtttaatgagaagtttattagacaccaagattatgatttttgtatccattgtgattacttagggattaaattccactttatagatgaagtcttaactatctataataaatttaataatacgagcgctcgtgctctaaatgggaaaaaagagtctgaagcatattcatttttttggttaaaggaaatgaagagtattatgcgtttcagggagcgatgcgcttatagagcatatattcttccgtctatatgtcgaatggataataataatttaaaagctgtattatatgccatgcttaaccttcctttcaccgggtttcgtgcaataaaattcaaggttttaaataaaataaaattgaggtga

SEQ ID NO: 249313 - DNA, 1167 bp, Klebsiella pneumoniae
atgaaaattactatttccggtacaggttatgttggtttatcgaacggtgtcctgattgcgcaaaaccacgaagtggtggccctggatatcgtacaggccaaagtggatatgcttaaccagaagatctctccgattgtcgataaagagattcaggaatatctggcagaaaaaccgttaaatttccgtgccaccacggataagcacgacgcataccgtaatgccgactacgtgattattgccacgccgaccgactacgatcccaaaaccaactacttcaacacctctacggtggaagcggttattcgcgatgtcacagagatcaacccgaacgcggtgatgatcattaaatcgaccatcccggtggggttcacccgcgacatcaaagaacgtttagggattgataatgttattttctctcctgagttcctgcgtgaaggtcgtgcgctgtacgacaacctgcacccatcgcgcattgtcatcggtgagcgctctgcgcgtgccgaacgttttgctgatctgctgaaagaaggtgcgatcaagcaggatatcccaaccctgtttaccgactccaccgaagcggaagcgatcaaactgttcgctaacacctatctggcgctgcgcgttgcctatttcaatgagctcgacagctatgctgaaagccaggggctgaacagcaagcagattatcgaaggggtatgcctggatccgcgtatcggcaaccattataacaacccgtcctttggctacggcggctactgcctgccgaaagataccaagcagctgctggcgaactacgaatcggtcccgaacaatatcatcgcggctatcgtcgatgctaaccgtacccgtaaagactttatcgcggattctattctcgcccgtaagccgaaagtggtgggtgtgtatcgcctgatcatgaagagtggttcggacaacttccgcgcctcttctattcagggcattatgaagcgcatcaaggcgaaaggtattccggttattatctatgaaccggtgatgcaggaagatgagttcttcaattcccgcgtcgtgcgtgacctgaatgccttcaaacaagaggcggatgtgatcatctctaaccgtatggcggaagagctggcggatgtggcggacaaggtatacacccgcgatctgtttggtaacgattaa

SEQ ID NO: 249314 - DNA, 1053 bp, Klebsiella pneumoniae
atgtttatttatttcctgatattgctatttttgcttttaagcatatttcttaaaaggaaatatgatacagtcactttctttatctcagtagttatattatttctagtcggttttcttagaggggataacgtaggtacagatattggaatatatacatgtaattttaaacaaattagttttaatcctgcgacttggaattattgtacaaaattcgaagatggatttaattaccttatagcattttataaagactttgttactaaagaacccacacttttttttagagcgatttttatatttgcattttttgggtttgtgaacttcattcgaaaagaaagtgatcgacctatattaactctctttttcttttacatttttcattattatttttataattttaatataatgagacagtttttgggcctgggtattattttaggtctttatccttatgttaaaaccaaaacaagtttactctttattactatagctacaacggcatttctattccataatacattatttatacttctttttcttcttatcttcaaacttaactggtctgaagcgttgaagaaaaaaaaattattactcatacccgtcttattgagttactgtctttttattcttaaaggaccagtgattagtttcgctcatagtatttatttcttgagtgagcgatatacaatgcacctaagaggagaggctgcagttgatagttcaactattacaattacattgcacactcttttttgtctattttgtatatttatttcttctaaaaacacaccgcgagaatatcttttttcctatgtgttaggtatatttatcttaaatgttatgggggcgataaatcctttatttatacgggtggcaaactgtttcttgattttcaatattatatattatacctatctctggtaccatacagaaaatcaattgcttaggattatattcaaattttcagtcataatgtatggatttgtttactttactaattcaattattaaggatttcggtgggatagtcccatacacagtttgggtattctaa

SEQ ID NO: 249315 - DNA, 1038 bp, Klebsiella pneumoniae
atgtctacccctttagtttcggttattctaccagcatttaatgctgagatgtttttacgagaatcgatatcaagtattttgaatcagagtctaaaaaatattgaattggtcataataaatgatgggagtacagattctacggaagatattattaaatcattcagtgacaatagaattgtctatttgaaaaatactattaacttaggcattataaaaactttaaacaaagggatagataatgcaaaagggaaatatattgcaagaatggacgccgatgatataagtatgccaaatagattgaagaggcagattgaagttttagaaaatgatgagtcgatagatatagtaaatattaaagcttacatcctcaatgattcgggaacattttatacaaaaaataaaggtagtgtcgaagctagttcaaatacaatgagatatttgcagtatctaagaaatatgatcatgcacccaggtgtcatggtaaaaaaagatattatgcagcatttcaaatatcgggattcagaagaggtattgcatattgaggattacgatttatggctacgactctttaaggctggatataaatgctttactattgacgatgagctcctttattatcgctttaatccgaacagtatcagtcgaactaaacagaatgaacagcataaccgagtgattgctctttctgcaaaaaatattaaaaatgacttttcttttgaattttcagtagattcgctaaaatataactggggtgaatttgattcatttaaatatttctcgttggataggtaccataaggagttgagagctttttttgataaaataaatcaggatggttcgttaggaccaagcgatatggctgtttttgaaagatttatttcttttaaaatgcttgctgtgttaatatcatttattaaattaggcggtattcgaggtaaagttattgctgctagtttcctgcttagaaatatgaatataattcctaggttttttttattaactaacatcttttcaaaaaagaaaaaatttataaactga

SEQ ID NO: 249316 - DNA, 1002 bp, Klebsiella pneumoniae
atggcctctaaactctttacacatattaagatctatacacggctgcttacaaaaataaactgtggcaaatatgatgtaatattcacgtttttagaaaaaagtaacattttctcttatttatctaattttaagggtgttaaacacgtctgcacagttcacaatgttttatcaattcaatatttaaaaattgcaaatccgactataaaaaaattgtgggcaaagacaatatcgtccatctataactctgataaaacaactataattgctgtatcagagcaagtgaaaacagatttaattaataatttcgatgtggatggagaaaatatttttgttgtcaataatttcgttgattcgcatgctatccatataaaaagcagagaagaggttacagaatttaatttttacgatgatgtaagctatgctattaatattggtaggttaagtgatcaaaaaaaccaaggttctttattgtatgcattttctcaatatttgaaagataatctaatagaaaataaagtccatttgttgataatgggggaaggcgagaacgaagaaaatttaagacaaaaaattaaagaattaaaattagaggaaaaagtaactataattgatttccaggtaaatccatataagtttctggctcaatgcaagcttctagtactaagtagtaagtttgaaggttttcctattgttattgcggaaaccaggagcttgggaattcctttctgtgggacacattattctattccccaagaaatgttcactagcaattctgcttacgatatgtgcactttccccgatctatatgagatggatggagttgctaaattcaaattaattatgaatagtgttttttcaacagacacattttcagaagagttgctagctgctactagcgaatggaattcacataatgataaggaataccagtttaagcaatattgtgagatatctataaatgaaaatatacataaagaaaataataaagacttcccggattga

SEQ ID NO: 249317 - DNA, 678 bp, Klebsiella pneumoniae
atgaaaatatacataaagaaaataataaagacttcccggattgatattttcgaaaagagagggatctatacttttttaaatccagtttcgtatttacaacttagaaaaaccaatttacttgatggtttcactggtgtgttttgtgatggcggagttttagttaaatttataaactttttctatcgtgaaaaactggaaagatttagttttgatatgacctccttagcacctatggtattccaatatgccgtaaagaatcataagagtatttatattattggctctgatgaattatctatagataaagctaaaaaggtaattgagggttcttatcctggtatatttattattggacataggcatgggtattttaagaatgaagaggaattaattagtgttgctaatggtattatgaaacaaaatgtcgatattgttattgctggaatggggtgcgggttacaggagaaattcttactagagctcaaatcccaaggttttgttaagttggcttttacatgtggaggtttttttcatcaattgtcaatgtcaggcaatgcatattatccaacatggataaatcgatttaatttgagatttgtatatcgaatggttaaagaaaagcatactagactaagatatattagggctggtatattactgtctcttatacacatctga

SEQ ID NO: 249318 - DNA, 294 bp, Klebsiella pneumoniae; identical to SEQ ID NO: 126761

SEQ ID NO: 249319 - DNA, 1017 bp, Klebsiella pneumoniae
atgaccttcaatattgctcttaattttgaggacggcgtaacccgttttattcagtgcaatgccggagagaaagtcctggatgccgcctatcgccagaaggtgaatctgccgatggactgctcggacggcgtttgcggtacctgcaaatgccactgcgccagcggtgagtacgacctgggcgaagattatctcgacgaggcgttaagcgacgacgaagcgcagaatcgccaggtgctgacctgtcagatggtcccgaccagcgactgcgtgatcgatgtgccggtggccgccgcgcagtgtaaaaccacgttggcgaacattggggcgcaggtacgacaggtgaatttactgtccgataccgccatcgaactggtggtcgccctcgatgagccgctggccttcctgccggggcagtacgtcaacattcaggtgccgggtacgcctcatgtccgcgcctactcatttagctcgcaaccgggttccctcgaagggcgttttctgatccgtaacgtgcctggcgggatgatgagccagtggttaacccagcgggcgcggcccggcgatcgtcttaccctcagcggcccgatgggcagcttctatctgcgccacggcgaacgtccgctgctgatgctggcgggcggtaccggcctggcgccgctgctctccatgctccataccctgcagacacagggcagccagcgtccggtgatgctgctgtacggtgttactcgtgactgcgatctggtgaaaaccgacgcgctggatacctttactcaacagttgacggggtatcgttggctaccggtggtggccgatgaaaacagcacttgcccgcagcgcggctttgtcaccgaccatctcgacgacgcgatgctgaacaacggcgacgtggacatctatctctgcggcccgccgccgatggttaacgcggttgccacggcgttgcgcgaccgcgggatcaccccggcggggttctggtatgagaaatttatcgccagccagagcgcggcggcataa

SEQ ID NO: 249320 - DNA, 1065 bp, Klebsiella pneumoniae
atggcagaaaacggacctcgtgaagacttggcgaagctggtgtcccataaactattggaaagatttaagtggaagcaacacggtccgaccgatcatgattttccgtgtactgaacaagaattacacaagccagcggaaaaaacgcaagaccacacacatccagttgatattgtctttcattataaagatccttacttaaataaaattgtttatctaaatactgatttgaaaagttattcaaaagggtctttaaattctaaaatggttgaaaatgctttagattccttagcaaaaactattcattgtgcgcagaatagtcaggtatggaaaagtcgctatgagacaaccatgtctaaaagtgaagtacgagggttactttttgtatataatcatgataatgactataagcataatttctatgactatttttatcctcctaaacccaaaaaagggaaaagacctgcggcagttaatttagacagagtaaatgtatctgaaaatcagcaaatacatataattgagccacgaactattagttatcttatgtctgttgttgctgatatgaacgaaatgattgcggaaaataaattcccgcgtgatgattatgggttctattaccctcaattaatacttcataaggttgtgactgcagaagaatatcttccagctacagtggaaactctaacatccccctacatgataattaaacatggtccagtaatagaatataatagagctaaaaaggaggacgagctggtttatcctgaagggtttattgtttattacaaccgctccggtaaaacagacttagagtttaattatttattagatactctagctaactaccagatattaaactcaaaaaataatattagaattagagtagcatgtattgataaaagtgagcacatacggactaattttataaaagctatagaaaaattttcatatcagtggggatatgatgaatctatgaaggaaaaattattatctattgagctatatattgtgcctctatctcgagagcaatatttaacagaagaaagatcatgggatgttaaataa

SEQ ID NO: 249321 - DNA, 1077 bp, Klebsiella pneumoniae
atgagtgaaatacacagtgttacagacaaagctttatacgaggctttatgccaatcacgtgtcactgataatgatatggtggaattgtttttatcccgtggaattttggtgtcaaaaaaaactgagcgtaagcaactagcaaaaaatttctcaaagctcactcatgattattatttgcatcagaaaatttctggaatatttggaggttttttaaggcgagagaaatctacggctatagttattaagaataatattgataagccactacttgttaaggctgctaataagcttaaagatcagctggaaagcgaagatgatatatgtcatgtaatcagtgataaagattttattaaaattagcattacatacttatcaaccaattttggtaaaagtgaatttaaccaagtagagaagaaaactgctgtttttgaaatcgagtccctttcggatggtttttcaattcgtaggcctgatagtgaacaagctgagatttataataaaaaactactaagtattatcgaacaggttatacaaaaggaaaaagatatagaagcaacgactttagatacagaagaaatcaacctcgcgaacatcgatgacgcagataaaagaacagaattttttaagcggctcatcaatgggttggatggatatgttttagatgatgttacggatgtttatatctaccatcctaaacctgctgtcatggaggaggaagatggggattctgaaacaggaatacatattagcaaagcatctttgaaaggagagggggtgcttaaatctgaagagttgaattctttgtatgatagagggttttatatttggaaaataagatggagaataaaggataaatctactactccagatctttatgattttgaagctcagtttagtgatcctttagagtttaagagcttttcatatatttctagaggggtgaggaaatataaaggtgccggagaatataataaaaatccgagccaattaccggatgatgaagaatatcattttaaaagacttattgaaaaaacggcgcgttcaattataatggatattaataaagagtatgagtga

SEQ ID NO: 249322 - DNA, 705 bp, Klebsiella pneumoniae
atgaaaacactggataaaattaagtggagcagagtgaagttatcaataaccttctctgaactaattgattattttaaacgtaattcttatgatgaaagtaaaggttatggttatacttttgtgaattttactgaacatgaagtttccgcttcttatgttgaaaagtcattgcgtacagaagttattgtatcgcccgcgggagatgagatagaacaagattttttagagtatgaaaccataaaatttgcattaaagcccgtatctaaaaaactctgtttattggctatttttaatccccctaaatctataaagaaattgacggatagacttagtgtagatttcaattatagggttggatttggttcaattaccttaaatttaaaggagtatataaattatctaagtttacagcattcaataagtctattacatattgataaaattaaagttagcaatgttgtgttaaatgggaactccaaggcctcggttgagataacttccacaaaaaatgcattgttagagctagaaagtatttttactaacaaaaaatataatatagataaagttaggttgcattgtttgatttacggggaaccttcttttgttgagctttcaaaaagcgcttttattaattcagattctaatcatctggatttttactccgacttcctcattcagcaattatctaatgatgaatttcgttaa

SEQ ID NO: 249323 - DNA, 234 bp, Klebsiella pneumoniae; identical to SEQ ID NO: 31831

SEQ ID NO: 249324 - DNA, 189 bp, Klebsiella pneumoniae
atgatttctattccgtttactaacgaagatgagcgaactatctgcgcatacattcgaaccactcacgatgggtatagcggaccggtatttatcaatattcatcggctagaagagcttcatatgcctatgagcaaagtaatagtcacagaagctttgagtaaagcgagcaggggaggaatgaccgcatga

SEQ ID NO: 249325 - DNA, 519 bp, Klebsiella pneumoniae
atggctaaacgtctgaacttccaatcgacgttttcaaccccatacagtgatctatctgttagatcgttctcttctggtaaagctgttccagcccttcgggctaaaacccaacaccgccccctttcccccaacccagattcagaaaatcaaaccctgggtgggagcgacgtatatcccctaaccgctggggtatacctcgtgcaaaactctcgcaatcggcggtttgccgtccgtcgtgcggcgttctgctgccggaatgacaccggctctgcatcgaacgcttcctggtacgcctgcgcatacgccatcgcgattttttcccgcatacctgccgggagtgttgccaactgctctttaatccacggggcgtcctcacgagaaaaaaccgtgggcatagtcacgtggaaatattcgtcctggtacactggccctcctgcttgcgtggtgagcctcacagagttaattaccctgaatttgaaggtccatttggaatgtcgtcaggggagcaaaagaccatga

SEQ ID NO: 249326 - DNA, 150 bp, Klebsiella pneumoniae
gtggctaagtttctggatattaaacgcagccgaccggcgatggtgcgccaacatacttgcctggcaggtgatgacaaactgatcctgtggggcgaaacctggtatcgtgaagaatatgaattccagtacagcacctatcgggataaataa

SEQ ID NO: 249327 - DNA, 3009 bp, Klebsiella pneumoniae; identical to SEQ ID NO: 128917

SEQ ID NO: 249328 - DNA, 324 bp, Klebsiella pneumoniae
atgacctttcaagagctcgatgcttgtatcgcaggctctggcagacgttctatcgcgtcagcattaatcgcttttattcttgatgcgcttgatgacggacaggatggagttgatcttgatatcttccagagccacacgcgcttcgttcgtaataatgtaaccacggtagccagttatctgcagctacatgaaattatccatatactgtattaccgtgatggtgctgcagaacgtcagtatgagtccgttaataattacgggcggtgggcaaagcagcactatcgtccttctgaggctcttatacagctgcatcgacgtgattaa

SEQ ID NO: 249329 - DNA, 231 bp, Klebsiella pneumoniae
atgtcacccgcgttcagaaacgttcttcgctttgccggcgtccccgtcgacagcagcgaaccggtacgcaggcagtacggcagtcgcatgattggtatcgtgacggtatgcctgctcccgctcctggtgttcgacgtcccgctgtgggttttcgtcctctcccaggtcatctggggcgcgggcgtgtatatcggcctctccgtggccggagataaatcccggaatcgctga

SEQ ID NO: 249330 - DNA, 702 bp, Klebsiella pneumoniae
atgtccagattcattctcgggaactgtattgatgtgatgcgcgggttccccgaccgtgccgtggaccttattgtgaccgacccgccctatttagtgggctttaaagaccgctcaggccgtgcgattgccggggatgtgacggacgaatggctggcgccggcgacccttgaaatgtatcgcgtccttaaaaaagacgctctgatggtcagtttctacggctggaaccgggtggaccgatttatggccgcgtggaaagcggcgggcttctacgccgtgggccagcttgtgttcaccaaaacatatgcttccaaccgccgtaatgcgaaagaccgtcgcggattcgtgaactactgccatgaaggggcttatgtgcttgccaaaggccgcccggtgccgcccctcagaccgctgccggatgtgatgcctttcccgtataccggcaacccgctgcacccaaaccagaaaccagtggaggcgctacagccgctgattgagtcattcagcgccccgggcgcgattatcctggacccgttcgccgggagtgcctcgacctgcgtcgccgcataccgcgccggacgccgctatatcggcattgaaatgctggcgcagtaccaccgggccggagccgaacgactggtcgccatgcgccgggccgtcaacacccctgcggcgaacgatgaatggcttccggaggcggcgtga

SEQ ID NO: 249331 - DNA, 222 bp, Klebsiella pneumoniae
atgaactacagcggacacgaagccctgcgccgcgatatggccgggctggcgaacaatctttgcgacctgaaaaccaccctcaaagtgctggaagagacgtatcactaccggcacgacggactggcggagcggcttgccggtatcagcctgcggcgtctcagcgtcctgatggatgaggcattcaatatcgccctgatgctcgacgaaagctttctggactga

SEQ ID NO: 249332 - DNA, 306 bp, Klebsiella pneumoniae; identical to SEQ ID NO: 207915

SEQ ID NO: 249333 - DNA, 429 bp, Klebsiella pneumoniae
atgcagtctgtgaaagcacgccccgtcctgaatgttgaagagtgtgaccgcctgtcttttatgccctacatgttcggcaatgattttatgctcgctgaattgcaggtgtatgcactggcaaaaaaatggatgcccgaatatgaagtcgaattctggcactttatccggctgcctgagggcggcggttacatgatgcccgattgtggccgcgtccatatggtcagcacggaaagctggtttgaccgcattgtgagcgccgacgcggcgggcattattctgacatccctggccgttaaccgtcgtctggcggcaaatcatgacagcggcaacccggccctgactcacctttacatgctgcgtgatgcccagctctggaatcacatcacccttcacccggaatgcaacgccatttacgccgcgctggactga

SEQ ID NO: 249334 - DNA, 405 bp, Klebsiella pneumoniae; identical to SEQ ID NO: 215827

SEQ ID NO: 249335 - DNA, 285 bp, Klebsiella pneumoniae; identical to SEQ ID NO: 207916

SEQ ID NO: 249336 - DNA, 1203 bp, Klebsiella pneumoniae
atgagtgtgtttgagaaattcaaagcaaaagtagacaggcatagcaacgtacaggacgtatttacaccttcatctccaataaaagacccggaaaatttaaaaggaagagataaagaaatagaagcaatacttaccacgataatatccaaaggaagacatggtcttatatttggagacagagggattggtaagagctcactagccatatcatctttaaatggtgcgctaaaatcaaaaatacacaaaggaataataataaaaatccagtgcggtgaaagctcctcctttgagaagataataaaaaaagctttgattgaggcagacccagattacgcaagtcacaggatggaggaaactgtaaaaacggcaggctctattggcgttgcaaaagtcctttctggcgaaagacatgtagaaataaagaaaataatcgaaaaagaaaaaatagaccctcagcaagcagcagatgcaattaaagatttgaacgctattctgctaattgacgaattcgatgtaacttcagaagaagtgaaaaagtcaatggctgaactcattaaacaattaagcgacaacgaaagtacaataaaaataatcattgttgggatttctaaagacggggcgtctcttgtagcacagcacccttcagtaacaagatgcctagacgagattaaactcgagcgcgttagtagtacggatataaaaaatataattgatgatggtgaagataagttaggggttgaatttaccactgaaatcaaagaaaaaataataaaaataagtaacggcttcccttactttacccacttacttggcttaaagtgctctgaagttgcattatcacagaataaagaaaaaatagatgaggttatatttaaagaagccttagatttggctgtaaaaagtagtgagggtagtttaataagagattatgaactcgcaacaaagtcatcacataacaataattacagaaaaatacttttagctgctgctaaaataaagagcagtagttttactactaaagaatggatagaaaaaattgaagaagaaactggaattttatataacaatcaatccatgagcaactttattggaagattgatgaatgcagataaaggcggcatcatagaaaaagtttcccatggggtatataggattaaagaccctcgcatggcgagttttattattatgaatgacgtcagttaa

SEQ ID NO: 249337 - DNA, 378 bp, Klebsiella pneumoniae; identical to SEQ ID NO: 182323

SEQ ID NO: 249338 - DNA, 240 bp, Klebsiella pneumoniae; identical to SEQ ID NO: 218363

SEQ ID NO: 249339 - DNA, 270 bp, Klebsiella pneumoniae
atgttttcgctgaacgctgcgtataagcgcgcgtaccccgaatattattgtgaaattaatggtgttgatattctccagaactttatcaatcacgccaacccgaactatgcagatgatgtggccgacgttgcagccggaacaaccccccggagtctgcgatatgacgacctgcatccgtctcaggttctgcaggaaaatgcattacatattggcgcagacgtaaacgctgaatttatcgttcaatttttgacaaaaaaaggctggttataa

SEQ ID NO: 249340 - DNA, 306 bp, Klebsiella pneumoniae; identical to SEQ ID NO: 218354

SEQ ID NO: 249341 - DNA, 537 bp, Klebsiella pneumoniae; identical to SEQ ID NO: 207929

SEQ ID NO: 249342 - DNA, 249 bp, Klebsiella pneumoniae
atggaccacaacgttttgtccccgcttgaatccctgccggatggcaccttcacccgcgagcaggcgcaggcggtcgcggcgcagtatcagaatgtggtgattgaagatgaccaggggacccattttcgccttgtcgtccgtcatcaggatgacggcagcatggtctggcgtgtctggaattttgaaccgggcggtgagttcctgatgaaccgttacatccgggactacggagtacgtaaaacgcaataa

SEQ ID NO: 249343 - DNA, 165 bp, Klebsiella pneumoniae
gtgtttgtccccgccagtggtcgtccgttctcggttatcagcaccctgtctgactggtcgccggaagcgatcagccacacgctgagtctggttgcccggctcgataccgatggctacagtcaggccagcatcatcagcatgctggtcatggagggcgcgcagtga

SEQ ID NO: 249344 - DNA, 219 bp, Klebsiella pneumoniae
atgatttcaaccggtaattatccccagtcgacaatggatatgatcatggaaaatctcaaccaggcgagtgtgcagattgccgctttccagtcccgtgttcaggtccagcaggacgccttgctcgtggtggacagacaaatgagttacatgcgccagcaggtttctgcccgcatgatgacccgctaccagaataactatcattttggggggaatcagtaa

SEQ ID NO: 249345 - DNA, 219 bp, Klebsiella pneumoniae
atggtttcaaccggtaattatccccagtcgacaatggatatgatcatggaaaacctcaatcaggcgagtgtccagattgccgcttttcagtcccgtgttcaggttcagcaggacgccttgcttgtggttgacagacaaatgagttacatgcgccagcaggtctctgcccgcatgatgacccgctaccagaataactatcattttggggggaatctgtaa

SEQ ID NO: 249346 - DNA, 216 bp, Klebsiella pneumoniae
atgagacaggttccttttgatgttttgatacatgcggagaacgccctttcagccagtgaagatgctatggctgttctggcgatatggatcgacagcatacccaatggtgacgaataccattccgaagcctgccgggtaagcgcggttatgtcgctgcttcacaacggcatcactgaattggtgaaggcgcgggaggcttacagtgcgaaatcctga

SEQ ID NO: 249347 - DNA, 174 bp, Klebsiella pneumoniae; identical to SEQ ID NO: 141588

SEQ ID NO: 249348 - DNA, 741 bp, Klebsiella pneumoniae
atgattgaattattaacttgtggcttgttctccttctctaaagagccacgtagagaaaaccaagatactattcttccgccactgtacatcaatgatggatttttgattgcagtcgccgatggcgttgggtcgtatgatggtgcacaaaacgcatctcaatcagctatcagagaactacctgaacttgtaagaaaaggaaatctgcaagacatgacgaaccttttcctttcgcttaaagaaggggtttcttcattgtcagacaaaaacatcaagttttctcacgcagccaccacgttaactttttgttttgtagatgatgaaggcctccatattggacacgttggtgattgtcgtttgtatgtgaaaacggattctaaactcaagcaaatcaccaaagaccacacacagcaccagaagttactcgatgataaaatatacagtaagagcgaactgaaacagttgccgggcaaaaataccctcactacggcaattgcgaatgcgatcccactcgatttccaacaaacctttatccctcatgatgagctgcttaatgaccgtgacgaagcatttgtatacttgatgtcagatggtacacatgcattctgggaaaaaaggccccgcttctcaccaaacacattagaaaacccttcaagttttgcttccagtctctataaacgtatcgagcgagcgggccctatagatgaccattcgttgatcgcagttagatacaaggttctttaa

SEQ ID NO: 249349 - DNA, 756 bp, Klebsiella pneumoniae
atggatgatgcacatggtaactatgttatcaagccgataagacgcattggtaaaggcggcttcggctacgttgaagaagttcagttacaaaactaccaaggtcatgtctgcgggacctatgctagaaaagtcttcgctccacaagatccagcctatagagatgagttcatccgtagattcgaacgggaggtcacgtaccaagctgactgcaaacatactaatattgtgccgatctaccttcatcacctgacaggtgatgaaccttggtttgtgatggacttagccgaaagcgatttggttacggctttgcagtcaggcgaaatgacaataagagataaactcagcgcaattcgcatgacgttggaaggtgttgcgtaccttcacgatcacagctattggcatcgtgatttaaaaccccaaaatgttttgaagttttctgacggaacttaccgaatttctgatttcggtttagtcaagaatgcggatcaaaaagccgagtcggaggtgatcacaaaagttgctgcaattatgggcaccgagcgttatatggctccagaggtttttgctgggatttattcagaaaaaacagatatctttgccttaggtgttctcatcgaggacatggacttgggggcgatacctggtgtcgatgacttggttacgaaaagtactgccaggaagccgccgaaaagacatagctctgtgcatgagatgctcgcagacttggaaaaaatagttatagggaatgggttatga

SEQ ID NO: 249350 - DNA, 351 bp, Klebsiella pneumoniae
atggaaaataatggactagttagagtattgaaaaacgaatggttgcagtcatctcctgatagttcctactccgggaaacatatagttggacgatttcatctaacagatacgttcatcgtaaaatatatgatgctggtacatgaagtcgatataccggattcgtgggttagtaatagtttcactaacataccagatatcgatacccgcaaggttatgtatatggaatgcagtgatatgttatcgaatgacacaatgaacgagatccgtaacgcgattaaatccccaccagaaaacatgagattatatcgaaatagcgatcaagtaattagtatagaaatcatggaagaatga

SEQ ID NO: 249351 - DNA, 486 bp, Klebsiella pneumoniae
  misc_feature (455)..(464): n is a, c, g, or t
atgattcagtacattcgtattcaaaattttcgctcagtaaaggatatcgcgctggagctcgggccgctgaacattgtcttcggccctaacggctgcggtaaatccaatatttataacgccatccacctgctgaccgctgccgctgagggcaggctttcggggtttatcagcgaagagggcggtctggagaatatgatgtggtccggggagcgttcgcccctcgatcgtcacccccgccggctgcaaatcgcctgccggaccgacagcttcgattatgaactgcagataggcttccctgaaaaattgccctatccgacgcaattcatgctcgatcctatcgttaaagaagagaatatctggctggccggctactcccgccggccttcctcccgcgtactgcagcgcaagaatcaggcggcgtttctcgtcgatgtcaccggggagaaaagtacttnnnnnnnnnnctttcaccgagagtatttatga

SEQ ID NO: 249352 - DNA, 363 bp, Klebsiella pneumoniae
atgaatagtcatgtctttttagtcggctttattatttatgcgttagccatgatttggcttggctggtacgtgtcgcgtcatcaaaaaagcggtgaggattttttactcggtggccgttctttgccgctgttcctgacgctggggtccaccgtggcgaccatggtgggaaccggttcaagcatgggcgctgtcgggttcggctacagcaatggatgggccgggatgctttacggcgtgggcggcgccatcggtattttactggtggcctggctgtttgcgccggtgcgaaagttgcgctttatgaccatgagcgaagagctttcttattacacagggggcagggtaatgactccaacttactga

SEQ ID NO: 249353 - DNA, 171 bp, Klebsiella pneumoniae
atgagcgaaaaatgggatgaccacattatcgcggttgccgtcaataatctatttcaattcttccccgagcgggattgcggcataacggtggtactatttgacgtatgcagcgcaggtgttgcatttgtatttgccaaagactttaaaatgaccactaacactactcattga

SEQ ID NO: 249354 - DNA, 777 bp, Klebsiella pneumoniae
atgccacaggctatgccaaaagcaaaccaaatcagtagcgaacttattgacattttagcgtcaaaaaatcgcatatctgaaatggatttctatcgctacataagagagatagagaagcttagggactttgagtcggaagactaccttaaagcgcttgcgaatggtgcatttggtcgtaaagaagaggctgtagctttttttgaagaggccgttaagcaagatattgatatcgttgctcaaaactatgttgtatacctaaatgactatggcactcatagagaagtattgaatgtcgtaaatagatttgctgagaagttccgctctcgaactatgttgggatatgcatgggaatcaaatctttttatgggtgatattgataaggcaatgtattacgccgaaatctacgccaaaagtgccaatgaagaggatgctgaagcgatgagacatgcagctgaaacagccttagaaaaaagcaatttgtttaaaagacattcagggttaactgactctgaatattctgatgttgcctatagagtaatggatattgttgattctaaaggtatcaacccgatcgaattagacttcgcttttattcctgaagagaatatttctgcttatataatgactgttaatactcttgatagcgatattctttcagacatgaatcttgacatagcattctctttagctgaaaacgacgatcttcttggtaaaaatttcagcgtatggttcaaaggtgctctctttgcggaggataacacaaatgtctgtgaatag

SEQ ID NO: 249355 - DNA, 678 bp, Klebsiella pneumoniae
atgtgcggacgctttgctcaatcacagacacgtgaagaatacctagctttccttgccgaagaagctgagcgtgatatcgcctatgaccccgaaccaatcggccggtacaacgtggcgccagggacaaaagttttgctcctgagcgaacgtgatgaacaactgcaccttgatccggttcactggggttacaggccggggtggtgggataaaccagcgctcattaacgcacgcgtagaaaccgcggcggcaagcagaatgtttaagcctctatggcaatatgggagagcaatttgttttgcagacggctggtttgaatggaaaaaggaagacgacaagaagcagttctattttatccagcgtgctgatggccagccgattttcatggctgctatcggaagcacaccatttgaacgcggagacgaagccgaaggatttttgatagtgactgcagctgctgaccacgggctggtcgatattcatgaccgtcggccgctggtcctggcgcctgaagccgcccgggaatggatgaggaaggatgtcactggggcgaaggcagttgaaattgctggagacggagcagtatccgccgaccatttcatctggcacccggtatcgcgtgccgtgggtaacgtgaaaaaccaggggccggaattgattgaggctatcaaaagcctatag

SEQ ID NO: 249356 - DNA, 1266 bp, Klebsiella pneumoniae
atgtttgcgctttgtgatgtgaattcattttatgcatcgtgcgagaccgtatttcgtcctgacctgaaggggcggccggtggtcgttctgtcaaacaacgacggctgtgtgatcgcccgttcgcaagaggcgaagcccttcgtcaaaatgggcgagccttatttcaagcaaaaggacatgtttcgccggcacggtattatcgcgtttagcagcaactatgagctttatgccgatatgtccaaccgagtgatgacaactctggaggaactctctccacgctgcgaaatttacagtattgatgaggcattttgcgatctgactggtgttcgtaactgtcgcgatcttaccgattttggcagggaaattcgtgagacggttctgcgcaggacgcacctcacggtcggcgtcggcatagcccagactaaaaccctggcaaaactggccaatcatgctgcgaaacagtggcagcgacagaccggaggagtggtggatctgtctaatcttgaaaggcagaggaagttgatggctttgctgccggtggatgaggtctggggagttggccgccgcataagtaaaaaactggaggccatgggcatcaaaacggtgcttcagctggcggataccgatatccgttttatccggaagcattttaacgtcgtgctggaaagaacagtgcgggaactgcgtggtgaaccctgtcttgggctggaagaatttgcgccggtaaagcaggaaatcgtttgcagccgttcgttcggcggtcgtatcacggaataccatgaaatgaggcaggctatatgttcatacgcatcgcgcgctgcggagaaactccgtggcgaacatcagtattgcagatttatttccgcttttgtcaaaaccagcccctttgcgctgaatgaaccgtactacggaaacagtgcatcggtaaaattgcttaccccaacccaggatagtcgggacataatcactgcggcgacaaaatgcctcgacgcaatctggcgagacgggcatcgctatcagaaagcaggcgtgatgcttggggatttctacagtcaaggcgtagcgcagctcaacctcttcgatgataacgcaccacggaagaacagcgaaaagctcatggaagtactcgatcatctcaatgcaaaggatggcagggggacgctgtattttgcagggcaggggatccagacagcctggcggatgaagcgagaaatgctatccccgcgctatactacgagattctgtgacctgctcagagtcaggtga

SEQ ID NO: 249357 - DNA, 420 bp, Klebsiella pneumoniae
atgcagttttacacacccgttgagttacgtgagatcatgctgatcccgttgtacagtgaccttgtgcaatgtggttttccaagccccgcacaggattacgttgagcaacgcatagacctgaatgagttactaatcaatcatcccagtgcgacgtattttgtcaaagccgccggcgacagcatgaaagacgccggcataggggaaggggatcttctggttgtggatagctcaaggacagcagttcatggcgatatcgttattgctgctgtggatggggaatttaccgttaagaagctgcagctgcatccgcgggttcagcttaacccaatgaactctgcatattcgccgatagtcgtgggtagcgaggacactctcgacgtgttcggggtggttacgtacatcattaaatcagctggctaa

SEQ ID NO: 249358 - DNA, 1029 bp, Klebsiella pneumoniae
atgagaaaatgttcggcgcctaaaaacaacgaaaccccgaaggctgccacctccgaggtctctaatttaccagttaactacgagaaaactgacatgacaagtttagcaattgcagatcgtacaatcaacgtgcctttctatggcaattctctttttgtagttgagcataacggcgaggcctacacgccgatgaaaccgattgttgaggggatggggctggactggaaatctcagcacaaaaagatttctcagcgcttttacaaaggtatggtggaaatcaccataccctcagttggtggtattcagtcaatgatttgcctcgccctgcgcaagctggcagcctggctgaacagcatcagccccaacaaagttcgtcctgaaattcgcgataacgtcattcgttaccaggaagagtgcgacgacgttctttacgagtactggacgaaaggcgaggttaagaacccgcgcaaaaagaccacggtcgatgaaaggacgccacttcgtgatgccgttaacatgctggtaagcaaaaggcacatgatgtatccggaagcctacgcgatgattcatcagcgctttaatgtggagagtattgaggatttagaggcgactcagattcccgatgctatcgagtatgttcatcgtgttgcgctggaaggtgagtttctcggtaaacaggaagcactacccgctccgaagctggatattcactacccagcagactggtgggatcagttcccgctccttcagcgtgaaagaaaaattcagaaatccacagcggctggaggttatcagttccccgtaaggctgctttatggatttgaggatgaatcaccttcggcgatcagtagcctcataagcaaactggcgatgcagggatacgacgtgagtgcggtcaagatggaatacttggctcatcgtcattatgcagagcggatgtatcagaaactatccagaattgctgaaatcagtggctcggtattaggcagtagcattaccttgaatattcagacacctatgcgctcttag

SEQ ID NO: 249359 - DNA, 2124 bp, Klebsiella pneumoniae
atgactaacgaactttttgaaaagatcatcgcaaaaattaacttttctctcctgaagaaaacgcctgttatattacagtcggaagccgctgagtgtgggatcgcctgtctggccatgatttgcggctactatggtctggacattgatctgttcaatttccgccagcgttatggcagcccttcgcagggcgtaacgctaatgtccttgagcaaaacggcggagcatgctggtttaaaaagccgggcgctgtcgttagatctggatgaaatccgccagctcaaactcccctgtgtcctgcactgggggatgaaccactatgtggtgttgaccaaagtacgtaaatccagctttgtggtgcacgacccagcgctaggcaagcgcatcattggtaatcaggagatgtccaattattttaccggcatcgccttagagctctggcccgatcagaatttccagcaggaaaaagccaagtctcgtctgcgcctgttagatctgatgcgcaatattgtcggcttaaaatcagtgttgctgaaaatatttgccttctccgttgtcgttgaagcgattggcttactgctaccaataggtacccagttggttaccgaccatgtgattatggcgcatgaccaaagtctgctgtcagtcatctgtatcggtctggtcttttttacgctgtttcgcactttcatcagtatgctgcgtgcctggacctcattgacgctgaatacgctaacaaatattcagtggaaaaccacccttttcgatcatctgaccagcctgccgctatcgtttttcgaaaagcgtcatcttggggatattcagtcacgtttctcctccctggatacgatacgctcgacgtttacgaatagtattgtcagcggcattattgactcgatcatgactattggcctactgatcatgctgacgctgtacggcggctggctaacatgggtggtcgttggctttaccctatgctatgcgattatgcgtctggcaacttatcatttctatcgtcgcgtggcggaagagcaggttattaagggggcgcggtccagctcgcactttatggagtctctgtacggtatctcgaccatcaaagcgcttaatctcaaagagcggcgctcccagcactggctcaatattaatattgaagcctgcaacgccggtattaaacaaacccgtttcgatatgatgtttggaggagtgaacacctttattaccgccatcgaccaggttgcggtgctctggctgggcgccatcatggttattgataataatatgaccctcggtatgttcatggcgtttaacgcctatcgtggacaattctcgcagcgcgcctccagcctggtcgatctgtgtatgcagttgcgtatgctttctttacataacgaacgtctgtcagagattgtctttagcgaaccggaaaaagagctccccgcgcgagaagtattttctccggattcaggcgccaaactggaggtcaaaaacctctgttatcaatatgacccattttctcagccgattttttcaaatttaaatatcacgattgagccaggagaatccgtggccctggtcggtccttcgggcgttggtaaaaccacactgttaaaagtgatgtgtggtctgctttcaccaaccagtggcgatattttagcggataatcttgatatcactaaaattggtattaataattatcgactcgggaccgcctgtgtactgcaggaagatcgccttttttccggttcgcttatcgataatatcagcggtttcgaagacaacgccaatattgattttgttatggaatgcgccaaacgctgcaacatccatgacgaaattatgaagatgccgatgggctatgaaaccatagtcggcgaactgggactggggatctccggtggacaaaaacagcgtattctaattgcccgagcgctgtatcgtaaaccaagcattctgtttatggatgaggccaccagccatctcgacttaaagaatgaatcagttatcaatcagtcaatctcggcgttaagcattacccgaattatcgtcgctcatcggccctccacaattgcctcagccgatcgcgttatcgacctgtcgcagacaaagaccgtcgcgcaagcttaa

SEQ ID NO: 249360 - DNA, 141 bp, Klebsiella pneumoniae; identical to SEQ ID NO: 36145

SEQ ID NO: 249361 - DNA, 264 bp, Klebsiella pneumoniae; identical to SEQ ID NO: 101375

SEQ ID NO: 249362 - DNA, 798 bp, Klebsiella pneumoniae
atgacaacgctttctcagctgtacaagcaaaaggataaaaacggcactggcactaccgttaaaaagactttcatggtgccttacgaggagctttacctggaacctggcgacaacatgcgccctttaaatgaggattgggctcagcatatgtgtgagctctggaagtctggcactgatttaccggcgctggatgttcaggttacagaaaaaggcgtgaaaattattgatggacagcaccgctttataggggctggctatgctcgcgcacaaggtgtgagtatccctcggattgaatgcaaagattttatcggaacggaactacagaggcttgcgcttcaggctggaagaaataacggtctggcgataacgccgatccaacgagccacgcaatacaaccgcgctaaaaatcacgggcatacaacgcaggaaattgccgacgcttttcatcggtccgttgcagatgttgagaaccaccttcaactgctctcatcaggcgacgtgttactcagcatggttgaggcaggagaggtgtcagcttctactgctgtggctctttctcgtgagcatggcccaaaggctgaaacaatcgcaaaagagggtctggccaaggccaaagccgctggcaaaaagaaactcacccgcagcgcggcgctgccgcagtttagcgcagcaaaggcgcgccagtttctccagatagtcgctgatcaggctgacattgaactgccagctgatgcgcgcgccatcctggacgaatatcgcgcttttctgaaagaggctggctgggagagtgaagcatga

SEQ ID NO: 249363 - DNA, 249 bp, Klebsiella pneumoniae
atgattagcagaaaagagttgtttgctgaaattagcaacgaggccgtttgtgagggtggcgaggtggtcgggtatttcgtcagaaacaaccgcatggatacgctggagcagatgctatgcatcagcgtccccgtgaagctgccgcgccctggtttcgtctctatctcaggtgagcgcatggctgtttacctgaaggctgatgttgaggcggtgctgaccgccgctggcatcaagtgggaggctgagtag

SEQ ID NO: 249364 - DNA, 582 bp, Klebsiella pneumoniae
atgacaactgatatcaccgaacttgcgcagcgtatgaagactgctgctgagaaacttgacgcagaccaatggcagacacgcaagggttttagcggtattgaggtaatcgtcaaaggtagccttgaaaaggtacatggctgtgtgtctttccagcctgttgctgccgacatggctgacacaaaaacagcaagagcgattgcgttgtttagtcctgccaacgtcctcgcgctggtagaggcgctggagaaggcgcaggccaaaaacgcactcgttgccggcggcattgaggctacagcaaagctacatgagcgcatcgccgagctggagtccttccgcacggcttacatggaatggagcgataaaacagattgggtgaacacagataggcggttcggcgtagtgaagccgctgggaaaacaccgcgctgatgtgctgaaggcgtacatcgaacatttggagtcccgcaccgtcaccgtgaagctgccaacaacccgtctatgggctggcgtgactgattgctacgaaaaatcggacgtaatcgccgctattcgcgcggcaggcgtggaggtttctgatgattag

SEQ ID NO: 249365 - DNA, 255 bp, Klebsiella pneumoniae
atgaaccacatcgaattcattgagaagaacgtccgcgaagagctgatgcgccagggattcaccaaggcagtggctcaggggggggcataccaggcggtcgatatgtacaagcgcatgtcacaggccagtcgcaaggggaggatttttgatgatgtattgcggttcgcgaaattgtgggcagagaagcaaacactgccgtctgacaaattcgaaaagaaaagagcgaagcctattaagcagcaagggctgttctga

SEQ ID NO: 249366 - DNA, 1164 bp, Klebsiella pneumoniae
atgtctgaattatctgtactggaaaaagctatcgaaaactcccaaaaagaagtaaaggagcttatcgaagaacagcgtaaatccatcaaccagaccggtgaaatcaacaagcagctgcagatcgatctgacgaaagcacaggaagaactgaaagccaccggcacccgcctgttcgatcttgagcagaaactggccggaaactctcctgatcagactgcgcagaagtcatttgctcagcgcgtatctgaagacctgatgaagggctgggacggctcgcgtaccaaagcgaaagtcaccagttttgataaagcgattggttccggcgcagcgtcggcaggcgccctggtccagccgcagcagctgccgggtattcttatgccgggtcttcgccgtctgaccgtgcgtgacttgctggcacaggggcgtatcaccagtaacgcgctggaatacgtgcgcgaaaacgtgtttaccaacgctgcagcaccagtggcagaaggtaccctcaagccggaaagtaatattaccttcaccaaagaaacggcgaacgtgaaaactatcgcccactggatccaggcatcgcgccagatcatggatgatgccccggcgctcgagtcttacctcaattcccgcatgatgtacggactggcactggtggaagagaaccagatgctgaacggggacggtaccggcgataacctgcaggggctcaacgtagtagcgaatgactacgaaaccacactcaacgcagccggagatactggcgctgatgttctggcacacgccatctatcaggtatcgctgagtgagttcgaagcagacggcatcattctgaacccggcggactggcaccgtattgccctgctgaaggaagctaacggcaattacattctcggtggcccacaggcgtttgcctcgaaagtgctttgggggcttccggtggtgtcgaccacagcgcagacggcaggcaaattcaccgttggcgcgtttggcctggcgtcgcaggtttgggatcgcatggatgccaccatcgagatcagcaaccaggaccgcgataacttcgttaaaaacatgctgaccatcctttgcgaagagcgcctggcgctggcccactatcgcccggcagcgattgtgacgggtgatattgctgtcagcactggtgcataa

SEQ ID NO: 249367 - DNA, 264 bp, Klebsiella pneumoniae
atgaacggcatcggaggccgcaccatcgcagaggctcaggaacggatgagccgtagggaatttctggtttggctcaagtaccgtgagaagtacggacagctcaatatcatgatgcgtaccgagtggggggcttcgctggtggcttctgtccttgcgaacatcaataaggctccaggcactccacttttcaagattagtgactttgccccccacttgcatgcaatccctataagtcttgaagaagctatgaaaaattggagttag

SEQ ID NO: 249368 - DNA, 477 bp, Klebsiella pneumoniae; identical to SEQ ID NO: 211927

SEQ ID NO: 249369 - DNA, 396 bp, Klebsiella pneumoniae; identical to SEQ ID NO: 223260

SEQ ID NO: 249370 - DNA, 552 bp, Klebsiella pneumoniae
atggatgctctcgatctactgcttaatcgccggagcgcttcccgcctggcggaacctgccccggcgggcgaacagctggaaaacattctgcgcgccgggctgcgcgccccggatcatggcaccctgcagccgtggcgcttctttattatcgccgatgacggccgcgagcgcttcagccagttgctggaaaaaggggccagagaggccggccaggatgagaagggaatagagaaagcccgtaatgcgccgttccgcgcgccgctgattattaccgtggtcgcgcgctgtgaagaccaccctaaggtgccgcgctgggagcaggagatgtccgctggctgcgcggtgatggcgatgcagatggcggccctggctcagggattcaacggtatctggcgcagcggagcattgaccgagagtccggtggtgcgggccggcttcgagtgccgcgaacaggataaaattgtcggcttcctctatctggggacgccgcagctaaaagcctcaaccaccattgccctgccggataccgcgccgtttgtgacgcgattctga

SEQ ID NO: 249371 - DNA, 633 bp, Klebsiella pneumoniae
atgcctagtctcgtgggctcggagatgtgtataagagacagtttccgaagcggttacgctgccgcccgggctgtttacgcgcagaacgatggccttaattttcggatcgaggcgcgcatcgcgaatttgcgctgcggtggtgtcgccgccgacgttgcccggggtctcttcaccgtccatgatggcgccgttggcgaagattaccgcgatggcggaaccctggtcagacggcgtcttcacgttgtagtcgtaatagctgattgcccggtaattgttatccgctttgctccagccaaactgtttggtcagcgccttttccacttccgtggaggtcgccagctcatccaccagcttattgtccagcgcatatttcgccgtatcgccgcccaccttacgcaggccatcgataatgccctgggcgcccgggaagagctgctgggcggtgatctggcggttggcggcaatggtgttgaggtagttctgccacagttcgccaatccagcggctatccgcttcgcgggcggcaggggacatatcatcgcggatgaatggttcgacggcggatttataggtgccgacgcggaagacatgggtggagaccttcagcttatccagcagcgatttgtaatatag

SEQ ID NO: 249372 - DNA, 855 bp, Klebsiella pneumoniae
atgctggactcaatcgaggactgcgtaacagcttgtaaagcacgcggctggctaccgatagttctgtgtgttgactggatgcagggcgaatcggacgaggactggtctggactacgcgaggggatgtatgaggcgcgacttcatcaataccagcgtcaagttatcagcgacatcatgggcagaacaggtcagagtgaaccgccgattatcgccattacccagctggggtatgtcaatgacgggcatggtgcatttacaggccaatatgcgcggctggcgtcgacgcgattgcacggaaaagagcaattcaggctggtcaattgtttgtaccagtacgattttatttcagacggccttcacctgacatgcgcaggacagaaccggcgcggtgctgctgtagcgagagccgttatccaggagtggtttaccagcggctggtatggaatggttccgaccggtttcgtgtggaactcaccaacgcagatacaaattaatattccatcgtataccaacctgacgatagacacgactacgattaacaccgacggtctggccaattacggctttagctacacggatgagtctggtgctccacctgctatatcgagcgtcgcgatcagccctgacggtaaggcggtgctgattaacctggcggccgccccctctggccgttttggccgggtttcctacgcaaccgttgaaaatccgctgcagagcggggctacggtgaaaccgtctggtaagaccttgggcgcacgagggtgtgtaagatcttctgccggaatcgcgtgggtatacgatacatctgtaaccctctacgactggctccctgcttttagaattaacgttttctga

SEQ ID NO: 249373 - DNA, 1014 bp, Klebsiella pneumoniae
atgtgcggttctgacctggtgggcgatatcgtcgataactggcttcgtcatggtcgtgaccttcctacggtggcgttctgcgttaacaaggcccacgcaaactttgtaaccatgcagtttaacaaggcgggcattaacgctgaggtgatggtcgcagaaacaccccacgaagaacggcaggcgatgatccaccgcttcgagactggcgccacaaaaataatcgtcagtgtgggtgtgctggtggccggttttgatagtgatgttcgctgcattatctacgcccgtccgacaaaaagtgaaattcgctggctgcaggcgctgggccgcggactgcgaactgcacccgggaaagatgcctgcctgatttttgatcacagtggcactgtgcatcgcctcggcttccctgactccatcgaatacgacgatctgccatccacaaacgacggcatgaaagcggccgctgccggcgcaactaaggagcgcgaagaaaaacttccgaaagaatgccccgaatgtcatttcatgaagccatccggcgtttacgtctgcccaaagtgcggatttaaaccgctcgttggtcaggacgtcgagactgacggcacccgcaacatcaaaaaaatgagcaagcacgaaacggtttataccaaaagcgacaagcagtcctggtggagtcagatcaagttttaccagcgtcatcgtgcggcgcaggggaaacctgtcagcgatggctggtgtgctcatacctttcaggagaaattcggcgaatggcccaacggcttaagcgactttccaatggagatcacaccggaggtcagcaatcacatcaaacacaaacttatcaaatttgctaaacgccgcgaacgcctgcagcagatggggaagaaacctgaccaggatctatttccacctccgagcgccagtatcaactatgagcctcctgagggcagcgacgggcaattaattatcgaagcaaaacgaaaactccagaaaaacgtaaatagtgcgagtcagtga

SEQ ID NO: 249374 - DNA, 1059 bp, Klebsiella pneumoniae
atggagttcggtactgattacgacgagtcccagctggcggaaatcatgtgcggttctgacctggtgggcgatatcgtcgataactggcttcgtcatggtcgtgaccttcctacggtggcgttctgcgttaacaaggcccacgcaaactttgtaaccatgcagtttaacaaggcgggtattaatgctgaggtcatggtcgcagaaacaccccacgaagaacggcaggtgatgattcaccgcttcgagactggcgccacaaaaataatcgtcagtgttggtgttttggtagccggttttgatagcgatgttcgctgcattatctacgcccggccgacaaagagtgaaatccgctggctgcaggcgattggccgcggactgcgaactgcacccgggaaagatgcctgcctgatttttgatcacagtggtaccgtgcatcgcctcggcttccctgatgccattgaatacgacgaactaccgtctaaaaacgatggcatgaaaggggctgcagcgcgggcagccaaagaacgcgaagagaaactcccgaaagaatgccctgaatgccacttcatgaaacccgccggcgtctacatctgtccgaaatgcggttttaagccgctggtcggtgaggacgtagaaaccgacagcacccgcaacctcaaaaaaatgagtaaaggcgagaaggtttacaccaaaagcgacaaacagtcctggtggagtcagatcaagttttaccagcgtcatcgtgcggcgcaggggaaacctgtcagcgatggctggtgtgctcatacctttcaggagaaattcggcgaatggcccaacggcttaagcgactttccaatggagatcacaccggaggtcagcaatcacatcaaacacaaacttatcaaatttgctaaacgccgcgaacgcctgcagcagatggggaagaaacctgaccaggatctatttccacctccgagcgccagtatcaaatatgagcctcctgagggcagcgacgggcaattaattatcgaagcaaaacgaaagtttcaggaaaacgtaaacagtgcgagtcagtga

SEQ ID NO: 249375 - DNA, 141 bp, Klebsiella pneumoniae; identical to SEQ ID NO: 36145

SEQ ID NO: 249376 - DNA, 1020 bp, Klebsiella pneumoniae
atgagttcaccggaagatctgttaaccgcctgcgccaccagccaggaagaaaggcagcgcctcacctcccgggcaaatgatgccctgtcgctctgggataactggctgcatccgttcacctccgggcctgaaaccggggacgatcccgcatacgatgataattttcagctgatgcgtgaagagatcaataagctttcaggtaccgattcagcgttgttgtgcgaactggcccaaaagtgtctttgcgaatgcgccaaagacattcgtgtcgtgacctggtacgtgcaggcccgactcagccgcgacggtgaaaaagggttgtccgagggcttactgcttcttgtcgcgatgctgacccgctacgggcaggcctgtcatccccggcgccccgccgcccggaaagctgcgctggagtggttgaacagtgcaaaagtgattgatgcaatgctgttatggcccgaggtggacagtaatgatgccggtctgacggctggcgctattaacctgcttcagtccgtcgtggcagactggccggaagccgagaaaccgtcttttgcaggcctttgtaccgctcttgaaaaccgcctggcacgttcgggtggcatggaagtgctggtcccccagaacagcagtgctcaggagcaggggcatgaaccagcccattcggattcaccgcaactgtcagccgtgaaatctggccgcgatttactcgacaaggcaaagttactttcccgctggctgagcgaacaatctcagggttggctggcttctcaccggctgattaagaccgtgcggtgggatacagtcgatcagatcccccctctcgacagtagcggccgcacccgcctggtaccgccgaaacccgagtatcgcgctcaacttaagcggctctatattcagaaaaactggaccgaactggttgagcaggccagccagatgtattgcgaaggggtcaaccatttctggctcgatcttcagtggtatctctggcaggggctcagccatgccggttacccctag

SEQ ID NO: 249377 - DNA, 483 bp, Klebsiella pneumoniae
atgcgttatcgctttattgccctggctttatgccttctttctggcagcaaggttgccatatctgcgggatttgattgttcccttgcaaatttatcaccaacagaaaaaacgatatgtagtaatgagtatttatcaggccttgatagtgctcttaataactttttcaaaaagacctatgacggttctttaagccatgggcgcctggctgaacgtcaaaaagagtggctaaaagaaagaaacagttgccagagtgatgtagcctgtattactaacagctatttaatacgcaataaaaatttagcatcaagcaacaaattccaaagtgtcagcgacatttttaaccgcgaaggcgacaaactagatgaggtattagatggcccaattaagaccaaatccggatttacaataaccgactcaccatggttggtaaaaaaaacttttcatctgatagttttgaaggcggaattaatcttgagggcatga

SEQ ID NO: 249378 - DNA, 258 bp, Klebsiella pneumoniae
atgagttttgatttcaaccttgcaccgataagcttaaaagcccgacaaggtaacatcgatctcgccgcttccggcgtcgcctacaaagaacgaatgaacatgccggttgtcgccgaagtggtggccagagagcagcctgaacacctgcgggactacttcatggagcgcgtccgctactaccgcgagcagagcatccagcttccccgcgcatccgatccgcgctatctggaaatggctgagcagaacgccaagaaatag

SEQ ID NO: 249379 - DNA, 924 bp, Klebsiella pneumoniae
atggttaatgagataaagccaatatcgccccgccaaggaaatctccaattatttccggtgaaggaggttgaagttgaaggtgtggcaatgggtgttcttaatgatggcacaccatatctcactggccggggactggctgaaatgtgtggcgttcatcatagtgtaattcaggatatatcttctgattgggctggagagcgccttaagcctcgtggtagaaaaattgacactattctccttgatcagggtatagatgttgaatcactttacataccatcatcagaaactaaacgggaccattatccgtaccctgactacgtctgcatggcaattcttgagtattatgcatttgatgcaagccaagcaaacaacgccacagccctaagaaattatcgccttttagcaagacaaacacttcgtgagttcattttcagaagtgttggtatcgacccaagaaacccggttagtggagcctggaagtgcttccaagagagaataatccttaatgataaaatccctgcagggtttttcagtgtattcagagagatggttgatataaccgtgcctctgattaatgctggatttgaattgggccctaaaacggttcccgatataagcgtaggtactagatggtcaaaccattggaagcgtaacaatcttggcgaaaaatacggggatatacagaaacaccctcacgtctacccagactggtttccgcagagtaaggcgggaaacttgccagcaaacatttacccagaagaggctctgggtgaatttaggcgatggctgcgtgaggagtacgtcccgaaaggattcaaggaatacctagctgataaggttcagcaaaaagtcatcgaaaatacaaaggccattgaggtcctagaaaacctgcaaagaccagaacttccaaataagaagcaatga

SEQ ID NO: 249380 - DNA, 312 bp, Klebsiella pneumoniae
atggacggacagacatccatcacaacgggtcgtgaccgccactgccaacgcgatgagctcatgtgttttggcgtccaggtggcctgttacgacagccgcattttgcatcttatcgatgccttgcatcacatcgggttgcagacctgcgaatttcccgatcgctgcccggagttctttccgcatttaagtccagtgaaccatcactgctatctccgtttgatcaatgcgttatcaggcaacgtcgtagatacgcacgtcaggcgcgcggttcagatagggtttgagcgcctcaaccacatctgcggtaaataa

SEQ ID NO: 249381 - DNA, 1452 bp, Klebsiella pneumoniae
atggctgatgtaaaagataaattaaaatcaaaatatattgcgaaaaatagatatcaaaattttggccctgttataaggagcatggttgtaaatgggtttagggggattaatgagcttactgtgaattttgattatccagttacagctatttctggacttaatggggcaggaaaaagtactttaggacagttagcaatttgcggttataagaaaccagttacggctcaaagttataagagattatatgttaaagacttctttcctgtatcaattgcagaccctgccccatttactactgaagcaagtataatatttaagtatgaaactaatgatgttactaaaacgcaagatgttacagtttctcgcaaagagtcagcatggtcaggatataaacgccaacctgaaaggcattgttattatatcgggtttactgtttatatccctaaggttgagcgaagagatttgagcatttacggagggaaggaattcgattttacaacgaggagaagtgtttcagaagagattatcagaactatggcgaaaattatcggacatccgtatgatgacgttgcatttcaaggtatatctcatcaggaacgtttgtctgaaataggcatagtggaacgcttaggttattcatattctgaaaataacatggggtttggcgaaggaagggtgttgtacactgtagatgtactagagagttctccagaacaaagtttatttgttattgaagagccagaaacctctttgcatgaaaacgcgcaatatgagtttgcaaaatatcttatggatgtttgtaacagaagaaaacatcaagttatactatctacgcattctagtgtaatacttaatgctttacctgctgatgcaagaaagttgttaatccgagacaggagcggtgtggatataaagaatggtatttctactgctcatgtgagatccatactgtcaggggggcattttaaggggttgtatgtttgtgttgaagatcagtttgcaaaagttctattaagtgaagtaattagagctaaaagacgcgatattctcaagtcattacaaataacagatgtcggtgataaaaaagtagtacgccaagctatcgaggttttctcaaagtcaggagttaatgcaatagctgttcgagatgctgatgttggtgaagctccggcacaaaaactatattctttcccaggaaatagacctcctgaagttgaagtctacagtaatgaaaaagtaaagaacttcatccaagataaatatcatgttgatgtttcatggttgttgcaacgtgaagatataaccgatcaccaccaaataactaaatgcatagcagaagaagctgagtgtgaagaggaggttgtacgtgctctggctataggtaaatatatagaagacttagacggagcatttgatgaattagtggagaatgttgttcgtaatattgtctag

SEQ ID NO: 249382 - DNA, 723 bp, Klebsiella pneumoniae
atggttgatcaaaatgatttgaattacatagcaagaacagctttccgtgatatagctgatcaagattatataacggcgcgttggtgctacaaatctcgcttatctattcagttttgttggatggctcaacaatgtatagagaagtatttaaaagcaacattgttatttaataaacagagtaccacagggcttaatcacaatataattgaggcatttcatcggttaaaagaaaaccctaacttcaagttcgaattaacaaaagaaacaaatgattttttagcatatattaatgaatatggtccggcacgatatctggaatggcctacgctagtatttgatagagaacttgaaaagctggataaaacagtctgggaattgagactttattgcagaccaattacagactttaaatgtcgaggaaaagtaatatcgactattggagatgaagaaaatgatattgagaaatggctttcatcaaaaacccctttcaaattcagaattacaaacgggtacttagagaaggttttatctaataaaaaaagcccccacagagagcctttaatatgggctaataagtttttcggcaccagaaaaaacaacactgaaattaataggtatgtgcatatgagaactccggttcacgagtttagtatggaaaaagcaatagaactaaaggattatataacaatccccaaattcataatagataaaataaaatcctaa

SEQ ID NO: 249383 - DNA, 684 bp, Klebsiella pneumoniae
atgattccagctcctgaagatacaatatttactgcatctaacattataaatttcttcgtcgcgctaggaacttgcaccgcagtgttagttgctttagttgctaaaaaacaatcatcttttgaatcaacattctctctcttattatctcaacacaacaatgctctaaacgaactcagaaaacaccccaaatactcagaattaattaataaactgatggatggtttagttcccttaaaagaaactaacatgctaatgcaccagcatgatactgtttttggtagttacttcagaatattatatcatttattaaaattcatcgataataatgctggatatcacccctttgatcacttgcgtaaaaagacctatacaagccttgtccgtgctcatcttgataacgaaataacgtacttacttgcaattaattgtgcgcatgcagacaataaaaatcaatattgcctgtacaaaacactgattgaacgttatgccatgctagagcatttaatcttgaataaatcaatactactggattataaaaatcaggaagtaaacgaaaataataacaatttacgaataaccacaataatgctcgatgatgatttgaaaacaattttcaatgagattacaagtgtatatcacaagagcgcttttgggaaaaacccagagttacaaaattttctataa

SEQ ID NO: 249384 - DNA, 735 bp, Klebsiella pneumoniae
atggcgcaggatacttggattgtccaattgcagatgctattagctcatatacctgtcaaggatattatgattaatgcagtcggaagttttgttggtggtgtagcactcatttggcttgcaatgagtaagcatggcgttcgttttttaagggcaacgttagaaagacctaatgttcgtatcgaacgacgtagaacacctgaaaatatattcatagggatagagcttggtgctccatctcgctgggttgaacagcaattaggtgttcctaaccgcataggcgataaatggtggggatataggttttcagactcactggtttctctgacattcgactcaaatgattctatcgaaaccatcgcagtggcattgattgaccatgatacaactttcgaatttccttcttggcacctttgctgtccaccgctgggaagattaaccctaaaagatcttatggaagaggaacacttaactttggagtatagggaatccttaaggcatcaagaacttgtcgtttcgggaagagaaggaccgccaggagcatggagttatgttgcctttggggcattgtcccctcatgcccctgggcagttgttaccgagtgatttcgaatggaatagggatagtgaatctcttctgagcaactcacaagatgtaaaaatcaactgggcagcagtttcaagcacctcatacatctatacttttccttgggatttaggtttaacgctccgaccttga

SEQ ID NO: 249385 - DNA, 1119 bp, Klebsiella pneumoniae
atgtcaactcaaagctttaactctattgaaagggaagccatatggtcagcccacaacaaaaaatgtgcgtacacggggcagtctataatgataaatggtttccatattgaccatataatccctgagcacttggcagaaaaaactgatgagttatcaaatattaagtccagcttgggtttgccggatgattttgatatttttggatatgaaaatttattgccttgctgtgtggcaactaacttgcaaaaaggtaagggtaattttgagggagctcatgcgcattattttttaaacctggccgggaaaaagaaatcagaaataattaaaaatatagggaggattaaaaaaaggaatgacaaggcaaaggctctattaattactcaacagtatcttgagagcggaagggtgagtaccagtgatcttcaagccattttaaatcagagtaattctgatgacatgtataatttaatggtgtcattgaaaatttcagatgaggagagtattaatgtaatacgaaaatctgacatggaagacttgtgggaccaaaaagtaattttaggagataacaatgacatagaaggtgttgttttgtgcaattctgaaaatgaaactatgcttgttaaaactagcagggagtttcttgaagcatcagaaaagggatttcatgctgaaactacttatactttgaaaatggccagttattttgagtggcaatgtggattgctcaaagctatatcgaggtcagtattaccgacagagagttacatagagaaccccagggtaagtatacttgatattgatttgttaccgtaccatatttttccgtgcctgtcgcaaagtgtagatgacattattgatagaactagtacatatcaaaacatgcttgatgataacttgttaaaaattacacaggttaagaataatttattaagagttgaaagtgatgttatggggcaacagctggttgaagtgatcagggctgattttaacggcgatggctatgaatctatattatgctttgaatacacttgggctactgaaggaacatttggcaggggagggatagtaatcctcacaagaaaatctcatgatgctctctttgaggttgttgaactttaa

SEQ ID NO: 249386 - DNA, 243 bp, Klebsiella pneumoniae
atgaaaaaagcacaaagcgtcaaaaaaatgggttatgccaagttattgacccctaaagggaataatatagatggctttgctgtttcaaacgactttgaaaaagtttttttcaaatactcttcgcaaggtttgaacaatcaagtcgaagagatgatgaatgattggatatcaaacaaagtcaaacaagaggaagaagaaatttttaaagatataaaatttcactcccaaattaagacagcgtaa

SEQ ID NO: 249387 - DNA, 981 bp, Klebsiella pneumoniae
atggacaaacaaaaagtagaaaaagtcctaaagaagaacagatatataaatgcaacatttgctaggcattttatatctgcatttaatatttggaatacgttgttagcaccaataataataggcgttggcgtttcttatctattccaatacaaagataatcctgacggaatcaataatttattttttgtattgtgtggcgcatttataatcatacattttattttagcattagcatttaactatctagataaacgaagtgatacaaccatagaattagctgaggtttcagaaggatataatgggttaatatctgacatggaaatcgtaaaggaaaggatgcgcgtggccaatgaattaaacgccacgcagaaaatagttatttacttagctaccctaaaggttaatagtcatattaaagatgttttaatcaagaaaaaagagaactcgtttacaacaaaagagttagattcatttgttaacgaattcattgagaccattataaattacttgtctaaacatagagaaactttgttcggttatgaaagtaaatcaagatataacattgctctttatgtttatgacccagagcaagagcaattagttgtcgcagcgagaaaatgtgatgacagaattgatagaaaagaccgtccgtggaaatcaggatttggtcatgttggattgacttatctgcataaagagttaaaaatatgcccaaatattcatagtagtagcgagctaaaaataacaaactcgctagataaaattaactactgttcatttatttcagttcctatccttacatataatgagaatgatgctgaaaatgactgtttaggcgtattagtcttaaccagtgcgttacctgaacaattttccttgcaaagagataaagagttccttcaaaacatttcctcattaatagcaatatatatagatgttatagctagcatatataaagaaattaacagccaacaaaaataa

SEQ ID NO: 249388 - DNA, 654 bp, Klebsiella pneumoniae
atgtttcgttatgccatagctactgggagagctgaatttaatcctgcagcagttctctctagcgccctcgaagtacatcaatccaatcatttcccgttcctaaacgctgatgagctacctgattttctgcgtgctttagatagctacacaggtagtcggcttgtccagattgctacaaaattactgatgatcacgggtgtaagaaccattgaattacgtgcatcattatggcaagaatttgatctggattacgtaatttgggaaattcctactgaaaggatgaaaatgcgcaggtcacatcttgtgccattatcgactcaagcgttagatttactttatgaactcaagattatgacaggtaactatcgttatgtttttccggggcggaacgatccgaacaagccgatgagtgaggcaagtatcaaccaagtcatcaaacgcattggttatagcaggcgaattactggacatggatttagacatacattttcaacaattctgcatgaacaaggatatgagagttcatggattgaaatacagttagcacatgtggataaaaatagaattaggggaacctataatcatgccctttacttagaaaaaaggatgagtatgatgcaatattattcagatgttatttttcctagagggtga

SEQ ID NO: 249389 - DNA, 594 bp, Klebsiella pneumoniae
atgccgttctggcggctgcgaacagacggcttctgggagatcgctcacgcagaaggctgcaaaccgcgtaagggcaatactcagccgacaaagaaagaactgattgataaccaggtggcgggcggcttcgatgaagcggcttatcaacaattgctggcacaccctgcgatgatcgaccagttggcccagaagatcctcaccgatcgctccaggaaccgcgatccgcgtttcagggatatcgttcttcgtgcttaccactcacggtgcgcgttctgcggttacgacctcagactcgatggcgcgctggttggtattgaagcggcgcatattcactggaaagcatatggtggtccgtgcgtggtaaataatggcctggcgctctgtacattacaccatgacgcgtttgatatgggggcgtttgggctggatgagagtatgaccatccgcatctccggcggcgtccgtcgtagtccggtggtagaccatctgttctggcagcgggacggccagcagttattcctcccttatgacaaaacgcagtggcctgctgaacagtatgtcggctggcaccgtaaaaagattttcaaagcctga

SEQ ID NO: 249390 - DNA, 1326 bp, Klebsiella pneumoniae; identical to SEQ ID NO: 106841

SEQ ID NO: 249391 - DNA, 630 bp, Klebsiella pneumoniae
atggctaagggaaatattaaagtagataataaaatgtatattttctgtgagggtgagaaaaccgagccatattatctttctgcttatgtggaggatagggtaagccataaaactaaggttatcaatattcccaatacaaagaaaaatactccattgcagttagtcgatgaagctattgcgaaaaaaaacagtaaaagtacgatatctggtgatgtattttgggttgtatatgatcgtgaggctgtaaataaaataacaaaagaaaaacatcaacaagcatgggacaaagcaatccgaaatggcattaacgttgccatttcaaatgtctgctttgaattttggattttacttcatttcgaatatacatgttcaacctttacatcctttttgaatttgtataatacatctaatcttaaaaagcatctaagcaaagaaggaatcgatgattacgataagggtaatgatgagctttattttacgatttcatccagaattaaaactgcacgcaaaaatgcagtcaaagtgaatgctcaggttctttctactgcaccaaaaggagttgataaaccatacgagttattcccttttactaatgtgcatgaattattagatagtatagatagcttttag

SEQ ID NO: 249392 - DNA, 129 bp, Klebsiella pneumoniae
atgatttcaaatgtgttccccaatatgagctattgccactctgtttttatcacttatcataataaatccaaaataaattctattcttatggtgtttcctgtttcccttaacatcgtcaacattttctaa

SEQ ID NO: 249393 - DNA, 1476 bp, Klebsiella pneumoniae
atgaaagggaatgtagctaaaacaggaagatcatttaaaaataggattaagtatatattaaaagatgaccacgattttatttgtagcaatatatcagcagataaaaataatgttagtgatcttactgatgagtttaaaactgtaagcagctttagacttgatataaaaaaaccagtctttcatgcgtttttatctcttccaaaaaatgagaagctcacagatgaacaatggcaagaaatagcaaaagactatttgaaagaaatgaatatcgatatagacaaacatcaatatatttgtgtgcgtcataaagatacagatcaagaccatatccatattgtagccaataggattggtttagacggttccgtatggcatgggcagcactcagcatttaatacaatagcagcttgtgaacgtcttgagataaagcacggcttaactattaccaaaggtttaaaaggccaaaaatcagacgtatcagcaccaaccaagaacgagatcgagcaagccttgaggacaggtgagaaaccagcccgtatcgtgctacagaacgcactacaagcagctttagtcggtaagcctgatttgtctacgttcgtagaacgtctgcaggccgtaggcattgaaccaaggttcaatgttgccagcactggcaacgtggcgggttgttctttcagtgtgggagatgtggcattcaagggatctcagttgggtaaaaaatacagttggaacactataaaaaacaaggtgatatatgacaaaaatagagatgatgaactcattaggagcttctcagcaagaaaagatgatgaaccaaatagtgttggacgatcatttgttgaaccaaatatcaatgacagtagaacctctgacagaatcgatgatgatattatccgaatcagtcagcacagcattaaatcagacacaacagacacttacgagggtgaacaactcattagaagcaacaacaacagctttaaactcagcgaaaaatataatagaccaacaggcccaaaagctagaagaacaacacaaaaagctgcacaaatactcaacagagttaaaaaacaatacaataaagaaccaatcaaaacttataataaaaatggcctcaatagttggcgtgataaatctgatagcggttctattggtaggatacttgatcatgcagaaacagccaacgcagccacccattcatttagactcaaaggccgtggcagtttcaatagtagagcaactaagatcgaagagataagagataaacttggaataaaaaaaccagttattcagccaaagaataaagaaaaaatagttaaagaagaaataaagaaaaagccgttaggtttgagtatggatgaaaatagatttaaatcgaagttaaaagaagctcttaaaaaagaaaaaccaaaaaatgaaacaacaccacagcaggaagacgatcagcatttaaaaccacgaggttttaaaccgcgataa

SEQ ID NO: 249394 - DNA, 1956 bp, Klebsiella pneumoniae
atgaattttgaagagcttataaatgatattgaaagactcttaattggtaaagagttgcagtctataaatcctaacactcccccattattccttttaaaaatagacagggatattggtaaatattacgtgtctgtttctttaaatgctaagcctatggcaaggtcaatttctgaatttgaatatatatttaatgacctactgcgtaaagggttttgtaatgtagatcagtcattatatggtagctcttcaagccgtaatcatccggaaacaatatttgcaaacttgccttatattcagttctttaagttcaagaaaaagaaacatattttattacgtaataaaaatgtacatgaagcaggtcaactttctgaattacaaggggctgagtctcgtgctataaggaagcaaatagaaaattatttatctcttaatttaagtgaaattgcagatcagcagttaaaatcattggaaaaaatgttcgatgcctatgatgctattttaaaaaaatatccaggggatattcctgttataatggctgagcaaggtttgctgggattaaaaaacattagcgaagttctgattgattcttatgtttccttggactttgacagtgctggcgataaaataaataaattaaataaattaagtaaatttaaacaggtagagttatttaaagaagatttatctttagaggatttacttgagtcccctgaggtaagtggaattgactcaggtgataagaatattgaggatcaatcggactcagaattagcacctgagcagaaacgtacgggcattgcaaaaatgcttatgactacaccagttttaacactaatttttgatcgtgtaagatatgatgaaattgagttacaacctgactttcagagaaaagaccgaatttggcctgacgacaaaaagtcaaaacttattgaatcaatattaatgaagcttccattaccggggttttactttggtgaaaaaccaaacggtaactgggtagttattgatggccttcaaagaacgactacaatttgtgattatatgagtggtcatttctcattgaaagggctctctattttagagcatttaaatggaaagagttttaaagatcttactcgaaccgagcaacgagacattagagaatatcaaattacggcttaccaaatagaactaaatgatgatagttctgaattggttgtagaactattccatagaataaacacatatggtgtaaagttaagtagtcaagaaataagatctgcacttaataaaggcaatagcgtaacctttttacgttatttagcttcattagaaacgttcaaaaaagcgacgcaatttaaagtaaagccggacaggcaaaaagatatggagctctgtttgtccgctcttgcttttatggtacttggttataataactatggccaacattcgtatgatcattttttatgtagtgcaatgcagaagctaaataattatccattaagcatcattaataaagaagagattgatgctggatcagctcttatttctccttcaagtgaagtctttttaactttatattcaaaatataatcaggctttaatcttagcaaatgaagtttttggtgaaatagctttttcaaaagatccggaaaataaaaaatcacctattaataaacaactctttgagttaatagttactgttttctctgtatttgactcacatcaaaaggagatgatgttagctaatggtgataaatttattgatagcttatacctggctattgaggagaatagtagtcgatatgctaagtgggagtctgatacatatgaaaaggacgatagaggatttagagactcaatatctacttcgacaggtaaaagaatatctgttgtatatcgatttgatgcttttttaaatatccttgaaaaaagcacgggaataattattgatagtaaattattacagggggagtaa

SEQ ID NO: 249395 - DNA, 1149 bp, Klebsiella pneumoniae
atgaaaaaaattacgtctttaacattaaaaaatttcaaagcttacaaagaacagagttttgattttagtaatttaactgtattttgcggtaataattctgttggtaaaagtacggctattcaagctatcggtatgtttctccaatcagatatgaatggtaacagtaatctaaaaataaatggcgatttagttcatgtcggagacttcgacgatattcataatttcagtatgcgtgaggatgatgttttatatttaaaatatacatttgaagacgatacgatttgctggggatatggtatagaagaaggggatgctagagaagaactttctaggaaaaatgaattaccttttattgggtgtgataaacaattaagaactataacaaactcacttaaagataacttttcattccaatatttggaagcggagagatttggtccaagagataatattccattatcacagcacaattatcatgaaggttggcttgggaaaaatggggaacatacaattgaagttcttgagagtttggtcacaaggaggcgtttaaatttttcagctcaagaggatcctaggaaacatgaaggaattgttaataataatgttttcaatcatattgaagcatggatgtctgagatttcaccagggcatcgtatctcacctagaattgaggctagggcgaatgttgcatttaatgtcataatcccttcacctggacaatttacgaaacctattaacataggatttggatttagttatgctcttagtattgtcactgctttaatgctggcatcagaaaatgaactcgttattattgaaaatcctgaggctcatctacatccaagaggtcaaagctatttaggccgacttattgctttatcagcaaaagcagggatccaggttattattgagactcatagtgatcaccttcttaatggcataagagtaattgcacgcacagatccaacttttgatgcttctctttttactctttactatatttcacgagaaaatgatgaaacatctgtcgtgaaaataaaaataaataatgaagggaaactttccgaatggcctagagggttctttgatcaacaatcacaggatatgtatacgataatgacaggctcttttgaacatcccaatatttaa

SEQ ID NO: 249396 - DNA, 1179 bp, Klebsiella pneumoniae
atgtcatatcagtttatacatattgaagattacggaataaatatatctaaaaaaaggagtaataacggaacgagtgaaaaatacaaaaaagaaacaaaaggaagatccgttagtcaaataatatcagaagcaaaaagagacaatgggttttgttctcatgttgaaaagccagaagaaccgattattttatatggtaagagtttagatgaagttgaaaaactcgctatggaataccatagtaaaacaaagataatagataaaaacgggaaagagaaaaaattaagatctgatgctaatgttttactcgctggggttatttctttaaatcgtgaaaatatggaaatatgggaagattataaaaatgactcgatagcttatttgaaaaataagtatggtaaaaagcttatatctgttattgaacacaccgacgaggaacatcctcacatacatttttattgtatacaggatataggtaaaaagtttgatttgatacacgacggaaaaaaagcattatttgaaaacagagacaagaaaaaacacgatcagaatatagcttatttaaatgccatgagaaaagttcaagaagatttttttcgtgtcgtatcttctaactatggtttatcaaaggatggtccgaagagaaaaaggaccagccgaaaggattattttaagcaaaaaagagaaataaaacttattcagcaagtaaaagaacaggcaaaaatagatggttataattttgcagtggatgattttcatgggaaaagctggttaaacaaggttgtaacttcttttactgttaaaaacagcaccttacaggaagccaccgccagaggtgataggtataaaaaaggactttccagcacaaaaaagaaacttaaaaatacagagagtgatttagaagaaacagaaaaagaactatcttcactaaaagataactttaaagaaagagtgaataatcaaacatcattacttaaagataaaaataataaactaactgttgagaatgagaatataaaaaaacaaaatgagcagttagagcatgaaaataaaaacctaaaaaccattttggaagaatcttttccactctacgagcttttgaaaaataaatatggtgatcgctttgatgaatggaaagaaagtttatttaatactgtaaaaacgaaactgaagtttaaatag

SEQ ID NO: 249397 - DNA, 984 bp, Klebsiella pneumoniae
atggagaatataggtaataaaaaaaataaagtcaagtacgaaaacttggcagatcgatctgataaagatcaaatatgggatcatcatagaaaagaaacagatcttgtttctgttttatatgaacaggaaaaagagttttatcgttatttcgaaagaatggaagattgttctggtcgtttagagttttcacagcttgtaaataaagacactggagaaatgaagattaaattaaaatctgctcatttctgtcgagttcgtcactgccctgtgtgccagtggcgaaaatctttgatgtggaaagccagatactggaaggcacttcctgagatacaatcaaaatatccttctggtagatggttattttttactttaacagttagaaactgtgagataacagaagtaaaaaatacaatccagaacatgcataaagcattcattaaactaatccagagaaaacattttaaaacttataatctgggttttatcaagacaactgaaataacaagatcgaagaccggaacggcacaccctcactttcatgtattattattcatgaagtctacttattttaatatcggttatatgaaaaatgaggcttggagtgagctttggagggattgtttaggcgtggattacacaccgtcagtaaagattaaatccgtcaggaacaagaagacgggtgaagtggtcaagatgggtgaagacggcatggaacatgctgttgcagagactttgaagtattcagtaaagccagcagatatgtatgcagatcgcgaatggtttcacgagatgacaagacaagtccataagatgcgatttgtctctaccggtggagtgctgaaagatatattcagtgaagatgtatcagaagaagaaatgttattattgaatgacgaggaagaaacagacgaggatttaaataataacatattctttaactggtataagaaaaacagcaaatatagacgaaagattgtagagtaa

SEQ ID NO: 249398 - DNA, 507 bp, Klebsiella pneumoniae
atgataactaaaagtagagttcacgaaaatgttgaagatataactgaagttttaaatataaagaaaataaaagataaagtagatgaaatgcaagaacgtggagatgttaaagccacagtaatcatacaagatgataaaaagataagtttaaaaaatgagtttgtgatcttatttttagaaaactttgatcgtttaataacagagttaaaaatcaatacatctgaacttcgtgtattgatttacatcctaaagaaaatggagtttggtaacttagtttcattgtctcaatcatctatagttaaagcattagatatgaataaatccaatgtctctattatatttaaaaagcttttagctaaagatgtattaataaaagatgaagacggtaatatgtacgtaaactctaatattgtaatgaaaggattaaaacataagctatcaggaaaaaataaagagaacttacagaagtctcaaaagcaaacagatttatttgataaatcacattaa

SEQ ID NO: 249399 - DNA, 1470 bp, Klebsiella pneumoniae
atggaaaagttcatcaccaatcccggaagagtgggggaagatgcgccggtttatctgacctggaaaaccgatgcaccgttgtttgagaagggtgagcggggaatggttgcgggcagtcgtaaaacaaaggcgccgggtattcttacgctggcaaaagtccctggcgttgatgctgaggggaatacgctgtccagtaacaaggatgcggcatactatcagattcgcccggaaggtggctggttacctgcatcaagtgttcagaaggtttcgcagtacgcgttaggtgagctcgggtttgtgacgctgaataaggcttcggaaagttttgacctgattgatgggataaaacaaccgaacaacgtggtgaaggggattctggaacagttgtataaagcggcacaggatgaaacgcgcaccactcacgcgctgaacaagtataactataaacggctgctggaattgatagacagtaaccaggacgggtattaccaggagcaggagtatcttcaggcggtacataatatctcttaccgcgaccgcctgtaccgtgtaattgcaaaacacgccagtgaatggtactacggcaaggatgccccgctctggaagacatacctcgatacgttaaccagggatgcgccattgtggaagacgtatctggaaacgtttctggataagatgacgtggatgaagacggtatccgaaaagggcgttgcgctggggtcggagccgtggcatatgcatcctatagtatttttaaattctataaaaaaagggaaatccaaaattacacgagagatgctcaggagaatttggtctgacccaggaaatgtttctgactctgttcttgatgttgttgcagaagaattttcgaataaatttgaagtttgtaatattaatactaaaaatagactgtatcacttttttgctcaaatatatcaagaagtaggccccactttcaatttgaatgaggggtttaattataggccacaagtacttataaataagtttgcatattatcgtaatcatcctcaagatgctcaaacggatggatatattccgggaagacaagtagcaaataaacagaatattgcgaacagagcatatggtggtcgagaggggaatgataatattgcaagtggagatggatggcgatatcgtggaagaggaatgaaacagttaacatttaagaataactatagatcttttacaaattatcacgaaagagtttggggagaacgtgttgattttgaatccaccccagatctcctagttgaaacggtttatgcggcaagatctgctttgtacttttgggatcagaataatttatttagtagcgctgataatggcattagtagagctgtatcagactcaataacgcgaattgttaatctctatgataatcactatgaagatagacataataatttaataagatttctacaagagggcatttttgatgaaatattctaa

SEQ ID NO: 249400 - DNA, 366 bp, Klebsiella pneumoniae
atgtcatatcagtttatacatattgaagattactctaaagtaatatcaaaaaaaagaggcaatggcggcaagggaaaatataacgaagaaacagaaaaagaactatcttcactaaaagataactttaaagaaagagtgaataatcaaacatcattacttaaagataaaaataataaactaactgttgagaatgagaatataaaaaaacaaaatgagcagttagagcatgaaaataaaaacctaaaaaccattttggaagaatcttttccactctacgagcttttgaaaaataaatatggtgatcgctttgatgaatggaaagaaagtttatttaatactgtaaaaacgaaactgaagtttaaatag

SEQ ID NO: 249401 - DNA, 984 bp, Klebsiella pneumoniae
atgggaagattatataataaaaaagataatgtcaagtttgaaagtttagcggatagatctgaaaaagataaagtctgggatactcacaggaaggactgtgatttagtttctgcattatattttcagtcagcagagtttgaaagatattttgaacgaatggaagattgctcaggtcgtttagagtttaatcagcttctcgataaagaaacaggcgagataaatattaaacttacgaaaacccatttttgccgtgttcgtcattgtccagtttgtcagtggagaaaatcgctcatgtggaaagcaaagttttataaagcacttccagagatcgaagcggaatataaatcagcaagatggttatttctaactctgacagttgaaaactgtgaaatcacagacttaaaaaacactcttagtcagatgaataaagcttttaaaaaaatgattaagaggaagcattttttaaaatataaccttggttttgttaaaacaactgagatcacaaaaccgagaacaagcaaagactcaaataaagcacatccacatttccatatcctcttgatgatgaaaagtacatattttaaagatggctatttgaaaacttctgattgggctgaaatctggagggattgcttaggtgtttcgtatacaccgatcactgatgtaagaaaggttaaagccaagaacggcgggggttctagcagttcggctcttgctgatgctgtggctgaaactttgaaatatgctgtaaaaccttcagatatgacaagggatcgtgagtggttccacgaactaaccagacaagtatttaagttacgttttgtctccactggtggagtattaaaagatttatttaaagaagaagcatcggaagaagatttattattattgagtgaagaagaagaagaggatcaagatttaggaacgttaacttttaactggtataaaacaaaagcaaaatacagaagaaaaataacagaatga

SEQ ID NO: 249402 - DNA, 573 bp, Klebsiella pneumoniae
ttgaagtcagatatgatgcctctcgcatttatgtcaacgctccgcaccgctgaacttcacgttcaggcggcaacctgggactggaattccgggcgtttcctgccgcatgtggattcagatggcgaaacgacgcgtttaacgcgccatgttcatccgggtggacgcgatcatgatgtgtatcgtgttgttacccgccgaaaaacggagttttttttatcccgaaccgccgcaattatcgccgcgaacgtggatgctcgccgccctacgttcaggaaaatcgctgataaccgctttatttgcattaccaacgattgcggcttgcctgacgcactggcgacaggattgcggcgcaacctgctcagaaacggcggcccgacggaagccggatatgcttaccctctcgacgacatatctttccgttggctaaaccaactgcttcctggatgtttctattcgctctcgtcggatgacgataatagcgccagccagttagtttccgcagctcgccattccggcggaaaaatgcgtcttcaatggcgaaacgggcttctagcgttatggactgggaaataa

SEQ ID NO: 249403 - DNA, 267 bp, Klebsiella pneumoniae
atggaaatgaacgatcgaatacgcttgttttttatccacatggcagccttatattatgccgaaatcgtgtcgaacaggagcgtaaaatacatatccgtggagcggggttactcgaatccattcttcaacgctggcaaagcgaagaagtggttccgctgttcgtcagtgaaggaacgcatgaacaaaaggttaacgctattcaaagcagtttttatctttcaaccgtttatcgagaagtgctcactgagccgcgagacaatttggtga

SEQ ID NO: 249404 - DNA, 642 bp, Klebsiella pneumoniae
atgcgctttcatgttgtatgcctgcttttactcacatcaggcgaggtggatcctggttattccccaacaacaaggatttggttaatctggttatcccaagtgatgagtggagtgttcaacgtgatagctgaattatcagcggctatggccgctataaaggagaccgctggtctcgcaaaagtaattaatgacgcgaaaacggatgctgaagtcaaagctgcaaccatagaactacaaagtaaactaatcactcttcaggcggagtgcttctcacttggtgatgcgataagagtacgggatgaagaagtaatgtatctcaaagctaaaattgcagaattcgacaattttatcgtgcaatctgaaggttatgttctcgccaaaactgagggcggaagttttgtgtattcaaagcaagttacagtgggtgatgaaggcttagtggttcatgcatgcccgaattgttatcatcaaaagaaaatatcgatgcttcagccgggaatagaaaagagctttaaaggatcttttttggttcatttttgcccactatgtaatagtaattttaaaatggataaaactccggtgtctaaacagccagtgaagcggcacataggcattaaccgatttggcggaggtggctggtga

SEQ ID NO: 249405 - DNA, 513 bp, Klebsiella pneumoniae
atgatggaggctaaagtaaaaggtgttttgattggtttgatcctcacaggcgcatttgctgcaggcgcatactggaaggacacacagtggcaatcgaaatggttgcaacgtgatattgccgaatcgactcaggaagtgaatgcgcagaccgttgcccggatgattgaacaggggcgtctgatcgcccgcgatgaggccgtaaaaaatgctcaagcgcaaacagctgcagcgcgtactgctgccgctaatctctctgatactgttaaccagctgcggcagcaggcaaaaaagcttgccacccgcctggacgccgcaagccacaccgcaagtctcgccgctaccgtcagaagcaaaacaaccggcgccaccgccggagtgctcgccgacatgcttggaaaccttgcagaagaagctcgacggtatgctgcaatcgctgacgaacgctacacagcaggaatgacctgtgagcggatttacgaatcagtaagaacgcctatccccaataagggataa

SEQ ID NO: 249406 - DNA, 1356 bp, Klebsiella pneumoniae
atgggtacggaaatttcacttaaggtctcaggtgcaccgatagactggagtaaaaatagcttaggggttgatcatgggaaattgttccagtcagctgaccacataatgatacctcagtatgaactctatggtttggaagacactgctgaaattgatgatgaaagacgccttcagtggaccgtactcagaaagcctcttgtagcggtggctgaacgggttgaattacttgggttttctcttaatgctattcgtgcggaatatgaaaatattgtaaagcatgagatcaaccgaagaaacgaaatgattgaagcctacccagataatattgaacctctagagaatctttttagttttgatgagtttatgagcttaattaaaagttatgatctagggaggttagacaatgaatacatcgagtttgattattcaaataaagaagaaaatttaattttaaaactattccctaaaaacattttaaaaagaatacccctctatgatcattataacgactccttctggtcagaaaaaaccgcatttttcagtgttataaacatacttcatccgtactcaataatcaaacttttaagtgaaaacaaaaataatcataatgaatatgtcgagtgggattatggggagatagtcgctaacggatgggtgcacattaaccacataaaaactgatattagtcgtgaaaattcttttctcatagcaactgaaggttcgtcggactcacatatattacaaaaggcattcaggttaattaagcctagcgtttgtgactttttccgtttcattgatgtaacatccggtcacccattccccggcactggaggattatcaaagtttgcagaggggctagtaaaaattgatgtacaaaaccaaatcatttttgtgcttgacaacgatagtgaaggggtcgaagcctacaataaaataatgaagatgaaacttccttataatataagttgcatgtgtcttccagatcttaaggagtttgagagtttccctacttgcggtccgggtggcttaagtttctccaatattaatagaacagctgccgctatagagtgttacttggatttaacatatagtgaatatgattcgtatacagttagatggactaattataaaaaagatactgggatgtatcaaggtgcacttgagtttaaagagtattatgctaagagatatcttgatacaccagaagctaagcttatcaatagtaaatataacacattcaaacttgaggctgtacttaattcgatcattgatacatgttccaaattgtccggagctatgcgtatcgaaaaaataaaaacccactatccaaatatatggactgaagaaaaaatttaa

SEQ ID NO: 249407 - DNA, 711 bp, Klebsiella pneumoniae
atggacaataaagaaacattatttttaattcaaaacattactcatcaagctattaatccaatgagtggggttattggtgcgctcgacaatcttatcgatggggttgttccagaacataaaagagagcaacgcttacgccgagccaggtcacaactagaatatacagtctcattaatacgaaatctatcttattttgcagaatatgcttcaggaaatacagcatcaatatcacactcttctatcaaaaccacagtgatacctcaagcaattattgagtccgctcaatttttccaagatcaaggacagcatgatcatattaaaattgaattagaaaacagaacaattcagaattgtgttagtggcgaccccaatttattaaagcaagtgttcatgaacttaattgataacggtgtaaaatatggaaaacctggtagtatactagtgataaaaaacaacatacaaaagaaaaccaatgatcttattattacctttgagggttacagcgagcctttttctaatgatgaagatttatttgagattggatatagggctaaaagtgcaaaacaaagaacatcatctggttcaggcctgggactccacatatgtaaattaattgtagagaatgcgtttaacgggtcaatctcagctcatcattcattagcagggatgacaaaattcgaaatcagaataccaaatgggtttttgaaatga

SEQ ID NO: 249408 - DNA, 885 bp, Klebsiella pneumoniae
atggaacttctgaacttatccccaacgaaattcgaaaatttaacttttgatattgttacggccttaggattaagaaatgctgtgtggagaacccctggtagtgattcaggtcgtgatatagaaggtgattattttatatgtgatttatctgggcagtatcaaagacaaaaatggtacatagagtgcaaacgttacacttcatcagttgattggcctactatttggaataaaattgcttatgctgaaacccatgtcgcagatatacttttatttataacaagctcatcactttcaccacaagctatagatcaagttagactttggaacgactcaaacaaaaaaccaattattagattttggggcgcagtagatctttgcgcaaaactaaacctatacccacaaatagcaaaaaaatatggtttaaagcctgagagcgaatcgaatattgaagctttcatgccatcaatcgatcttcttcttagaataacaaattctttatcacctgaaattggcgaagtatcacaaacaaaactatggttattacactcgtttagtgaactaatttcccgaagaatattggatgtgaatttaggttatggattttgttttagggaacatactgaaattgattactttgattgggttgatgtaaaaaaagtgaacttactatattttgataaatactctaccagagcgcttctagcttatctattttttatacttaaagaggcgccaacaatcgttcaaaaatctccatctttaatccatctcctgattcccagagagctaagagaatcagaggtaaaccacattaagataatatctcacttatccaattttaccataagcaccatagacgaagagattgttttagagctaacttaa

SEQ ID NO: 249409 - DNA, 1029 bp, Klebsiella pneumoniae
atgaaccgacgagattttttatctataggtcttggtgcagccactattgcttttccctactcagtcattgctaaccaaggaaaagactccttaaatggttatgacattgatctaactggtcaaaaagatagcacagatgagtttcagcgcttgcttaatgatgctgctgtttcggctcggcccgtacccaatggcatgcaaaaagcactagtaataattcatggaataattcgcgtttcaaaaacattaattatagatgcttcaagagtaaatatattagggcccgccacgatttatttttcaaagcaagcgcttggtataaattatggtataattctcaataacaatagtttgaaaaatgtttcttttacaaatggagttggctctttgtttgactcggttaatttttttactgaaattaaaattaatttgttctttgcttcaaatataaaaacatcagatactaatccatcatgtctaataaatattagtcaatgcagattcactggttttgataaaatatttacaaatggagctggaggatggggatggaactgggatagatgtggttttgatgaatgtagttggttgctttacatcactcagcaaatggattcatacgagcgatttagctttacatcttgtatttggcagaatggtggtacagcattttatgtagataacccttttggtaaaatctactggactgcaggcagttttgattattgtgatgcgatcgcttatataaaaagaggttacgtttccgtaagtggtcatcttgaatttaaaaaaagacaaaaacctgctgtaacattattaagtgatgactgtcacttttacttcttaggcggaagtatttacgctataaactgtagtgagcctttcactctctttaagcaatattcaaacgatcaaattactattcgcgatgttaattttatgtatgataaagtcaatgacggggttgttacactatcaaatatgaatttagaaactaatagtattcttttcaagaaaagacagcgataa

SEQ ID NO: 249410 - DNA, 1023 bp, Klebsiella pneumoniae
gtgaattctaatttgtctatcagttttacatcatataataccaaaatggcgaaagcaggcttacagttttttagatatattgtagcctgtctaatcgcagtcttcggctatatattaatcctgaaccaatattttggtgagaataaagactggagtgtctattcacgttattatgattattttattagtggttggggagggttattaacgcaggttgaaccagtttttcatttcatttttagtatcacgtcgtcgctacatattgatttattaaatgtgttaggtggaattgcgttagtatctttattaataaaattttttgtaattactaagatctcacggtccatcatccctgttatcttatacagtgcagctatgtaccctcttcacgaatatacacaaatccgtgttgcattagctattgcactttgttacttatatttgattctatgtactaagtacaagaaaacatcttttgtattgttatgtattatccctttcactcatacatcatgtttactgtttgttttatgctgtgtagcatcaaagaaattatataaattgacttttgccaagtcctttttgttatcactgtttgccttgattcttataagtataagtatacaattcgtagcaattgttttaggttcgtcaaatttagtgaattacctatccggtgatattattgataaaaaacctgctgtattatctataactaatattatattctttttatatagtgtctcttttattttaacaggtgtccaatataaagatcgcggtatttatattgcttctttgctttctatcatagcggtgccgcttgccataatattttatgcgtacccggttcttgctgatagatttaaggaacttttttttgcatttggagttattacttttgcttatttacttaggttttttaaatttacaccaaaatatttatttgcatttcttttgtatttgctattctgtgcatcctctgtttttgtctatttaaataatgggttgttatttcgatga

SEQ ID NO: 249411 - DNA, 1437 bp, Klebsiella pneumoniae
atgacattgcgttctaatgctaaatggaatatgttttctcagacattcaaagttttagtccaggtcgttaatattgtttatttagctaaaataatacctccagccgaatatggtctgatggctatggcacttgttatttttaattttggtattcttctaagggatctaggaacgtccgcagccatcatacaaagaaaagagctaacacatcctttaattaatactgttttttggttaaacactataatggggattgtattagctattattgttttcagttcatcacctctgattgcaaatttttatcaacaaccacagctaatccctattttaatgatgctgagtataacttttccattatctagttgtgctgcagctcatttggcattacttgaacgagactcaaaatttaaaattgtatctataatcgaggtgacatctgctactgtatctgttgtctgcgcagttgtacttgcgaatctaggttatggcgtatatagcttagttgttcaggctataatactaaatttaatgtctgcaattcagttttggtttgcatctaattggcgtcccacagtacgttcatttattgatttccaagttttgaaagatgtttttagttttagtgcaaatttatcattattcaattttgtaaactatttctctcgaaatgcagatagttttataataggtaaatttatgtctgcgtcagtgctcggtagctataatttagcatatagaataatgttatttccattgcagagtcttacttttgtaactacgcgatccctttatcctattctaagtaaaagtcaagatgataacaagagcatttctagcttatatcttaagtgcgtatttgtcattttatttattactatgccccttatggttggtttagcttatttcagtgagccttttgtaagattggtttttggtgctcagtggtatttaactgcagatgtgttaaaatggcttgcccctactgcaattatccagtctgtattgagtactactggttcagtatttatggcaaagggccgtacaaatacattactccgtttagggattattggtgcaatattacaggtctcatcttttattataggtgtcaaatattcgatcacagtcttcgctatgtgctactttattgcaaatattttaaatgctataccagtgatgtattgtttgtttaagttgattgatattaactttaaatgtttttttacaaaaataattcctataattgcaggcacttggtgtatgtggctttcgcttaatattctaaatttatatgttcctatcatttctatcaatagtgttttaaagttatgtagtctttcaataactggcgcgcttttatatatcatttttatggttgtgttctcgagttttattcgtaataatatcctcggcacactgagaaaagtattttag

SEQ ID NO: 249412 - DNA, 846 bp, Klebsiella pneumoniae
atgaaaacttgtgtctgtattatattatataataaattacctagtgagagtgttacattaaactgtttgttagacattcaatatattgatgattccaaagtcgatatttttatatttaataatggtccatattctgttgccaatgataaggttttgaataatgatatattacatcttgtcgaacacttaaataatagacctttgagtcatatttataatgattttttattaaaaaacgccgaatatgataggtatatcattctcgatgatgatacaccaattgatgatgaatttttccacggaattaataaatattatgtcagtaaaatagatcttcaggttcctgttatttttgatagtaaaggcgaacaaagatattatccactgatgaataaaaaaatttatcaaggaagtacttctgaggtgatttataacaatcaagattttcttacaataggatctggtttggttgtctataaatcattattagataaattcaatgtaattggggagaatttatttgataatcgttttgctttttatggtgttgactttagtttatttagacgcataaaatggttggaaaagaaaaatatacaagtcaatattcagataccagcgagtctaaagcattcattatctcgtgtcgaaaataatttttcatcatggcgtcatttagaaagaatacatgattatgcattatctgcaagatattattctggcaataaattaaaaactttttgtggtgtcattttatttttatctaaagaatgtgtgcatcttagattgaaaaatatattagtattcttcaaaacttttattaatggtaagcatcccagatgttaa

SEQ ID NO: 249413 - DNA, 771 bp, Klebsiella pneumoniae
atggaattaagtgtaataattccttgctacaatcgcgaggatactatccgtggtgctgttttatctgtgcttaatcaattaggtgagcattcagttgaagtgatcgtggtcgatgatggttctacagactcatcaatcgaaaaaattagtgatctgaatgttaagatatttaaaacacaaggaagaactggtgcatgtaacgcaagaaatttaggcgttcaaaacgcacgacatgacattatagctttcaatgatagcgacgattattgggtaatcaataaattagaacaagttgaaaaagtattcactcaatataatatagactatctttttcatagctttatcagagtcaaaggaaatcaatctaacttaggtgggggatacttacaacaaagctcattaatcgataaaaatcaattgtctaaaaaaatgctcactgataaccaaattagtactcagtgtttagtaattaaaaaaaatattttaaataaaataggagggtttgatattgatttggggcgttttcaagattgggagttagccttgcggatatgcaaccattataaaggatattatattgccaaacctttagctctttgtattgagtctacagattccatatctaaaagtaagcttaaaggtattatcgctaggcgatatatactgaagaagcatttatctctttttaagcaacacccagcacaattattaattttccgctttcagttatttacaagaactcttttttcaatgatctttgacaggaaataa

SEQ ID NO: 249414 - DNA, 912 bp, Klebsiella pneumoniae
atgactaaatgtgttattgcgataccaacatataatggaaatgaactatggaaggaggtagtttctaatttaaagaagtacgtgccgtccgatataacaatccaaatagttgactctggcagtactgatggaacagtagaacttgcatccgaagccggttttaaagtgatgaagattagaagtgaggattttaatcatggaggtaccaggaatctcgcagtcagtgagtatttaaatgagtttgatattgcaatttttctcacccaagatgcaattccagaaaaaggatttatcgaggagattattagatcttttaatgaccctcttgttgtctgcgcatatggaaggcaattgcctcatgaagatgcaaatcctattgctcaacatgcacgtttttttagttatccgtcaacgagtaaaataaatgatatgacaactgtttcgaacaatggaatcaaaacagtatttatgtctaattctttttcggcatataggttatctgtatttaaagagcttggtggttttccttcaaatactatcctttgtgaggatatgtttttcacagccaaagccatactctctggttataaatcagcatatgtttccaaggcaatagttcgtcattcacacaactatacacctcttcaggagtttcgccgttattttgatattggtgtttttcataaagattgttcttggatacaacagaagtttggggggacaggaggtgaaggtaaaaaatatattttatctgaattaaaatatttgttgaaaaatggcgctttttggattcctgtttcggtattaaataactttatgaagattgttgggtataaactcggtaaaaactatcacaaaattagtaaatcattaatattgaattttagtatgcataaaaaatattggcgttga

SEQ ID NO: 249415 - DNA, 2163 bp, Klebsiella pneumoniae
atgaaagcagaattaaaaaaccaaactaactcttctgaaaatgaagatattgatattgggcggttattcggtgagttaattgatcatcggaaattaataattgcagttacgacgggttttactgttattgccgtaatgtatacgttattagctacaccgatataccaggcggatgcgttaattcaagtagagcaaaaacaaggaaatgcaattctaagtaatttgactcaaatgctgcccgatgctcaacctcaatcagcaccagaaattgcgttgttacagtccaggatgatattagggaaaactgtcgatgatttgaatcttcaagcagaaattaaacctaaatatattcctttaatcgggcgtggtctggcaagaatttttggtgagaaacaaggtgtcatcgatgtaggacatatatatctccctggaggggatgaggacaatccaccggaagttactttaactgttattgataataaacattatcaaattgaaagtgaagattttactttaaaggggactgttggtgatgtattagatgacaaaggaattagtttattaataaagaatattgatgcagaaaacggtgaaaggttttctattaaatatttaacacgagtgaaagctattagtaatctgcaagaaagttttaatgttgtagatcaaggtaaagatactgggatgctgaatcttactttgattggggataatccaatattgatatcaaacatactggataatataagccaaaactatctttcacaaaatgtagcccgacaagctgcacaagatgcaaaaagcctagagtttttaaatcagcagctaccgaaagtaagagcagagctcgatcaagctgaagataaacttaatgtttatcgtaaacagaaagactcagttgatttatcaatggaggcaaaaacagttcttgatcaaattgtaaatgttgataatcaactcaatgaattaacatttagagaagcagaggtatcgcagctatatacgaaagagcatccaacctataaagcattgatggagaagcaacaaacgcttcagactgagaaaattaagctcaataagaaagttagtgcaatgccatcaacacagcaagaagtactccgtttaagtcgcgatgttgaatcaggaagagctgtctatttacagttattgaataggcagcaagaattaaatattgctaagtccagtgctataggtaatgtacgcattatagatacagcaattacagagcataaacctgtaaaaccaaaaaaaatcatagtcatcggtttaggttttgttttaggttttcttttgtccattggtttagtgtttttaagaatatttctgaggagggggattgagtcgcctgaacagcttgaggaaatgggaattaatgtttatgcaagcgtacctgtatcggaatggctagcgaaacaatcatctaaaaataaacttcgcaagaatgaatcagataaattgcttgcgattgaaaatcctgcagatttagctttagaagctatacgaagccttcgtacaagtttacattttgcaatgatggaggctaaaaataatatattgatgatatctggagccagtcctagcgttggtaaaacatttataagtactaatttggctgctactatagcgctgactggtaaaaaggtgcttttcattgatgctgatttacgcaaaggatatgtgcacaaaatgtttggacatcagaataataaggggctttcagatattttgtcaggtcagcaggatatgaaaaatgtcatttcaaaactatcaggaggagagtttgactatattagcagaggtcaagttccgcctaatcctgctgagttactaatgcatcctcgttttgagcaattattaaactgggcctcaaaaaattatgacttagtaatacttgatacaccaccaattcttgctgttacggatgcagctattattggccaatatgcgggtacaacattattagtagcacgctttgagaacaataccgcaaaagaagttgctgtaagtattaaacgtttcgagcaaagtggtgttcaaataaagggatgtatacttaatggaattgtaaaaaaagcaagtagttactatggatatggctataatcattatggctattcttatgacgagaaaaataagaaataa

SEQ ID NO: 249416 - DNA, 510 bp, Klebsiella pneumoniae
atggttcaagagataataattaaaaaatcaaacaagcgtggttttggtggtcaagaaagcttcattgttacaaggggaaagacgagctatttgcgaatagttggtaataatcctcattactcgctgatgaccgtgacggccagtgaagatgacaaaagcttctatgtgtgcagagataaaattaagctgatatcttctgcgttgcaattaggcacatggctaaacattccaccttcccatgaaacggatagctcgggtagaaagttcatacgcatatgtactatagagtttattcctggaaaagagaaagaagacatagaagaggtccgtgaagttctcgagcattttttccagatatacgatacctgcaaccccggcagagaagatgtaatgaaggatatgaaagagatttactcctttctctcgcatgatgattcctatgatgatgtatatctaagtgatggtgtatggctaagctctgatgggaaattgtatgacaggggcagatag

SEQ ID NO: 249417 - DNA, 528 bp, Klebsiella pneumoniae
atgcaacacaaattcgaaaatgtattgattgaattgaccgacggtgggaaaaatctaaagcgtgaagaattggacaatatatacctattcacgttgctttatgccttcggagaaagcaaatggtcacacaatgggacaagtattgcaaccacaggcaatgttgccgattggcttttgtcttcaggaagcatcgatcttaatttagtgagaaaagtgcatagttactatacgaaacgatatttagactcaggaaaggttaatcatctatttcacgagctatttccagataattacgctaggggtgaaactaaacctcgaatgattgtattgatggaaaaccagagtcccgacgagaaacagatgctgagtctttgcttaaaggttctgcactgccttagaaacaacttattccacggtgaaaaatggaaatatcacttcaccgaccaacatgataatttcaaggcagcaaatgatcttttacagatgttactcttccaaacaaagggtaatttgtggcaagttttttga

SEQ ID NO: 249418 - DNA, 306 bp, Klebsiella pneumoniae
atgccatttcaacgaacagtaaaagttaccccgacaaagttgtatcaggagctgggtgggctgcaggtggcagaacccgaagaggaggtcaccatcacctatagtgcgatccgtctggaatcactggatgctacaaccaggcttgccagcgtgtactacagcatcagcatcgataatgcgtcggccatcgggtacggatacgccaacttcacctacgaggacctggggaatattcttgctgaagcggaagcctggctgcaggcgtcgtttgatgttgttgcgctgaaccccttgccgggtagctaa

SEQ ID NO: 249419 - DNA, 150 bp, Klebsiella pneumoniae
atggaagaattagatgatatgttctccaatcgccagattgtaaccaaggctcttgccgatgcacaagaaatggcaattcagactgatgatggaaacggaaagacacttaccctggaagagcagatagcatttgcacaatcgcaggaataa

SEQ ID NO: 249420 - DNA, 1380 bp, Klebsiella pneumoniae
atgttggcatcacttaatgatggggactacatcaagctgagggcaaactccgtccactacaaccatttccctaataactcgcaagtctctgatgggtgggtaataaccgctgataacatcacattagatggcggtggggctactctttcccgagccacaccgtcatcggcaagttattcaggatttacaacgttaaaaattacgggcgataaaccagaactcatcggtaaattgctgattacatctgaggaccctaccaacaaacccctgtatgcatatcaaagtgcaacaaaaatagattcaagggaaattttcacttcacctctggcaaatacattagggctgtggctttctggtgtagatagcccttatattgataaatcggttacgttagaaagagcggtattccctttctttgccaataacggcacggatggtatgaaagcattctgtaccgcaaaaaaatcaggccagatttacccacaaccaacgtcagcaaattcagatttggcgttgggtagcacctttaaacttgatgcgtgttccaattttatcatggaggttacagcttacgattcagcatacgcaggcattgaggctgagagcaacaatgtcaatggcaccataacactggtaaccaataaggcataccatgccggtttgcatctatggaacagatgcaagaacatcacttacaaagtttccgcaacggatatcgttgagggtggtggcgttattacagggtatggttgcgaggcatgtagcggtgatgtaacagtgtataatgcacaatatctagtagcatatattgggaactctgcgacaacgcctgtaatatcctgcaatgccaaaggatcgggttttaacgttacggatggggttgtattcttcgctaccgcagcaaataatgcgtatatccagcactgcaacgtagatgttaccgttgtgcacgccgatgtgttttccatcggcactggacgccagtcagctgttaaatttaatggaggtcagtattgcgacataaaagtaaatgcaaaagattttgattatattttttctttgggaatgggcgccaacaacaaatttaatgtcgcgtacaacaaattcaacacagcgttttcatactcggaccagcgctcgtttgataacgagtataaatatactgatcctggtggtaacgtataccatctccaggcaaaggcgagttctcatgagtacagatcggatgcggtgacaaaccctgtgcttgggtttaaacctcttctccgcaaacaaataaactctgatggttttgttaatgcaaacttgccaataacaacaacgtcagttggtgggttctattacgatcctgatactaaatatgtaagagtaaatttatag

SEQ ID NO: 249421 - DNA, 1059 bp, Klebsiella pneumoniae
atggcaaccgatccgcaactgaaaacactgaaaattgaggctctgtttggctataaggatatagtgttagactttagcgatgttaacgtcttggtaggcagaaatggtttaggaaaaactactatcctaaaaattttaaatgccatgctaaataatgattttaattgtgctgaacttaaattatgtcatcgagcaagcgtagcattcacaaataaagcaacaatatcatatgagcctgataatagccttgaaatgattgcaagagacacggttaataaagttttcactaaacaagtgatggaatcttttcaaacaacacaaatcaaactacatgagcgtttgaaagacgaatttcttaaggaaatcacaaggcggattaaccttgatcagattaacgactccaaggaaatatacaaaactaacgctagagaatatatttcttttttcgacaagaaaaagcaaaacaacattcgcatgtcaaaagcgttaaaagactatcttgaaaagagctgtgatgttaggtacatttcaacaattaatatgtcagccaatgctcagcaagacattaaaatgagtagtgggaaagaaaaaaacattcttaattgggagctaaatcttgagctcgcagagttagctaaagaaaaaaattccgtctacacatctcgatttgtaaaaattgcatctgaacttttattagaaagtagtaagagattggttttacgaaaattaagagatggatacacattcgacacagtcgatgaaattcgcaacgaaagtattaaaattgaaagtttatcctcgggtgaaagacaacttttatacattttatcacgcgtagctaatacgaggggcaaacaagcattcttgttgatggatgaaccggagatatccttacatctaaattggcaagaaaaattaatttcgagcataaaaagccttaataaaaactgtcaaatcattatagtaactcatagtcctgcaattgttatggatgggtatatggacgcctacgttgatatggatgaaattacaatggagggtgacaatgccagcatttga

SEQ ID NO: 249422 - DNA, 993 bp, Klebsiella pneumoniae
atgccagcatttgatagtttattaaaatcagccaagtatattaaggcatacacaaaacagcaaacaggaaaacctagaggggttttatacgttgagaatccatcagacaggctgttttgggaaaatataattgctcaagtttgccctgaacagtacagcgtaaaatcatttagtctagaggatgcgccaggtaaacgtttgcttgaaaaagaatatagcaagctgcatcgcttctatattgttggtgtagatggtgattttgattatctttgccctgaccggcatgagtttgctagctatttgaataatagcccatatgtaattcatacattcacatactcaagagaaagtgtaattttcagcacgccttctatattggatatcagtaataggctggcattcaggcataaattacctcatgattgtatcgaagcccttatcgagtattctaaaataatattctctgcactttctgttttctcgtatgctcataatctgaactggcaggattttaaagaagatcagttcacgaatgcaatatctttacctgtcggtgaaaaacttcttactgatggcttgcaagtaaacctggctgcacttgatggtgttagagttacctctcgaaaatatatagactctattctccatgctatttctaatgggatagatgaaaagcattgctgtgatatattgactgaacgttctattactcctgaaattgcttacatgtttatcaatggacattatctcaaagatagcattgtaaagcctatgttagatttattgaagagaaaaaataagtatgaagatataagtgatgttaaagcaaaaataccaaaggccagatggaaacaatcgattaatgaggtcgagaatcattttaagaattgctgtcacactgaaagcattatacacaatgcaaattgttatacgtcaggagttatctgggatttaataaaagaaaaattcaaagctatagataatgcagcctag

SEQ ID NO: 249423 - DNA, 819 bp, Klebsiella pneumoniae
atggaggataagcgccaggaagagcatatcaagctcgccaccgaatacggcaaaagccagctcaatatgggccatctggttaacgcacagcgtgagcagcgcggcgctggttttgagctgcgaacggatgagtttggcgcggtccgcgcagccaaaggcctctacctgacggcggatgaacaggcaaaagcgcaggggcctgtgcttgaaatggcccctgccatcaaccagattaaccaggccaacagccagatgcaggccctgaacagcgccgccgaagcggccggggccctgatctgcgacatcaatacccagataaattttgtggccgacaaaatcagggacctccagtcggcggtgctgctgggtagcgcgccgcagggagtggcactgacctcaggcgaacaccttcagctcagcagtacccgcaacaccatgatcaatgccggtcagcatcttgatatcggtgcgatgaaaaatgtttctgtaacggttgaaaaagccctgggtatgtttgtgcataaaggcggggcgaagctggtcgccaatcaggggaatattgatattcaggcgcagcacaacacgatggggcttctggcaaagcagcaggtgacgataaccagctgcgaggacgggattaccatcagcacgccggagacactgacgctgaatggcggcggatcgtatctgaagctgagtaaaaacgggattgagcatggttctgaggggatgatggtgatgaaggtagcgagctatctggtgccaggaagtggcagcagtctgatcttacccagcaatagtggacacgcgactaagtga

SEQ ID NO: 249424 - DNA, 1023 bp, Klebsiella pneumoniae
atgatcgctattgatgacctgcataaaagttaccgcacggcggatggccggctcagcgcggtgctgaaagggctgtcgctgcaggtgcctgagcgctccatcaccgcggtggtggggccgagcggcgccggtaaatcaaccctggcgcgctgcatcagcctgctggagcaaccggacagcggcagcattcgtatcaatggccaggatctgtcggcgctgtccggcgaggcgctgcgccgggaacggcgggcgattggcaccgttttccagtcttcggcgctgttgagccgcaggaccgcctgggagaatgtcgccctgccgctggcgtggcttggtgtggtggagcgcgatatcaaggcgcgggttggcgagctgctggagagcgtcggcctgagccacaaagcggatgcctggccggcccagctctcaggcggccagcgccagcggatcggcattgcccgcgcgctggcgctgcgcccgtccgttctgctggcggatgaagccacctccggcctcgatcctcaggccacggcctcggtgctggctctgctcaagcggctgcgtgatgagtaccagctggcgatcgtcctgattacccatgaaatggacgcggtgcgcacggcggcggatgcggtggcggagatccgcgacgggacgatcgtccagtacgggcggatcgaagatctgctggcgcgtcccgattctctgctcggccagcagctgttgccgctgacgccggcggcagctacccacagcgatctgctgctgcgtctgagctaccgctgggatgtgccggtggccaccgactggatcagccgcctgagccagcagtgggcgctgcagatcgatctccttggcggtcacgtcgaggtgattaatggtcggctggccggtcgcctgcaggccggagtgcgctttcagggcgaacgcctgtcgcccgcgcgactgcagggcctgctggcgcagctcggcataacggcggagatcctcgacagcgcgccgttgctcagggaggcggtatga

SEQ ID NO: 249425 - DNA, 693 bp, Klebsiella pneumoniae
gtgattgaggataactttgttgccggacgtccgcagtgggagaaagcgggagcggaactggtcgccgacgtggtgcctttcgaagagatgaagctgagaatgctcaatggtagccattcgttcctcgcttatctcggctatctggccggttatcagcatatcaacgactgtatgcaggacgataactaccgtcgcgcggcgctgtcgttgatgctggacgaacaagcaccaacgctgaaggtgcagggggtggatctgtcacgctatgccagtttgctgattgaccgttactgcaatccggcgctgaagcaccgcacctggcagatagccatggacggcagccagaagttgccccagcgcatgctggactcaatacgctggcatctggtgcatcagcgtgattttacactgctggcgctgggcgtggcagggtggatgcgctacgttggcggcgttgacgatgcgggccaggcaatcgagatatgcgacccgttgttgccggttatccagcaagcggtggctgccagcgccgatggcgaagcgcgagtcaaagcgctgctgggtattgaggctattttcggcgtcgaactgccgcaggagtcacgctttgtcacggcggtgacccgcgcctacttagcgctgcagcggcagggggctaaagctaccgtcgccacgtgggccgccgcgcaataa

SEQ ID NO: 249426 - DNA, 180 bp, Klebsiella pneumoniae
atggaagacgaaacagaactgaccgaaccgccatttgaaacctggttcagagacgtggttgaactggttaaaaatggcggacattcaatggatattgttgcctataagggggaatgggttgattatttttcggaaggattaacaccagaagatgcgtttataaaaagaatggctctttaa

SEQ ID NO: 249427 - DNA, 450 bp, Klebsiella pneumoniae
ttgttactggaaaactgcggcaaacagttcgagaacccggtgtactggggcgtggatctctcctctgagcacgaacgttacctggccgaagagcacttcaaagcgccggtggtggtgaaaaactacccgaaagacattaaagcgttctatatgcgccttaacgaagacggtaaaaccgtcgcggcaatggacgttctggcgccgggcatcggcgagattatcggcggttcccagcgtgaagagcgtctcgacgtgcttgacgcgcgtatggcagagatggggcttaacaaagaagactactggtggtatcgcgacctgcgtcgctacggcaccgtgccgcattccggcttcggtctgggcttcgaacgcctcatcgcttacgtcaccggcgtgcagaacgtccgcgatgttattccgttcccgcggacgccgcgcaacgcgacattctaa

SEQ ID NO: 249428 - DNA, 255 bp, Klebsiella pneumoniae
gtgcaaaatgactttgtaagcgatgcgcggcacgggaagcgcggagagttcaaattgccgctgttttgtgaactgactgcagaagggcagagtcacatcacctttgccctaaagtttgcccccgagtctgtggctgtgttccatcccgattcgggagaaatatctcactggctcagccgcggaaacgagattatcgacatttacggttgctataccgtctttcctcgcaatggcattagggaggaacagcaatga

SEQ ID NO: 249429 - DNA, 150 bp, Klebsiella pneumoniae
atgaaagtaaggattgtccttcaggaattaaaggaagatggcgttttaacaacgtactccaatggccatattgaaatgcttccatatcgaattgatgaaaagggggaggagtacgttgagatgttccccaacgatattgaacaacattaa

SEQ ID NO: 249430 - DNA, 315 bp, Klebsiella pneumoniae
atgcagttcactgtatacagtaacaccggaaagagcgccgtctatcccctactgcttgatgtaaccagcgatattatcggccagttgaaccgcaggattgtgatcccgctgctgcctgttgaaaagtaccctggcagcactcgcccggaacggctggttccgcttgtcagactgaacgacggtaaagaatatgcagttatgacgcatgaaatggcgagtattcccgcccgttctctgggggctgtgttctgcgatgcttcccttcatcgtacccaggttaaagccgctattgattttcttctagacggtatttaa

SEQ ID NO: 249431 - DNA, 567 bp, Klebsiella pneumoniae
atgagtgtactttttttagaatatagtaaagagttcaattgctttagtaaattcaaaaggaaattggactttttgactaaaaaaataagcatatcagagataattttcatctctgaccctagaggatttatcagaaaaatttctgaagataagcaatttcgaattcgtgaggtgaattctgccgaagatgctgaatatgcaatcatttttagagacaaacgtcaagatattggtgattttaaattacctgagaatgcaaaagtaaaagttgtacttttaaatctgacgctggttgtcaataaagacagaggtgataaatttgatgtatatataggcagaggtacgatatggggaaatccttatcaaataggcgtagatggggatagggatgaagtaataagaaaattcaaatatgattttgataaagaatttttaaaaccctttgataatattgataaaaatgcatcatctcttaagggaaagattattgcgtgtcattgcaagccatatgcatgtcatggggatatcatagccgattatataaactcccttgatgacggggaatga

SEQ ID NO: 249432 - DNA, 648 bp, Klebsiella pneumoniae
atgagaacaactcatcaactactttgtcttgctaaatcttggaaaaatggaggattttgcattgcaggaaaaaatgataataatcaatgggtaagaacaattacagcaaatcctattaataacgctatattccatcatggaaatgccatcaaacccctagattttttccaagcaacaaccattaaccatgcccctcaaggacaccaaacagagaaccacatcattgatgaaaacgtgagttttactgttaatgggcattgtgctgctaatgatttagatgattatgtggatacgcctgcaactctatgggggacaggaacaagcagtaactacggtgtaaatgacaaaatcattattggacagagtgtggtaaacaattcactctacctgatcaagcctgatgatacggtgatagtacagatgcagaatgagtatggtactgataaactgagaataaggttcacctataactctaatgaatacttactaacgactacagatatgggaatacagaactatttcagagatgaaaacaacaggttgaatgatggcgaagaggaagaacttgatggagtctcctatcttactatcagtctagccgaaccactgaatggaaacttatataaagtagtagctggagtattttag

SEQ ID NO: 249433 - DNA, 252 bp, Klebsiella pneumoniae
atgtttcaggcattcagtgagctgagcaaccagtcttcttgcgtcttcaagctgttcagccattttttttgcctcaaactcaatgtcttcatgcaaattctgttctcctctatgcatccggagaagaagtttcgctgtaacgtcattcactatatagaagtaatactctggatatcccagcacatcagccacacggcatacaaactcaaacggtggtgcaaaccgtccagcttcataattagacatccttga

SEQ ID NO: 249434 - DNA, 264 bp, Klebsiella pneumoniae
atggatatgcatatttttttcagttcaatgttggattatattaaacctctcagttttatacttatttgtataattttagcatatataacccttaaatcagcaaactcagaaaatacaaatttttggaaaaggattttaaagggattcctcatagctgaattagttttaatcttatgggcagtctctgcatcatttatcaattcttataagcaacaaaacaatctcaataataatatcctgtcaactacccctaaaagaaattag

SEQ ID NO: 249435 - DNA, 327 bp, Klebsiella pneumoniae; identical to SEQ ID NO: 16903

SEQ ID NO: 249436 - DNA, 1251 bp, Klebsiella pneumoniae
atgactagaccgattgctgttgatttatttgctggagcgggtgggctgagtctcggtttcgagcaagctggctttgatataatggcatcagttgaaatagatccaatacattgctctgctcacaaatataactttcctatgtgcaaaacgatatgtagaagtgttgttgatgttaccggagaatacgttagggaagtttcaggtattggtgagaaagagattgatgtagtgatcggaggcgctccctgccaaggcttttcattaataggaaaacgcgcgcttgatgatgatagaaacaaactggtctatcactatgtacggctggttcttgagctaaagcctaaatactttgtttttgaaaatgtaaaagggttgacggttggtaagcataagcagtttttagtagagataatggatgcatttaaagatggcgggtacgacgttgtaagcgattataaagtgctaaacgcagctgattatggagttcctcaagatcgccgtcgtcttttcttaatggggggaaggaaaggaattgctctgccatcataccctgagccattatccattagaacaacggttggggacgctattggggatattcctgatgcggaaaaatatcctgagctatggggtagagattgggtttatgctaaatttggtgagcaatcactatactcatcctatttgcatggcgtaggaaaagatcctagtgattttagctacccaaggatttttaataaagacaaattaacgtgttctttactgacagatcactctgacatttctagagggcggtttgttgaaactttgcctgacacggtagaaccaatcagcaggtttaaaaagctctcgatgaatgggctatgtaatactttaagggcaggaacagcaagtgacagaggtgcttttacatctcctcgtcctatacatccgatctatcctagggtcatcacggtcagagaggcagcaagactgcattcatatcctgattggttcagatttcatgtgactaagtggcatggatttagacaggtcggtaatagtgttcctcctatgctagctagaagtgttggcttgcagattatgaaggttcttggtgttacgccaaaaaaaccaacgaagaaaatcaaactcggtgatgaaagtttggttgctatttctatgtccgatgctgcatctatgtttggtgtgtcatcaaatgtaattgctaagagaataaaaaatagtaacaaggaggttgtttgtgagtaa

SEQ ID NO: 249437 - DNA, 810 bp, Klebsiella pneumoniae
gtgagtaaggataaaaaagaaaggtccaaaaatagataccatcagttggtagaaaagatatttttcgataaatatgttgatggtgacttagaggttttgtttgaaaggttagatataaacagtgctgcaaaagatttaggtatagaactcccatctaatgttggtgatgttatatattcaatcagatttagaacgcctatgccagaaagtattctgttgactcagccagaaggtaaggagtggattattgagctggctggtaggtcaaagtatcgatttagattagtaactattagtaggattttgccaaatcctaatatggtggcaataaaaattccagacaataccccggagataattacaggttattctttagacgacgagcaggcattgctggcgaaggtgagatataaccggctaatagatatatttctaggtataaccacatattctttacagaatcatttaagaactacggtgaagggaattggtcaaatagagatcgatgaactttatgtaggtatagataaatacggttgccattatataataccagttcaagcaaaaggtgggacagatcaaatatcaatggtgcaaacatcgcaagatacagcgtggtgtgaacaaaaatacccaaatgttagatgtagagctatttccgctcagtttgtttcgagcgatttgattgcactgtttgagctaaagatagacgaaggacaagtgaaattgattgaggaaaggcattacaaactggttccggtaaaagagttagatagctctgacatctcaaactaccgcatgtctgtataa

SEQ ID NO: 249438 - DNA, 654 bp, Klebsiella pneumoniae
atgatagcatttagttttagtgatggtggtaatcgatgtgaaaacttagatttattttctacaataaattgtcaaaatgatatgtttgggatggttatcatggatggatattcctgctctgaaggtagtatggaattcctatctgacaggctaggtgagtgcgtgttttctggtgatcttgataaaaatattattgaaccctgcaagtcagtttctgttaaggctgcggtatgtttcctttttaaagatgagacgcacctccatatctataatgcaggggattgccgtgtatataataaaagtggggctcttctgaccgaggataactcagttgcttggagaaccttaaaggaaaagggagtggataataaaaaaatacctcacctcgtttgttattgcccagacaggaattatctaacatcatttgtcgatttctgttctgatgagataacattcaatcattcagtttttgatttaaatgatgaaaacaaagagattcttttatgtactgatggcttttgggagcattttgatgaaggtactgttgtcgatcttatgaaagataacccagaatctaacttagctaaattcaccaaaaacatcccagataatgcagagaatcatacggtttgctacgttagatttccttcttga

SEQ ID NO: 249439 - DNA, 1227 bp, Klebsiella pneumoniae
atgacatggagaactaccagaacacttttacagcctcaaaagctggacttcaatgagtttgagattcttactcccctggttgagggcgcccgaattgtcggccttggcgagggcgctcactttgtcgcggagttttcactggctagagctagtcttattcgctatttggtcgagaggcatgattttaatgcgattggtttggaatgtggggcgattcaggcatcccggctatctgaatacctcaactcaacagccggtgctcatgaacttgagcgattttcggatccactgaccttttctttgtatggctcagtgctgatttggattaaatcatatctacgcgaatcaggaagaaaactgcagttagtcggaatcgatttacccaacaccttgaatccaagggacgacctggcacaattggccgaaattatcaaggtcatcgatcacctcattaaaccgcatgttgatgagctgactcacttgttggcatccattgatggtcagtcggcggttatttcatcggcaaaatggggggagatggaaacggctcagcaggagaaagctatctcaggggtaaccagattgaagctacgtttggcatctcttgcccctgtcctgaaaaaacatgtcaacagcgatttgttccgaaaagcctctgatcgaatagagtcgatagagtatacgttggaaaccttgcgtataatgagaactttcttcgatggtacctctcttgagggagatacttccgtacgtgactcgtatatggcgggcgtagtggatagaatggttcgagcaaatccggatgtgaagataattctgctggcgcacaacaatcatttacaaaaaactccagtctccttttcgggcgagcttacggctgttcccatggggcagcacctcgcagagagggaggaggaggattaccgtgcgattgcattcacccatcttggatccaccgtgccggaaatgcaattcccatcgcccggcagtcctcttggattctctgttgtgaccacgcctgccgatgcaatccgtgaggatagtatggaacagtatatcatcgatgcctgtggtacggaggattcatgtctgacattgacagatgcccccatgaaagcaaagcgaatgcggtcccaaagcgcctctgtagaaacgaatttgagcgaggcatttgatgccatcgtctgcgtcccaagcgccggcaaggacggcctggttgacctatag

SEQ ID NO: 249440 - DNA, 186 bp, Klebsiella pneumoniae
atgaaaaatattaaaaactttcttcatgttttattattgcagggagggaactacttattcccattagttacaatacctattgcttcacgggtgtttggaccagacttaattgggacttttaattattatacttacattgtttccttttattgtatgattgtggaactgtctcttatacacatctga

SEQ ID NO: 249441 - DNA, 396 bp, Klebsiella pneumoniae
atgctgtttcaccatgcccagcagttgattgcgcgcctgggtcagagcggtatgaccgagtccgccctggtcgatcagttcaaagtcgaagccggtggcggtacccagctcaataatggctggcatgttgaacgggaaaaccatggcgtctttgatctggctaaaggctacggtggcccgcttgatgatggactccacgctgtttttatcgccgctgcgtgcttcccagggcttcaggctgacaaacgccataccggagttttgtccctggccgctgaagctgaagccgttaacggtaaagacgctttcgacgttggccttctcgttatgcaggtagtagtctgtcaccgtatccaggaccttctgcgtgcgctcctgggtagcaccggacggtag

SEQ ID NO: 249442 - DNA, 327 bp, Klebsiella pneumoniae
atgacatggggtatagtttgtgaaactaatcgtgttgagtatgcgataaatgtcaatggtaaagaggaaaagtttgtttcaaagggcattgtttttgtcaacagagaaataaccactgagccaagtagtgcctataagggcccagaagatgatgtgatgacggataagtactcagccgaatccgagcatggcgattttgtctgggaagttgtggcgagaagagcagggtttgatgggcacgctagcattgaaagtacggaagtaaccattccagaaagttgtaagttattgattgatgctaaattcgatattcaagaaaacgaatga

SEQ ID NO: 249443 - DNA, 738 bp, Klebsiella pneumoniae
atgtggaaagcgttacatcaactggcgatccccgagcggctgtaccgcctgtgcggatgctggatcccctggctggcggcgttgagcgcgctgttgctggtcatcggcctggggtggggctttggcttcgcccccgcggactatcagcagggggaaagctaccggatcatgtaccttcacgtcccggcggcgatgtggtcgatggggctgtacctggcgatggccgtcgcggccttcgtcggggtggtctggcagatcaaaatggccgacctggcgatcgctgccctggcgccggtgggggcggtctgcaccctggtggcgctggtcagcggcgcggcatggggcaagccgatgtgggggacctggtggatctgggatgcccgtctgacctcggagctggtgctgctgtttctgtatgccggggtcatcgccctgtggcacgcctttgacgaccgccggctggccgggcgcgcggcggggatcctcgtgctggtcggggtggtcaatctgcccatcattcattactcggtctactggtggaacaccctgcaccagggctcgaccaacctgcagcaaaccatcgacccaagcatgcgtctgccgctgcggatctgcatctttgccttcctcacgctgtcggtcaccctgaccctgatgcgcctgcgtaacctgatcctgcagctggagcgccgtcgaccgtgggtggtggcgctggtgaataaaggagccgcccgatga

SEQ ID NO: 249444 - DNA, 459 bp, Klebsiella pneumoniae
atgcaagcgcgtcgtaaaacccggctgtatatcgtgctggcggtgctcgccggacttgggctcaccgtcagcctgacgctgtacgccctgagcagcaatatcgatctgttctacaccccgggggaaattatctacggcaaaacggaaacccgggcgctaccccataccgggcagcgcctgcgggtggggggctacgttcagccgggctccctgcagcgcgacccgcaaactctcgacgtgcgctttaagctgtatgacgcccgcggggtggtggacgtcagctataagggcattttgccggacctgtttcgtgaagggcagggcgtggtggcccagggcgtactggacggcgagcggcatattaccgcccagcaggtgctggccaaacatgatgaaaattacacgccgccggaggtgaaaaacgccatgacgccggagaaaacgggggcgcagccatga

SEQ ID NO: 249445 - DNA, 573 bp, Klebsiella pneumoniae
atggcgcggtttgatgctgcaacacacccggcaaagaatcaatatttcgcgctgggtatgtatgttcgtattccgtcagctgatgattttgtcgcggtcagtaccaactactcaggtatctgcggaacggctgaatctctgacacccgcgaacgaggccggggggattgcattcactaatatcagcggaacaaaagcgatcaacgccattcgcggcactgatgcaggtgcgctacgcacagtagctgtcccggcgactaatttcctcggcaaagtgtgtctggtcgtcgtctaccgggacgccgcagggatgcacctctatgtcgaagcaaccgacgggacaaaggcgagcgcaatgaccgcgattgcgaacgtgcctgtgcttactacaaacatgacgaccaggagcctcaagtttggtgttaccggtttttattccggtagcctcgtctataaacatgagttttttggcggctggttaatcgacctggaaactatcaccgtttccgatatccctgcgtttgcctctgcggacctggcgcgacagatcgccagagggtgggttgtcggctaa

SEQ ID NO: 249446 - DNA, 273 bp, Klebsiella pneumoniae
gtgattcagcgatgctgcgtgcaatggcggttgccagactgcggcgcgtttagctggctgccaatattgcatgcgaaaaaaagcgcccgcaaggggcgccttcaagacatagccgagttattcagcgtgccgggtaaagcgtcgtctaacgactacgaagaacaccggaacaaagaagatcgccagcagcgtcgcggtcagcatcccgcccatcacgccggggcactgttgcaaatagtcggtggtgataaacttatcatccccttttgctga

SEQ ID NO: 249447 - DNA, 366 bp, Klebsiella pneumoniae
atggcgggctttcgtaaaaaagaagtctccgttccggagtgggataacgccaaagtcatcattcgtgagccatcagcagaagcctggattcgctggcagggcattgccagcccagaaccacccaaaccaccggaagggcaggatccccaggaggcaccagaactgaccccttcagaacgagccttccgcacgatgcgggccgacgtcacgcttttcatcgatattttgcttgataccgacctgcagcccgtctttactgtcgatgacaccgaacaggttgaagcgatctatggccctgtgcattcccggctgttgaagcaggcgctcgatctcattcgtgacgcggatgatgctaaagcaaagtaa

SEQ ID NO: 249448 - DNA, 705 bp, Klebsiella pneumoniae
atgcagacgtcattcagggtcccgtcggaggatgattttgatggcgtggatgtgaaatatatcaaccctgtgacctgggcggaggaaaccgtacagtgccggacgccggaaaatccttttccgcgcaaaacggaggcatacaccattgatgttgccatgactgcagatcgcgcctggcgtatcgggatgcgtcggttaatgaaatatctccaccaacgccgaacgtatacggctacgacttcgatgctgggatggtgtcatgacttcggtgatcacatcattttgtccgacgacattccaaccgggaaaacccaaagttgcctgattgacgcgatgatttacgacttccaggaaattacgctgcacgtcacggagccactggactggagctacgcgaatcctcgctgctggatacagtttcaggatggtcgaccatcatcgcgaatgctcacgccgcaacgggtagatgatttcacgctgacggtgccgtacaacgacgacctgcatcccgacgactggattatggacgacccagatattgacctgccgaagttattgttctgcgacagtgaaaagggtgcgcggcatgggatagtccaggaggttgccccatcgggtgacagcaactgtcagattactgcacctgaatataaagaaattttctaccagtacgacgacgccacataccccggcgacgtcgcttaa

SEQ ID NO: 249449 - DNA, 228 bp, Klebsiella pneumoniae
atgcggaatatagatattggaatagtagcagactggcttgtaacctatgctggttctgaaaaagtaattaaggaattcatcgagatttattcgggtgctgaactatattctgtggtggattttttatcagacgaagatcgtgaactttttaaaggtaaaaaagcaaaaacgacatatattcagaagcttccaatggctaaaaaaaatatcaaaaatatttacccttga

SEQ ID NO: 249450 - DNA, 159 bp, Klebsiella pneumoniae
atgagtttcatgcctgaccatagcctgaaacttcccgctaccaagcaagacatcgatgatttctggatttgcctccagttccttctctatcttgccggcctttgcgacaacattgttattactttgcggcttcggcttttgctgcatttgctaatgtaa

SEQ ID NO: 249451 - DNA, 516 bp, Klebsiella pneumoniae
atgccatcaaaattcgaacaactctcagagcatctaaacgaatatgccgtagcttacaggaattattggtctgatttagaaactgtatttttgagacttgaagatgagctagtgtcatattttggtataccgcataacaacatcattaacaatgatgctgatgaagtgaataatagatatattacggtgggggttaaagggaatacgtctcagttttgtgttcgtgacgtaaaggatgcaaaagaagtacgaagccagtctgagatgaagattaactttgcgattttagtaaaagtggaagttactaacgaagaaaaagtaagttttgttaataatttttttgccgtagaaactcgtatatctgataagcattttgtattcaaaatatcgcctagcaaaggtggcgatattgttattaatacgccaagagcagttgcaaaaacggtttctttagagaaagtatgtcaagctattcatgaatccatcatgaataaatacgacccatcttcattgtag

SEQ ID NO: 249452 - DNA, 1089 bp, Klebsiella pneumoniae
atggagtctttatctgtagattttactaaaagattactccagcaaagaattagtggtttttgtagaaaggatttttcggagtattttgacatatcatcgacttctattgatgaatattgcgatttaatatttaaaacctctatgaatgttccacgaattgttgggtatatactttactattgtcatcaaacccacacatcgttaggtcggaagatcactcgtcaagcgattgaggtcgctgctgaaaactactatgaaaaagttgtttctaagttttttgatattgccactcacagcttaatgtctttcagcgaaaaagtatctgagctacaacagaaagaattattggatttggttgtgtcaaaattgaagagtgtcaagagacaaatatcctcaggtgagttttcaggattgatttacaataaagaaagaacaaatccatattgcagtcatttccattttcaacctaatcttgaacattttttgagaacgttagaactcaattttttcgttacgaaatataatgaaatggtaaacaaaaaaggagttaaagtttcaatttatggcctcaactatggtttaagtaaaagccaaaaccttagatgggggagaccagacggaacgcagtatagaacttatttcatcgaaagtccttttgattttaataaagatattgaagagttcctgagacagtcaaaaactataatatgcacaaatccccaatgtggaaaaacatatccttatgaagatcttaatttcttgaattataacaagatgcggtgcattgagtgccaaagccctgttgaggtgcaagccttttcggagtcaataagtaaagaaatgtcgaaaatagacaaagccaagttaatgcctagattagaacttatgatactgcatgaacttcataaggccgggacaaaaatactggcccgagatatcgctgaagagttagatgtgtcttcacagttaattgcaaaacgagcagagaaacttgagaagaaaagatatgtggtacgtgataaatcagcagctttgataaagtattcgatcgctgataaagctgttgacgattattttcatgatgattga

SEQ ID NO: 249453 - DNA, 804 bp, Klebsiella pneumoniae
atgctgacagtgattcggactctgacagcgattcggactccgacagtgattcggattcggactccgactccgactctgacagcgattcggattctgacagcgactctgactctgacagcgactcggactctgactccgattctgacagcgattccgactctgactcggacagcgactcggattctgacagcgattccgactctgactcggacagcgactcggattccgacagcgactctgactcggacagcgattcggattccgacagcgattcggactccgacagcgattccgattccgacagtgattcggactctgacagcgactccgattcggacagtgattccgactccgacagcgactcggattctgacagtgactctgactccgacagtgattcggactccgacagcgactctgactctgactccgattcggacagcgattcggattccgacagcgattcggactctgacagcgattcggactctgacagcgattcggattctgacagcgattcggactctgacagcgactcggattcggacagtgactcggattcggacagtgactcggatgctgacagcgactccgactcggacagcgactccgattccgacagcgactctgactctgacagcgactctgactcggacagcgattcggattccgacagcgactcggactctgacagtgattcgtattctgacagcgactcggattctgacagcgactccgactccgattcggataccgaaccgcaggcaaataatgatacccatacggcggctatcgataccgtag

SEQ ID NO: 249454 - DNA, 423 bp, Klebsiella pneumoniae
atggattttttccgcaaccatgatctgattaacgaagatggcgacacgctcagcatggaggatgtggtgcttacaagtgccagcaatccagcgcaccgtcgtaatgagatgatggcctgtgttaaaggcctggaattgatagctgaaatgcgtggcgactgcgccatgttatataccatcaactgtccttctaagtaccacgccacactgatgaacgggaagcctaaccctacatgggatcactcgacagttaggaaaagcagcgactatctggttgatacgtttgcggcattccgtaaggcaatgcacaaaaaagagctgcgctggtacggcgtccgcgtagccgaaccacatcacgatggcactgtgcactggcatttattgtgttttatgcgcaaaaaacatcgacgtgcaatcacatag

SEQ ID NO: 249455 - DNA, 456 bp, Klebsiella pneumoniae
ttgacagcgttcagctttgacggcccttatcccgtgcgggatatggccgatttgctggacaatctctattgcatggacaacgggcgatactatgagacgccagtagatttttacggactggctaaagctccgcgccagagcgcctggcatgagtcggcgttgtactccaaacgtaatgtgctcaccggctgttttatcccgcacaagctgctcaaccgtcagacattctcggccttcgcactggactggttcacatttggcaatgcctaccttgaactcccgcgtaatcgcctgagcggcccacttcccttcaaacactctcttgcgaagtacacccggcgtgggagcacagatctcgatcaatactggtttatccggcgctggaaagaagagcacacgttcaaatcaggaacggtttgtcacgttctgaaccctgatattaatcaggaggtctaa

SEQ ID NO: 249456 - DNA, 201 bp, Klebsiella pneumoniae
atgtccagattcattctcgggaactgtattgatgtgatgcgcggattccccgaccgtgccgttgaccttattgtgaccgatccgccttacctcgtcggttttaaggaccgtcagggcagacagattgccggggatgtgacggacgaatggctgcaaccggccacgctggagatgtccgcgtccttaaaaaagacgcgctga

SEQ ID NO: 249457 - DNA, 669 bp, Klebsiella pneumoniae; identical to SEQ ID NO: 239704

SEQ ID NO: 249458 - DNA, 747 bp, Klebsiella pneumoniae
atgacagccttcaagaatcaatgtgcagcgttctcccgccccattgatgcaggtcaactgctcaggcaaggcgcagcggggcggtctgatcaggcaatggacagcgcctggctcgtcagcctgcgtgtaccacaggcgcctcgatcaaacaccgatcctcacgttgtagccgagtgcccgcagccccttgctcgtctgcatgttccttggcggaaactcgtctgggcgcgcccagacgacgatttccccgaggctgctcaggctaacgtgcggaattgcccagtcgtcgctgcggatcgcgttccagagccgggccgaaacacttccgttgccccagacaacgtagttcaacagtatccgtccggccagcacaccttcccgacaccgccgccgaaggccatggcccatcaagcggattttccatgcgccctcagcgccgtacctacagcaaatctttcaaggctcaggtcattcaggagtgttctgaacccggtgcctccatcgcaaacatcgccttgggctacagcctcaatgccaacctcgaccacaaatggattcggctgcctacccagaaaaccacggctatccagccagcgttcatcccgttgccttctcaaatgctcggcgtgggttcgcatactcaagcgcgctgctgcgatcatgagtttgatccagtcggcccgtaataatgggcacgatccgtatgcctatctcaaggatgtgctgacacggttgccgtccctgtaa

SEQ ID NO: 249459 - DNA, 315 bp, Klebsiella pneumoniae
atgggaattttgttcgggcttgccaatcagctactgcttatcgtattcgggattgcactctgcgtgatgatcgtggtggggtaccgtttgtggtggatacgccgtcccgcgagttcggcctttaacccggctaatacgctgctccatgcgtggctgggcttagcatggcctgctcgtctgtcgatcggcgttatcacagtgatgttggggctggcgctgccgctaatggggattagcctcgcgctgtgtctcgccgttgattatctgcgctggcgcgcagcaacggcgatgacagaggctaagtcagtcgaatag

SEQ ID NO: 249460 - DNA, 270 bp, Klebsiella pneumoniae
atgagcattcgaatcgaaatcggtgataaatgggttattaccagcgaccagtatcaattcatcctgaatgaaaagaaagtcgttaagtcaggtaaaaaagctggcgaggaatggctcgacaccatcggttattacccgaaggttaatcagcttatttccgggctgattcatcaccatattcaaacagcgacaattaattctcttgtggaaatggctgcggaaatagagcgcgtcggtaatttatgtaccgctgcggttagggtggcttaa

SEQ ID NO: 249461 - DNA, 1017 bp, Klebsiella pneumoniae
atgaccttcaatattgctcttaattttgaggacggcgtaacccgttttattcagtgccatgccggagagaaagtcctggatgccgcctatcgccagaaggtgaatctgccgatggattgctcggacggcgtttgcggtacctgcaaatgccactgcgccagcggtgagtacgacctgggcgaagattatctcgacgaggcgttaagcgacgacgaagcgcaggcccgtcaggtgctgacctgtcagatggtcccgaccagcgactgcgtgatcgatgtgccggtggccgccgcgcagtgtaaaaccgcgctgaccaacaccggggcgcaggtgcggcaggtgaatttactgtccgataccgccatcgaactggtggtcgccctcgatgagccgctggccttcctgccggggcagtacgtcaacattcaggtgccgggcacgcttcatgtccgcgcctactcattcagctcgcaaccgggttccctcgaagggcgtttccttattcgtaacgtgcctggcgggatgatgagccagtggttaacccagcgggcgcggcccggcgatcgtcttaccctcagcggcccgatgggcagcttctatctgcgccacggcgaacgtccgctgctgatgctggcgggcggtaccggcctggcgccgctgctctccatgctccataccctgcagacacagggcagccagcgtccggtgatgctgctgtacggtgttactcgtgactgcgatctggtgaaaaccgacgcgctggatacctttactcaacagttgacggggtatcgttggctaccggtggtggccgatgaaaacagcacttgcccgcagcgcggctttgtcaccgactatctcgacgacgcgatgctgaacaacggcgacgtggacatctatctctgcggcccgccgccgatggttagcgcggttgctatggcgttgcgcgaccgcgggatcaccccggcggggttctggtatgagaaatttatcgccagccagagcgcggcggcataa

SEQ ID NO: 249462 - DNA, 1344 bp, Klebsiella pneumoniae
gtgtttaaaataaagtcaataaccagacgagattacattaaaaaaaacatactgttactattgctatcaagcccttacataaaaaaaacatattctaaaaatcaaacaataaatgagtcaccttctattattaactattacaaaggagactggcaggaagcttttaaaacagggctaaatgattctgattgcatcataataccaaaaggaacgacgtgcgataattttaactttgaattacatgtacctacaaataaaaaaataataataaatggcacactttgcggaaatggccacggaagaataatattaaacggaaataatcaaataacaggaatacatggcgtaattaatgatgtatcaatagtaatatcgggtggtacaccttacatttcaaatttagaattaagcggctatactcaaacagctagaatttatattgatggtaaagaaaatgaaatatcaaatttaataattgacaacctatatattcatgactgtaactatggcattctacggcaaggcaagaactccaaattagttaaagctcagattacaaattgtatttttaaaaatatgaaaggcgacgcgatagaatggaatgtagctgttaatgacgaacaaatcttgatagcaaaccataatattgaaaacataaataacacggcacagaaaggtttttggggaattggcataggcctatctggggcgcattacgacaattcttaccccatcaataaaaccgtaaaaaactttactattgagaatattaatggaaaaaaccttagacaattaatccatgtagaaaatggcagcaactttattataagaaatataacagctaaaaatatctcagataacttcagcaccaatgccggtttagagtctgcaacaatcgcggtttatggctctcaaaatttcacaatagacaaagttaatatagaaaatggcaatggcattataattggctttggtgtcaatcatggaaaatacatatctgcaccacaaaactttgtattatctaatgtaacaatctcaaatgagaaacaaatgaaaaatggtttaaaagcatccttaggaaataagggtagttttgcaacaatgagggatattgacataaagggtgctactttgtctattttaaacaaaccagaatcattaacattaacaaacataaaagttaaaacactagataataatgaagccatatcaattcttgaaaataaaaatgacccaagaaacaaatttaatgttagcaaaaacaacaagatgacaataatcaatgttgaggaatctaatctggcgggaaaaattaataatttctcaagtatagaacacaaatag

SEQ ID NO: 249463 - DNA, 1401 bp, Klebsiella pneumoniae
atgtcaatcctacagcataaagcgagatccaaagccaatgcttctttaatttcgatgtcgcaacgtttttctgatattactgttatttttcttggggcatatattgtttgtttttattatggaataaatttttcttcacaatatttgatggtctctttggtcacattagtcttattccagatggtgggtgggattacggatttttaccgttcctggagaggggttaatttttccattgaactttcttttatattgaagaattggtctttaagtcttgttttttcgatcggtttactttcattattttcttttttattaatacccttcaagttttatcttgcttggtatttgactggttgtttcggatttattatttcgaggtcgtcaattcgttattgcgctaaattaattagaaggtttggttataatacacgcagggttgctatagctggatgcttaccttctgggataaatttacttaaaagttttgaaaacgaaccatggcttggttttatttgtgttggagtttatgatgatcttcaatccaaccctgtaacaccttatgttcctctatctggtgatttggctaaattagtgttggatgcaaaagaaggcaaagttgatagaatttatattgcaatggctatgcatgatgaaataaaaataaaaaatttagttagtcagttaaccgataccacatgttctgtaatgcttattcctgatctttttacatttaatatattacagtctcgtactgaagaagtgaatggtgttcccgtcgttccattattcgatacgcctcttaatggcataaatatggttttcaagaggttagaagatattattctctctttaattatcataatattaatttcaccaatactcattcttatttctttgattgttaaatttaccagtccagggcctataatttttaaacaaaaaagatatggcatggatggtaagtcaatcgaagtttggaaatttcgaacgatgcatgtcatggaaaatgaaaataacgtcaagcaagctacgaagaatgaccctcgagtgacaagggctgggcgatttttacgtcgtacatcacttgacgaactacctcagttttttaatgttttatgtggacaaatgtcaatagtcggtccaagacctcatgctatcatacataatgaacagtatcgccttttaattcaagggtatatgctccgccataaagttaaaccaggaataactggttgggcccaggttaatggttggcgaggcgaaactgatacattagataaaatggagagacgtgttgaatttgacttggaatacataagggaatggagtgtatggttagatctgaaaattgttcttcttactatttttaaaggttttattggcaagtctgtatattaa

SEQ ID NO: 249464 - DNA, 1227 bp, Klebsiella pneumoniae
atgaaaattttaatttatgggatcaacttttcaccagaattaacaggtattggcaaatatacaggtgagatgactgattggatgcataataatggagttgatgtacgtgtaattacagcaccaccatattatcctgagtggaaagttgccaaggggtatcgtaaatattggtttgcgaatgttaataatggatatccagtttcccgttgtcccttgtatgttcctcaaaaaaaatctaccttaaaacgtgtcttacatttactgagttttggtgttacatcttttttttctctgttacgacatatttcatggaagcctgattgtgtgatttgtattgtgccgacaatgttgagtttccctggtgcttatttttttaaaaaaataacaggggcaaaaattgtcatgcacattcaggactttgaagttgatgcgatgtttggtttaggcatggccaaatcaaattttttagccattattgctaaaaaatttgagagttggtgcttgttaaaatctgacttggtttcaactatatccagttcaatgatgaactcaacaattaaaaaaggggtttctgagtctagagttatattcttcccaaactggacagaatatcagagatttgaacttgtgactgaagaatccctcgagagtacagcgcatagattgaatttagatagacaaaaaaaaatcgtgctttactctggaaatataggtgaaaaacaagggctggaaattgttctcgaagcggcaaagtatttttctactgatgaggatgttatttttttaattgttggagatggtcttggcaaaaagtcattagtccataaaactgcttcgcttgggctttctaatgttttttttcatccattacaaccttatgatttgctgccatcattgttaaaacttgcagattgccacctgattatacaaaaacgaggtgtcgctgatgctgttttgccatcaaaattaacaaatatattagccgcgtctggaaatgcggttataactgcagataaaggaagcgagcttggtaacctatgtgaacagtatccagggattgctgtacaagttgaacctgagtctgcaaaagccttaatagatggtattttaaaatgcttaaaattacctaaaaataattcaatagcttcttcttatgctaaaaattatttagataaagcttctattttgcctgctgtgataaataaaatacatgaaaaattaggttag

SEQ ID NO: 249465 - DNA, 450 bp, Klebsiella pneumoniae
atgttcttagaccctaaagaatttagctttattgttaaatctacccctcttgtatctattgacttgatagtacatgatgaaaatggctcttttcttttaggtcagagaatcaatcgccccgcgaggggcttttggtttgtgcctggcggaagaatcctcaaagatgaaaccttagatagtgctttcaagaggataacacttggagagttaggacttgagttagatataaaaacagctgtatttaaaggtgtttatgaacatttttattcagataacttctcaagtgatttattttctactcattatgttgttttagcttacataattaaagtcgcggtgggtttcgaaccgtttgttaatactcagcatagtaaatataattggttcgcaaaggaaagtgttttgtcatctgatgatgtacacgctaatacaaaggcatattttatttaa

SEQ ID NO: 249466 - DNA, 966 bp, Klebsiella pneumoniae
atgccaaaaaagagagtgttcattgcaggacataacggcatggttggttctgcgctgcttagacaattaagtaaacgtgatgatattgaaattatttgccgcggacgtaaagaacttgacttattagacttcaactctgtagaggcttttttttcttcaataaaaattgatgaggtatacttagcagcagcaaaagtgggcggaatagttgctaataatacttacccagcagagtttatttacgagaacattgtaatacaaaataatgtgatacattctgcgcacaaatttaatgtcaataaattaatgtttttaggttcatcatgtatatatcctaaatttgctaatcagcctattaaagaagatgagcttcttcaaggtacattggaacctactaatgaaccttacgctatagcaaaaattgcaggtattaagttatgtgaatcctataataggcagtatggtcgcgattatcgttcagttatgccaacaaatctgtatggaacaaatgataatttccatccaaataactctcatgttattcctgcacttattcgtcgttttcatgaagcaaaggcggctagtgcagaggaagttcaagtgtggggaagtggcaagccgatgcgagagtttttgcatgttgatgatatggccgacgctagtatctatgttatggatttggaaaagagtgtctgggagtctcagactaacccaatgctatcccatataaatgtaggtaccggtacggattgctcaataaaggatttagcacgtattattgctgatgtcattggctacacggggttaataacttttgattcaactaaacccgatggaacaccgcgtaaacttctcgatgtttctcgattaagaaacttaggttggaaccacagaataggtttagaagagggattatcacttacttataaatggtttgttgataatcaggataattttagaggatga

SEQ ID NO: 249467 - DNA, 549 bp, Klebsiella pneumoniae
atgagtcaaaaccttagagagtttgaaatgccaaaaggttttagagggcgtaatgcagtatttgtacaggcatggtggtttgttcaatcaacttttttttctatgtcacctcaattctgttatagatggagaaatttcctacttaggttatttggagctaaaataggaaaaggggttattataagacctactgttaaaattacttatccttggaaagtcagtattgatgattactcatgggtgggtgatggggcaactctgtattctttagggcgaattactattggtaagaactcagtagtatcccaaaaaagttatctatgtacgggaagtcatgattatttaagcgataattttgaaatttattctaaggatataactataggagatggttgttggcttgctaccgatgtcttcattgcaccaggtgtgacaataggcaatgattgtcttgtcggcgcaagaagttcagttttttctgatttagagggaaatcatatttacttagggaatccagcatgtaaaataaaaaaacgttttaatagatag

SEQ ID NO: 249468 - DNA, 756 bp, Klebsiella pneumoniae
atgacaaaactatcgattattacggtggcatataataaccgcgccgggattgagcaaacattcaattcattggattatattgacgataaagatatgccatcaattgagtgggtggtaattgatggaggatcgaccgatgggacctatgattatctttgtacattaaaaagcaaaatcgctataaaatatctttcggaaaaagatcaagggatttatgatgctatgaataaaggtatactcatgagttcaggcgactatgcattattcttgaattctggagacactctagttcctaaagcaaatgaaattattcatgaactttgtgataacccttttagaaacaatatatatatttatgatgcaatattagactttggttataatataaaaaaaataagaagggcgaaaagttgcttttatatttatcatagcttacctgcgagccatcaagctatagtctatcctttgttggagatcaaagatgtattatatgacttaagatataaggtatcgtctgactatgccctaaccgctatgttatacaaaaagggtattccgtttattaaagctaagagaatattatcttgcttttctattggtggtgtttctacgacaaatagtagacagctctgtgaagatgccatgaaagtgcagaaaaatatcttacatctgcctagtgttttaatctacctttcatattttgcgcgaaaattaagtacaagaagagccaaaaatacttgggagtcaggtgtatga

SEQ ID NO: 249469 - DNA, 282 bp, Klebsiella pneumoniae
atgggcatatttctcatcgagataatgatgtcgactaagctggttttacctgggggacagtccttcatgcccctcaggggtaactctaaaagtgcgatttccgcatttttaaccaacaacagggtaactaacgattaccctgttcgcctgaaagattacctcttaaatccgggatattaccgcgtgtacgggcccggaaattcaatacgctcgttcgccgctatagtatgcaacactaaccacaccagcttcatgcaaagcagcccccactgcccgcggtaa

SEQ ID NO: 249470 - DNA, 1299 bp, Klebsiella pneumoniae
atgacagctgagatcgcagtttataataaacttgcagtgtcgctagccgcagactctgccgtaaccataactggcggcaatacagtaaaaataaataatggcgctgagaaactattcgcattaagcaagcaccaccctgttggtttgatggtctatggagcaggtagtctgtgtggagttccatgggaaatgattataaaggaatatagaagacaactgggtgaaacgtgttatgacacagtcgaaaaatacgctgaaatgttttgggaatttttatgtgactgtcaccacatcatacccgacgatataaagagaaaccatttagaagatattctacttaataatgtcttccagggattaatgcaacacattcaagattttcgcattaaagaattcattgagaaaaacggtcgcaaacctaatacacctgaaacgtatctaataattgaagatgcctgcaaagagtttgttaataattttaatggaagtagcttttacgaagggtttgatgaacaagacattattatggcgaaagaattttcaacttcaatcgcacaagaggcttgtgagtcaattttgtttcgtgaagaaggtatagatataccagaaagcttaatagattcactatccaccatgttttctcatataatatgtagaaaatccccttttggtactaacaccggtctggtaatagctggctatggtgacaaagaatacttcccaagcattttagcatatgatgtcataggtttttttggggaaaaacttcgatactccccgaatatggataaaagtacaagtggtggcgagagtggtgtaacagcctatgcacaggaggatgaagtcagcgccttcatgacaggaataagtggagagttacaagagtttatgttccccaaaatagaaaaaggaacagatagcattttacacaatatcgtagaaaaaataacaacatcctctttacctgaagaagaaagagatgagcttattaaaaacatcatagaatatgcaaaggatgattggacaaaaaccacaggtgaaatacgagagtatatccttgaaaatcatgtcggaaaagttgttgaaatgattgagttcctgccaaagcaagacctggggtacatggctgaatccttagttaacttaacagcctttaaacgaaaaatctcaaacgacagcgaaacagttggcggccccattgatgttgctataatatctaaaggagatggatttgtttgggttaaacgaaagcactacttcgataaagagcttaattatcagtactttaaaagaaactaa

SEQ ID NO: 249471 - DNA, 243 bp, Klebsiella pneumoniae
atgaccccagattttcatctggatcataaagaaatgaaaataagtgaggacacaatggcaagcgcgaacaaatgccggaatgatgtggtgatcactgtgaagtcaacgccacttaacgaattgatgaaagactggtcaaaggaggagaaggacaggacgacgcaggcggtgatcaacagcactaatttcaggcttcactttttccagtcatatcggaaagaagttcggccagtccttacttaa

SEQ ID NO: 249472 - DNA, 129 bp, Klebsiella pneumoniae
atgtttcccgttttatctgagcgcaatgcccagagtgagtcaggcaatcagcaatttcaaacaattctgagtaaggttatgacgaacaggcatctcaggtgggactattatcccatgtgggaagtttaa

SEQ ID NO: 249473 - DNA, 663 bp, Klebsiella pneumoniae
atgacggttcaactgacgaaagagtggttacaacaggaaattatgcggctagaagccgggctggatcgagaggatgcttaccgtacagatgatgacggccagagaacgcttgcggcatatcgtctggcgctggtgagcatagataacgaaccggtggaagagagcggcattttttatcccggcgatgctgttggagttttcaatattggcaataaaacctgccctgaccacatggttgcctggactgttaaggggcagaacctgccaaacggcgtgtactggctatacctgcatcccccaaagcagaaaacggttgagctgtacgattacgatgaattaaagggggcgctggagaaaattatttcggaaaactggaagatgcgtgaggttctacgggatttgcttaataagcgccccggaggggtttacttcaaaaaatgggaatcggtcatttacgaagcactgacccaccccgtaaccgatgcgtggcgcagtcgcattctggctgaatttttccccgttattattcctgtagaaatccgagaccagataatcgactactgcgaaggcgctgaaatctgcgacgccgcagcccagcatatctgggacgtattccgcacctcagccctcaaccctgcccctaaatgtaatggtggtgtttaa

SEQ ID NO: 249474 - DNA, 753 bp, Klebsiella pneumoniae
atgacacaagctaatttcattcgcctagacaaaatctcatcctcctactttattaaagccgaaacccttttcagaacatttctattcatgcacgaagcagccaaacatataaataacgaagcgacacccaacattaaaaaggcatgggaaaacctagacaaaacactaaagaaaaacccttcattctctcaaaaaaacaacaatcatcatcatgatgcaataaataattacatcccaacactatgttttagcactttagtatctgcatttgaagactatataacagaaatagcaggactaatgctagcactaaaacccgaaaaactagataaggtaaagttagaatacaagacttacaagagcctctcttctgatgaactccttgaccatttgatagccgaagcaataaccagcataacattcagttcagcaaatgaatatataaacaaaatatgcaaattaacagaaataaacaaaaaagataacgagagtcttattaaagcatttatcgaaataaaagcaagaagagacaccggcgtccataacaattgggttaaagacaaaaggtatgagcaaaaactttcagaaataaacactccatcaccaaaagaaaaaatactcacccccaacctttcatatttcacacatgcttacgacacctgcggtgacctagtgaaaataataagcaataacatatcaacaaatatactcaaagaaaaagaaatcttaccaacaatacaaaaaaacaaataa

SEQ ID NO: 249475 - DNA, 444 bp, Klebsiella pneumoniae
gtggctgagctgcaggaagttgacgcctggttagatgcgctgctggcggggctggagcctgccgcgcgtaagcgcatgatgcgggagctggcgcagcagctgcgccgcagccagcagaaaaatatccgaatgcaacgtaacccggacgggaccgcatacgagccgcgccgcgtgacggcccgcacgaagaaggggcgcatccgtcggcagatgtttgcaaaactccgcaccacaaaatacctgaaagccatcgccagcccggactctgccagtgtcgaatttgagggcagagtgcagcgcattgcccgcgttcatcactatggcctgcgtgaccgggttagccgtaaagggccggaagtgaagtattcgcaacgacaactattgggcattactaacggagaaactaaaatggtaaaagatattctattatcttgggtgttatga

SEQ ID NO: 249476 - DNA, 1080 bp, Klebsiella pneumoniae
atgactagttttgcttacgacggtgatgcttcaacatcaactaatttagaaataacatctttatcgcagttaaaaccaaaaattagcggccggaaagtgtgtgtttttctcggagcaggcttttcgaaagcatgggatgataagtaccctataagtaacgaggttttttctatatctgaagaggaatctttagaaaatattgatgaatatggttttttttcattatttgatggccttaagtttaagtgggctgaggaaaatgcaagtcttgatgataaagctcatgtattcaaaagtttcaaatacgctttggatgtatataaacgttatccaagtctattgccatcttatcttgataggcatacgcttgaattattcgaatcccaagttaagttatatataaaaaataagttttcaaaaaaaataccctcaaatgatttaaagttaaaccaatccgcacgatttggacaaaacaaaaataatattatttctttcttcaaacaattccaagatgctgctgtgcttgatgtaataactacaaattatgatatagttattgataaggtgctgagccatgcttttccggggcgttccataagtcgaggctttccggtacacaataataatatcttaatgtgtcctcagcccaaaggaattgggttgtataagctcaatggtggatttgaggtcgttgcagaaaaggatggcttcaaaatagattatgattcattagttgatcccaaggttgttccaaacataattctcccttctaacgagcaagattatggggataagtattttaaaacggcctttgttaaatcctctgggcaattgaggcaagccgatcttttaatcttcattggttactctttcccgaaggaagactttatcattaatttccttttaaatactttccttgatggtaatagtacagagaaagaaacagtgataatcggaaggaacaaaagcagcgcaattgatacacatcaacgtgcctgtggagtatttaaagagctaaatgataagtctgcattgttctactatggcggaagtttttctgaactttgtcgacaacgctaa

SEQ ID NO: 249477 - DNA, 1227 bp, Klebsiella pneumoniae
atgctagttgcattcagtttagaaaattacaaaagttttcgcgaaagacaagttcttagttttgcttcctcgatcggggatgagcatcctgagcatatggtgacattggcgaatggtttacgggttaaccgttttgcggcgttaattggaggaaatggtgtaggtaaaacacaattaatacaagctattaatgaatttgcaaatgcgatccataatgatggcttaaataaattgcatatgccgtttcttttaaataaagaatgtcgcagcaagcctacttcttatgaggcgatcatcattgatgaagatcaggagaactttattcgctatggtatttccatttttaatgaagttatagtagatgagtatttatacattaggcctattaaaaaaggtgctagagagcaatgtatatttactcgggatgtaaatggggtagtatttaaaaaagccgagtataaaaagcaggaatcattaattggtcctattttaagagacagtggagcagttataactttcgcaaaatcgttggagatcgatgctcttgtagaaaccaggcgttgggcgttaaagcaattgccttactactctgaaaaacataagaatcctagtttgaaatttgtcgaagggcaactgaaacgtcaattattaggtgaaggggataatgaagcgttagatgaaagtggtttaaggattatacaaacctataatgaaatggttgtacagtctccacttcatatagataaggtcgattttttaaaatttggagaagacaatgaatataaatttgtctattttataaaaaatgatgatggtgattttaccagaattgggccagatcgtagggatgaatttttttcccaaggaacgctaaatgttttaacattcttagcaattttaatttgggctagtgaatacgatttcactttgtatgttgatgaaatagattcatctattcattattcattagcaagtgcgttgattaaaaagatattcgataaaacgtgcagaagaaatggagtgcagtttatcatgtcaacgcataacatccctttgttggatgactattttagacgagatgaactcaatattataatcaaagactcatctaaagcttcaataataaccaatgcagcaaacttttctgtaagaaaagatgcaaaggtctctgcaaaatacttacgtggtgaatttggtactgttccatcttttcttggtataaaataa

SEQ ID NO: 249478 - DNA, 237 bp, Klebsiella pneumoniae
atgcgcaatagagaaacccgcaccaccaaaactggaccggatgatgctggcctactccagctgtttaacgaggctcgcctggatgagcgtaaaaactgcgcctttgccgtttcgttacgaatagaggcgctggcgatctacatactgcagcaagggatgaacggagtggaagcggcagaattgcttcgccgtgaagttgcccgttatgacgctgaatcacggggagactggcactaa

SEQ ID NO: 249479 - DNA, 342 bp, Klebsiella pneumoniae
gtggcgataaacggtgatgctgcaactgttccactaagccctggtaaacgtctggatgggcttaaccatattgcagaattacgtgcaaaagtattcggcttcaatattgacactgagctgatacggtttatttcggatatgcgtaatccgcgggacgtgaacagattacagaatgagagagctctggcagccatattttttatggcaaagattccgacggaacgtcattgcgttaatgtgagtgacctgactactgacgaaaagagggagctgattaaagcaatgaatcattttcgtgcagtggtgagcttatttccaaaacggctaagcatgcctaattaa

SEQ ID NO: 249480 - DNA, 249 bp, Klebsiella pneumoniae
atgctgacccagatagagaaggaccgaatcgagaaactcgaaaacgaggtcgcaaccctccacaaggaagtagtgatgcagcagataatgatttctggcttgctacacagctttttccgtaacgaatcgtcgaatcaggaggcattctttagtgtcatcagcgaagaacttaaccgactacgctttggatcagttaaacatcaagaattcagccatgacatccagcaactcctcgaccgttatcgataa

SEQ ID NO: 249481 - DNA, 225 bp, Klebsiella pneumoniae; identical to SEQ ID NO: 199747

SEQ ID NO: 249482 - DNA, 270 bp, Klebsiella pneumoniae
atgaatgagttacagaaacagggcttagaacttcgtactaaagctaaagaattagctcttgctgctttggcaaagcatcctgatggacgcataaatggtaaaggcgttaagcaagcagaagtatttcgtatctgcggtctggactgggtagattaccctaaagccccaagtacacagcaacaatactgggcagtagcccttctccgcgaacttgagtcagagggaatggtggagcaagtcgaggagaaaggcccctggcgtttaaagtaa

SEQ ID NO: 249483 - DNA, 477 bp, Klebsiella pneumoniae
atgaaaaagtctcctttaaaaaaccttccattcattgcaactttattattatcaattatttttgctttactttacttttttgcggcaaaccaattcaatgtaaacatatcactaacagtaatagctttaatacttacaattctttctggttttgattttattagaaatatcacatcttttgaaaggcccaataagccacctgtagatttattattagtattcagcgttgctgtagcaatcacatcaattatatcattagtatgtaaagtagatgaaagtattttagagctacgagaacaagtgactattattggaactttaattttacttgtattaggaatgattgcatctgcttacttgaagcataagcatggaacaaaatctaaagtaagaagaatagaaaaagaaagccattcgatatttaacgaaaataatgaaacaattacaataattacaacaataaaaaaagccccataa

SEQ ID NO: 249484 - DNA, 1185 bp, Klebsiella pneumoniae
atggccgagttacatgaagtaaaaccaagagaacaagcaggaagagataccttagaacggtataatgctcagattagagcggcgagtatcgcatgtttgtcaatcttagagggcaaagacgttaaacgtgttttttgcgaatttcacgatgattttgtgattgaaaaagttgtcgctaatgatattcattacacatttgtgcaagtcaaaaccaaggagaagcttcgtgaaatatggaaacttcgagatgtttttggaatcttaaaaaggaaaagtgcaaaaaaccctcaaaccaatgaaatgatcagagatagttttgttgggaaattattacagcacacgactaattttgaagattcctgcaaagaggttgttttccttacaaatacgcatgttgacgaagatatagagaacattattaatgacatatcatctgaaactttttcaaacacacattgcaagctaattattgactcatttaataactgctttatctcaattcagaatgaacaaaaagagttaggaattgacgcaataaaacacaagcttaagaaattaagattcgaaactgatgtagaatatataaagagcaaacatgaaacatttgagatacttgcaaaagagaagatttttaaatttagcgaaatagagctatcgcatagtgaagctaaagaaatacttttttccctcttagctcttgtaaattctaagtctagtgtaaaaatcaatgactgttcaaaagaaaatatagaaaaactcgcaggagttgatattaatgaccttctagaagttttaagcatctctaaacgtgcttattatgatttcttagagaatggtgatgaacatgctttaaaatcagcatcagtaattgaacgattactgagaaaagcaggagctagcgacatcgaagtggatttttttaccagatgtaagatcaaatgggatcagtggctaaggaataacagacacattatatctgaattagattacatcacacttgaaagagaaattaattcaactttggataaactaaccttcatgcatgggagtttatttatttcaaacttgagaacattcatagatgaattatatgattcattacataagcataacttacttcattctttagataaagagactttaataggaagtcttttttccagattagtagagcgttcaaaatga

SEQ ID NO: 249485 - DNA, 1752 bp, Klebsiella pneumoniae
atgaagctgataagtataaaaattaaaggtagagatatagtcggccttgaatccgaagagctaatctttgggacaaacataactgaattttatggccccaatgggtgtggaaaaacaccattattacaatcaatctcttattgcctaggatacccgtgcaaatttagggatgatatttataaactatgtaaatctgccactcttacgttcactatagctaataatacttttcgtgctacaagggactttgaaaataccgacttcattttaaccttagaacaaaatgaagagacattaagattttacaaccaagctgattattcaaaacatatctttgaattgttatcactcagttatccatcgcttcttacaacgcagaataaacagtcttacccctatttatcgactattcttcctatattctatcttgatcaagatttaggttactcaaaattttattattcaccaggtaacttcataagagatcaattttctgaaatgctcagaatcgtattttcgttgcctgaaaaacactcttttgacgctaaaaagaaaacaattaatattacagaagagataaaatatcttgataactcattagcagtacaaaggagaaatattgaaatagctaaagaaactcacaaagataaaaatattgaggcaattgatagctctattgataatttaaaaaatgaactttctgaattaaaaaatagtaaatcattaaaaaatgattctctgtttagcatagaggcggtaataaaaaaacaaaaagaaaatttaaatgatctgaaatccaaactaaacttcatggaaaggagagagtcttcattgttacagataatgaaggagatcaatactgaaatagaaactctaaaccttaatgaagaagccaagagaatattccgttctttcgaggaaatttgcccatctcttgattgcaaaatgttctcccgcagctctgaaagctacgcaaaacatctgttatatctaaaagatcaaattaaagacattgaaagaagtttaaatttagatagtgatcgccatgacaagttagaacaagaaatcatatacaccagtaagaccattgaagatcttagtactatgagaaataacatcattgaagaggaagacatatcatcagtaattgatgcgatttccgaaatatcatccatgctatttaagttgcaattagaaaaaaatgagttaaataaaataacaatattagaagacaaatatattgaaatgcttaataagcgtgaatatgctttagatgaattagctggactcgagaaaaataggcaatcaataccgagactggcaaaaataaaaacgactcttagagataaattcatcaactggttgaaggttttaaaaactccaaatattgatttcaatgttacatttgaaaatgacttcagccctatcatgggctatgaaacattggaacaattaaaaggaagtactaaagttagagctatacttgcatatagaacagcattgatagaaagtatgcttgaactggattgtaagtccttcatgtttgcgatatttgatacaccaaagcaacatgaaatacattatgaagacatcgacaattttatcatgaatttgaaaactctttctaagagatacaacttccagtttattttttcatcaactgaatacaaatatgaaggtgatgcagatgatgtcttattaactcctaaatatcctggagagcagcataacatgtttttaatgagatattag

SEQ ID NO: 249486 - DNA, 1515 bp, Klebsiella pneumoniae
atgatcaattccacacctatttataataaatttaagtacgtatctgctgagtgtggttcaggtaaaacatatcaattatgtgagaatatcaataaaatacttaagacgaaaggcattactgaaaagtttattatcgtacaaaatacacagaaactcgctacaaaaacagctaaaaaacttaacaactgcaaattactgattagcgatttaatgcctaggagtaaaaatgtcattaatacagtactggaatttttaaaatcacctaccgagcgagtgctaataattagcgacaaaactttttttagaattcccattgagttactacaggggtggcaaatatggcttgatgatgtgactaatttccattcattcaaaaacgttaatgatgataatcagagaatcaaagatatgatttatcatgaactgatgcaggagcatgagattgtcgacgaggaaaaggaacgatatttaacagctaaaaagaaagcagtaaaaggggatttaatgaacaaaatcgcccaagagctttctgttatagctgagaatgatattttcatcatgaacaacgattactttgtcgatccagagaaagtgcaattgagcattcttggatggaaagatctcagtaagtatctcggattacctgttactttcatgggggcgaacttcgagaattcattgatttataaggcaaatcaagggatgtttgaagaaatcagtctggataatctgcgacaacgaaaagtacctttaactgaacgcctcaaagtatactatttctcagaaaatatcaagttatcaaagacatggaaggaaaggaatcccgaccaactccagcgtgtttatgattacctctctgaagtactcgacggtcagaagtactactggacgaacaacaataccgataaacagaagctgcatgaggcttacagaatcagccctgatgcgagggggcataacgactacaaagatcgacatacatgcgtctggttagcctgtatgcgttctgacgacacagaagcgaagctgtgtgagttgctattaaatattacaggtgaagatatccatcaggctagagaatacgagagccttcatcagttcgctttgagagggatatcacgtgatttcgacaatgatgcaacacagattgtctatgtgttcgataaatggcaggctgaatcattgagtacaaatattgaacatattcctgaagtactagaaaacgttgaaccaggtgtaccgggaaggccaaagggagccacaaacgctaagagattgcctgcattgagtgatacaaaatcaaagcgtttcagtcgctggaaaaaggataatccgaggcttgagttagaggcattcaaagcgtttcttgcaagtactgtcaactcggatctcagtcctgatgatattacggctatgtggggcagataccagaaagcagtacaaaaaagagacacaaactcagtccgatacaccgacatgcaaagcaacagtatgtccaaaaataatcccttataa

SEQ ID NO: 249487 - DNA, 534 bp, Klebsiella pneumoniae
atgcaaaaagttttgtggactgttcattacaccctggacagccaatgcgacaggttgtggctatgtcagcccgggcgaaaggggcttaaacgggtgaacggcaccaggaatggaaatgagcagggacccgccgcaacgacggaacgcgcgggcgcgaaacggcgttgcgccttacagcacggcgtcagtttgccggggtgcagaaagcgcaggatacggcgcgtaaaaggggtggcgcatccggaacggatgctgcaagccctgttgttgcgtcatgggatggaagcccgcagggcggagacggtttaccggctccgttcacgacagcccgcccggacgcccgctgtgaaaccgggaacgggcagaaaaaagagaacgggagattacatgcggcttagtgggaaacctcgccaacagggcggggagcagtcacgagatggccgacaattatccggcgtgatgccagccgggaacatcaggagcgaaaatgcttttcttttctgtactgcacaatgctgtaccaggccgaagtaa

SEQ ID NO: 249488 - DNA, 270 bp, Klebsiella pneumoniae
atggaaagacaacaagaaattgaagagcgctcccgggatttaataagaaaggccgatgaaaaagaaaggcaagaattgaaacgttttgatctgctatatggtattttttttggttcttcttttttttgcttcagctggatgttttttttgttcagtatgaagattttcgcgatatgcagcccgccactacagaacaactgcaaagtattattcatgatgcgccttgtgcgggtgaggcttttcggatggctcttcaaactaatactgtga

SEQ ID NO: 249489 - DNA, 900 bp, Klebsiella pneumoniae
atgaaaattgatctcaatcttttacctgtttttatcgcggttgctgaagagcgtaatttcaccacagccgcagcccggctgggagttacgcgctcggcgattagccagggaatgaggcggcttgaggatactctcggcacaatgctggtaatgcggacaacacgttcagtaaacctgactgaggcgggagaacgactgcgtacatccttgtcattacctttatccagcattgaagctgcgttcgaagatattgcatccgacagcacgccatgtggacttctgaggatcgcggtaacctccatagctgaagagtttctttctggtccgctgatcgcctcgtttgcggctgctaatccagccgtgacgatcgatattgtcgtgacggatgaggaatttgatattgtggccgctggttatgatgctggcgtaaggcttggagatgtgatcgagaaagatatgattgctatcccgcttacagaaaagcaacgtgaaatggtggttgcgtccccatcctatctcacagctaatagcgcccctcttcatccatgtgagcttgtgcatcatcagtgtatcggctggcgtccatccccagatgttgcgccttatcgctgggaatttgaggagaacgggagagctttcgatgtggcggtagaaccgcgaataacaacgaatgacctgcgtctcatgctgagactggctcttgccggtggcggtataacatttgcccctcaggaaacattcaagccgtatattgaaaatggtcaacttgtttcaatgcttgatgattttcttccccattttcctggcttctatctgtattttcctcaacgccggaatatagcgccaaaattacgcgcactgatcgaccatgtaagacgatggcggcaaccgcatgcataa

SEQ ID NO: 249490 - DNA, 723 bp, Klebsiella pneumoniae
atggataaagttatattaattaccggcgcgtcaagcggcattggggaaggtattgccagagagcttggaagtacaggtgcgaaggtgctattaggggcacgcagactggatcgtatcgaagccatagccgcagaaatccgcagcaccggcggtattgccgacgcgcgggagctggatgttacaaaccgactgtccatggctcagttcgtgcagtcagcgcttgataactggggtcgtgttgacgttctgattaacaatgcgggcatcatgccactttcaccgcttgcggccggcaaacaggatgaatgggaacgtacgattgacgttaatatcaagggcgtgctgtggggaattggagctgtgcttccagtgatggaagctcagggttctggccagataattaaccttggctctatcggtgctctttcagttgtgccaacagctgctgtctattgcgcctccaagttcgcagtacgggctatttctgatggtctacggcaggaaagctcgaaaatccgcgtgacctgcgttaatcccggcgttgtggaaagtgaactcgcctcaaccatcacccatgcggaaaccatggcggtgatggacgcataccgttctgttgcacttaaacccactgatattgcccgtgccgtacgacatgtcattgaggctccggaaagcgttgatacaacagaaataaccatcagaccgacagcatctgcaaactga

SEQ ID NO: 249491 - DNA, 222 bp, Klebsiella pneumoniae
atgaataacatccattatttaactgtagcaacaattgtgtttttagtatctttcagcactatggcccaaactgttactgcagtagattcaaccatcgagggcgctgaggaaaaaatttccacccttgcaactaaagaggggaaaaaatataaaattcttggagcctcttttaaaaacagggtttatatggcagcagagttaatccctgttaataaaaaatag

SEQ ID NO: 249492 - DNA, 246 bp, Klebsiella pneumoniae
atgaaagaacagcatacatatacaggcctctggattaccgaagatgagttcattcgccatgagcctttaccaaatgggcgttacgatgaggcacgaggcacaaaacctcatgcttatcagggcgactacgacattcgtgaaaacaggatctactatcaggacgataccggttttacagctgatggaacttttgttaataatgacgaacttcaccacgcaggaatggtgcttttccgccgccaataa

SEQ ID NO: 249493 - DNA, 273 bp, Klebsiella pneumoniae
atgcttgcacgcattgctgatggcggcgtgatactgtcggagaacaccaccgcatccgcttcgatgaacgtcagtaccaacctgctgcaaagcagatatatgatctcttttctttctttacgactggcacaacgctacgccaaccagggacagctggggatccaaaacctgccgaaaatagttcagaaaataggcgtcggtgttttctggcgtaatgatgaaacaccttccgctgcgttaaaccgctttttgtactttctagcacaggtttag

SEQ ID NO: 249494 - DNA, 1044 bp, Klebsiella pneumoniae
atgaatataagaatactcattgctgtggctttgctttttatcagtcaaagtatatttagcgctactacacaacctcatattgtgattcttgcgacaggtggcactattgctgggacggcagcaaatacaacacaaacatcgggttataaatctggcgagattggtgttcagacattaattaatgctgtaccagagataaaaaatattgcacgtgttgatggtcaacaaattgctaatattggtagtgaaaatatgaccagtgatattattttaaaactgtcccagcaggtgaatacgctactggcgcgggatgatgtggatggtgtggtgattactcatggtacagatacgttggatgaaacagcatacttcctgaatctgacggtcaagagcgacaagcccgtggtgttcactgccgcaatgagaccagcgacagcgattagcgcggatggtgcaatgaacctgttggaagccgttactgtggcagcagaccccaatgccaggggccgcggagtgatggtggtattaaatgatcgtattggttcggcaagatttgtcactaaaactaacgcgaccacgttggatacattcaaagcgaccgagcaggggtatctggggatcattgtaaacggtacaccgcaatttgagactcgagtggaaaaggtgcataccctgcgttcagtatttgatgtgcgtaacctgcgaaaattaccagaagtcgtggttatttatggttatcaggacgatccggaatatatgtatgatgcagcaatttcacatcatgttgacgggatcatttatgccggcaccggggcgggttctgtttctgtcagaagcgaggcagggatcaggaaggcagaggaagctggaattatagtgatacgctcatcccgcacagggaatggtgttgtacccgtcgataaaggccaacctggcctggtcgcggattcattgaatcctgctaaagcccggatattactaatgactgcactgacgcaaacaaaaaatcctgagctgattcaacactatttccgtacctactaa

SEQ ID NO: 249495 - DNA, 1320 bp, Klebsiella pneumoniae
atgttttggacggaattgtgttttattcttattgctttgatgattggtgccagaatcggcggcgcatttttagggatggtcggtgggttgggtgtgggcgtcatggtattcgtattcggtctgacaccttcaactccgcctattgatgttattcttattattctttctgttgtattagccgcctcatcattgcaggctgccggagggctggatttactggttaaactggcagaaaaaattctgcgacggcacccacgttatattacgttgctggctccctttatttgttatctttttacctttatgtctggaacggggcatgtggtgtacagcttgttgccggttatctctgaagttgctcgtgactcagggatccgccctgaacgtccactatccatttctgtcatcgcttcacaacaggcaatcaccgccagcccgatatcagccgcaatggcagcgatgatcggtctgatggcgcctttaggtatttctatttccaccatcatgatgatttgtgtccctgcaacattgatcggtgtggcatcgggggcaatcgcaaccttcaataaaggcaaagaattaaaagaagacccggagtatcagcgccgactggctgaaggggtaattcaaccggttcagaaggaaagcaaaaaaacagaagttacgtcgggcgccaggctctcagttgtgctttttttaatgagtgcggttgtgattgtattattggggcttattccggccctgcgtccaattgtcgaaacagcaaaagggctacaaccgctttcaatgtcagcagcaatccagattactatgctctcttttgcttgtctgattgtattgttgtgtcgcccgcaagtggatcaaatcattagcggtacggttttccgcgccggagcactcgcgattgtctgtgctttcgggcttgcatggatgagcgaaacctttgtaaacgggcatatcgaattgatcaaagcggaagttcagacacttttacaacagcatacttggctcatcgctatcatgatgttttttgtctccgcgatggtcagcagtcaggccgcaacaaccctcattttattgcccctggggttggcgttaggactgcccgcttatgcgctgattggatcatggccagcggtcaatggctatttctttattcccgtggcaggtcagtgtcttgcagcattagcttttgatgacaccggaaccacgcggattggtaagttcgtacttaatcatagctttatgcgaccaggcttagtcaacgtcattgtctcggttaccgttggcttaattattggtaaaatggtgctggcctga

SEQ ID NO: 249496 - DNA, 849 bp, Klebsiella pneumoniae
atgagcatcagcgttataggtattggtgacaacgttgtcgataaatacctccattccggagtgatgtatccgggagggaatgcattaaatttttccgtgtatgcaaaactcactggagtacctgctgccttcatgggagtctttggcgatgatgaggctgcaagacatgtgcaggatgtcttgcatgagttaaagatagatactacccactgtcggcattatgctggtgagaatggatacgcttgtattcggctgaaaaatggtgatcgggaatttgttaccagtaacaaaaatggggtgttgcgcgagcatcctttgatactatcacaagacgatctccattatatttctcaattcaatttagtacactccagcatcaacggatttctggagccagagctgaaaaagataaaacagaataataatattatttcgtatgatttttcagggcgtggtactgatgaatatttcgaaagcgtatgtccatggataagctacggttttatttcttgcagtggcttatcatcagatgaaataaaagaaaagattgagaaaatatatcattacggttgccggcatgttatcgcgacccgtggacatgagggtgtttattatttttctgccaatggttatcttgagtggcatcctcagtatatcgaaccagtggatacgttgggagctggtgacgcgtttttgaccggctttatgctctccattttgcaatccggtacagaggaacctgataacgaaatggtgatgtcagctatgcgagtaggagggcaatctgctgcgcaggtcttatcacattatggcgctttcggttttggcaaaccttattctgcctgctaa

SEQ ID NO: 249497 - DNA, 978 bp, Klebsiella pneumoniae
atgatgagtatgaaagagattgttagcgaaattttggccagccaggaggataaagggggcgtaaaatacgtttattacgtggcctgtggtggctcatatgccgcgttttatccggcgaaagcttttttagagaaagaggcgaaaggtcttaccgttggcctttacaacagcggagaattcattaacaacctgccatcggcactgggggagaacgcggttgttattgtggcttcgcacaaagggaataccccggagaccattaaggcggccgagcttgcacgtcaacatggcgcgccggttattgggttaacgtgggtgatagattctccattagtcgcccattgcgactatgtggaaagttacactttcggcgacaacaaagacattgctgaagaaaagacaatgaaaggtttgctgagcgcagtcgagttcttgcagcagactgaaggctatattcattacgatgacttccttgacggggtaagtaaaattaaccgcattgtctatcgtgcttgtgagcatgtcgcagagcgggctgtgacatttgcgcaggaatacaaagacgacaacgttatttataccgtcgcgagtggcgccggttacggcgcggcgtatcttcagagtatttgtatctttatggaaatgcagtggattcactcagcatgtatccacagcggtgaatttttccatggaccttttgagatcactgatgcgaacacgccgtttttcttccagttatctgagggcagcgcgcggcctgtggatgagcgcgctctaaacttcctgaaaaagtatggccgtcggattgtagttgtcgatgctaaagagttagggttatctactatcaacacgacggtgatagattacttcaatcactctctctttaataacgtttatcctgtctacaatcgcgcacttgcaagggctcgtcagcacccgttgaccacgcgtcgctatatgtggaaagttgagtattaa

SEQ ID NO: 249498 - DNA, 717 bp, Klebsiella pneumoniae
atggagcagcctgacagcaaaagcgcgaagccactctataaacagcttgaagcctccctcaaagaagctattttgtgtggcgaatatcaacctggacagcagatcccaactgaaaatgagctaagcgcacaatgggaggtcagtagggtgaccgtgcgaaaagcactggacgcattaacgcgtgaaaatctcctgacccgcgtgtcgggtaagggaacatttgtttccagtgaaaaatttcagcgtagtatgacagggataatgagtttcaccgagttatgccagtcgcaggggcgacggcccggttcacgtactatcaaatcagtattcgagtctattgatgatgaaacacgattcttgctgggcatggctgccgaagaaaaagccgttgtcatcgaacgtattcgctatgctgatgacattcccgtctcactggaaaccgtccagatgccaccacgctttgcctttctgttacaggaagagcttaacaatcaatccctatatgagtgcttgcgtgagaaatacggtttgtggtttacccactcacgtaaaatgatcgaactggtttatgcgaattttgaggtcgctcattatcttggcgtggcagagagttatcctctcatcctcatcaagagtgaaatgatcgacaacaaaggcgagttgtcctgtgtctccaagcaactgattgtcggcgacaaaattcgcttcacggtgtag

SEQ ID NO: 249499 - DNA, 1455 bp, Klebsiella pneumoniae; identical to SEQ ID NO: 201641

SEQ ID NO: 249500 - DNA, 1224 bp, Klebsiella pneumoniae
atggcttcaactcttaatccacacgaacaggtaagaaaactatttgatagcattctaaggaaatcctcaatccgacctccaatcgaaattgggaaaggcaaagatctcatcagcgatttcaatgcaaaatgcgatagttttaaagatactctaaaagatcacattgcaagcgaaaataactggttattaattcgagttaaacatagattaagggtaatacaatcattgcaggacggcattactaaatgcctagaatgctatctatctggagatattaaatcagcctacgactcttttgaactaatgttaaaaccaaagtacatttcacaacaaatagagaaaatttgcattcctctatccaaggtctgtaacagacaaacccccttgtatagagttagaaaatcagacactccgttatcaaaaagaaaggatattttccatattccttttactcatcgtcatttagtaagagcacaacgttactctgttgcaggcctaccatgcctatatctgggtacttcgttatatatatgctggcgtgaaatggacaaaccagattttgacaagctatatatatcatcatttaccaccacctctgacgatgataaatccttattacttaacttaagtgcagacatactttacaagacgagtttacgattaagaaaaaaaggtgactcacatgccaaagaagaatattcaatcaacaccatgttatcttatttatcattatggcctctgattatcgcctgcaactatttgaaagagcacagtgatgcttcatttattcaagaatatattgtacccaatttactaatgcagtggataagtagagatataaacagcaataacattatcggaattgcttatcgttcaactaaactcccagccaatactgacagtgaaaagggagtcaatgtagttcttccaccgaaagcaagctacaaggaaatgaaagaatacgatttttgtcctgcgctttcggatttatttgagtttactccgccagtttcatggcaggttcttaaaactcttgattatgtaccgctacgccaatcactgtccgacaaggaagctttgagtgagacactgcgacgtagaaaaaaatatgctctcactggcaaccttgatgacgaaatattaagcatctatcagttatcagacttctacaagctagaaatctgccttgctgaaattcagttacacgatgacatagaggcctga

SEQ ID NO: 249501 - DNA, 1164 bp, Klebsiella pneumoniae
atgtctgatttagatgatgtaaaaaagatagtaatagaaactctagtgaaggaaatgtataaagatctaaaatcaagcattccttctatttttaaaaagatatctttacccaccaaaaaagttaatgctaaaagatttagtactcctgatggccttttggatgctttgaaaaaagggagtgtaaaaaataatgaatttgttgtgttggaatgtaaaccaactgtctttggaccatatttaagaagtcattacctcatgccctttattggatctagtactgatatgcgtttgggcccaatttttgccggggggaacgaagatattgacgttatttttaacatatttgctcaggtgagtagtcatttaacacctgttggattatacccgccgattgataatgatatttcacaaattaaattgcttccttctgatgcggtatgttacggtttcaccggcatgatgccatgggttaatgatattgtttcatcaatcacggcgattgttggtcaagacaaaattatttcttctggagcaccttgtcatgttgtagggattgttaggcaggtgactcaagctatgtttgtggaaaaaggattgccgattgaaatatatgaggagttaaggcagtctggtgatatatggtatttagatgtttattcggaagggaccgatataaaaccaattcatgatggtgttgttacagaaatgtggggaggcctttatgcatcaggtcatattgaatgcgagggggatttatttgcagatccattaattaacggtgttatggattcatttagaagtgcagggtatgaacctcaatttacacaaaatctggctgctggtaatgatatgagtgtttatgcaaggggaatgagattctctattttaccaggctgtggtttttattctctgcatatggatgcggaattggctattaattataaaaaaaatagaaatgtttttaatagtgtgtgtgataatttacttgaggttataatagaatctgctaagaaaagcaatgctaagatattaaatccaagggatttggactttacttatactgattctgcaaaatcattttctattcttgggtcaaaatgtgcagaggaaataaaagatccagtagctttagttgtcagagattggtacagaagaaaaaattaa

SEQ ID NO: 249502 - DNA, 1185 bp, Klebsiella pneumoniae
atgaaagaaaaaattgtaaaaccgaactggaaaatttggcgttttgaccagatggctaccaatgtcaatgtccgtattgacaatccagctgaatcgggcatggaatactatgttggtctcgaacatctcgattcagactcgcttaagattcgtcgttggggaagtcctgatgatgttgccgctaccaaactgatgttcaaggagggtgatatcatttttggtcgtcgtcgagcctatcaacgcaagcttggtgttgctgaatttgatgggatttgttcagcccatgcaatggttttacgagcgaaaccggaagtggtattgcctgagtttttaccgtttttcatgcagagtgatgtattcatgaatcgtgcggtcgagatatcagttggttctttgtcaccgactataaattggaagacaatggcagaacaacaattcatgttgcctccgatggaggagcaaaatagattggtgtcagctctcttatcttttgacaatttatcaaatgaggtgagcatagctcatgataaattgagagtttcagaacgtgcagcaattcagtttgtgttaggtcaggaacatagctggcgcatcgtgaaaatgaaaaatattgtaaaaaacattgaggctggaaaaagccccaaagcatcatcattgccagcaaaacctgagcaattaggtgtactaaaagtaagcgctgtgggttcaaccggatataatccagcagaaaataaaactctactgaacccagaagattttgttcaagatgccatcgtcagggctggtgattttcttgtgacaagagcaaatgcacagcctcaaggtgttgctcgtacatgcatagtcgaatcttcaccaaataatctcatgctcagtgataaaacttggcgaattaattttaatgaggatgctcctccactagattttgtattagcttggacgaagcttccaatattccgttcatatattgaagcactttgctcaggaacagaggcaaagaatatttctcaaaataaattcctagcagcaccaatgattgatctgacgaaagaccagcgtgagcatatgtcccatattcttaagcagacaaatatagcaaaaaaaatgttaatcgaaaggaatgatgttgttaaatatatgaagcaagggttcttgcaagaaatttttggagagagctttcaatga

SEQ ID NO: 249503 - DNA, 1674 bp, Klebsiella pneumoniae
atgattgctgctgaagcatggcaacccgccgatgggctgacgttggaaccaaatgcaaaacgagcagtaaaagcgcgtgagggctgcttggcactaacagccggacctggcgcaggtaaaacggaaatgcttgcgcaacgagcagacttccttttgcgtacaggaacctgtcggtatcctaagcggattctggcgatctccttcaaggttgatgccagccgaaatctaaaagagcgtgtcgaacggcgatgcggctccgatcttgcctcgcgttttgatagctatactttccatgcatttgccaagcgtatcatcgatcgtttcaggccggtgctcacggggaaagatgccttggatgcgggttatacaattgttgataagaaaaatggcccttctcgttctcaaatagaattcggcgatctggttccgttggcaatacaaatattgctaagctcaaaaattgcccgcaatgcaattaggcaaacttatagcgatatttttttggatgagttccaggattgcacgaatttacaatatgacttagttaagcttgctttccaagggaccagtattcgccttactgcggtaggtgatactaaacaaaaaattatggcttgggctggagcgctggacggtattttccaaacctttgccaatgattttaatgctgtaccacttaacatgtatcgcaatttccgttctaaaccacaattgctgcgggttcagaacgaaattattcgtacgcttgatcctgactctgttatgcctgatgaacaattgaatggcgatgaaggagaggtttatgcctggcgttttgaagacagctgtaaagaagcagtctatttggctgatctaataaatggttggataaatacagaacaattaccacctgctgaaattgcagtcttggtttctaaacagttggaactttatgctgacctcctaatgaccgagttggacgctcgcggtattccatatcgtaatgagcaacaattgcaggatatcactatagaacctgcagcacgtttgatcgtagattatttatcatgtctctacggtaagcgtgaacctaaggcttggattcgattaatgaatcaattgattccttttgccgatgaagaaatacagtcaagtgcgagaaaggaacttgatcaattaattaaaaaacaacgcaaaaaagtatctgatgctaggcatacaaactcgcctttttcgaattgggtacaattggcaatagaatttctcaagtatattggctccaaaatgttggttgctttatcacctgactatgaaacgcgtgcgcgtttagatgatgttatccgtgaaacttttgcgcgggttaaagaattgctcaagtcagagccagatttgccaaaagcgttgggacgttttgcggatgatcaggctgtgcgcattctgaccattcataaaagtaaggggctggaatttgactcagttattattttaggcatcgagagtcaaacgttctggggaaaacctgatgcagagcgttgtgcatttttcgtgggtatttcacgtgcgaaaaaacgtttggttcttactgtttctgatcgcagagaaacgccgccttcaaatccgtatcgatggcaagaaaatagaacacagcatgaagaatttatcggatatgttacgccatttttgagaatacagtaa

SEQ ID NO: 249504 - DNA, 1905 bp, Klebsiella pneumoniae
atgaagcttgaaacaattcggttattaggttttcagtcttttggtcaggaaccaacagagctgagcctggaagatattacctatctaattggtcctaatggttcaggtaagaccgcagttcttcaggctttatgtcggctctttgcattcgatccgtcattgcgacgtgtccagcgttcagatttccatgtccattttgaagaggaggaggttcctcctgagcgtgagctgtggatagaagctgattttttatttcacgaactttcagaagacgaagataacagtacagtagcacctcattttggccatatgcgactagatgagccggaaggtattccacgagtacgttttcgccttacggctactatggggctggatggtgatatcgacgaaaacttagtgtatgtcttggatatcaatgctgatggttcacctcaaaacacagctcaagtaccacgagcagagcgtaatcacatccaggttcattatttaccagccagacgtgacccagctgatcatattacttacggcgcgaatgcattactaggccgtttgctccgggccgtacgttgggatgctgagcgcgatacgatcaagggtctgaccgatcaaataagcgacagccttgcagcaaacccttcagtgaatgcatttagtgagagtttgaaaacaacttgggccaccctacataaaggcaaatttttcgctgatccaaaaatcacatttgtagcttcggagattgaagcgctgttgcgacatttgtcggtttcttttaccccagggcacgatggttcacttgtcgatttctcgcggttgagtgatggtcaaaagtcaatgctttacctttcccttgtattatcgtctcaagcgattggaagagctgtactcgctgaggaagatgtctcctttgatcccgataagttacgtccaccggtctttacattggtcgctctggaggagccagaaaatagtctttctccacattacttgggacgtatcgtcagtgccttgaataccatgacgaaaaatgtagatgcacaagctctcattgcaacacatgctcccacaatgttgcgtcgtgttgctccagagttaatacgttatctacggttaactgaggctcgaaagacacgggtcacctgtatcaaattgccagagaaaactgatgatgcacacaagtttgtccgggaagcagtccaggcatttcctgagatctatttctcgcgtctggtagtgctgggcgaaggtgatagtgaagagattgtattgccacgtttgcttcaggccaaaggtgcgccagttgatgagtcagcagtcacgatagcacctctgggtgggaggcatgtcaatcatttttggcgtttgctttcagcgttgcagattccctatctgacattgcttgatcttgatgtagctcgctatgcggcaggatggggacgaatcaagtatgttaatgatcagttttccgcatatgagccgtataagaaactccccaatgactacggaattccaagttggaaagataaaactcataaagttcgggactttgataattatttcgaacttctcgaagaacgtggcgtctttttttcctccccaatggatttggacttttcaatgttactggcttaccccgaagcttatgatgttgatcaagaagaacctgacgagtcaataatcaaggccgtcctcgggaaaagccatcacgattcatctcaatacagtcaagacgaattaacgttgttcagcacctatcaccagcgctttaagcttggcagcaaaccagcagcacacattgaggcgttgactcagctaacggatactgaattacttgaaaacatgcctgagtcactaagcaggctggcagatgcagttattgccaaactcgaggagctgccagaatga

SEQ ID NO: 249505 - DNA, 2181 bp, Klebsiella pneumoniae
atgccttcatcaaatgtaaacatgatacctaaaaaagatgctgatgaaattgacattggccgactaataggtgagttgatagatcatcgaaagttaataatttctattacattattaacaacagttgtagctttcatttatgcactatttagtacaccgatatatcaagcgaatgctttaatacaagttgagcaaaaacaagggaatgctatcttagacagcctaagtcaggtattaccaaatacaacgccgcaatcagcaccagaaattgccttgttgcaatcaaggatgatacttgggaagacagtagatgaccttaacttgcaggttgttattgaaccacgttattttccagtttttggcaaagggtttgctagattatctggtgaaaactcaggtgatgttaaaatttctagattgtatgtaagtgatgacattattaataatgacaaaccattagagttagatattataaataatgagcagtacgtattaaagattgctgggaggtcacataaaggagatattggtgtattagtaactggaaaagatttttctataaaaatcgatagcatcaacgccaagccaaatagtaaattcgagattcacctacagtcaaaattaaaagcaattagtgaattagcagattctttttcagtgtcagatcttggaaaagatactggcatgttaactttaatttattctggtagtaatccggacagaaacacagaaattttggacagtataagtcaaaattatctttcacaaaacattgctagacaggcggcacaggatgcaaaaagcctagaatttctgcagcaacagttacctaaagttcgtgcagaattagaccaagctgaagaaaaattaaatacattcaggcgtcaaaatgactcggttgatttatcattggaagcaaaatctgtactcgatcaaatagttaatgtggataaccaactcaatgaattgacattccgtgaagcagaaatatcacaactctttacaaaagagcatcctagttataaatctttgcttgaaaaaagaaaaacattacaacaagagaaagaaagattaaacagctctgttgcaaaaatgcctaaaacacaacaagaaatacttaggttaagtagagatgttgagtccggtcaagcagtgtatatgcaactcctgaataggcaacaagagttaaatattgcgaaatcaagtgcaatagggaatgttcgcattattgataccgcggtaacagatcctattccgattaaacctaagaaaagtttaattatacttcttggtatttttatcggcttagtaatatctatctgtattatactcttcagagtcatgttacggagaggaatcgaatcaccagaacagttagaagaacttggtattaatgtttatgctagcgtacctgtttctgagtggttgataaataaaaacacaaaaaaaacaggtagacgaaattttaagaaaaatagccaaaataattttagcttgctagctattgaaaatcctgcagatcttgcagtggaggcaattcgaggtcttagaacaagcttacattttgcgatgatggaagctaaaaataacgttctaatgatatcaggtgctagtccaaatgcaggtaaaactttcataagtacaaacttagctgaagtgattgctcaaagtaaacagcgggttttatttatcgattcagatatgcgcaaaggatatgtgcataaaatgtttggactgagcaatgataagcagctaggcttatcagattatttatctggtaaagcaagcattgactctatagttaataatctcgaaaactataatttcgattgtatcgttagaggaatggttccacccaatccggctgagttattaatgcatagcaggatggccgaactattgaattgggcatcacaacattatgatttgattattgttgatacaccacctattttagcagtaacagatgctgcaatcataggtcgctatgctggcacgactttactagttgcaagatttgaagttaataccgcaaaagagatagatgtgagtataagacgattcgagcaaagcggagtagtaattaaaggttgtatcctcaacgggattgtgaaaaaagcgagcagctactatgggtatgggtataattattacgattatacatatgtagataaacaataa

SEQ ID NO: 249506 - DNA, 1335 bp, Klebsiella pneumoniae
atgcccatgatgtgctttcccaacggtaattacatgactggctttataaaaaaaaatcacttcataagaaatgtcacagtagtgatgacaggaactgcgttagcacaattaatttctgttgctataagtcctttacttacaagaatatatggagctgaatcttttggattgatggggatatttgtagctagtgtgacagttattagtactgttgcagccttaagatatgatttagcaatagtacttcctaaagatattaaagattctttagcactgttttatctaggtttagcaattagctttattctttgttcggtattgctattgttacagtttgtaaataaaccggttatgcatttgctaggtctggataaaatcgcaaacttatattatctgataccaattggagtttttttctttgccttatcatcgctatgtgattcatggttgagtagaaataaaaagtttaggatgttatccatttcaacagtaattggaacattagcctcttcaataatcatgcttctgggatgggggtttggtgcaagtatagtaacattattgctgggaagtatatttaataattttgctaaagtctgttatgtgttttattttaatagtgaattaatatcatacaacaaaataatacggaaggatttgcttattagaataaagtgcaacgcacaaaaatatatagattttgtcatttaccgtacaccgcaagatttaatcaactcgttatcacagaacgttccaagcttattattaggttacctttttgcaccaaacattgtaggtttcttttggttggctaatcgagtgttgagactgccgagtacattaatttcggaagctgtacggaaagtattatatcaaaaattaagtgagatgaataatgataataaaagtattgtggttccggcaataaaggcgacaatcgcacttatcattattggtattatccctgttgcagttatatttttgtttggaacacaactgttttcattgattttcggtactgaatggggcatcgccggtgagtactctcgatggatttccatatgggttttttcattgttcattaacgtacctgcaatagtaataataccaatcataggaaagcaaaaattcttactacaatatatgcttattatgttacctgtacggttagtgcctctttggtatgtaggtacacaaactaacaatgcatctatagcaattgcgacattttgtatcattaatgccctaactaattttgtacttattgggtatgtttttttacaggccaggtcatgggaaaaattatctataatagggggcggggatgatatatag

SEQ ID NO: 249507 - DNA, 1101 bp, Klebsiella pneumoniae
atgatatatagaatagtaggaatgaatcttagtgggggagctagaagatattgttatatacttaactctgagctatataaaaaaaatgaaccgataaaaacattcattccaaaatcaccaattgaagataaatattcagatgctgaaactgttccttttgattatgtaaatacaaataattggctcagtgttgggaaagaaatatataaaaataggaagaaaatatcttatgtgcatttgcatcttcccaatgtttctatacgttttttttggtttttaaagttattaaatatcccatattttctaacaattcactcccctttatacaatgaaaagggcttcaaaaccaaagtttacagatggatgtataaattatcaattttaatggctaaagacgttatattcatttctgaatttgtaagaaaaaatgtgcaaaatggtcttgggataaagcaaaagaatatgggaaatatagtatataatggttcagaagacccatatcatagcgaagtagatcaagattatatcttaaaaagaaatgatgataatttttttaggatttgtattgttggcgaattaacagaaagaaaaggtttgctagatcttgaaaaaatacttctgattttactagaaaataaaagcaaaataaaaaggaaaatcatatttaatatatatggtgaaggtgtcttggaaaaatatattcaagggctaaaagacagatatagggaaagcattgtagttaacatctatggatacgttagtgatctttcccatatttataaaaataacgatttacatattatattatctaaagatgaagcttttggtagagtgataacagaggctatggcattttatatgcccacagtttgttatgataaaggagcttttccagaaataattgatgataatataaatggtgtattatcaaactctgaagaaaatcttgcattaagtatcatatatcttgaaaataacttttctgtttatagagcaatgtgtttacgggcaagagaaaaatttttgagtaaatatgaatcgtcaatttttgttaggaacactttaaatgttattgatgaggccttaaaaaatgaagtttaa

SEQ ID NO: 249508 - DNA, 978 bp, Klebsiella pneumoniae
atgaagtttaaaaatctcttcactttatttgacgtatcttcatgtagtaccaacttgggggaccaaataataacacgatccgttatgcgcgagttaaatcgttatatatcgaaaaatcaaattgtaaatgtaccatctcatgattatttgagtattcctgcgtataaaaaggtcttaaagagtaaggcctccttcgttggagggtcaaaccttttatcttcaaatatgcccttttacagacaatggaaattaaggttaactgatccgtttttcctcaggaattgtattttgtttggaacaggctggtggcagtatcaagataaacctaatttttatacttcttatctttacaaaaaaattctttctaatgagcatcttcatagtgtaagagatcaatacactgcagacatgcttaaatctatcggtattactaatgtgattaatactggttgcccaacaatgtgggatctttcaaaagagcactgtgaaaaaataccccatagaaaggctgataatgttattacaacgataacagactataatactgatgttcaatctgacaaaaatatgttagatcttttactttcaaagtatgattctgtatatctttggctgcaaggtgatggtgatttgaagtttttgaaagaaataggttatcaagataaagtgaaaattattgcacctagtttaaacgcatatgagaatgttttaataagtgacactagtattgactatataggcacgcgactacatgcaggggtgtttgcgttacaaaatctacgtagaacattagtagttgccatagacaatagggcaaaagaaatttcggctgatacaaacctaccaatcgtcgaaagaggggatattcaaactatttctgattggattgatgggggtagcgaaacagtattgactctcaagaatgaagaaattaacaaatttagaaagcaattagaagtccttgatctttctctttaa

SEQ ID NO: 249509 - DNA, 1245 bp, Klebsiella pneumoniae
atggttatctttcaattaaatgttcgcctggctgaagggggggcagcaggcgtagccctcgaccttcaccgtcgcgctatcgctcagaatattttttccacttttatatatggatatggaaaaaagggattaaaaagtaaaagtcataacatatatgataatgtcataaaaaacactaatattataacatcatatttgaacttactaacccatccatttttaaattatgacccatttggcagtattaatcatctagaaaaagaattgaataaaattaacggtgatgaaaaaataattatacatttacatgttattcatagttactggctcaactatcatcatctagtcaaagtatttactaagctaaaaagccttaaaaatatttccctagtctggaccttacatgatcattgggcaataaccggtcgctgtgcttttctcgaaaattgtgagaattggagaaataaatgttataaatgccctagtcttacgaattatccacctgtaaaaatagataaggctgttaatgagtttcataataaaatagcctttgttaaacaaatgagcgagcttggatgtaagtttatttcccctagtgtgcatgtcgcgaaagcatttaatagtcaatatagcaacatgggcgttagtcaatgtattgttgtaaacaatggtattgatatcgatagcgaaaattacattactaatttgttgtcattaaaatcaaatgtgcagaacaaagatcagattgaaagtagaccaagatttgctgtagttgctcatgatttatcatatgacgggaaaacgaacatagaactcattaaaacgcttttgaatgcggatttagaaatacatactttcggtaaaaattcattatttagtgatgttaaagtacataatcatggatatattagttctaaaactatattacttgaagcaatcagcaaattagatggcctaatttttacatcaaaggttgataattaccctttaattttatgtgagtgtctatcacttggggtgcctgtactcgctacagcaagtgacgcttctatagaagtcctaaaaaaggttggagggaaaacaattcaagaaaatgagtttacatactatactggtttaacaaaggataaaatatgtcaactactatataataagtccacaaaacaattacaaaaagatgcattaaatgcttttggtggtaacaaaatgttagcagagtatagtggtgtttatgaaaatatctaa

SEQ ID NO: 249510 - DNA, 1566 bp, Klebsiella pneumoniae
atgggatttataaaaaagaataatggtttttcattgcttgaattaatcttagtgctaggaattggaacatcaatgggacttcttaagtttcaggagatgaagtcaacacaggaagatattactgcttcgcttgcgggtgagcaactgaaacagataggtcaggcagtaaatagctatatcaccatgaaatatgataagttatctacgctatcaaatagcagtaatgatggtaatgatccggggcctagaatatgtaattcaacacaatgcgaaataacatatagtactttactgaatgaaggtttattgccagcatcctatactggaatcaatatctataaatctccatataagattatacttaaacgagatggcgtttcaccgaattatattatcaatggattaatcactaccaccataccttggatggacggctcaaaaatacgctatgatttgcttggtaaagcgatgcagactgctggcatagatagcggtatgaccgataactcaaccgttgtctctggcttacaggggcaatggaaagaatcagcaacaaacttttccaacattaataaaagtggattgcttgcaatgagggtaggattcaatagtgccttatatacgatatatctcagacgcgatggaactcttcctatgacaggtgatttaagtttgggcggatatgatatcaataatattaaaaatttgagtgccagcggtacgggtaattttcaaggggcgcttaaatcaggcgattcgataactgctgggaaagaacttatcgcccacaacggtaataatgatgtaattgcaattggcggaaacgatggtaatgattatgaaatcagactttataatggaacaaaaccacttactatttattctccaaatgcggcaaattatacaactgttttacaagtaaataaaaatgctatagtagaacagagacttggactgatgggttatgatcctaatgatttacctgcaggatgggggggggggttaagaacccttgatgtatatgctgcaggaactgtagcagctggaaatagtggtataactaatgcctatcttaacagtagtggaaatatttatgcctctaacaatgttgatgttggtaatcagatcaatacgagatatgtctgggcttctggtaacctcaattcaaattatatacattctaatggtaacattgatgcagatggaagtatgaatataggctgggatgttaatgttaataaacgtattactactaatgaatatatacagataaatggtacagcaacagcaggaggtgggtgctctcctaatggtttacagggcagggattcaatgggattgttgttgtcctgcgttagtggtaaatgggctaaaacatcaggtgctgaaggcttttttacaaaaaaccaaggttcttgcttgattaaaaaccccgatacaaatgcttgtacatgtccatctggaacagcagcgtatgaactattttatactacatctactgagcaattaggtacagggagcggtactagagtagttaaagatagtatactatatcaatgtagataa

SEQ ID NO: 249511 - DNA, 1242 bp, Klebsiella pneumoniae
atgatgtttgaaaaaaaagattatgataaagaatttttaaatataaacaaaagaagtaaaaaacatacatgtttatactctgagtgtttagataaaacaatatactctcataccatatctaaatctatctctattgagaaaatctctgaaaatgggcatgttaaaaattttagccctacaagatatagatgtgaaaaaataccaaaaatgtcagatattggtgttaatgacgctactgcttttaatggtttttgtcaccaccatgatcgtatttttaatgatatagatgaaaaggaaataagtaatttaagagatctttatttgcaaatatatcgttctatttcttgtgtatattattatgaacaattaggtgatgtgttataccctgacatagatattgacaaagcagtaaaaatcattctagatggtcaaaatactaaagacgaaattgatataactcaaggtaagttatatgaaatgaaagaattgttgcgcgatgaaattcgaaggttaaataaaataaagaataatgaactaaatgaaatgaaaggagagataaacagggttagaaattattttttgaataacatttatgaacttgatgagcgtaaatatgtgaatagaaagctaaatgaaaaaggaacagagttacaaacaataaaatttaaagattttgattatgcattgttttattatatatctgattttcagattcctgttgcaataaatactatgcataaccttaattataacgggtgtgcttttttattcttttatatagtcattccatatgagggatctaatataattattggagtgatgaaaaataatttacctccagagtattatgacaagattataaatttaattgataatgcgtttaaaaataggttgtccgtgttaaattttatcgaaactttagtaatatcatcccccgatgatacatattttaagccttgtgttatcaataacatgaaaaaggaaaagttagattttattttaaatgattttatgttcttacatgaatttcttagttttgataaatatttttctgagtatgatgtctctatatttgatgaattgcgaactagcctcatttcagagggtgttgattgttttaatgaaaatgagttagataaagttcattcattgcctcagagagaaagtattgaggtaaggaaaaacaaaatgatgggtaagataatgaaagaaaacataacaatcaagtcactaaagaaatag

SEQ ID NO: 249512 - DNA, 768 bp, Klebsiella pneumoniae
atggaatggtttacaagaatgattctcaatttaccaccacgagctaaggatgtgaaagaattaagagagagtgctcctgaattattcacagatgaagaaatcaaagaaaacacaagccatcacccaaggtatattcatcctatattttgggatacatacgaactccgagaagcagttcgtttttggctacaagggtttgaagaaaaaatgcctgaaggggattattgcgattatccgtgctgcataaggaagaaagcgggagataatgccgacggctatatgcatatgatgactgttgcaggagggagagatcgcaatccgcctgcaaaatcattttttgacctaataaacgcaacaaaaataaaaaacgcaacagtactgcgggtgatcctgaccgatccctatatctacttcgacattggacaaaatggtgacggaggtgggtttaataatttgctaaagctcctcgaacatctgaatattaatagttcaactgagtttagacttgagttaacgccacaaaaaaattcagaaatgaaagacaggtttgagagagaaatccaacaaaaatttcctctgtgcactgtatctaatcataataattcctcatctttccacgatagatttatttttgtgcaatattcaaataatcagtgtaaagcttggtatgggccatctctgaatggtctaaatagtaattctataataatatttggagatctcaccgatagtaatgcagttagacaactttcacagaggttattgtaa

SEQ ID NO: 249513 - DNA, 735 bp, Klebsiella pneumoniae
atgaatgctaacgacactgaactacttcgcttatttgaagcattaaccacagagcaaaagattaatatcgcaagacacttgctacaaaacaaagatataaaatcaactacagtcattgcaacagaagaagataaagcgatctcatttgcacagccttatgtgtttgcttttacatctaactttcgtgttttttctgatctggacatatccaagaatgaattccgtgtattaacttatattttagaatatatggagtttggaaaccttatcaatctgtctcaatcatcactctgcaaggcattgaatattgcatccggtaatatgtcaaacatattcaaaaagctaaaacaaaaaggtatccttgttgaacatcatggacacttgtatatcaactcaaatattttcgcaaagggaatgagtcatcaacttgatgagaagcgtaaagagcatttgagcaatgctaaaagccttaatgctgatattgaaaaatatccagagtattatgcagacctttcacagaaggaaagacgaaacttagctttggaaactgaaactaaagagatctacacagatgcttttgtttttagtaaaaagaaaaaaaataatgctgttcctaatgctaaaaacagtgtccagatcgataaaccacgaaaagtatataaaagaacaaaagaaaatgaagcttcgagaaaatatgtaactaactctgataaccatttaaaacctgcatcctaa

SEQ ID NO: 249514 - DNA, 480 bp, Klebsiella pneumoniae
atgaaaaaagtgaagttagacaacagtgatttaattcagtattttgatacagtcaaagaactaaaaaatcacatttcaatagaagaatatagagatgaatatcgtaggctacgctctgatgatattcctttgaccaaagccaaaaagtttaaatctgcacatactgaacttcgcagacttgaaaaaaagagactctcattcatagaaggttttattgatgaacttaacccaataatcagttcaagcgctaatacctctgttaggctaacaggaaatcttgataagattaatgagagagtgctctacaggaaagtacttgaagaaaaaagtgatgatgaaattgttgctcttgtaataaaacaacgcacagaggccgctcttgagttccagcgttcagttgagttgagtcttgaacagctatcagacattgccttatcatttagaacatcagacaagatgaaaaggagaatgtctttataa

SEQ ID NO: 249515 - DNA, 408 bp, Klebsiella pneumoniae
atgagtgaagcacttcaggcattaaacaacatacgtacacttcgcgtacaggcacgtgaaaccgatctggcaacactggaagaaatggtggaaaagctctctgttatcatcgaagagcgtcgtgaagaagaaaatgctgcccgtcgagagcaggaaaaacatcaggctaagctagaggctttccgccagagaatgctggaagatggtattgatcctgctgaactcctttcactgacctccccatcagcgaaagcaacaacaaaatcccgacgtgcaccccgtcctgctaaatacaaatatacagacgaaaacggtaatgagcagacttggacgggtcagggtcgtactcccaaagctatagtggctgctcttgaagaaggtaagacactggaagacttcttaatttaa

SEQ ID NO: 249516 - DNA, 381 bp, Klebsiella pneumoniae
atgaaaagaaaagaaatgagtaaaaaagaagaaacacagattttcgttatatcagtgaccttgatgttatatgtaaataggatttacggtatggcaagtataaacaatgatgctgcaatgatatttgtaaaagatgagagtgcggttgatttggcattaggtgtgcatatgaaagatgtgattactgattttgaatattacaaacttatttttggtacgggaaaagaaaaaaaaggatgtatcgatacaagtggattattggatagggtaatattttaccatgatctatttattagagatatgttgataagaaatctagaaaaaggagcatctagggacgagaatggagtgctggactggaatctgaatcttaacagataa

SEQ ID NO: 249517 - DNA, 1077 bp, Klebsiella pneumoniae
atgagcgtaaaaaaatacgtcgccattctgacccgcgcgggaatcgaggcaatgactgcggccacattgagcggggagcctgttcgctttaaatttatggcggttggtgatggtgccgggacaacgccggaaccagatccggaaagagtcgccctggtcaatgaggtttggcgcgcggaactgaacagggtggttattgccgatcaggcagcgaatattatccgcgcagaaatgataatgcttcctcaggtcggtgggttttggttaagagaggccgcattatatgatgaagacggcacttgccttgccgttgcaagcctgcccgagtcgtacaaaccactactggctgaaggttccgggaggatgcatgcggttaacctttggatcgccgtaagcaataccgccgacgtggagcttaaagccgatccgtcggtcattctcgcgacggttgaacaggtgaacaaggctaaggcggaggcaaaagattatgccgataaggtcaccggggacctcgacacaaatattcagcaggctatcgctgatgcggttaaatcggctgtgcgtgatgcctgggaactggataaccccgtcggaaccacacgtttttttaatcagaacatcaaccccaatgaacgctggccgtggtcagaatgggtttacactggcgagaataaaacgatccgcgtcggaaaggctgacggctcggacgtcgggcaaaccggcggcagcgataacgtcacgctccagcgggacaacctgcccgccgtacagatcgacgtcaatggcgagaccagcgagcaggaagagcagcgactgcaaacggaggatggcggcgcgcatgatcatgatggtgtgcccagcagggatgacccgtgggagattggcggcgatatccgccagctctttaacccggctcacacgggcaaaacagaccaggcccccaaccataaacatggcgttgtgatcccggcgcataaacacaataccagcggcaaaactgacaacctcggtgaaggaaaatcgttcagcgtggtggaagcccacaccctgctgatgtgctggagccgcgttgcctga

SEQ ID NO: 249518 - DNA, 1665 bp, Klebsiella pneumoniae
atgccgggggctgaatacattctttcgtcagggacgcaggtgctctgtttttatgaccaggacatggcaaaaaccagccatatctccattggttcagccactgcatttacggtaccggagggttcgttttatctgaggtttcaaagccatccccttgctgcaaaagatgccctgatgctgattcgaggcactacgctgccgtctgcctatatcggattcgggacgttgacaaccgcggaggtcactacgctttcacagggaatagcgtggggggttttggatggtaacatgcctgtgggacggaatctgtttaacaagggcgccacgcttgatgattacgcgttgtcaactacaggagcgccctatgcggcggccggatattttgttacgccatttatcccggtaaaaccaaacacgcagtatatcgccagccgtgcatccggtgtggtcgtctattttgacatcaacaaaaccaaaatttcaaatacgacatttgcagccagcacggcattcaccacacctgagggggcggtgtacgtacgttttcaggttttcggcctcgctgataaaaacactctgatgctgattgagggagcagcactccccacatcctacctgtcatttggttcgccgacgtcaacttacgtcgatacgcaggcattgagcgccgcgcgttcagtagcgctatccctgcaaaaaatgacggtgaatctctataacagcgagctggcgcaactcaatactgcagtgtcgtatcagacaggcggaacatcggctgcgccgggttattttgccacgccgaaaatgatggttgttcccggggattactttgtatcgaactacggctcaggtagtggcgcgttctacaggctcgacggcacgtttcacagcggcttccagaatcttgtcgccaacacgccattttctgtgcctgaaaatgcgtactatgtacgttttcaggtctataacctaacccgcgttgaaagcctgatggtgacacctggccaggcgatccctgccgggtttattccatttggtgggcaaacacaggaattgccgtggcaggggaaaaagcgcatcgatctgggagacagtattactaataccggcaacttcattgcccctctaaacacctacacgggaatgatggcgctggcgaattatggtgtaccaggccagggggtgagaactatggcggactctctgaacgaaaccacaatagcgtcagctgatttcatttcaatcctgggcggaacaaacgattacggcgggaatcgccgtctcgggacaattgcagacgccagagcggattatgaggacgcgactgttaaatcgttttattacgacgtgttctacgtactgaacaaaatctacaccctcaaaccgaatgtgcgagtgatgttcagcacgccgctgaaacgcggggcgtttgagagccagccagtttatccggcggcgaactcggccggatttaccctgccgcagtacgttcaggccatcaaagaggtgtgctcactgttcagcgtaccggtatgtgatttgtttaatgaatccggaataaatctgcttaacattgcaacatataccggcgataacctgcacccgaacgccaacggcgggaagttgatggcacgccggatggcttcagtaattaacggcctgtag

SEQ ID NO: 249519 - DNA, 1377 bp, Klebsiella pneumoniae
atgccggtggggcgaaatctgtttaacaaggacgccacacttgataattacgccttgtcgacaacaggagcgccctatgttgcatctggatattttgttacgccatttatcccggtaaaacccaacacgcagtacatcgccagcagtgcatcaggtgtggttgtctattttgatatcaacaaaaccaaaattttgaacaccaccattgctgccggaaccgtatttaccacgccatctggtgcggtttatgtccggttccaggtatacggtctttcagcaaaaaacacactgatgatggttgaaggctcagcactccctgcgagctatctgtcgttcggggcgccgacttcaacttacgtcgacacgcaggcgctgagcgtcgcgcgctcggtggcactttcactgcaaaaagtggcagttaatctctataacagtgaattagcgcaactcaataccgccgtgtcataccagactggcggcgtatcggctgcatcgggttattttgccacgccgaaaatgatggttgttccaggggattactttgtatcgaactacggctcaggtagtggcgcgttctacaggctcgacggcacgtttcacagcggcttccagaatctggccgcaaatacgccgtatgctgttcctgacaatgcatatttcgttcggttccaggtctacaacctgacacgcgttgacggcctgatggtaacgcctggtcaaaccgtcccgtcagggtatatccctttcggtgggcaaactcaggaattgccgtggcaagggaaaaagcgtatcgatcttggggacagtattaccaacactggtaacttcattgctcccctgaatacctacacaggaatgattgcgctggcaaattatggtgtgccaggccagggggtaagaaccatggtggactctctgaatgaaaccacaatagcgtcagctgatttcatttcaatcctgggcggaacaaacgattacggcgggaatcgccgtctagggacaattgcagacgccagagcggattatgatgatacgacggttaaatcgttttattacgatgtgttttacgttctggacaaaatctactctcttaaacctaatgtgcgagtgatgttcagcacaccgctcaagcgcggggcgtttgagaatcagccagtttacccagcagctaactctgccggatttaccctgccgcagtacgttcaggccatcaaagaggtgtgctcactgttcagcgtaccggtatgtgatttgtttaatgaatccggaataaatctgcttaacattgcaacatataccggcgataacttgcacccgaacgccgatggcgggaagttgatggcacgccggatggcttcagtaattaacggcctgtag

SEQ ID NO: 249520 - DNA, 204 bp, Klebsiella pneumoniae
gtgaccgccccgctggcgggcaccatctggaagatgctggccgcggaaggccagacggtggccgcaggcgaggtgctgctgattctggaagccatgaagatggaaaccgaaatccgtgccgcgcaggccgggaccgtgcgcggtatcgcggtgaaagccggcgacgcggtggcggtcggcgacaccctgatgaccctggcgtaa

SEQ ID NO: 249521 - DNA, 1404 bp, Klebsiella pneumoniae
ttgaatcaagagacacatttcaaagcggaattgatagcttgcaaggaatgctctaatagtggtgaaaaaatcggattgttagtactggtttatcaggatgctgattctacagctacacaactgcccggaaaggacgaaattgaatctaaagaaaatatttgcgcccagattgagaatcttttatcaaaggtttcatttgatacaactatagtagttgtttcacaggtttcattacggaatatctcattaattagtgagatttatggtaggtatattattagtttccttattgacacgctctattcaaaactctatgcaattatcgcaaaagatgactttgtgatgaaagttgatagagaaagtgttattttttctttgaaattagaaagagcggattctaacagcactgaacagattcaacaaaagattttggatgtatttcaggacatacaacaaaaaataggaaacgatatatcttacattaaaccagttatatgtgctgggtgtattattgtaaatagtaaattaactccgggggcgcttatatttgaccatgctcaaattgccttctcaaagacttattccttagacaaggaaaatattatatttgggaatgatgttttatacaaacagcacgaagagagaattactatgcttgctatgctcacagaagctataaatgataatcaattcagtgtttactatcagcctaagtatagtttcaaaaactcagcggtatcaggggtagaagctttgatccgttggtatcatccaaactatggattcattcctcctgacagatttattcctgtcgctgaaaagtccgagttgattcattttattacttcatgggttatttctaccgtattctgctttgcagcagaaatagataacatcacattttcaataaacttatctggcaaggattttgacaaccctcagcttttacagcacattgataaaatggcattcattcatgaagttgacacgagtagaataatatttgaaattactgaaacagttatgattagtaatcctgacttagctttaaaaatcttgactacacttaaacaaaaaggctacgggatacatatcgacgattttggtataggatactcttctttgaactatttgagagagtttccatttgatgccattaagttagaccgttcttttattattggtattacatctaatgagcgcgacttatctattgttaaaagtattgtatctcttgcgaaagctttttctttaagtgttgttgctgaaggtgtggagtcaaaagagcaatttgatttaattgatagtatgggctgtgaagaatttcaaggttatttatattcaaaacctttatcgcgtgatgacttaattgagtttttatcaaataaaaaaatagggctataa

SEQ ID NO: 249522 - DNA, 909 bp, Klebsiella pneumoniae
atggccgttattgacctttcccagctgccgccgccgcaaattgtggatgtgccggattttgaaaccctgctgacagagcgtaaggcggagtttgtcgcgctatatccggcagaagaacaggaagctgtggcccgtaccttaacgcttgagtctgagccggtggtgaaaatgttgcaggaaaatgtgtaccgggagttgctgctgcgccagcggattaacgaggcggcgaaagccgtgatggtggcctattccggcggggatgacctggacaatttaggcgcgaataacaacgtacagcgccgggtgattacggctgcggacgacaccaccacgccgcccacggaggcggtaatggaatctgacgcggattatcgccagcgcatcccggcggcctttgaggggatgagcgttgccggaccagtcggagcctatgaatatcacgcgcttagttcggatggtcgggtggcggatgcgtcggcgttcagcccgtcaccggcggaagtcgtggtgacgattctggcccgcgacggtgatggcaccgcgccggatgatttgctgcaggtggtcggcgcggccctgaatgatgaggctgtgcgccctgtggcggaccgggtgagcgtccgctctgctgagattgtccgctatgaaatcgacgcggttctgtatgtctatcccggtccggcaaaggaacccattctggcggcggcgaaagcacagggcgcggcatacatcaacgagcagcgtcgcctggggcgtgatgtgcgactgtccgcgatttatgccgcgttgcatgtccagggcgtccagcgcgttgagctgatgaagcccctggcggacatggtgttagataaaacgcaggcgtcctattgcaccgattttaaagcagaaattggtggctctgatgagtag

SEQ ID NO: 249523 - DNA, 243 bp, Klebsiella pneumoniae
atgattgccgagctggaacgaattatcggtgatgccaagccggtcagccgtcacatatcgcagttaaccctctcggcaagcgcatacggtacagcccacattggcgcggcaatagctgacggggaagtgataacggtttatccaccggggtatgagccggatgacagcatttattttgatagcacagccaattacgacgaaacctattattacaccgggaataaatatggcaaaagtgaatga

SEQ ID NO: 249524 - DNA, 513 bp, Klebsiella pneumoniae
gtgaccgaagtggaccgggacggctggctgtgccgggtgaaaacgggcgacctcgaaaccaactggattaactggctgacctaccgggcaggtaaatcacgcacctggtggtgcccgtctccaggggagcaggtggtgctgttcagcctgggcggcaatttggaaacagcctttgcgcttccggccatctactccaacgcctgcccgccgccgtcagactctgaaagtgcggacgtgaccgcatacgaggatggtggctggttcgaatacgaccccgccaccgggcgctggattattcgcggcgtgaaaagcgtgctgattgagtcttcgcaggttgtctcctgcaaaaccggtgagtttgtgatcgaggctgacaccaccctaattaacagcaacgtgatcctgaacggcgatgtgacccacggcggcggcgcgatgacgtcaaacggcgtcgttgctgataagcataaacaccctggcgacagtggcggaacgacgggagatccattttga

SEQ ID NO: 249525 - DNA, 1185 bp, Klebsiella pneumoniae
gtggccatcggcaacggtaccgcctcgcgtgaaaccgagcgtttcttcctcgacgtgcagaaacagttcccgaaggtcaccgcccagaaggtgatcgtcagcgaagccggggcttccgtttactccgcctccgagctggcggcgcaggagtttccggacctcgacgtgtcgctgcgcggcgcggtctccatcgcccgccgtctgcaggatcccctggccgagctggtgaaaatcgacccgaaatccattggcgtcggccagtatcagcacgacgtcagccagacccagctggcgcgtaagctggacgcggtggtggaagactgtgtgaacgccgtcggcgttgacctgaacaccgcctccgttccgctgctgacccgcgtcgccggcctgacccgcatgatggcgcagaacatcgtcgcctggcgcgacgagaatggtcagttccagaaccgccagcagctgctgaaagtcagccgtctggggccgaaagcctttgaacagtgcgcgggcttcctgcgtatcaaccacggcgacaaccctctggatgcctccaccgttcacccggaagcttacccggtggtcgaacgtattctggccgccacccagcaggcgctgaaagatctgatgggcaatagcagtgcgctgcgccacctgaaggcagtggacttcaccgatgagaagtttggcgtcccgacggtcaccgacattatcaaagagctggaaaaaccgggccgcgatccgcgtccggagtttaagaccgcgaagttcgccgatggtgtggagaccatgaatgacctgctgccgggaatgattctggaaggtgccgtcaccaacgtcaccaacttcggcgcgtttgttgatatcggcgttcatcaggacggactggtacacatttcgtcgctttctgaccggtttgttgaggatccgcacaccgtggtgaaagcgggcgacatcgtcaaggtcaaagtgatggaagtcgatctgccgcgtaagcgtatcgccctgaccatgcgtctcgacgagcagccgggcgacagcaacgcccgccgcggcggtggtcaggagcgcccgcagggaaatcgcccggccgcgaaagccgccaaaccccgcggtcgcgaggcgcagcctgccggcaacagcgcgatgatggatgccctcgccgcagcgatgggtaaaaaacgctaa

SEQ ID NO: 249526 - DNA, 576 bp, Klebsiella pneumoniae
atgatccgtatttccgatgctgcacaagcgcactttgccaaactgctggcaaatcaggaagaagggacgcaaattcgcgtatttgtgattaatcccggcaccccaaacgctgagtgcggcgtatcctactgcccaccggatgcggtggaagacaccgacacggcgctgaaatttgaacagctgaccgcctatgtcgatgagctcagcgcgccctatctggaagacgctgaaattgatttcgtcactgaccagctcggctcgcagctgacgctgaaagcgccgaacgccaaaatgcgcaaagtctctgacgatgccccgctgatggagcgcgtcgagtacctgctgcagtcgcagattaacccgcagctggcaggccacggcggccgcgtatcgctgatggagatcaccgacgacggtctggctatcctgcagttcggcggcggatgcaacggctgctcgatggtcgacgtgaccctgaaagaaggtattgaaaaacagctgctgaacgagtttccggagctgaaaggggttcgcgatctgaccgagcatcagcgcggcgagcactcctactactaa

SEQ ID NO: 249527 - DNA, 675 bp, Klebsiella pneumoniae
atgctaacagcacacagcttatgctggctatgccaaatgccgctggcagtcgcccgctgggggatctgctcccgctgcagccgcgccctgctcgcctgtcccccgctctgcccgcagtgcggcctgccggcggcggcatctcgtcacccctgcggccgctgcctgcaaaagccgcctccctggcatcggctggtggcggtcaatgactatcgcccgccgctgagcggtctggtgcagcagctgaagtttcaccatcgcccggagctgggccccgccctcgcgcgtctgctgctgcagcgccttctgcagcgtgacgatttgccgccggtagacgctctggtcggcgtgccgctatggcatcgccgtcgctggcgccggggttataatcagtgcgacgaactgtgccgaccgttagcccgctggcgaggatgcgtctggcatcgcgaaggcctgactcgccagcgagccggcgccgtccaacattcgctcaatgcccgccagcgcaggcagaacctgaaaaatgcctttcagcttgaatttgccgtgcagggactccatatcgctctggtggatgatgtcgtcacgaccggcagcaccgtcgccgagatatcccgcctgcttttgcgaaacggcgccgcgacggttcaggtatggtgtttgtgccgtaccttgtag

SEQ ID NO: 249528 - DNA, 249 bp, Klebsiella pneumoniae
atgagcaaccctattactgtgggcctgtcaggcttaactaaccgcatctttgctgggcgatctaagccaagcaaattggcccctggcgtgcgcgaattcaccggggaaaagttcgatgttacggatgacgttctgtttgctgtagcccatctgatgatcgcccgcgatgacgtgcttgttttccctgcggcaaacggcaaggaaatccatctgcgcgctgacctcaaagacaaggcaggtgcagaatga

SEQ ID NO: 249529 - DNA, 195 bp, Klebsiella pneumoniae
atgaaagcgctgaattacaacccagaagaccccgacaaaatgcagttgccggcgggtaagacctgcggggattgcacgcacattcgtcgctgcaaagctatttttggccataccgaaatcgataaatattgcgactggtcgccatcgcgcgcggttttcagtcagccatcagagcaagaaggcggtgctgcatga

SEQ ID NO: 249530 - DNA, 210 bp, Klebsiella pneumoniae
atgcaattgaagattctgggtgtgggcaacgcgctgttgctgtctgtcaaggttaagacgttggacgatgccaacttactgaacgtgtcagcgcttgccagagcattaggtgtgcatcgctcaacatttctgagcaaggtcgccagcgtcggcctcgaacccgctatacaccattacgcaatgcagcaaaaactgaaagatgctatctga

SEQ ID NO: 249531 - DNA, 342 bp, Klebsiella pneumoniae; identical to SEQ ID NO: 198589

SEQ ID NO: 249532 - DNA, 564 bp, Klebsiella pneumoniae
atggctacttttggttacgtgcgtgtcagtacccaggatcaaaacatagctcgccagatgtcggcgcttaacgggttggttgaaccagacaatatcctgattgaaaaaatatctggcaaggacatcaaccgcccacaattacaacggctgttgaacgataaactccgcgctggagatacgcttgtcatcaagagcattgaccgccttgcccgtaatacaaaagacctgctggagattgtggataccttgattagcaagggtgtcacggtgcgtttcctcgacaatgcgatgacgttcgataataacccgacgagccgcctgatcctcactatgatgggcgcggttgctgagtttgaacgtggtgttattcgccagcgtcaggctgaggggatcgagattgcaaaaggggctggcaaattcagaggtcggcaggcgaaacaatcgttgcacgagaaggtacgcactctgattgcgtcgggtgagcacaccaacgagaagatcgcagacctggccggatgcggtgttgcaactgtctatcgtatcaaaaagagtctgaccgtctga

SEQ ID NO: 249533 - DNA, 201 bp, Klebsiella pneumoniae
atgattaccgggactgcgaactatgacgatgttcctgatgttctctgcgccttgtgcggcggttatttcaaagccgacgatccggaaagtcacgaatgcgatgaagaagctcttgacgaaattgcgtgtgatatctgcggtttcaaaagcacagaccctgacggcgctcactactgctgcgaggataactccgatgactga

SEQ ID NO: 249534 - DNA, 1410 bp, Klebsiella pneumoniae; identical to SEQ ID NO: 216221

SEQ ID NO: 249535 - DNA, 606 bp, Klebsiella pneumoniae
atgagtgttgtagctacactgagagaattatcggaagtctggaagctattcggtgatatgcctgacgatacaacactgaatgcagagttagcatccatttatttaggtgtcagccctaaaacattagctcgttaccgacaaaatggtggtgggcctgaatacattcaatatcaagccgaagatagtaaagcccgtaatcagcgagtaaattacttattaggggatcttcgggtatggcgaaatagtcataaagtaaaaaatagtatggaagccgctcaggttagaggacttgcattcaattcactgatcgacttcacaatacaacaacctttctggcatatagataatgatatagattcaggaaaccgaaataaaatattatctcatgcacttaggacaccagatgagcgatttaaactttatttgaaagaagaacatgtcaatattgtttggatctcgattgaagaagctttgtcgtgggattggactgatttaagcgaaaggcaagtattcaatgattatttcgtagggtttctaaataatctaatccagctttccaattctgaacaagaaactctcgaattaaatcatattttcaaaaaataa

SEQ ID NO: 249536 - DNA, 600 bp, Klebsiella pneumoniae
atgaatacagcaaaccatgaaaccatgagcacgatccttctgagcggctcgctggctaaactttttggccgtactcaccagcggcttattggcccgacacgtgaggcgtttactgcgttatccgccaccattcccggctttcagaaattcatgaataccagcaaagcccgaggacttacgttcgctgtattcgtggacaaaaagaacgtaactcaggatgatctcgattttccgaacggtaacaggacgattcgaattgttccgatcataatcgggagcaagaaagcaggggtgatgcaaactattctcggcgcggtgctggtggcggcgtcaatctggatgcctggcattggcattgcagccagtaacatgatgtttgctgctggttcagcaatggcagtaggcggtgtaatgcaaatgatatctccgcaggtgcaaggccttgccagcaagcaaagtgccgataataaagcctcgtatgcgtttggaggtgtcaccaacactgccgcccaaggctacccggtaccgttgctttacggtaagcgccgaattggtggtgcaatcatttctgccgggatctatgtcgaagaccagctttaa

SEQ ID NO: 249537 - DNA, 264 bp, Klebsiella pneumoniae; identical to SEQ ID NO: 129515

SEQ ID NO: 249538 - DNA, 2280 bp, Klebsiella pneumoniae
atggcaaataaaaaaatgaatgccgtaatcaccatcggcggggctgtttccggcagcctccgtggtgcgtttggcacggtgaagaaatccaccgttgagatcggcagcgccatcactcacctgtcacgcgaacagcgccagttgaatgaagcaatgaagcgctacgggcaaaactccgtgatggttgaccgcctgcgcgggcgctacgatgccattgtgggccaggtggaacgcctgcggaaagcgcaggagcgtttaaacgcagtcgagcgcgccagcgcggccaacctggccaagcgtgccgagttacgcgggcagatgctggacacggtggcattaggtgccgcagtggcggcacccatcaagattgctgccgatcgtgaaagccacgccgttggcatcgccaagcagctacagggcgcacgcgacgaagcaggcaagctgacgccggtattctggcagatgcgcaaggctgtgaccgacctggggcacgaaatcccactggccactaatgacctgtacgatatggccgccgctggcctgcgcatgggcgtggcaagcaatgacatcctgggctttacccggaacacggccaaactggcttccgccctggagctggaccccggcgaaactgcggaacgcttcgccaagctgggcaccgtgtttaaactgagtcaggatcagttgatgggcctgggtgacgccatcaactacctggacgaccagaccacggccaaaggcggtgaaatcattgactttatggcgcgtgttggtggttccgctggcctggtgaagattaccgcaggccaggtggctgcaatcggtacggcgctgattagcatgggtgagacggcagagactgccggaacgtcaaccgctgccctgttcagcaagctggctatgggtgacaagaacaccaaagccgcccgcgaagcgttcaaggaattgggcctgtcagccggtcagatgtccaaagccgtccagaaggacgccattggcgcaatggaaatgctgtttgaccgcgttcgcaaactgccggaagcgtcacgcactggcgtgctggtagacatttttggacaggaacacgttggcaagattgccaaactggtgaccggcaccaaagagcttgccagcgccctggaagcggtcaacggcgaagcagccaaaggcagcgtgcagaaggagttccagaacaccattggcaccactaatgcgcagatggtcctgctgtccaaccgcatggctgacgtggctgacaatatcggcaccgtcctgctgccgtccgtgaacgacgcagccagcacaattggccggttcacaactgttgtggccaacttcgcgcaggaacaccccggcgtaaccaaagccgtggtaggaaccgctgttgccctgacctccctgaaagtggccaccctggctggcggctatgcctttacgttcctcaagggcggcgcgctgacgctggctaagggtttggcaggggcaagggcagaaatggcgctgacggccaccggagcgcgtttaatgggtgcatccgcagccgtggcacgcggtggcgtcatcggtctggggcgcgccctggtgatgaaccctattggggccattgccgctggcatcgccgtagctggcctggccatctataagaattgggacatggtgaaggctgccgccatcgggtttggccgtggaatgctggaaggcttgcagccggtatctgacgccatcagcaccgtgcgccaggcgctgaccccgctggagcctgcattcaaggtggtgggtgacgcggttaaaggcgtgttcaactggttcagcaacctgctggagccaacgaagcacaccagtgaccagcttaaatcagccaccgacgctggccagacgttcggcaaggtggtgggcgaggccattagttttgtgctgacgccgctgacggcactggtggacggctttaagtggatctcacagcacggcggccagattctaaacacggttggcgcgaccatcgacaaggccaaatcctggctgccgtcatgggctggcggtactgatgacgagaaagacgcaccgaaggcaccggcagggttaaatccaccgcccgcgccggtcatggctaaccgttccggcagcacgaccatcagcaccaatgaccagtatcacatcagcgttcaggccacgcctggaatggatgaagatgcattggccaggaaggtggcgcagcagttacggcagcaacaagccgtaaggcagcgtagcatgatgacggatggagtgctgtcaccgtaa

SEQ ID NO: 249539 - DNA, 207 bp, Klebsiella pneumoniae
atggaacgcatggacccacaaccccaaacagaaaatggtttgtgggattcattcgtggaactggcactgccacgcgtcatggttatggacacgcgggaggaaatggaagaacagagagaggaaataaaaagacaggcgctgttattggccgcagcggcactacgggcagcgggcgaatttacgctggccgataaccttttaaactga

SEQ ID NO: 249540 - DNA, 321 bp, Klebsiella pneumoniae
atgaaaaataatgacctgtacgaatcaatgaaagaagaagcgcgcttaatccttagcgaaacaaagcgtttccagaccatttcagagaaaaaccctatctgccacgaagcagccgacctgctggccagccttcgtaaccgtttaaacgcattcgaacacatgaccgatgaagccgggcgcgccatgcgcaacgaagcggaaagccacgcatccaccattgagcgcaaaaaatggaagccatccagtcgcatcagttccggtgaacgtgccaagcgccaggcggtgaagcgtggggccactctcattcgggatgctttctga

SEQ ID NO: 249541 - DNA, 315 bp, Klebsiella pneumoniae
atgggctggggcatcaggaaagtggcggcggaacgcgccgccttatcgggcgaagtgctggccgccattgagggtgccgccatgtacacgcgacacggcgatgctgaagcaccgcgcatcatcgtgcaaccagcaggctacaccggctttatctacagcgaacaagcggcggaaaagtgggtcaggcgcgcgtttatcgaattgacaccgtaccaggtggaacgtgcagtcaattatctcgcctccctggtgcgggaacaccaccgggagcatcagccaaagcgccagcgcaatagctgggtgaacaggtggtga

SEQ ID NO: 249542 - DNA, 912 bp, Klebsiella pneumoniae
atgaatgacgtacttagtgaacttgttcgcggagccctggaacatcaaggcgctcatcttcgctttgatggtaacggcgatgtcaatcaagttatcccggtagagcctgctgttgtcagatatctgtcactgaacgaagtgctgacgccgaaagcaggcgcacagaccacattcaacggcatcattgccgcgcgttccctggtggccgctgctggtgctgaaatcatccgcatccctggccccatgacgcagcaagctgatatcgacgacgaaggcaaccgccgcccgctgaaacagcaggaagtgccgcgccactacatcgttgtagcgcctggcaagttcgcagcagtggccgatgatgccgaaatcactctgagtggcgcaccttacctagtggccagctatgacgacgccacagcgccatcctacggcatcggctacaccctgacgcgccagcaactgaaacacacctttgctgaccctgacaccgtgctgcgtgccgtcaacagcgctatcgagcagggcattgcccgcctggctgacagcgttctactgactgacctgaacaccaaagccgcgacactgaccgacgccaccgttgatgctgttgcaaaggctgccgccgctaagggctgccgatgggctgacctgtcagccatcgccggaaccagtgctgctggcgtgaccctgggcagtgacggaaccctgcgcgcctgtgcggttaaagccgaactgaccgacaccattgcaacaaccattgttggcgattttagccgtgcagccgtggcgattgatgacgaactgcgcgtaacagccaagcgcatcaacaacggtgccgttgagatcgtcgtgtggtgcaacgcacaggccctggttcctgattccgcttacttctggaaatacggagcttaa

SEQ ID NO: 249543 - DNA, 225 bp, Klebsiella pneumoniae
atgagttatcgcgcatatatcattgcttttgacccggaacacggtacctacaccgaaaccgaaatcatggaaggtttcgccactgaacaggaagcggtagaccatgctcgcaataggctgccagaggtgcagcaggaactggccaagttgggtgaaaacctgctatgcagctaccgcataagggtagtggattccgctgaaatcttgccgtttctccgctcataa

SEQ ID NO: 249544 - DNA, 1689 bp, Klebsiella pneumoniae
atgaaaaacgcgcctaacgttaagctgttaccgaaagacccttttacggaagccattatttttgcaggttctgatgcctggagtcatgccaagggctgggaagaaggcatgggtaaacagatagctggcgatgatacaccgcctgtctaccttgggccaaggcaactggctgatttagataatctgcggattatcgacgatagtcgccggtctgcgcgggtatatctggccggtgatattgagccaataaaaattaacgccatcgctgaaaaactggctttggctggagttaaggaagcccgtttatttaaaggtataccagaccgcgaaccggaaaaatggaacatggacaggcttagagacgccgccctacgtggtgaaagcctggtgggtatgctgcgcaaagaagaacgagcaaccgccgcagcaactgcaaaagacattcacgatatgacgcctgtattaatgacaacctggccaaatattggaagcaatggccagcctttaaacacgcgccccaatgttgaacgtctattagataactacagcatttctgcaaaatataatgagattagcaaggacgttgaggttttagtgcctggcgttagtagcggttcagatgctcgcgataactgcgctgtgagtgaaattttaagcctcgccgcactgaaccggttaccaatgagcaatattgaaggtcatatcaaaaccatcgctgtgcgcaatacttataatcctgtcagggatttcatcaatcagcgtgaatgggatggccggagccgatttgcagacctgctgaataccatcagcacgccagatgactacagccgtgatctgctggccatgctggtgcgtcgttggttgctgtctgccgtggcggctgcttacttagaagcgggtttctggtccaaaggcgtgctggttttccagggcgagcagtcgctggggaaaacagcatggtttaaagcgcttctgccccctgacaatcgcaacctggttaaggtgggagcaactattgaccctagcaataaagacagcgtggccagcgcaattagtcactggcttgttgagctaggtgaactggatgcgacgttccgcaaggcggatattgccaagctcaaagcatttatcagtcaggaccgtgatgacctgcgccgcccttatgaccggcttgaatcgaagtaccagcgccgcaccgtgttttttgcgtcagtcaaccctaaacacttcctggctgacgacaccgggaacgtgcgctggtggactatccctgtgactgccgttaactacgagcatggcatagacacacaacaattatgggccgaagttctttcctggtttgaggcaggtgaacgctggtggctggatcgtgatgaagaagccatgctggaagtagtgaacgaacagcacgggcaaactgacccgattgaagaaatgatattggcgcgttttgattggaacagtgatcgcctggctgcatatatagaaatgactgcaacggatgttctgttgtctattgggcaggatcggccaacaaaatcccaggcaacgcagtgcggtaacattctgcgaaaactgactggaagggatgcacgtagaacaagtaaagggcgtttttacctaatgccaccgaaagtttttggacagcaagaccatagctattttgatgggcctaaccgccagttttga

SEQ ID NO: 249545 - DNA, 282 bp, Klebsiella pneumoniae
atgaaacaagtcaccactgccgaagcaatccgtaattataacggcctgttgcgtaatcccttacgccagttaactgttggcgaactcaccgcccagcgcatggcggctgcacaatcattgttgcaagcgtgcatccgcgaaggtgtaaaccgtccgtggactattgtttcacgtcatgctgctatggctgatagcctggtgccgtttcgtatcagtgacgctgaatcatgggcgatgtatctggagttaaagcgcggggttcgaaatgaaaaacgcgcctaa

SEQ ID NO: 249546 - DNA, 180 bp, Klebsiella pneumoniae
atggatcaattactgaccgctaagcaagttaccgcattaaccacgttatctcgcatgacaatctggcgatacatccaggcaggcactttcccaaatagcattaagcttgggccacaacgcgtggcctggaaacgtaaagatgttatggcgtggcttgaaagccgccaaactcagatttga

SEQ ID NO: 249547 - DNA, 1176 bp, Klebsiella pneumoniae
atgaacataactagttatattggtttgtcgcaagagttagttatttttttattagtggctttattatgttctatcacactttttatctctccattagtaggtctgtatctaactatattatattttttatttgtaaggacagatacgttaatatctagatttcccgctgaactttatgccattgtttgtatgagtgttatatctgcatctatacaagtgggatatgggcacggcgatgactattataatgtatatattcctgcgtatgaggcggtaaatagaggagaaagtatcttttcatttttttccggaggggttgagttcggtttaccattattctttttgattttaaataaattattcccaggcgtaaattacatacaactaagtggtgttataacattcatctattcctttatatttattttgtgggttgaaagattttttttaaaatatattgaagataaatacaaaggcgttgctcttgcctctctgttggtgttttttaattatttgattttggtgcatttgatgcgccagtcgatggcatcattatttgtattatttagtcttggttattttcttgagaagaactatagaaaaggagttgtgttttttcttgttgcttgtatttgtcatttgtcatcagccgtaataataccattgtttatgattttttttagtaataaaaaatacctaaaaatatcagtagtattgtttataatttttgcagttatatcttttaaatttcttgttgggtttattgttgcacataatatatttggtgtggctacatataaaatggccgtatacgaagatgatgtcatagaaacgacggcgggggccggttttgtactgcattttattgtgctttttctattgtctagatttatccgagatggatcatatgaatcgtataaaagtttgattttttattcttgccctgcatatttaattctaacactaattccttttgcctctgataggctatttatgccaattacaggtttcatgctgggggggatattttttatttttttcaaaaaatacatcacagtatttcgaattttacttgttgcctattgtgctttaaggttttttagattagggccattcgcagaaaacatatatggtttatggtataactatccttggttaggtagtatttttgtatga

SEQ ID NO: 249548 - DNA, 1092 bp, Klebsiella pneumoniae
atggtgaagaaaaaagaattgtttatactacatgatgttgatgggaggatatattttgaagcattacaacaattgatgaacgaaaaaatagtgggcactataaaatatagagaaacatcagttgtcaagagattgctatcagctattttgaagaaaaaagatgtatcgctatggttcaagcgaggaattcagaacacattatttagatttcagttacctttcttgaagaataaaacaattatattcggtatagctccttataatatccgatttgtattttatggattattaggtattagaaataatgtaatttaccatacatcatggccatactggtggggtgataatgtgccttatccatataatggaagaaataaattcctaagaaaaatattcaagttttactttaacaaattcaatttttctattgttggagtaacaccaccttgtgttgaaagcataaaaagtgaaatttctccagaggtgaaatgcaaatttataccacacgcggtaaatgttgatttattcaaagacgaaacaatcaaaaatattcgccctgtaaatatattatatgtcggtaggttggtgtgtgaaaaggggatatatgagcttgcttctgctattaaaaagctagatccggaatatagatttacaatagtaggtactggtactgaggaagctaatcttaaaaaaatgctaggccagctagataatgtaaactttatgggccatatatcagacaagagcaaacttgcggctattttcaaagagcatgatgtattagtcttaccctcaaaaaaaatagatggttgggaggagttatttggcttggttataattgaagcaatggcatgtggtctggtcgtaattgcaagtaatcatattgggcctagagggatcatagacgatgggaaaaatggatttttaatatctgacggtaacttgacaagtgagttggtcactaaaatagaagagcttagcgaacttgatcttactactataagaattgaagctagaaagacagcgattgattatgatatagattctataaaaggtaaatgggatgaagttattaatgaaacacagtattag

SEQ ID NO: 249549 - DNA, 582 bp, Klebsiella pneumoniae
atgaagttattaatgaaacacagtattagtaatctaccttctgaacttattgataatcccatatgcttcttttttccatctaaaattgttggtggccatgaattgatggctattgaattaatgaaagaattatatgacatggggaaagatataaatgtagcttttctatctcaaaatatagaactaaaggatagaattgctaaaagagggattgatatcgactatattactatctcattgaaacaacctagatttgaatttttgcatactttgtttaatttttcttatctctctaaagttaatgaggcaatattaaaaataaactctttttcacgaggtaatatcgtcattgtacagggcgatattgagctcggtgcaggatatgtaaaaaaagcgtatgaaaatggtatttttctatattcatatattccttatgcgcattctgcaaaaaaaatgagtaaagcattagcttttcttcgtgattactactatccgtttttgtataagaaaatcaataaatatataacaattagtgagcagtttagaaaagagcttttgcaatatgatcccttgatattataa

SEQ ID NO: 249550 - DNA, 426 bp, Klebsiella pneumoniae
atggacaaacaaaacaactttccagtggaaacactggaagaacagcttattattatcgttgataagtatatctctaaacgataccagccgaacgataaaagtttttctcaccagttatacttagtgttcgttggctatcacttaaagtatttctatcccaaacaactttatactcgttctaatcgcaacatagacaacattatgacaatgtttagttctgtgtataaatctctgacgagtggtttattaaggcaattaaataataaagaagctgttcttcgtgagttaaactctctcgttaactatattgataataatcaagaacgagcagaagaaatctatgctacggtcagagcacaatatgaaatgaaaataatcgagaaagagttgactcatgaggttcgcgtaagaaccgttaggctgtag

SEQ ID NO: 249551 - DNA, 1191 bp, Klebsiella pneumoniae
atgaagggaatgcaacggataaagagacataagaactttatcaatgttgtgaagtatgtgttgaagcctgggtctcaccataaaagtgatcctgttgttatcggcggtaacatgacaagtgattgtgccaatgaactgatagctgagttcaacacagcaagtatcctgagaaccgacatagcaaaaccagcctggcataactcgcttcgccttcctaagaaggatgaacttacaaatgctcaatggataaagatcgctgacgactacatgtaccgtatgggattcagtgacactcaccttcgttgttatgtattacacgacgatcctgttggtcaacacattcacatcattgctaatagagtcgatgccgtgtctggtaaagttcatcttggtcggcatgagagtttagtcagtggccgaataattcaggaacttgaaatcgctcatggccttactcaaaccccagcggttagagtacaaccgaaacaaacaaagcgtaagctttcacataatgaagagatgctttctcaacggacaggcttgccctgccccaagaaatccctacaacagatcattgatgaatgtttgactgataaacccaatctagaaacttttatcaaaagaatcagagaagctcaggtttcctggacggcaaacgtctcaaaaacaggaaagatgaatggattttcgttcgaatatcaaaacatcgcatttaaagcctcccagcttggaaagatgtattcatgggcgaaccttcaaaagctcctcaactacgaacctgaacgggacaacccaatactactaaatgccaggccagttgctcctgctcctgctcctgctcctgctcctgctcctgctcctgctcctgctcctgcaacatttttaaaaaccactgagagaaaggaaagtatcagtgaaaaacttgctgaactcgaactgcaactcagagaaggcaaacgaaacgagattgtagaaaagattcttcaaaagaatgtagtacaacagcaaaagcatcacagactcagtagatgggttcctttactacaacggctcatagagcttctcagaagctatgggaagagcattcttcataagacacctacaaacttctcagaagtctattcagcacatcatcttaaaccggcaagaaaaactcatttaaagacagttaattacaaatgccttctgtaa

SEQ ID NO: 249552 - DNA, 1038 bp, Klebsiella pneumoniae
atgcttaaatacatactccggtgttgctcattattagccatggttatggtgccatcatttagtttgtgtagcgaattccttttagggattggtgtccaccctcagtcatttcctgggggggcagaagctctacataaagaaatcgaaaaattacatgctaattcaattagaactgattatccatggtatcaagtagaaaaaacaaaaggaatatatgtaactccaaatattgaaatcgaagagacactaaataaagcattgtctaataagatcattcctgtaattatacttggatatggcaatcctatctatattgaaaagacaaaagacaatccaagaatgaaaccaattggtgaaagggctgttacaggttttgtgaattatgcaaaatggactgctgagcatttcaataataaggatgttatatttgaaatttggaatgagtgggttcagggaggaggtgcaggtaaaaaaataacattaagcaaggcctccataagaagttacactaacattattaataaaacttgtaatgcaataaaatcaaataataacaaagcaaaagttattattggttctaccagtccctttgatgatagatcaaatctatggttacgttcattggtgactaatcttgatatgaaatgcgtcgatggcatttcatttcatgcatatcattattaccctaagattaaaaaaatcagtgcggaaagtgtgactgataaattagaagaattacaaaaaatactacaagcgagtctgaagacaaacaatacaattccattttatgttactgagattggtgttcctagcatagcatcagcacgttacgatgagaacgatatagctgactattttgaacgcttaatcccgttactaaaatctaaagatttcattaaaggcgtatggtggtatgatttaattgatgatggaaataatagagaggatatcgaacataatttcggattgatgaaggctgataagaaaaacaagccaatagcttacaagtttatttcattagcaaaagagctagaataa

SEQ ID NO: 249553 - DNA, 981 bp, Klebsiella pneumoniae; identical to SEQ ID NO: 144920

SEQ ID NO: 249554 - DNA, 924 bp, Klebsiella pneumoniae
gtggcaaagcaaaagttcagaatcaccaactggtccacctacaacaaagctctcatcaaccgtggctccctcactttctggctggatgatgaggcgattcaggcctggtatgagtcggcaacgccttcatcacgaggaaggccccagcgctattctgatctcgccatcaccaccgttctggtgattaaacgcgtattccggctgaccctgcgggctgcgcagggttttattgattccatttttgccctgatgaacgttccgttgcgctgcccggattacaccagtgtcagtaagcgggcaaagtcggttaatgtcagtttcaaaacgtccacccggggtgaaatcgcacacctggtgattgattccaccgggctgaaggtctttggtgaaggcgaatggaaagtcagaaagcacggcaaagagcgccgtcgtatctggcgaaagttgcatcttgctgttgacagcaacacacatgaagttgtctgtgcagacctgtcgctgaataacgtcacggactcagaagccttcccgggccttatccggcagactcacagaaaaatcagggcagccgcggcagacggggcttacgacacccggctctgtcacgatgaactgcgccgcaaaaaaatcagcgcgcttattcctccccgaaaaggagcaggttactggcccggtgagtacgcagaccgcaaccgtgccgttgctattcagcggctgagcggaagcaatgcacggtggaaatggacaacggaatataaccgtcgctcgatagcggaaacggcaatgtacagaatgaagcagttgttgggagattcactgacgctgcgtgactacgatggtcaggtagcggaagctatggccatggtgcgtgcgttgaacaggatgacaaaggccgggatgccagaaagcgtgcgtattgcctga

SEQ ID NO: 249555 - DNA, 645 bp, Klebsiella pneumoniae
ttgttcaattcactatcagaactaaaatcagtagttaaagtttttgtgcagagtgaggtaggagatatcttaactgaagaggaattaaacaatttaccactatttattgatccttatttttttaattcgacttacaagcttgatgaattatatgaaaataatttcttcaatttgcatatgagttctaagagaataacccgtagggttcaggccgtttgcaagagagtaagtaaagataaaaataaaaaaattaactctcgtcaacttagggttacattagccacaaggcttgcacttaaaggttatggattaggaacgatagcaaaagctttagatcatagcaatttgaaatcagtattatcgtatgcaaaaaacaatgaagagttttcattcagaattgatcaggcgataaatgattcagtaagtccttatatcgcttcattttcaaaaaaaagtgacgacattacacttggattggttgacgatttgataatcataaaagagcttactaaagaattaatagccggttatacgaagcaagcagagtttgaaattctaacggacttttcctcaatcttagaatgcaaaataaataaaatagttgaattgctcaactgggagggcatgaataatgagttattataa

SEQ ID NO: 249556 - DNA, 987 bp, Klebsiella pneumoniae
atgataaagaacattcagatacttagagctttagcagcattatcggttgtcgtctatcatatatggcaaaaaacacaggcctacaatattggcattgactataacttatccttccttagttcaggcgtagatctttttttcattatttcaggttttattatggtctacattcaagatcgaaaaaaaagaacttcctttgaattcctaaaagagagatgcataagaatcataccgttatactatttttttacattccttataacttctgtatttataatcagcccacaggtatttaatgaaagagtttttcatgttagcgatctgttatcgtcactattctttgtcaactttttatttggtagctacccagacccaatagtacaacaaggatggactcttgaatatgaaatgattttctatatcttattctcaatttcgataactgcacataaaatcaaaacagctatatttatcaccgcagcacttattgtatttttgttagtttttggaatgagtgacataatgctagaatttatatatggcatgctggctgcatacttatgcaaaaatataaaaaaagtggcaacaatcccattattactttctttaattggtgttgctatgcttatggtggataaattgagtatatatactcaatatagatcaatatattatggattaccatgtcttttaattttcattggaattttgctaacaaaagaactgaacctaaagaaaatggaattcatcggagatgcctcatactctatatacctatcacattttattgtaatacctgtaatttgcaaaatatttgtcaagttttacccatcaccatctacatcgcaaagttatttgttgtttctcatttgctttgttagcagcgtgacttccggagtcattgtgtataagtacatagaaagctatttaacaaggacgataaaatcattttccataaataaaaaaatcacctccaattctaattaa

SEQ ID NO: 249557 - DNA, 243 bp, Klebsiella pneumoniae
  misc_feature (226)..(234): n is a, c, g, or t
atgactactaaaaagtttattgaactggaggtcggggacgtcatcgtccccgttccggggatggaaataactgtaactgaggctccagtgctaactaaatcagatgatggagaaaattactcgctgaaaggagtgcgggatggtaacgatattggcattgtagggttttatgactcgttaattcaatttaaatctgtctcttatacacatctgacgctgccgacannnnnnnnnatacaataa

SEQ ID NO: 249558 - DNA, 2043 bp, Klebsiella pneumoniae
atgactcaatataatacgggttaccctgtcccatctccagctatgccggatgtgtgggataataatgaaacgatagatagttttgtaaattcacctgagatcagcgtcaccaccagaactggaatagttcgtgacaccatgttcggaatgcaaaaaaaagcagacgaacaacgaatcgccgcttcggtagcattggccgaacaaatggattcgcaggagtcggcatttaatgcggctcaaactgacaaagaggatcgtttccagggatttcttaacagttctggttatgtctttcttggtaactatgaaaacggtccatttcagttcagcgcccgcaatcagtacattcgctacgataatcagtattaccgcctgaatgctgctactgacgtcggctttacgaccaccggaaccgatgcgaccagctttgcgaacgacgttactcacttcgttctgatggatggagacacgcttcgccaaaacctgggttcagacgaagaagggttgggcgctgatttagtcaacacggtccttgatatttctgtcggtaagtacatccaaaactcctcgccgagaatatctgattacaaagttacagaaggcacagatgcgactctagcttttgcgaaggcattagttaaagcctcagaaactacaggcatcgtaattgtcgatgtcagttgtgtggttgatacaattgctgttccatcgggaataacagtccggatagctgattataagaccgtcacccacaaagccaacgcattggcgcatatgtttatcttaccctctgattcgttaatcaaggcaaataataaaaaaggccgcttgaggggaaactccgcgaatcagtcagcgatacgtcgctgcataagtgctgttggtgtttccaatgcaggggttgatagtgttgatatccgggatttcaacagctacggggcgtattttgaaaactgcgaagacaccttttgcaaaaattcaacaatacgtgatatcaccggaggggcagtagaaactgcggctgggcaatatgtaactaactgcctgcgccatgaatctgcgttcaatgatattagagacaccggttctaatggtattaagtttagagcggatgctttaggtcaaacgcaaggatgtagctcgaccaacgataaggtatatcgtgcaggttttattggaattgctaatggtaagtgtaaagaccataccgtcactaacgcctattgtgagtcatgtgttgacaatggctgcgatatgaatggctgttataatacgcggtttatagattgcgtatcagtaggatgtcaggacggattctatatgggggaaaacgggattgataattgtcatataattaatccaactgcccggaactgtaaacgttctggggtaggtagccttggttccctgacaagatgctctgttatcaatccaactattgatgcctgtggtagcggtatctattgctctggttttgtaggctttaaaatcaggggtggcagcattacaaatagtgtaaaacagacgtacactgacaacgaaacgggtacggtaaagacgagcaccggaaacggtatcgatttacaatcaaacttgtctggatgttaccaacctgatatttccggaaccacattttatggtaatgctggttacgatatcgcctttggtagctctggtaccattggcaacttaatgcttggcgaatgttctttccaagattcagctggggatggaaaaattagctatggcggcgctactcttgccgatccgcagattagaaactcccagggatatattgtctcccggacgcaggtgtacaatttggctggtgatggtactacactggattttacgctttcactgccgcaggcggtcgctgacgcaaattatcgtattgtttctgttgtacctgattggctaactaccatcagatacctggataataccaaggggacttcctatttcattatttcattcggtacggctccaccatctggaacacgtcgtgtaaatatttcgtttgaacgcctgcgtccagtttaa

SEQ ID NO: 249559 - DNA, 279 bp, Klebsiella pneumoniae
atgcagtgcggtccttttcggcttgaggctgctgacgatggttttatgcatatcaacggacaagcccctgaaacgcagaaaatgaccttcctcaagcaaaaagacgacttcgataacgtcatgatgcaatggatgctaccagatgccaacactgggcactggctcggccttgattacgttaagcgcaatgggaaggcaattctaaatgttgaggttgttcgcaagaatatggatgatccccggcgattttggacctatgattgcaagcgtataaagtga

SEQ ID NO: 249560 - DNA, 648 bp, Klebsiella pneumoniae
atgactgatatcaccgaactggcgcaacgtatgaaggccgctgcagagaaagcgactccgggcgaatggtgggccgacgaagttaaaaacgaaggatgctacgggtctggcgatgactgcgtggagggattcacctcatacgcaatttatggctctgacgggcaaaccctctttgattcgctcaacagtgacgccgcctgcatctgtgaggaatacgacggcgaggggcatgtggcatgggatgagacggcgcagcgtaatgccgaattcatcgctctggctaaccctgccaacgttctcgcgctggtagaggcgctggagaaggcgcagcagaagattgatgaactggagaacgatgaagttcgtcagcgcttggctaacgcagagcaccaactctacatggctgaactggctaagcataacctcaaagcaagccgcaaatcccagttccgcaagcgtagagcggccgagaagcgcatcgccgagctggagtcacgcttaaactctgctgacaaattgcaggacagtgcattccgtagtggattgcaacacggctttagtctcggacagacagatgaccaaaaaggttatgagcagagcatggccgcttatagctcccacgctggcatcaaggtggaggatgagtga

SEQ ID NO: 249561 - DNA, 720 bp, Klebsiella pneumoniae
atgactgagcgcggaatgatttttaacgctgagatggtgagagcgctgctcgacggccggaagacacagacgcggcggattatgaaggttcagccggaaccatcgaaatcacgacctggggatttttggttttcatcgaaaaaattagaaagcatggtgcacgtttctgaccttgtaccgggtaactcgcctattgctgattgtcaccttttctttcaggagcactgctgcccgttcggcgcagtcggcgaccgcatctgggtgcgggagacgtggcaggccattcatgactattgcgatgaaaatgggcatgtcgacgaacgccgatatgcgcgaagcattccgaggaatcgcgggaactactggcatccggtctatgaagaggcatggggtaacgaaagccgagaggaccgagaattcccctggcgaccatctatccacatgccgcgctgggccagccgcattctgctggaaatcaccgacgtgcgcgtggagcggctgaacgctatcagcgaagaggatgcgcgagcagaaggcattattgacggtggctgtcttaattgcggggaacctgagccatgcggatgcgccaatccagagcctgacgctaccgatgcttttgcctacctatggcaatcgatctacgggcaggaaaactggaatgccaacccctgggtttgggttatcgagttcaagcgcgttgaaggcggtgcagcatga

SEQ ID NO: 249562 - DNA, 135 bp, Klebsiella pneumoniae
atgtgggtaatgatgaagcttaaacgcaccgggcaagagatgtacttccagtattacgacagcagggaagcggctgaaatggcggttaagattatgaactccatcgccagcagctgggaattctatatcaaataa

SEQ ID NO: 249563 - DNA, 249 bp, Klebsiella pneumoniae
atgattggactcgtgcccttgcatcgcgctggtgagatccggggcggggttatactcagctcgaccggtgactattgcgtaacggaaaacttccccacagcgctgcctaacttttcttgccttttcggtagcgccgcgcccctcaatgcgccgcagcacattcaacagttcaagcggtttgatatcggctattggttttttgccaatgtaagggaacacatccttgttgaaagcctccaggatgtctga

SEQ ID NO: 249564 - DNA, 1506 bp, Klebsiella pneumoniae; identical to SEQ ID NO: 230262

SEQ ID NO: 249565 - DNA, 678 bp, Klebsiella pneumoniae
atgaatgctgctatccaatctatctgttacaacatttcccaacatcccgaagtcagtaatacaacgttgaaacgttctcaccttcacgaagtgattgctgctcttttagggtatgccagtcatgcggcactcatccaggaagtaaaagaagcctcacgagaatatgaattctctgatgctgaattcgtggtgctgaatctaccgatgggtacagaaagggcgaagaagtttcttctcaccgatgaaattttccgcatttgtgtcttggaactaaagtcagggatgcctttaccagtttttgagtccgtaagggatttttatgatgattatctcagagagtttcttgagaaatttatctatgacggagcggaagaaactggggaaatggccgactgtaacgccagcttctattactatccagacatggatgaagattataatattagcggcgagctttggacggcactcgatgaatggtctatagaggatactggaacgttatcaggtgaatatgatccagaagggcaccggatgtacaacgggcatacattcaatgttaagggcaagcttaagtttgcaaaagcagggcgagcaggtttgatattcttagaagatgagagcgacttttacttgtcacttgatgaatcgtggcgtgacgaagaaccattggatatctag

SEQ ID NO: 249566 - DNA, 1242 bp, Klebsiella pneumoniae
atggcacgtataaccactccattgaccaacacagagatccgtgcagcaaagccggctgccaaagaatacaccttgcaggacggcggtggcctttatctgctagttaaacccagtggttcaaggatatggagattctcttattaccgcccatacgataagaaacgggcacttgtcagctttggatcaattgatgaagtaacgctcgccgatgctcgtaaaaaacgcgagttgtatcggtcactcattgcgcagggtatcgatccgcaagcccaccagcagcaaaaacgtgaagcagaagagttgcgcagaggaaacaccttccggaaagtagccgctgactggtatgaaatgaagaaaagccagaatctcgcggcaaacacgataaaagatatctggcgctcactggaaaaatacgtattcccggacatcggtaacaagccaatcaatgagctgacggccagaatgttcgtcatcatgttggagccgatcagagcaagggggaacctagaaaccctgaaacgggtattacagcgtataaacgaagtaatggactttgccgcaaacagcggtctgattgaggttaatactgctgcaaacgtccgtaaggccttccctactccggtaaaaaaacacatgccgacaattcgacctgagcaacttcccgaattaatgcatacgctatccatcgccagtattgagcggcagactcgcttacttattgaatggcagttgttgactgttactcgcccagttgaagcagccgaaacccgatgggaagaaataaactttgcagaacacacttggaccatccccgccgggaggatgaagatgcgtcgagatcacatcatcccgctatgcgaacaggcgcgggcagttctggaggtaatgaaacacattagcgcccaccgggaatatgttttccccagctttaaaacgccaacattgccgatgagtagccagagtgccaacgccgcattacggcgcatggggtatcagggagttcttgtttctcacggcctacgcgccatattcagtactgcggccaatgaagagggattcgagccagatgtgatagaagccgctcttgcacacgtagacaccaacgaggtacgccgtgcatacaaccgcagtaactacctagaaaaacgtgttgtgctgatgcgctggtggggagagtttgtcgaagcggcatcaacaggagtgacgctggcaatgggtacccgggggatacgggctgtataa

SEQ ID NO: 249567 - DNA, 663 bp, Klebsiella pneumoniae
atgttgaatttaccaactcatattaggcggcttagaatcgtaacattagaacaagccgctttggcaatggctggattatttgattgtgatgatatagaaatggctcgtaatggtaattatctaggttggcgaaaggctgaaacttatagagagactattctccaagcgataaaactaaaagaaatcataccgctaaggttaactttaagtagccctatatatgaaaaatatttaacaaaagattcaatgactatagatctcgataaggttgatatcgacatgcaaatatctgacgctaaattcctagctccagatatatggtcatgggcagagagtgaattaagtgagtttgattaccatgacaaatatagtgataaagcatctggttacgagagtcaggtaagtagtgaagtcgacaatcaaattaacgacatccaatgggaatctagatttgctgggagaaaacacgctatagaaatcattgcagcattatccaaaactctcgctgaaaaaacaggacatagattcactcgaggggatagtatcaacgccagtgcgttagctgaaatcgttgcttctcatctaggaattaaagatccgcagttacatcgcaagcttatagctgatgcactaaaggaagcaggactagcagatagagattga

SEQ ID NO: 249568 - DNA, 201 bp, Klebsiella pneumoniae
atgaaccatacagaaagaaaaatacttataaaaaaagaagtaaaggacataatccgcattaaatcagatgccgcatttcaagaaatgattaatgctggcgagttccctcgaggcttccgtattggcctgcgacgcgtcggctggtttgaagatgaagtgaataaatggttggacgacagaattacagaggcccgtggttaa

SEQ ID NO: 249569 - DNA, 276 bp, Klebsiella pneumoniae
gtggataaacgcgatccatgtatgacgctaattaccgatgaggaaatgctcgatatcactggggcgcaattcccttccaagcagtgccagatactgaaagaacatggtatagcttttgtgcgaaggttggacggtcggccacgaacgacatggtttaatttcaaccacccactgcatagccgtcatcgccccagcgaagaagagataatggaagatgaggaaccggactttgatgcaatttttagagggaaagaaaaacccaatctgaagcgctaa

SEQ ID NO: 249570 - DNA, 837 bp, Klebsiella pneumoniae
atggcacgttctagatatgacgtagaaattaatggcgacaacaaaggtctaacaacggccgttaataaatctatggatgaactgaacaaactcaatgaggtcgccggaggattattcagtaatttaaccggaccacttggtagtctccaaggtggtattaataccataaacacaatgaaccctgctttacgtgctcttggcgtagcagggttagcggctggtgctggactcgcagcaatcaataaagcagcggatacggttaatacgcttaatcagattagtacaaacacaggtgtatctgttgagatgcttcaaaaactccagaaccagtttaaagatactgggatggaagccgagaagttcggtgatatcaacaaagatgcaatggataaacttggtgactcattcagaaacggtggcggtggcgtagctgatgacctgaaagaatggggtatagaactacaagaatataccaaatatgctggtgatgctgaaggtggtatcaaagctgtaattgatactttctataaaatgaaagaagctggtaaatctcatgctgaaatcactaacgcaatggaaacaatggcgagtgattcaagtcatttgattacgactcttgagaagtacagttctacacaagaagctcttaacagtattaatagacaacacgctaatattactaaagaaacttccgaggaatacaagaacttccagaggaatatcaatactctgaatagtaatgttcaggacttaactgttcaagctgttactccattagttgctgaaatcaatcacctttggtcgttgtttaacaaagagtggggcgttgttgaataa

SEQ ID NO: 249571 - DNA, 213 bp, Klebsiella pneumoniae
atgatggtggtgtttaaattgaacgcggttcataaaaattctctgagaatgactatgcatttgatgtcctttaacctaaaccacttccgccgcagaaagcaagggcttttttctatcattaattcatttcatattgagcgaagaaattgtcagttgccgctggctggcgtagcctgtaatcagcacagcgaaagagtcaggagcctgggatga

SEQ ID NO: 249572 - DNA, 201 bp, Klebsiella pneumoniae; identical to SEQ ID NO: 232034

SEQ ID NO: 249573 - DNA, 219 bp, Klebsiella pneumoniae; identical to SEQ ID NO: 232078

SEQ ID NO: 249574 - DNA, 1608 bp, Klebsiella pneumoniae
atggctatcaagaagaacgaactttactcctccctttgggcgagctgcgacgagttgcgtggcggaatggatgcttcacagtacaaagactatgtgttgaccctactgtttatgaagtacgtctctgacaaagctaagggcaacccttacgcgatgattgaagtgccggaaggtgcaagtttcgacgatatggttgctctcaagggcaacaaagaaattggcgaaaaaattaacaaaaccatcaggttactggctgaagctaatgacctgaaaggtgttatcgacattgccgacttcaatgatgaagacaagctgggtaaaggcaaggaaatgatcgaccgcctttccaagctggtggcaatcttcgaagggttggatctctcagccaaccgcgttgatggagacgatctgctgggcgatgcctacgaatatttgatgcgtcactttgctacagagtcaggtaaatccaaagggcagttttacactcctgcagaggtgtcacgcattctggcgaaagtgattggcatcagcaaacagacaccacaggatgctaccgtttatgaccctacctgtggttcaggctcactgctgttgaaagccagtgacgaagccggtccgaaagggctgaccatttatggccaagagatggattatgcgaccagcgcactggcacgcatgaacatgatcctgcatgacaacgccaccgctaaaatctggaaaggcaataccctggccgatccacactggaaagatagcaacgataatctgaaaaccttcgactttgctgtagctaaccctcctttctccaacaaaaactggaccagcgggctggatgctgcgaacgatacttttgaccgtattgtctggggtacaccaccagaaaagaacggtgattatgctttcctgttgcacataattaaaagcctgaaaagtaccggcaaaggtgctgtgatcttacctcacggcgttctgttccgtggcaatgctgaagcacgtattcgtgagaatctgctcaaacagggttatatcaaaggcatcattggcctgcccgctaacttgttctacggcacgggtatcccagcatgcatcattgtcatcgataaagaaaatgcccagctccgagctttcaatgctaatggcgaaagtcagcaaagcatctttatgatcgatgccagtaagggctttattaaagacggcaataaaaatcgcctacgcgcccaggacatccataaaattgtcgatgcatttaatcgtgagcaggaaatcccccgtttcagccgcatggtaccgctgtcagaaattgcggccaacgacttcaacctcaatatccctcgctatatcgacagcagtgatcctgaagatctgcacgacctttctggccatttggctggtggcattcccgatcgcgatattgatgctctcagtgcttactggaaagttttcccaacgctacgacaggatctgtttgaacctgctcgccctggctacagcaatgcccgagtcgaggccgataaagttaagagtgctattctggcgcacccggaatttgccgctttcaaagggaaggtgcgaataagcaggtcatttcttcccaagctgactcgctga

SEQ ID NO: 249575 - DNA, 558 bp, Klebsiella pneumoniae
atgctgcgccagcagccgcagggccgccagcgaggcgccatccggcagcggaataaagaccagcagcgctgtatcgcctcccggataaaccagacgttcgacgccgcggcggcagggcgccggagcgggcatcggcggattaaccggggcggtaataaggctcagctgacgcgctacccactgcgcatcttctgcgctgccgccggccagggccgccagccaaccttcctgatgcccggatgtacccagccgttcggggagttgagccatgagatgacggatagcgatactatccggcggtggggtcagcgaggcgaccgggagcgcgagctgccgcaggatggcctgcaggatcgcctccggccgtcggcctggctccggcagctggagggtcaactgccagctgccgtcgaacagatgccactcgccgtgtcccccggcatggcgcagggcggcaagcagtgggcgcagctgttccccacgcgccagtccttcggcctgatcgggcgagcagtagaagggcggtcgcagcaggagcctcggcggctcttccggtaa

SEQ ID NO: 249576 - DNA, 600 bp, Klebsiella pneumoniae; identical to SEQ ID NO: 160412

SEQ ID NO: 249577 - DNA, 783 bp, Klebsiella pneumoniae; identical to SEQ ID NO: 160413

SEQ ID NO: 249578 - DNA, 510 bp, Klebsiella pneumoniae
atgatcgtagcttcagaacatcaagcaaagctaaggcagaaagaaatacaggaaatcgacaggagggcgtctaaagagcacgaggaggcgaaaaagaatagcaacttcacccagacatacccaaagggctggcaacgcattagagagcttgtgagagacaaacagggtgctgccgctataggtctttactcatttttcgctgaacacatagatcctacatgcggtgcagtggtctgcgaccagcaatttttagctaatcagatgggtgtttccactcggacaattcgtcgttggttagattatttggaggagaagggtgccctggtaagaataccagttgctggaaaggtatgtgcttacgctttagaccctcacgaagtctggaagggatataacacatcaaaagactactcagcctttgttaccaagacgttagtaaacaaagatggagaaataaaacgccgaataatggctatgttttctggagaggagagcagtcaagagcagtag

SEQ ID NO: 249579 - DNA, 924 bp, Klebsiella pneumoniae
gtggcaaagcaaaagttcagaatcaccaactggtccacctacaacaaagctctcatcaaccgtggctccctcactttctggctggatgatgaggcgattcaggcctggtatgagtcggcaacgccttcatcacgaggaaggccccagcgctattctgatctcgccatcaccaccgttctggtgattaaacgcgtattccggctgaccctgcgggctgcgcagggttttattgattccatttttgccctgatgaacgttccgttgcgctgcccggattacaccagtgtcagtaagcgggcaaagtcggttaatgtcagtttcaaaacgtccacccggggtgaaatcgcacacctggtgattgattccaccgggctgaaggtctttggtgaaggcgaatggaaagtcagaaagcatggccaggaacgccgtcgtatctggcgaaagttgcatcttgctgttgacagcaacacacatgaagttgtctgtgcagacctgtcgctgaataacgtcacggactcagaagccttcccgggccttatccggcagactcacagaaaaatcagggcagccgcggcagacggggcttacgatacccggctctgtcacgatgaactgcgccgcaaaaaaatcagcgcgcttattcctccccgaaaaggagcaggttactggcccggtgagtacgcagaccgcaaccgtgccgttgctaatcagcggctgagcggaagcaatgcacggtggaaatggacaacggaatataaccgtcgctcgatagcggaaacggcaatgtacagaatgaagcagttgttgggagattcactgacgctgcgtgactacgatggtcaggtatcggaagctatggccatggtgcgtgcgttgaacaggatgacaaaggccgggatgccagaaagcgtgcgtattgcctga

SEQ ID NO: 249580 - DNA, 675 bp, Klebsiella pneumoniae
atgaacgttccgttgcgctgcccggattacaccagtgtcagtaagcgggcaaagtcggttaatgtcagtttcaaaacgtccacccggggtgaaatcgcacacctggtgattgattccaccgggctgaaggtctttggtgaaggcgaatggaaagtcagaaagcacggcaaagagcgccgtcgtatctggcgaaagttgcatcttgctgttgacagcaacacacatgaagttgtctgtgcagacctgtcgctgaataacgtcacggactcagaagccttcccgggccttatccggcagactcacagaaaaatcagagcagccgcggcagacggggcttacgatacccggctctgtcacgatgaactgcgccgcaaaaaaatcagcgcgcttattcctccccgaaaaggagcaggttactggcccggtgagtacgcagaccgcaaccgtgccgttgctaatcagcggctgagcggaagcaatgcacggtggaaatggacaacggaatataaccgtcgctcgatagcggaaacggcaatgtacagaatgaagcagttgttgggagattcactgacgctgcgtgactacgatggtcaggtagcggaagctatggccatggtgcgtgcgttgaacaggatgacaaaggccgggatgccagaaagcgtgcgtattgcctga

SEQ ID NO: 249581 - DNA, 270 bp, Klebsiella pneumoniae; identical to SEQ ID NO: 237986

SEQ ID NO: 249582 - DNA, 258 bp, Klebsiella pneumoniae; identical to SEQ ID NO: 143786

SEQ ID NO: 249583 - DNA, 210 bp, Klebsiella pneumoniae; identical to SEQ ID NO: 201057

SEQ ID NO: 249584 - DNA, 2829 bp, Klebsiella pneumoniae
atggaagaaaataaaataaaagtattcatatcatatagctgggatagtgaagaacatcgattatgggtcaaaaagcttgcagatgaacttgaaagtgaaaatctattccatgtcgtatgggatgggtacgacctcgatagtttaattgataaaaatttatatatggaaaaggctgtcgttgaatcgaattatatcatcaacgtttgcaccctcaaatataaagataaagctaatgacagacttgggggcgtaggcatagagacttatcttggtgtagctgaacactgggacaacttacaaaaaaacaaaaaaacaaaatctttggtggtccttaaagagaaagaagcaacacccacatatcttaaaggccactttcatattgactttaccgatgataacaaatttaaaacgagcgttctaactttaaaaaaacaactaacaggagagtctttattcaaaagacctgagaaaaaaaaacgaaacgaacaattaattgaacttacgaaaacgggtgatttgattagtcttttttataaaaataaaaaattagtcaccgaaaaaacagacttttcaaaagacaatagaattaaatatgaagtttgggaaataaaagatttcacagatgtatcatcttacatcgtttcatttcatccaaatataaatataaaccaaaccattaaaaaccttcttgaaacaataaaggaaatgggtttaggagaacgagcaaattatctcgttttaagccatggtaatataaaggactttacatccttaaccagtggctataagatggttaataatcgatatgatgattttatttggaattcttgcgttgatgcatcattaaaacattttccaatcccagaaacgattgatttttacacaaaccaagaaataatggatgctaatggagatgtatttaaaaacgcaatcaatcacctacttgatataactaagaataaagaaaatggaaactctgtaaatttaattattggttccggtggaattgggaaaacatctttatgtcaatccctagccaataaattagtaaacaatggcaaagttgttgtttatataagctctgaagatattaaaaaccatatcaatgaaaataatggactatatggttcggtcgacagcctttatgatttttatttaatggaggcgaaatatttagaaatctctaatatctttgataaaaaaacatttgatgcttgtattctgtccggtaaaataattataattatagatggtttagatgaattcacatcaatattttcggaacaatttgatttaaacctttttttatcatccatttctgcatttaatgcagaattaggagacagttattttattttaacaagtagagatgatattgcattctctgagacttatctggaatcacttaacatcaataaatgcacactattaggtttcaaaacagataattgcaaggcttatcttaaccaacggtttagcaaatataaatcagcagatagaattgttaatgtaataacatcaaaaatcgaaaacagttcattgtatgaagagcatcgtgtaattccttttttcgtcgatgttatatcaacaatgtatgaagataatcttgatgaagatgaaaacagtgaacttcattttgaattgctagaatctaatactagttatccttcattaaacaagctcaatgatcatcttattttttcaatatttaaacgagaaaaaagacgacacaatttcaatgagacaccagaatcaatgataagaactttcattgatctttgttctgatcaacatgatagctggaaaacagctgatttctgtgaaataatttctattaattatgatcgagatgttgatttatatatcaacctgcttaagaagaaccctcttcttaaagttcatactgataccatttctttaagatatggatttctgaagtcatatttcacaactcttgatttgttctactattttacaggaaaacctcttaacgcaacattttggagaatattatcacggatcggtgatgactcttacgaaatgaaaagcatcatcgaatttgtttcgaacattgattatatcccaaaaataaaaaatatgataagcgaattaaaatcaacaatcgtagaaaatgacattcactatgataaagagcgtaacgaaaagctcctaactttagagaaattgaatacaataatcaataaaataaatatatcatcgccatcaaccttttgtgaaataatgatggatatttattccaatgacggctttataaataaaatgttcattaatggggatgttggtaatcttgatttctccaatacaactgtaagatacagccattttaggaattaccccagatttttaaattcaaattttgacggcgctaaatttgaattttgtaaatttttaaaatgccataatgaaaatattaaaaactcaaatattttaaacgctgacttcgataaaaacagctgcgaaatgggtgatattgaacattctatttcgaattttagccaactgtcagaagtaagcgaagaaaaaataaaacatgaccttgtaaaatatttgggttcattttttcgagctggacgatttcgtgacaacaacacttcgcacattacattttccaaaaacatccctaaactaaaagaaagtaactttaataaagcactaaggcagggctttctgattgtttctacaacaaaaaatgttgatacattttatgaaatagcaaaggaatataaaccaagtgtacgaaaatttattatggatgatttgatggatgcaaaaatcaaagaaataataaattggattaaacaagattga

SEQ ID NO: 249585 - DNA, 1158 bp, Klebsiella pneumoniae
atggccgaaaacaaaaaaaaggtagttagtgataaccacagaataaataacttttgggatgtcacttatgatacaaatgtcgatattaatagttttgtggctgcccgtatatatgagattggtgaactgtcattaaaccataagcaatttcaatcatatgtaattgattttagttatgaatatcaggagcccgctgaagggactcttgacagtgtaaaagaaaagtcggaaaggatctacattgaaggtattcactttaatacttgtgattttattggtggaaatgaagggaaaaaaattacttttagaaattgtgtttttgaaaaagcatattttggctactcatgcctaaaggatgtgaattttgaaaattgtatattttcaaacacctcatttgctttgactaaattttacagatgtagatttgatgagttatgcagtttttctaaaatttctatttctggtagcaaaactgtatttacagaaagcgttatttcagcaggtaagctaattgatgcactttatatttatgcaacaaaagaatactgtagacagcatccatctaagaaaatagagcaagaaagatctaagatgtatgagtctatggttaagcttgcaaggaatatattggaatctatttcgaaaaatggggatgatgacctttattataatgctgttaaacaagttcataagttgaagataaaagagaaacatcacaaaaaactatgggaaattaaaaaaaataaatcaaacaatatatttaaaaaattcatttccagtatttattatggcgttgttaaattcgcaatgcctattgaaactttaatactaagaattttagggtgtctgaatggatggggtgcaagtgtctttaggtgcgcactttttggttcttcaattttgatcgtattttcagtgatttattatcatgtcggaatagagtcagttccaagtgagacggcaatgcttccacatgtaatgaagagtattattcaaagttttgatattaccttcttagcaggttatactaaatacgtgaatgctagagatgattatggtattcaattgatttgtttgaccaatatgttgctaggtttggtttggtatgcgattagtatccccacagttatcaataaaataagcattaaccgtatatga

SEQ ID NO: 249586 - DNA, 690 bp, Klebsiella pneumoniae
atgattgaattaattaagaatgatagtttggattgcttggtcctctttggcagtcacgcgacgaatgaagctgatgaagactcggatattgatttgcttggaataaataactcgactctgaggactgtcagggagaatggcaaggtaaatctttcgctatattctctaaccgagttgaagcaaatggcgagatcagggaatatatttattcttcacgtgatcctggagggcgtttgcgtttttaacccaaagatttttgatgagttaaaaaatgaatttcaatataaagaaaattataatattgatattgcaaccgctttttacttagccaatgtcattcttaatgaaaaggataacatatctaattgggctgttgctaataaaagaatatcttggtgtgtgagaacaattctgatttcaatttcagttgagaataggaaaccggttttttcaaaaagaaagttagcaatgctatgtcttagtgcaggtctttcatatgaggactcttaccttttggttgatgctaagtcgaataaagagaaaaatgataatatacttaactgtttgagtttttttcttgattattataaaaactataatgaagagattgtaaaaaatattttctcgagtggtatcgttgtggctacgctagatagcattctaaactcttcaaatttttatgatagttga

SEQ ID NO: 249587 - DNA, 192 bp, Klebsiella pneumoniae
atgagcacgatgtttgccctggttctcaccgttagcatgctgacgggcggtaatcaggatgtcctgctcggcgtttacgacactgagaatgactgcaaggcagccgcagaagagcaacacgtgaaagctgaatgttatccgctgaaaggtgtactggacgagcatccggccgggttcacggtgcaaatgtag

SEQ ID NO: 249588 - DNA, 186 bp, Klebsiella pneumoniae
atgagcaactcactgcaaattctctgcattaaagataccgagggatactggactgtaaatgagagatatccggcccgccagttctgtcgggcttttgctcatcttatgaaaatgcatgaaaaccactacacgcggcgtgaagacgtggcgaagatacgagcacgctattggatagaccatggatag

SEQ ID NO: 249589 - DNA, 1080 bp, Klebsiella pneumoniae
atgtttgatacgttaatactagagaactataaaagttataaaaaattagagttgaatgatttaaaaagaattaatttaattgctgggatgaataatacgggtaagacctctatacttgaagcaattttcatgcagcatgatagattggctggtgatgtatttttgcgacctttgtttcggcgtggggtgcagcaggttgaagttaagcctgaatatatatttcacccttattttcatgactttaacatagataagccatttgttattacaactaaaggaggtggttttaaagatgtagctacatatactatggtttcagccaagagtaagactatggctgttaatcagaataatttaccaatgaattctgttttatcttcagcctcaacatttaaaaatgccgttgaaataagatacttaagcaataatgataaaaaaggaatggcgacgcttcaaatagttaataatcaactagaaatgaatcttgaatcggtgtcgcctgcatttcggacggcagtatttgttccggcctcagcaagagggaatagtttaagtgatgctgatttcatcagtcaattagatatggctaatggactagatgaatttgttaaatatctgaaaatgattgatagcaagttaaggggggtatcattattatcattaggtggtcagccaacattgtatgttgacgttggtctaaaaagaaaaatacctatggtacaaatgggtgaagggattagtaaattaacttcaatcctaaccgcaattttatcaaatcaaaatgctgtcattcttatagatgaaattgaaaatggaatccattattcattaatgccgaagatatggaaaataattttctcagcagctacgcgacaaaaaagccaagtttttatcactacccatagtcaagatgttataaacggtgtgtctgagtgttttaaagaaaatcccgatgataaatatgaggatgttttttcatatataagattagataagaatgataatggagaaattattcctaagcattatggcgcagcatctttagttgcttctgttgaacgtgattgggatataagataa

SEQ ID NO: 249590 - DNA, 630 bp, Klebsiella pneumoniae; identical to SEQ ID NO: 175172

SEQ ID NO: 249591 - DNA, 165 bp, Klebsiella pneumoniae
atgaaagataaatattttattttgaaagttgttgcgagtgaggtgaaatgttgcagggcatggaagcacgcaggggaggagccgttgaaggactattttgtctacaaacagattgtcgctttcttgttggtcgtcgcatgctttaccataattatcccttgctga

SEQ ID NO: 249592 - DNA, 582 bp, Klebsiella pneumoniae
atggacatgaacaccgcgttcgatctggaagtcagggagcactgtcctcaggcgcaggtggtctatgacctgttccacgtggtcgcaaagttcggccgcgaggttattgatcgcgtcagggtagaccaggccaaccagctgcgtgataacccgaagtcccggcaggtcatcaaacgcagtcgctggttgttgctgcgcaatcgggaaaatctgccggaagggcatgaggtcagactgtcagagttactggaagctaatcagccgctaaatacggtctatgtgatgaaaaccgtgctgaaagagctgtggtatgcgccgaatgaacaggatgcgggtcagcgctgggctgaatggtacagacaagcacaggaaagcgggataaaggcactgaagcagttcgctgaaaaactcaggggatatgtgagcggaataatagccagcgcgaaacacaggctgaataccagcatactggaagggatgaacaacaagatcaaggtgataaagcgaatggcctatggataccgggataacgactacttcttcctgaaaatcaaagcagcgttccccggtaaagcgcgatga

SEQ ID NO: 249593 - DNA, 333 bp, Klebsiella pneumoniae
atgaccgaaaaaatcgactggctgcccgagcgccagcgatataccgccacgctgtctgcgtgggttgaatcactcgtccggttacttccgattaagcatgtcgccagcctgaccgggctgcactggcataccattaaaaatatcgattaccggaggatgctgcgtgaagttcgcgagccacagcggcataccctgcggcgtctgatgatggatgagttcgccctgtttaaggggcaccgttacgccaccgtcgtggcggatgccgatacgcagcaggtactgtgggtgggagaaggtcgtagcggagccgcctttcgccccttcttcacctaa

SEQ ID NO: 249594 - DNA, 213 bp, Klebsiella pneumoniae
atgacgcggatcgcggttgagctttccttactaacttttgtgcgttccagtgagttacgtttcgcgcgttgggatgagttcgacttcgataaattcctttggcgtatacctgcaaaacgtgaagaacttaagggggtgcggtattcgtttcgtggtatgaagatgaaagaggagcatatcgttccgctcagtcggaagacgatactttgttag

SEQ ID NO: 249595 - DNA, 1257 bp, Klebsiella pneumoniae
atggttaggccaataggtattgatcttttttctggtgcgggtggaatgtccttgggcttcgaaatggcaggctttgatatcgcagcttctgtagaaatagatccgatccattgcgctacgcataaatataatttccccctctgtacaaccatttgcgccagcgttgaaaacttatcgggcgacgatattagacaattagctggtttagatggaaaggaaatagatgttgtattcggtggtgcgccttgccaaggtttttcattaattggtaaaagggctttagatgaccctagaaaccaactagtttcacattttgtgagattggtaaaggagttatctccaaaatattgtgtttttgaaaatgttaaagggttaaccatcggaaaacatgcgaaatttcttagtgaaattatcgaatcgctgaatgacgccggttataacgttctaacgccctataaagttttgaacgcttctaaatttggagtgcctcagagtagagaacgactatttttaattgcggctaagcgcggacaagagttgccttcttatccacaaccattagatcattcagttacagttggggacgcaatatcagatcttcctgatgctgatacattttcagagcttaaaaaacaagactctgttcaagcttcttggacaacaaaatcgaaatatgctcggatacttcgtgggcttgagcaagataaaagtgattatggctatgatcgtgattttgattatagcttattaacgtcaagcttaagaacagaacatacaaagttatctcaagatagatttatgtcaacgccaaatggtgaaacagagccggttagcaggtttagaaagcttgatttgaatggcctctgtaacactttacgggcagggactgatagcgctcgtggtgcatttacctcgcctcgtccaattcatccaacattaccacgagttatcacagtacgtgaggctgcccgtttacactcatatccggattggtttagatttcatagcactaaatggcatggatttaggcaattaggtaatagtgtccctccatatttggctcgggcggttgcttcagtgattatagataaattaaatataaccccaaaaaaaccaaagaaggttctcaaacttggtgatgagtggttattaacagttgatatgaaaactgctgccaaattctttgaagttccagcagatacaatcgctcaaagaactcgaaaagaaaaaaaggaagtagttaatgagcaagagtaa

SEQ ID NO: 249596 - DNA, 798 bp, Klebsiella pneumoniae
atgagcaagagtaataattacctcgctattattgagaggatatttttctcgcattaccaagttggtatgcgtgagtttgagttcaataggacagaaatcgcggctatggctgctgaattggggattgatatccccaaaaacgttggcgatgtaatctattcggttaggtataggattgatcttcctgagaaaatctcaaatacagctgagccgggctacgaatggataataagtggcgttaaaagggctggttataaattccatcaagttagaatgaacagagttgtaccaagagatgatcttgttacgataaaaatacccgatgcaacacctgagattatagagcgttatgctttaagtgatgagcaagcattgttggcaaaagtccgctataacaggctaattgacacattccttggtattacggcatcttcgttacaaaaccacctaaggactactgttaaaggtgttggtcaaattgaaatagacgagatatatgttgcggtagataaatacggtaggcagttcgttatccctgttcaagctaaaggtgggaatgataaacacgctgttgttcagacgaaacaggatattttgtgttgtgctgaaaaatttcctcaattaatttgtaaggctgtttctgctcagtttatggcaaataataaaatcgcaatgtttgagttggttgttcaggatgatgaggtcaagattgttgatgagaaacattacttgcttgtttctgcatctagcataacggatggagatattattcaatatagtaaactagcaaaaccttag

SEQ ID NO: 249597 - DNA, 495 bp, Klebsiella pneumoniae
atgcaagatttcaacgtactgctcgaagcagcatcagattataacgaatttgttggcagcggagcagaagaagaccgcaatgcattacggcattttgaggggcttgccaacgaggcattacctgacgatgtcatcagtaagctctcacaacttccgggttcgtacagcattctggtagctgctgaaatgtggtgccccgactgccataaaaacctgcccgttatccatgccattgccgcgtcagcgccggcaatacgtctgggtattatcacccgcgacaaggctgaagccgtctttaaggcacactttggtgtcgataaagtcaaaattccgtttgccgtggtactggatgagaacgcgactcctctggggcagtttattgaacgacctgaaaatgctaccggcaagaacggagaagtgagcgagatgtacaaaaacggtgagcttctggttgataccgcccgcgaattgacttcaatttttccaggaaaataa

SEQ ID NO: 249598 - DNA, 753 bp, Klebsiella pneumoniae
atgaaaaaattgaaatttaccttcaaaaatgcagaaggtgaggaacttgccgggttgcttgaattgccagaaaatccaaaagcctttgccctgttggcgcactgctttacctgcgggaaggatctgaaaggtgctgcacgcattgccaggaaactgacagaaaattcaattgcggtgcttcgctttgatttcaccgggttaggcaacagcgaaggcgatttttccaataccaatttttcctcgaatatttctgacctgctgtgcgcggtcgattatcttcgtcgggaatacgaggctccttcgctgctgattggtcatagccttggcggttcggcaatcctctctattgcagccaaagtgcctgaagccagagcggtcgtaaccataggttcgccaggcgaattgacgcatgtacagcggttgtttaaagacaatatcgaagatatcaggaaccatggcgctttcccggtagagcttgcaggtcgggtattcacgctaaaaaagcaaatgctggataacattcaggagcataaaatagcggaaaaggtatttaccatgaataagccactgctgatttttcatgctcccaatgatgatactgtgctgattgaacaggcagagaaaatttttaaagccgccagacaccccaaaagctttatttcactgggtgaagcagatcatcttctgacgcatcctcaagatgcggaatatgttgccgggattatcgttgcctggagttctgcttacatttag

SEQ ID NO: 249599 - DNA, 816 bp, Klebsiella pneumoniae
atgactgccggcaaatctaccctgcaaataacggagttcaaaatgagcgattattttaaaggcaaaaaactgcttgtcgtgggtggcaccagcggtatgggtctggaaacggcgcgtatggtgctgaaagccggtggcagcgtggtactgacgggcaataaaaaagacaaggcagaagcggttcagaaagaactgagcccactgggttccgtgtccgtgattgcggcaaacctgatgaccgaagagggcatgaacgccattcgtcaggagattaatgccaatcatcgcgatatcagcctgatggtcaacgcggccgggatattcatgccaaaaggctttaccgagcatttggaagcggattacgacatgtacctgactctgaaccgggcaaccttcttcatcacgcaggacgtggtgaagaacatgctggccgacggccgtgaaggggcgattgtgaacgtgggctccattggggcgcaagccgcactcggcgactcaccggcttccgcgtattccatggccaaagccggcctgcacgcgcttacgcgtaatctggccattgagctggccggtgcgggtatccgcgtgaacgcggtctcgccagggatcgtgcataccccgatttatgagggttttatggcgaaagaagacattgctggcgcaatgcaatcgctgaacgctttccatccgctggggcgtgtcggcacgccggaagatgtggccaataccatcttcttcctgttgtccgacaaagcctcttgggtgacaggcgcaatctgggatgtcgatgccggtatcatggccgttcgcagataa

SEQ ID NO: 249600 - DNA, 702 bp, Klebsiella pneumoniae
atgcaaacccttaagccgattattacgatagatatctggtcagatctggtctgcccctggtgctggattgccaaaaagcgtttcgaacagggccttgccgcctttgaacacaaggaacaggtcgtggtccgccaccacagtttccgtatttccggcgaccggcctgccgtgccgttccgcaaagccctttacaagaagtttggcggggaacatggggcggaactgatgatgaatcaggtgggcacggccgggaagacagaagggctccagtataactttgacaccatgctttttggcgataccgaagatgcccatacgctgctcgcggctgcgcgtcacgccaatatgggcgacgccatggcagaacggttttatcgggccagtgtgactgaggggcgttccattttcgatccgctggagctcattgcgttagctacagaagtgggcatgtccagagccgacgctgtaagtgcccttgccaatgaggccttccgtgcatcggtggccgaagatgaagcccatgcccggtcgatcggggtcagcggggtcccgctgttcctgctcaatgaaaaatatgctatcagcggcgcgcaatctgcggacaacttcctgaacgtgttgaagcaagtctgggaagaaaaagcggctgaactggcaaaaactgacggccagacctgcggcgctgacggttgcagcatctga

SEQ ID NO: 249601 - DNA, 1107 bp, Klebsiella pneumoniae
atgagtaagttgttcaccccctacaatctgtcaggcatgcagttaaaaaaccgcgtggtcatggccccgatgacccgcacccgcacaatgaacgacgtgccggatgacgtcgttgcactttactacgcccagcgcgcctctgcggggctgcttatcaccgaaggcatgcccgtttctgaagaagggcgcggctatctgtataccccggggatctacaacgctgcacacgttcagggctggcgcaaagtgaccgatgcggtacatgcgaagggcggccgtatttttgctcagttgtggcatgtgggccgtatgtctcacgtctctcttcagccaggtcacatagcgccggtttcagcgggcaccgttcaggcggtcaataccaccgtttttgcgctgaccgaatccggagaaccgggcccggttataccaagccagccgcgcgcgctggaaacgcatgaagtgaaacgcatcacggcagacttcgtgcactccgcacgcctggcgatggaggccggttttgacggcgtggaaatcatggcggcgaacggcttcattttcgaccagttcctcagcagtgagctgaaccctcgcactgatgaatacggtggctctgtggaaaaccgtcagcggttcctgctggaaacggttgatgccatctctgcggctattggtagcaataaggtgggcttgcgcatttcaccgttcgggcggatttacgacctggcgccatatgaaggtgaagaagagatttgggccagtatcgcagcggctctcggccagcgtcagctggcttatgtacatctctattatcagcctgtttatacccaggcaccggttcctgccgggttcaaagccgcgttccgtaaaactctggggggcacggttattgccgccggcggcttcacccgcgagattgccgaaacggcacttgaggcagacgaactggatcttgtcgcgtttggcgtgccgtacatcgccaaccctgatctggtcgaaagaatgcagaacggctggccgctggccgaaagcgatcgcacgacgtattacggcgtgacggggtcaccagagaaaggctacaccgattatcccgcctggaaagccaactaa

SEQ ID NO: 249602 - DNA, 564 bp, Klebsiella pneumoniae
atgtccagacatcaccttacagttatcagtacattatgcctggcgttgtcgagtcaggtcgcttttgcagccggttttacgctgacaagtcatgagcttgaaaaaaaccatttccccgtggctcaaaccctgagttcaccttatggatttgggtgcagtggtggaaaccttgccccctcttttaactggagtggtgcgccggcaggaacccaaagcttcgctctcaaaatctatgatcgggatgcgccgacaggcctcggttggatccactggcaggtggttaatataccctcatcgcttcattcgttaccggcggggataacggcggataacaaaaatctcccgcaaggggctcttcagaccaggactgatttcggtatcccgggttatggcggcccttgcccgccgaagggtgaaacgcaccgttatgagatcacgctgacggcacttcgtgtcgacaaacttccgggaataacggcggactcgacgcccgccctggtcggctttatggcaaaagcgaactcactgggcgaagcgcatcttcagattacgcagggccgctaa

SEQ ID NO: 249603 - DNA, 795 bp, Klebsiella pneumoniae
gtgctgcatacgcagcccctgatgatgcgccatatcactatagatgaacccacaatcatcctggtccgccatggcaggaaaataatccgctgggcgcaagaggagataacgctggaagcgggtgacgcggtggtcatcggggaggggcactcttttgatatcatcaatacaccatcacctttaacgggtacgtacgaagcatcatggctgagtttttgtgccgatttcgtccaaaactactgcttcatgcatgccccacgtatgagcatgcacgaagcaaataaaatggcggagccaggcaacagttttcgccaggccttttatcacactgcacaggccattacagatactgaaaacatacctgaaagtatcgtggccaggcgtatggaagagatgctgagttggctggatgaataccgcattttcttcgcgctgaaacaacataccggactggcgataaaaatccgcaaactcgttgcagcagacatatcacaagactggaatactgcgcaggtagcggctgcatttggtatgtcggccaccaccctgagacgccatctgcatgccgaaaatacgtcattcacccatctggtgactgacattcgcatgtgccgcgccctgacacttttgcaggtgaccgatctttcagtcacccgcatatccctggaagtcggctatgaaaatccgtctaagttcgccgccagatttcgaactcgcttcggattcagccccagcctggtccgggtttccggccaggctatcggcaacctggctgcggttagcggccctgcgtaa

SEQ ID NO: 249604 - DNA, 330 bp, Klebsiella pneumoniae
atgcgtgaattagccctttacaatgaagataattttagagaaatcgagaggcatgaaggggttgcggtggtgcgcttctctgccccctggtgcccgccttgccagatgagcgaagacatttttaaccattttgccgagcagactgacagcgacgtcaaagtcggcaaagtgaatgtggatctggcaccggtgctgaccaccaaatatgaaatttgggggctgccgtccgtactgatgttcaaggatgggcagttggtccagcgtataccgggtgttaaatcggcagggttttatcagcaagcattgtcagagctgaaaaaagggcagtaa

SEQ ID NO: 249605 - DNA, 1320 bp, Klebsiella pneumoniae
atgaagggtcttaagttagtggttattggagcgggttcaagctacacacctgaactgatggaaggcattatcaagcgtcaaaatgaatttccgatccgcgagttatggctggttgatattgaggatggccgtgaaaaaatggcgatcattgcgggcctcacccgacggatgctggaaaaaaatgggctggatataccggtttatgaaacccttgaccgcacagaagcactgcccggtgccgattttgtttgttctcagttcagggccggctgcctggaagcacggatcagcgacgaaaggatatcgctgaaatacgacatgatcggtcaggaaaccaatgggctgggtgggtttgccaatgcatgccgcactatcccgattgcattggctatagcgaaagaaatggaacaactgtgcccggatgcctggttgctgaactttaccaacccgtcgggaatggtcactgaagcgatactgaaatacagcaaagtcaaaaccgtagggctgtgcaatgtgcctgttatcatgcaaaaaggtattgccagtgctttaggtgtcagtgacatcaatgaatttatcatgcaggtcgcgggacttaatcacttcatttttgcgcgccatatttttcatgaaggtaaggataagctgcctcaggttattgagctgatttcagaggggaatgatccgttggtgcctaaaaatattcctcctttcaaatggccggatcggttgttggcgaatatgggaatgataccttgcccctacctgcgttattactacatgagcgacgacatgtaccgtcaggagcttggcgaagcacaaggggaagggactcgtggtgagatcgtaaaggagctcgaaagagaactattcgaaatttatcgaaacccggaactcgccgagaaaccgaaagcgctggaaggtcggggagggcagtactattcggatgcggcatgtgaattgatgagcgcaatatataacgacaaacgcatcatcatgcatgtcaatacgcgaaacgatggtgcgattgcgggcctgccggatgactgtgcggttgaggtcagttcaatgatcacccgttcaggacctataccactgaatgtcgaacctttcccggaagatgtacttcgtctgattcaactgatgaaaagctttgagcaattgaccattgaggcagccatcagtggtaatcggtatacggcatggcgcgccttggttattaatcccctggtcaaaagcggtcaactgcttgaaaatgcattggatgaagtgatcgaacataacaaagcgttgatgccggccttccagcgcaataaataa

SEQ ID NO: 249606 - DNA, 903 bp, Klebsiella pneumoniae
atgctcgctcaacagaacatactggcactattgcatacgtttgaaacggcagcactgcatatgagctttactaaggcggcgacagccctcaatctgacgcaaggggccgttagccaacgcattcgttctcttgaatccatgctaggattcagactgtttatcagaatgaccagaaaacttcagttgaccgatgaaggggagcgtttacttggcgtactcgcgttttcacttaaacgcatcagtgatgaaatagaagatattcgcgtgcaggggctgagaggaaccttgtctgtcggccttccacctaccttcgcttttctctggctgatgccgcgcttaccggtatttaccgaacggtggccagggctgaatatcaatttcagagtgagggccggtctggtagattttaatcttgaacgggtagatgtcgctatctactacagtaatctgaaataccccgatctctactgcgaacggttatctgaagagatgctggttcccgtctgtattccatctcttgcaaaaaaaatcaggcaagcaaaccattggttagctgaagtcccgttcattcatacctctgaatccgttgactcccagaatgttttttcagaatggcgagaatggtgcagggagtctggcaaaaacctgcccgttgaagataattttttaagcttcaacaattgtcagatgtcgattgaagcggcactcaatggcggcggtatcatcatgggcagaaaacgactcattcgacattacctcgatgagggccgactggtcgccccttttgaaatagaaatacccgccgggcgaggatatgacctcattatgccacgagaaaaccttaaccgaccgggcgttcaggctttggccgaatgggtaagaaatgtgtttaacgagaaataa

SEQ ID NO: 249607 - DNA, 339 bp, Klebsiella pneumoniae
atgttagactggaacgaataccgctcagaagtgatgcaacgtgttggtgatctgggtaagctgaccccggaaacgctaaaaggcgtcatggctttgggcaacgccggcaataagaccaaccttctgggcgcgaaagtgcgtgaactgattgcactggcttgtgcggtgacgactcgctgtgatggttgcatcgccgtccatgccgaagctgccgttaaagctggcgccacagaagaagaaattgctgaagccctgggtgtggcgatcaacctgaatgcaggcgctgcagttgtctattcagcacgtacgctggatgcgattaagcaactgaaagcgtaa

SEQ ID NO: 249608 - DNA, 570 bp, Klebsiella pneumoniae
atgtcagtcatgacacgagaaaggcttctgaatgaagcggaccatctgatgcgcgaacggggttactctgcattcagctatgctgatttgtcaaagagtattggtatcactaaggccagtattcatcaccacttcccaaccaaagacgttttgggcgaacaagtggtgattcaggcccataccgataccaaaaaccgatttgaacagattgaaaagacggagaatacggttgcgcagatgcttaccgcttacgtggagcttttcatcgagagctatcgcacgtcgcgtatgccgctgtgctgtgctttgtctgcggaaatggccaatctgccaccgaatatcagagttcaggcgaccgaatatttcgatatgcagattgcctggttgaccaaaattgtcagccgtggcgttgatgcaggggaactgactgctgacttgccgccatcaaaaatggcgctgcttattttgaatttatgcgagggcgctagcgttgtttcccgggcgattaataagcctgagcttttcaacgatacgcttgaacagatcctaatgattgttaaaagaaaataa

SEQ ID NO: 249609 - DNA, 558 bp, Klebsiella pneumoniae
atgactgatttaaaaaaaccttttgctgacgctaatgttattcgcggtacacgagaagctattcgccagcatccagaactgggcaatctcacctttaacatgaagagtaaatccaacggtggagtatccgtccgagtggaaactcatgcgactatccagaacggcaaggttgataccagtcgctccggaaaatttgctaatgttggcgatgaacctgctgatttatcgggtacggatagcggtatgggcccagctgaatacattttgcaggcacttgccggttgttataccgcgactctgactgtgatggcggcagaaaagggcattgaacttgatggtattgaacttgacctgaatttcgacattaatctgaacggtttcctgggtcttgacgaaaaagttcgcaacggggcgaaagcgatccgtgttggcgttaagctctccagtccgaccgccagccgtgaacagcttgaagaaatggttcgtgctctcccagaaagctcgccgatccacgataccctggcgaacccggtcagtattgatacccggttggtgtag

SEQ ID NO: 249610 - DNA, 1500 bp, Klebsiella pneumoniae; identical to SEQ ID NO: 195656

SEQ ID NO: 249611 - DNA, 990 bp, Klebsiella pneumoniae; identical to SEQ ID NO: 195655

SEQ ID NO: 249612 - DNA, 954 bp, Klebsiella pneumoniae
atgaaatccgtaacaagatttatgaacacagacccggtgttacgtctccagtgcattatcattattattgtcgcacttgcattctctgcgacccttggttcccgctatttcagtgtagcgaacttccagtcaattggttctcaactacccatgctgggaatgttgacgctggggatgggaattaccatgctgacgggcggtataaatctatctattattgccggcgcaaatgcctgctcattggtaatggcagccattatagtgagtcaccctgctaacccgttatttatcgtgctggcactactggcaggtatagccgtcgctgtggttatcggtgtcctcaatggtgccctggtcgcctgggtgggggtctcccctattctggccacgctgggtaccatgacgctgatttccggcctgaatatcctgctttcagatggcgctgttatttcagggtttccggatgcaatccagttactgggtaatgcaacattccttgggataccggcagcattactgctgtttattggtgtgacggctctgctctggattctgctggaacacaccacacttgggcggagtctttatctgcttggctcgaatgaacaggcgacaagattcagtggagtcaataccgcccgggtgcagttagccgtttatatcatttcagcattacttggctggctggcagccattctgatgatggcaaaatttaattcagcaaaagccggatacggagaatcctatcttctggtcaccattctggcctctgtcctgggaggtattaaccctgacggtggatttggccgtgtcattggtttagtcatggcccttatcgtccttcagatgctggaaagtgggtttaatttgttaggtatcagcagtttcctgaccatggcactctggggtggtgtgctgatcctttccattattttacagaatcgcaaagcctga

SEQ ID NO: 249613 - DNA, 1635 bp, Klebsiella pneumoniae; identical to SEQ ID NO: 195653

SEQ ID NO: 249614 - DNA, 489 bp, Klebsiella pneumoniae
atgttaattatctataaatttatagctattttaaaacagataaaatttatggcgaatatcaccacagaagcggcttcagcattcagacaaaacctcaccagcctggcccggcgtttacgccgggagtcacagaatacgccacatacctggtccaccatgctgctcctcagcgcgattgatcatgccgaagatggcattacccctggtgaacttgcccggagtgaagatttccggacgtctaatctggccaccatgctgaaagggctggaagcgcgcgggctcattgttcgtatcaaggattcagacgatcgccgtcgggtgagggtgtatctgacggagacggcccggcagctactgtcggagaacaggcgtaagcgtgatgagtggttgtttaaagcaatgattgatggcctgaaacaggaagaagtcgatgtgcttctgaaagccggggaaataatgaaaaccatcgcggactcaggcataaaatag

SEQ ID NO: 249615 - DNA, 783 bp, Klebsiella pneumoniae; identical to SEQ ID NO: 195651

SEQ ID NO: 249616 - DNA, 624 bp, Klebsiella pneumoniae; identical to SEQ ID NO: 195650

SEQ ID NO: 249617 - DNA, 561 bp, Klebsiella pneumoniae; identical to SEQ ID NO: 195649

SEQ ID NO: 249618 - DNA, 753 bp, Klebsiella pneumoniae
atgagtaattttgaaggtaaagtcgcgttagtcacaggtggggctcacgggattggtaaaggaattgcaaaacaattcgctgaacgcggagcccatacggttatcgttgactataacgaagagaacggcaagaaaacagctgaagagctgacttttggtaatgtgaaatctttatttgtcaaaacggatgtatcggatcctaaagcactggaaaacgttcgtgaaaaagtgtttgaagcttttggccgtatcgatatcctggttttaaatgcgggtgtggcatttgcgaataaagttaacgatatcacttttgaagagtggaataaaaccattgcgattaacctcacaggtttattcaacaccgtaaaagcgttctacaccgatttcaccaccaaccatggctctatcgtgtatatctcctccggctccgcactttctggtaccggtggcggggtaagttacccggccagtaaagcgggtggtgaaggcctgatccgtggtctggctaaagaactgggtccaaaaggtgtcaacgtcaacgccattgcaccacgtttgattgataccggggaaatgatgcgcgtgaactatccgacccaggccgaccttgatgccgtcctggaaaaaattccggtacgtcggctcgggacgattgatgacgtggcaaacctggctatcttcctggctgataaagacaactcctacattcaggggcaaaccattctgatggatggcggacgtactatcgcttaa

SEQ ID NO: 249619 - DNA, 645 bp, Klebsiella pneumoniae
atggcacagattctaccttcaatttttggcgcagatatcctccgtttgcaggacgaaattaagtttctggaagcggaaaacacagagattctgcatgttgacttaatggacggcacctacgtcagtaatattgcattcggccctaatcagatcgccgcaatgaaaaaagccagttcgatgaagtttgatgttcacatgatgctggcgaatccggaaaggcatgttgatgatgtgattaaaacgggcgcagagatgatttcggtccattatgaatcgacgcctcatgtgcactatattattcagaaaatcaagaaggccgggcgcaaggctggcgttgtactcaatcccgggacacctgaaacagtgctggaatatcttctggatgatattgatttcatcttaattatgaccataaacccaggtcagccgggacagacttttatcgagaaaagtctagagaaaatcagaaatacccgcaagatggttgcagggcgaaatattcttattgaagtagacggcggcgttaacgttgaaattgcaaaaaaggttaaagatgcgggtgctgatttaattgttgtcggcggtgcattatttaacgggtcacccaaagaaagttatcaggcgctaagggccgcacttcagtaa

SEQ ID NO: 249620 - DNA, 1254 bp, Klebsiella pneumoniae
atggaaatgttaaaaggtatcatgtttacaattacaagcatgggcgccacagcaatattgccgcttgttattttccttttaggtctggttttccgtatgaagatcggtgcagccattaagtcgggcatcaccgttggtattggttttattggtttaggcctggttgtgggcttgctgaatacttcccttcacccggcaattgaatattactctaaaattggcagcggattcaccgttgccgatattggatggccagccgttggcgctgctgcatgggtggccccattcgcggcgatggtcattccgattggtattattctgaacctcgttctggttcgcctgaagctgaccaaaaccctgaacgtcgatatctggaactatatgcacttcctggtcccgggggctctggcttacttcgtcttcgacagtttcttcctcggactgggagtggctgtagccctgagtgtggcggcgttgtttattggcgacctgattgcaccaagatggcaaaaatactacggcctggaagggacgacctgtacaacgatgatccatattggctggactttaccgttcgcctgggttgtgaacaagattatcgatttcataccaggtctgaacaaacttgatgtggatttagagagcgttcagaaacggctgggcgtttttggggagcccgccatcattggtgttattgtcggcggcctcctgggtttgttaaccaggcaaccgatcacgactatcgtaccgatggctatgggagtcgccggggttatggttctgctgccaaaagtggttggcgtcctgatggaaggactcaatcctatcgggaaaagtgccaaagagatcatgcaaaagcagatgggcaaagatgcagaactcaatatcgggatggactgtgctctggcgcttggtgacccggcaaccgtaaccgtcactgtcatcactattccactaaccatgctatgcgcactggttttaccggggatacagatcttcccaatcggcgtactgatgtcgatcatctatatgacaaccatgacagttatggtcagtaacggcaacgttgtccgctcaatcatctctactttactgttctgcgtagtggtgatgtatctgggggggtatgtagcgcctggggcaacacagttcctcaatggggcgggtgttggtctgcagggacagggaacagattttgttttaaccggcccgtgggaaattttaacttactggcttagcacagtaactcactga

SEQ ID NO: 249621 - DNA, 294 bp, Klebsiella pneumoniae
atgattactatcctcgtagcctgcggaagcggcgtagcaacctccaccttagccgctgatgaagttaaatcagtttgtgcagaatatggtattgcgaatttcaaaatcaataaatgcagcatgtcagaattagcatccgagatgcaaagtgctgatattgtattaacgaccaataattataaaggcgatattggaaaacctcacatgagcgttgccggttttattaccggcattaatgaggcagcccttcgcaaaaaactgggtgatttgctcaccgaaatttccaaaggctaa

SEQ ID NO: 249622 - DNA, 450 bp, Klebsiella pneumoniae; identical to SEQ ID NO: 195648

SEQ ID NO: 249623 - DNA, 756 bp, Klebsiella pneumoniae
atgtacttggttgatgaaaggcggaaactgatacttgaagagattattgcggccggcaccgtatatgtcagcgatcttgcgaaaaagtatgatgttacctatgaaacaatacgaaaagacctcactcatcttgaacaaagaggactgctaatcaaaagtcatggtggtgcaactctgaaacagggcgccgtcgaacatccattccaggtcagggaaaaagagaacagtacctttaagcaggcgatagccagaaaagccttggaattcatccccagcaatagttccatgatcattggcaccggtagttccaactttgagctggctaatctgttgtgtatgaaatccggtttcaaaatttttacagattccctgccagtagctagcgttctcatcgaatcagataaccaggtatttcttttcggtggggaactaaggaagaaaagttcttcggtgtttggcggttgggctgtatcaatgatcaacgacatcagcgtggacctatgctttattggcacggacggttttcataagatgggcggtccctcaacaccttcatcttctgatgcctttctggacagaaccatcatcgcccggtcggataaaaaatacattctgggtgactatacaaagttccagagaagcagtttgtttaagatttgcgactggtcggacattacagcactcattactaatgaagttgctgataaagacggtatcgcggaagtttcaaagttcacgactgtcataacttgttga

SEQ ID NO: 249624 - DNA, 537 bp, Klebsiella pneumoniae
atgaaaacgaagattgctatcgcaagtgatgacgtggggtttgaacgtaaggaggagatcaaaaaatatctcgtggaagagaaaggcgcacaggttgtgtatgatcctgttaaatgcaaagaggacggtgtgaacaattttgcccgtctggcagacgaaatggcgggggtgatccagcgtgatgaatgccgtctgggcatttacatttgtggtacaggtatagggtttacctgccaggtgaataaacactggggtatccgggctgttgccgtaacgaacccgtattcagcaaaacgagcaagactaagcaacaatgcccaggtgattggacttggctgccgggttaatgacctcgagtacaccaaaatgatagtagacgcatggtttgataatccattcgactttgctacagctagagagaattccaaaaagaacctgctggaggctgaacgcagtgataatgccttactggcaaaaccggatgatgttcgctggaatatggggttcaggcccgatgatgaaacctgtgagggctaa

SEQ ID NO: 249625 - DNA, 1383 bp, Klebsiella pneumoniae
atggaattgatcacacagtttatcaatgatctgggtaattttatattcatcccagtcatcttccttgttctgatgaagttactgggacgtccatggtctgagtgtatatcttcagcgatcaaggttggtatcggttttatcgcattaaccatgactatcatgttgatgctggaaaaaatgcaaccggcagtaaccggacttgccgaagccacagggtcgtcgctaagcgctattgatgtgggaggcgctgccaccgctgtgatgggctttggttccagtatgggggcgattattattccgctgtgcgtggcggtgaacattgccatgctggtcgcacgcctgacggattgcgtgaatgtcgatgtgtttaacttgcaccagaatgcctcaatgggggcaatagttggcgcttattccggcagcttcctttacggtgcgcttactgccgctctgtttcatgtctgggcattgattgctgcggaccttggtgcgcaaaagaatgaacaattcttcaacctgccgaaaggtgtggccatctcgcatccggtcgcgaatacatatcttctgttcgcctacccgtttaactgggtttacgaccgcattccggggttccgtaacctgaacgtgaccgcagaaagcattcagaagcgttttggcatcctcggcgaccctaccatggttggttttatcatcggcatcctgctgggcttctgtgggtatagctgggaatcgccataccatacggtcattgccagccttcagctggggatgtatctcgcggccgttatgctgcttctgccccgtatgacctctattatgatggaaggtctggtaccgttgtccaacgtggcacgtaaaaaactggtcaagcgcttccctgatcgtgagatcactgttggtatggatacggcactcattgttggccatccctcagttatcgcgcccgcactgctgttaatcccggtgatagtgatccttgcagtgatcctgcctggtaatcgtgtgatgccactaggtgacctgtcgcagttcgtcttctttattgcgtgcatggtacctgttttcaacggcaatattatccgtacctgggtgacgtcgatcatcctgtttggtggtgggctgtacattgcctcgtggatggcgccagccactaatgaagtgttccagaaattcggaacaaacccggatgcaagtgtgatgtattcatcattgaatccttcggctaacccattcaccggcctcttcgcagcaatcagccatgtgggtatcgttggctacgtacttgctgctgttctgctgatatcagtgggatacttacttaaacagaaagcacgccgtcagttaaaagcagaagcagaagcagaagcagaaaaagcggtttaa

SEQ ID NO: 249626 - DNA, 285 bp, Klebsiella pneumoniae
atgaaaaagatcttagtcgtatgtggtaacggtatcgcttcatcctccatcatggtatctgtactgcaggactttctgaaagaacagaaactggaagctcaggttgataaatcctcgctgatggcgtgtaccactgatactttcaacggatatgacctgatcgtttcctccaccaaactggataacccgggtatcgcaacacgcgtcattgtcggtgccggcctattgaccggtctgggtgaagatgaaatcttcgatgccgtcaaagaagaaatgctgaagtag

SEQ ID NO: 249627 - DNA, 459 bp, Klebsiella pneumoniae; identical to SEQ ID NO: 195647

SEQ ID NO: 249628 - DNA, 330 bp, Klebsiella pneumoniae; identical to SEQ ID NO: 195646

SEQ ID NO: 249629 - DNA, 966 bp, Klebsiella pneumoniae; identical to SEQ ID NO: 195645

SEQ ID NO: 249630 - DNA, 879 bp, Klebsiella pneumoniae
atggtccgttttaacttactagaaaatgcgttggattcagtggaaaccgggctggactactttaacaaagcgctagaaggtcatgatcgacgtgactacaaacagtgcctgcttaacctctttcaggccgctgagctattgttgaaggccgtagtttcgcgcaatgggtctggagcgatttttaatccagcatcgcttcaggaaaaatgtgtggatccggggcatccaactgagtcagaattacaccagtgtaaatctgtcaacgtcagccagctttgtaagctgttaaagacatattacccagccgaattttctgaatctgcgttacaaatgatgaaaacggtgggtcagttgcgtaataaccttcagcattttgcccttgaggttcgtccgcaagaactggcaatgcaactgagtgaactgtaccaacaaatttttcgtcccgcattcgtcataattcagtcagatgagaccgaaaattcatggaattctgatttacgtcaagacatcatcgctcttgagcaacaattccttgatataactgttaaccaggaatacacccttgcactttgtcccgtttgtgagagtttttcacattttatcctttaccaaggtgaaagctttccgacacggactcactgtatctgttgtggtttcagcctgaataatttgcaaacttgggattttcaggaatgtccggaatgtagtgccccatccgtaatttatttaccggaacaaagggccggtgtctgtctctggtataaatgtgaatacagcaagatggatggttttgttcctatggagccttgtgaatgtggtgcattccggatggaaggtcattgtgtaagcgcacccgttttagttccacgcactttttga

SEQ ID NO: 249631 - DNA, 285 bp, Klebsiella pneumoniae
atgcctacaattctcatcacagctctcccaatagtcgcatttacccgttacctcaacgtgttacttaacgattacgtcagtaaggagaagcctatgagtaaattattccgccatgtagtaatatatgtatcttgtttcattgaaactttttgggctggggtgataagtgtagtagcgggtctgatgacaggcggtgtccaaattattttggcactagctaaatcttctcagtttttgttttttattcaaagcacttacacccataaatattatttaaatcaataa

SEQ ID NO: 249632 - DNA, 780 bp, Klebsiella pneumoniae
atggaatatagattgactgaattcactggtagaattgaagaaataattagaacatctgttagcaatcattctggccacgaatgggacgaggatttcattacacgaaaattgcttatcgatcttagaaatgaattacgtggtatcagtctagtaggtaaagaccaaaaaagaaatattaactggcaagcatacaagcttaaaggtacttatgaaaaaaatttcggagacgtagcattagtagtcaatattagctataaagatggaacatcaattcatggggccgctttcttagaagcaaaaaaaagagactggcgaaaaacaactttcagtgcaataaaaacttctcaagcgaagaaaatacttaaaaatgcaccacgctcacaatatctactttatgattatgaagaaataacaagctttcttaatggatcattatattcagaggatatggaacactaccgttacctaagaggttattgcattccttttactggagtaacaaaaacagtctgtgttcctcttaacttagctgtggcaactggtaataaagacacgcttctctatcgccatgggttacctctatctatgatgctatcaagccgatatttccaaggattagatttagagtttgatgaaacttcaaaaaatattgcgactggttttctgaaaagttttggccttcctaaatttgttgtaaagattgacatatttgaaaatgatacagaggctgtagatcaaggccttagtataaatcaatctgagtatgttcaatttgactaa

SEQ ID NO: 249633 - DNA, 1029 bp, Klebsiella pneumoniae
ttgactgaagtagaaataaaatatggctttccgcttttctcaaaaccttcctcattggtaaccctggggaaaaatgagaagatcgtaatatcagatgtctgggcattctgggactatgttataaagaaggcgagcaatgaacgtaaaggagaggattttttaaggtctcttctcgaacaagcaaaacacttttatataacagcagaagctagtccagtgaaaagccaacctctcctttattactattcatttctaaatttatctaaaataataataaatctttcgggtgcgcatgggcctaggaaaatgtacatgcacggaatgaaggaggatcataataataagttttcgcagtcaacaatcacaaaacaaaaacaaaaagttaatatcgtacaagttgcgcatgaaatcgtatcgatatttgatcctaatatagccaccactgatataaccataaatgttaaagaacttctaaatcattgcgtgggagtccatagagcctattctgaaatctataatcagaccgaggtcttttacaagatagcgaactacaaattatataaaaaaggaaaagagctaatttttaaggcagaagtccaatgttctgataccgacatgacaagtctctcagcaaaagggtactcgatagtagaagatgaagatggggtgttctattacacttgcaaaataacaatgcccacttatacgccaacaagaaaagactatgctgaattaagcaaggaaatacagagaaaaggcatttggtactttattggcaatagcggatatacaatgtacttatcaaattcatcaattggccgttacagccaagagtccataatatatatggtaatgttctacttgggctcgataacgcgttatcatccatacatgtttgacgaaatattctctgacaaagagcagtggcttatgagtgaattcttaaacactcagcctaaacaatttttatatttggcaaccgctagaattctcggtcaaagtgtcttaaaagcgtatgcaagcttctag

SEQ ID NO: 249634 - DNA, 1326 bp, Klebsiella pneumoniae
atgaaccattatcaggcagcaattatcggatttggaaaagcgggcaaaacgctggccgcagctctggggcgtgccggctggcgcgtagcgatcattgaaaaatcaaaagagatgtacggcggcacctgtattaacgttggctgtattcccaccaaggcgctggtgcatgatgtgcaaactactgctgacttcagtgaggcaatgcaacgcaaggcctctgtagtggaatttttacgtgagaaaaattatctgaacctggctaatatcgcgcaggtcgaggtgattgatggtcatgcggagttcactgaccctcacacgctgaaaatcacgactgatcaagggctcagtcagctcagagccgatcgcattttcattaataccggcgccgaagctgttttcccacagattgaaggcttaataccaggaccacgcattgtcgacagcacaggcatcctgaatttatccagcctgccaaaacggctggccattctcggtggaggctatattggcgtcgagttcgcttctatgtttgccagctttggcagtgaagtcactttatttgagacttcatcacaatttctggcgcgtgaagatgctgatgtcagtgtggccataaaaaacgtactgcagggccagggcataaaaattgagctgaacaccacggtgcagtcggtttccagtggccacgacagcgttacgctccacatgggccatggcgattgtcaggccgatgtattgttggtggcaaccgggcgccacccggcgacgcagtcactgaagctggaaaacgctgatgtaaccacgaatgcgcgcggtgccattcaggtgaataagtatctgaaaacgtcagcggatcacatctgggctatgggggatgtcaccggcggcccgcagtttacctatatatcgctggatgattttcgcattgtgcatgatcatctgctggggaaaggaacccgaaccacagatgatcgcgttaatatcccttattccgtatttatgacacctacgctgtcgcgcatcggacttacggaagcgcaggcccgtgaacagggcaggaattttcaggtggtgtcattgcccgtggcagccattccacgtgctcgcgtcattaacgacacacgaggcatcctcaaggcgctggtagacaatgacagcaagaaaattcttggcgtggcgctgctggcagcagactctcatgaggtaatcaatattgtgaaaactgtgatggatgcgggcttgccgtacacagtactgcgggatcaaatcttcactcacccgaccatgagtgaatcgttaaacgatttgtttgcattaataaaataa

SEQ ID NO: 249635 - DNA, 1023 bp, Klebsiella pneumoniae
atgaaatccagactgagtgtcagtgcattattattagcaacccaagtcactgctgcatgggccgggccgactcaaaataaaccggagcccactgccggagtagcatcatttctcaaggtgctgaacagcagcggcggaaaaccaatggaacagttaactccgcaagaagcgcgtaatgtactggtttctgcccaaaaaggcgtggaacttcctccggcacatgtatcagaaaaaaccattactgtactgggtaaaccgctgaagctgacagtcgttaaacctcaaaacgcaccggaggagacgctgcctgctttcatgtttttccatggaggcggctgggtgttgggtgatttcccgacacatgagcgtctggtgcgggatattgtaaacgcatcgggggcggttgccgttttcgtgaattacgatccgtcgcctgaatctcattatcccgttgcagttacacaggcttatgaagccacaaaatgggttgctgaacacggagcggaaataggcgtggacggaaagcgcctggcgctggtaggaaacagtgtaggcggaaacatggttgcagccgtagcgctccaggcaaaacagtttaaaacacccgctattcgttacgatgtaatgctctggcctgttacggatgcgcattttaatacagcttcatataatgaattcgccgacggctattttcttacccagaatatgatgaaatggttctgggataattataccacttccgagaaagaccgaaataatattctggcttcccctttacgggcaaccactgaccagcttaaggggctgccgccgacccttattcagacggcggagctggacgtgctgcgtgacgaaggtgaagctttcggccgcaaactcgatgaggctggcgtgccggtcactgtcacgcgttataacggtttgatccatgactatggcctgttaaatgcactgagcaatgagcctgcggtaagaacagcaatcaaccaggcgtcttcccagctcagaactcatttacagtaa

SEQ ID NO: 249636 - DNA, 543 bp, Klebsiella pneumoniae
atgaatcgtttatattcagccccagaaagcgaggcaagtggcaaagccgcagcgctttttaaaagcatcagacaggcagtgggtaaggttcctaacgcgtatcttaccatcggcagcaatgcgcccgattttctagagcagaatctacagtttaatgcggttctggaaaaaagcagtcttaccgcgcgcgaacgtgaagccattaacctcgctgtcagtgaagaaagcggctgtgagtactgtcttgccgcgcataccccactcgcaataaaagcaggttacagcgaagcgcagacgctcgagttacgacagggttttctggtggacgacgctcgcatcgatgcactggtaaaatttgtgcagttgctcgtttcaacacgcggaacgttatcggcacatcatttcagtgcattaaaagatgccggatttacagacccgcaggttgtggaaactatcggggttgttaccgcgattttattcaccaacatgattaatcgcgtgaatgacactgaaatagatttcgctcccgccagagcaatttaa

SEQ ID NO: 249637 - DNA, 810 bp, Klebsiella pneumoniae
atgagtaaatcttcaaaaggaacggctgttgtaacgggtgcatcaactggtatgggggctatttatgcagcccgtctggccagaatgggttatgacctgatgattgtagcccgcaatcataaccggcttaatcagatggccagtcacattaccgctgacaccgagcgcaatgtcgaagtcgtggctgcagatctgaacgattcacaacaactggccggtcttgaagagaaattacgaaatgacgccagcataacgctgctggtcaataacgcaggcgtaggcacccacacttctcttgtagacagtaatgttgagcaaatgaccacgatgattaatctcaacgtaaccgctctcacccgactgacttatgccgtcgttcccggatttatcaaccggggaaaaggggcaatcatcaatattgcctctattgtcggtatagcacctgaaatcctgaacggcgtttacggcggcagcaaagcctatgtgctggcatttacccagtctttacaccgcgagttagctgataaaggtattcaggttcaggcagtgctgcccagcgctactgcaacaccattctgggaaaacggcggcctgccgttaagccagcttgacccgggtattgtcatgcaggcggaagatatggttgatgcagcgcttgccggtttccggctcggtgagctgatgacgattccttccctgcatgacgaaagccgtctgcaaagctgggaacaggcgcgtcaggcaattattgaagacttttcccataacgtgcccgcggctcgttatcagtcttcctcttcacagatttaa

SEQ ID NO: 249638 - DNA, 951 bp, Klebsiella pneumoniae
atgcaccgggtagggcttatcattgccgagcagttccagtcccttgcgttatcaacattaacggtttttgagtttgccaatctggtgctgggcgaaactttttacagttgcacggtttattcagagtctggcggagagataaattcctcttatggattaagcataatcagcagaaagctcactgacgaagcggcagctgatacatggctggttggtggcgtgcttatgccaacgaaactgcccgcaacagatggcgttatagattttttacaaaaccgggcctgtcatgcgcgtcgcattgcaggcatctgtaccggggcttttgttcttgcccaggcgggattgctgagtgaaaaacgagctactactcactgggcacacgcgcacagcatgaaggttctgcatccggcggtcaggacagaggatgatttgatatacatcattgatgaccgtatctggacctcagctggaatgacagctggattagatatggtgctggctatggttgaaaaggaccatggaacagaagtggcccgtaatatcgcgcatcgtatggtaatgaatcagcgccgttcaggtggccagcgtcagcattctgaactgcttgcattgtcgcctaaaagcgaccgcttacagatggcgctggaatatgtgcggcaaaatctcagtaaaacgttgtctgttgaacatgttgctgatgcggtacatgtaagtactcgtcagcttaatcgactatttctgaatgagatgggtaaatctcccgcccgggtaattgagcggttgcggctggaagccgcgagattgatgattgaacagagtcgactttcgctggacgtggttgcaagggaatcagggttcagagatcgccgccatatgcgtgatgtttttatgcgtgggtatggtatccccccacagtcattacgtacaggaaagaacatggcaccgtcctga

SEQ ID NO: 249639 - DNA, 1203 bp, Klebsiella pneumoniae
atgaacgctgtcatcacatcttcccagcgtcgcgccctgcgcgcgctgagcatcgcatactttatacaggctaccggtgcgctgtctgtcgccggcagcctgccggctatctctgctgcctggttgctgactgatgcgcagagtgcacgcttactgagtattttcggcctgacctttgcactggctgcccccttggttcaggtgctgtttggtcacctgcgtcgccgccagctggtgcttacgggcatcgggttatttggtctgggtgccttcgcttttgcgttgtctccgacctacagcgcgctggttacctcccgtttaatgatgggcatcggcgcaggcttcatcggcccggtactggttgcgctgggttctgagctggtacatgaacagcagcgcgggcgggctatcggcatggtacttctcggcgtatccatggcgagccttgccggcataccactcgccgcgtgggttgccagcttgtggggagcgaaagcattgtttgcgctggtcggcgttgtgagcctgctgagcggtctgaacgtcctgctgacggtaccggatgaaagtgcggggacgcgtatccggctcagtgagatggctggcgtgctgtttgagggaaaatacctgacggcgttcctggttgtgttttttattacctccggagtttactgcttttactcttttatcgctccgctcatccgtgatacctacgccggcggcacgcatgcaatctccgcggcgctggcggtgttgggtgttgccggagtactgggaaatctctgggtcacccgcgcatcgacacgctttaggtctgaaacactgctgctgacgggcatgacactgctgatagtggatatggcgctgattgccctgttgccgaaagcgctgggagtgctgctgacggcactcgttttctgggccttttccactgatctgctctggcccagtcagcagcgcaggatcgttgaactgtcgtcagtccggcaccgcggcattgcgctggcgctgaccagtgcctttatgtttggagggattggatttggctcagcggcggcttcttgggtttatccggtagcaggattttatgggcttgctggtatgtctgtggtctttattgtgctggcgctggtcagcctgcagctgtcagaaaagttcagaaaatccgttaaaattgctcagccctgtaagaatgaagcctga

SEQ ID NO: 249640 - DNA, 762 bp, Klebsiella pneumoniae
atgatactgacccataacaccatcttcatcaccggcggcacctctggcatcggacgtgcaatggcagaaaaatttcatcagctgggcaaccaggtgatcatctccgggcgccgcgaagcgttgctgaaggaggtaaccgctgctagcccgggtatggattatgtggtgctggacgtgacgcgcgccgacagtatcaaggccgccgcacagagcgtgctggaacgctatccggcgctgaacgtggtcatcaataacgccggtatcatgccgtttgacaatgcggcgggcgagctggatgacgcacaggcggttacgctgctgaacaccaatattctgggcccggtgcgcgtcagcgcagcgtttattgagcacctcaagcaacagccagatgcggtgctgatcaacaacagttcggtgctggctttcctgccgctggccaccaacgcgctttactcagccaccaaagccgcgatccactcctacaccctgtcacagcgcttcctgctgcgcgatacaggtgtgcaggtcattgaaatttctccgccatgggtagatacggatttgatttacaagagtggcgacccgcgcgccatgccactggatgagttcatcagcgagacgtttgacaagctgggcacgaacaccattgaagctatcgttgatcgcgtgctgcctattcgtaataacccgggcgcagacgagcatactctggtgaaccagttcaatcagtccgtggcggataacccaatccctgttcagtaa

SEQ ID NO: 249641 - DNA, 816 bp, Klebsiella pneumoniae
atgacgcagcagacacacaccgaccgcggcaccgcagttgtgaccggcgcttctattggcatgggcgcactgtatgccggccgactggcacgcatgggctatgacctcatcattgtggcgcgtaatcacaaccgactgaaccagctggctgaacacatcaccaccgacagtggacgtagcgtggaagtcgttgtagcggacctggccgatgccgctcaactgagcaagctggaagaaaagctgcgtcaggacgcgagcgtcacgctgctggtcaataacgccggtatcggcacgcacaccccgctgctacagagcggtgccgacgagatgacggccatgattaatctcaacgtcaccgctctgacccgcctgacctacgcggtagtgcctggcatggttgcacggggacgcggggccatcatcaacatcgcctctatcgtcagcattgcccctgagctgttaaacggcgtctacggcggcagtaaggcttacgtactggcgttcagtcagtcacttcaccacgagctggccggtaagggcattcaggtgcaggccgtactgcccggcgccaccgccacgccgttctgggacaacggaggtctgccgttggaccagctcgatccaaacatcgtcatgagcgcgccggacatggtagatgcggccctcaccggatttgaccgcggcgagctcattactatcccgtccctgcaggatgagacgctctggacccgctacgaacaggcgcgtcaggccatgatgccgcacctgggaagcgacgcgccagctgaacgctatcagcccgtatccgtacactga

SEQ ID NO: 249642 - DNA, 510 bp, Klebsiella pneumoniae
gtggcgggtatctgtaccggggctttcgtgctgggacaggccggtctgttatctgagcggcgcgccactacgcactgggtacacgcgcagagtctgaagaccctgccccccaccacgcgcgttgaagaagaccgcatctttattattgatgaccacgtctggacgtctgcgggactcaccgccggactcgatatggcgctgggcatggtagagaaagacctcggtgcgggggtggcccgctccgtggcacacctgctggtcatgcatcatcgccactccggcgggcagacgcagcactccgaaatgctgatgctctccccacgtagcgaccgcctgcagtcagctcttgaatatgagcgtaataacctcagcaaagcgctgaccattgaagacattgcggatgcggtccacgtcagtgcccggcaactcagccgcctgttctgttctgaaacgggcaaatctcctgccaaagccattgaggggctgcggctggaaaatgccgactgctga

SEQ ID NO: 249643 - DNA, 630 bp, Klebsiella pneumoniae
atgaccacccgtcgtctacagatcgcctcacgcaagcaacccaaacaggcgcgttcggccgcactggtcgccgccatcctggaagctgccacccaggtcctttccgaggaaggcgctgctcgattcacttcggcgcgcgttgccgagaaggctggcgtcagcgtcgggtcgatctatcagtatttccccaacaaggcgtcgatcctgtttcgtctgcaggtagatgagtggatgcaaacgacccggatgctgcgcaacatcctagaagacgccagtacaccacccctggagcgcctgcgtacgcttgtgcatgcgttccttcattcggaatgcgaagaagccgagattcgcggtgcgctcaatgatgctgctccgctttatcgtgacagcccggaagtgcaaaaggcccaagcagaaggagatcggatgatcgacaccttcattgccgaagtgctgccgatggcatctgcctcttcccgcgaacaggctggcgacctgatcatgacgacgcttagtacagtgggcaatgagttttcccgtactcggcggacgaaggcggaaatcaaagcctatgccgacgagatggccgacatgttttgcgcctacctcaagacgttaggacaagtttaa

SEQ ID NO: 249644 - DNA, 777 bp, Klebsiella pneumoniae
atgcgaattttcaacacgaatattccgtcatattatccaaaaagcgaacagttaatcgcatttaaggcgctccagcacaacggcgcttccttcaccaacctagtagtggacaataccatgacttcagcacttattaatgcgccattggcgcccttgttggatcgcctgttcgagcaggctgatcgcgccactagctcagcagtggctggcatccctctcgaggaacgcgagcggctgatgagtagcaagactgagtacctcgacttctatagccgcgccaaggacctgtggctgccggtttcgcgtgaaaccggagtgctgctgtaccaactggcacggagcacgaatgcgcgcaacatcgtcgagttcggcacctcgtttggactctcgaccctgtacctggcggcagcgctgcgcgacaacggcggtggtcgcctgatcggcagcgagttcgagccgtcaaagattgccaaggctcaccagcatcttgtcgaaggcggcgtcgatgacctggtcgaaattcgtgaaggcgatgcactgaaaacactggccacagatcttcccgattccatcgacctgctactgctcgatggtgccaagtcgatctattgcgaagtcctcgatttggtcgagcaccgcctgcgggccggcgcactgattgtcgccgataactccgactacagcccggattacctcgcgcgcgtgcgcaacccggaaaacggctacctgtccgtgccgttcggcgaagatgtggaactgtcgatccggctggcctga

SEQ ID NO: 249645 - DNA, 867 bp, Klebsiella pneumoniae
atgcatatatttgtcactggtgccacaggttgggttggctctgccgtggtggaggatctgctcgctgctggccaccaggtcacgggcctagtccgttccgccgccaaggcagctccgcttgccgcggcgggcgcaaaaatcgttcaggcctcgctggatgatctggatacattgcgttccgtcgcttcgacggtggaagccgtaatccacacagcgtttaaccatgatttctccaggtttatcgaaaacgtggagcaggaccgccgcgcgatcgagacactgggcgctgcgctggaaggttcgaaccggcctctgctcgtcacttcgggcctgtcgggactgccacgtggtgccactgaagccgaccagcccaatccggcgtccccccgcaagtccgaggaagccgcacgggccgcggcgtcgcgcggggtgcgcacagcaacggtccgtcttgccccttcagttcatggattgggcgatcacggcttcgtgcccatcctcattcgcacggcgcagcagaaaggtgtatcggcctatctcggtaaaggcgaaaactgctgggccggcgtgtaccggcgggacgctgcgcgcgtctatcgccttgcgttggagcaaggtgttaccgaatcggtctatcacgcggtcgcggacgaggcggtcccatttaaggcgatcgccgaagtgattggcagccgcctgggtctgccggtcgagtcgtgcgactacgagcacttcggctggttcaccaatatggccggtgcagatatgtccgtgtcgagcgcccgcacgcgagaactgctcggctggaagcccgaaggacctagcctcctcaccgatctggatcagcccggttactacgccggttga

SEQ ID NO: 249646 - DNA, 1182 bp, Klebsiella pneumoniae
atgtctcaagataatctcctgatggcatcaccgcctggtgccaacgttttcttgaagctgctacccctaacgctggcagtctttatcgggttcctgaccattggaattcagatgccgatcctgccgctgtacctgcacgaaactctcggcatgggtacgctggtgatcggcttggtcatcggcctacaattcgtcgtggcattgttatcccgcccctgggccggcaacttcgccgacctgcgtggcaccaagcgagcggtggtcattggctgcctgctcgcagccagttccggcttggtctatctagtatcgctggcctttgtcgccacaccgaacacctcggtatggatcgtggttctgggccgcatcctgctggccttgggtgaaagtctgattgccacgggcgcactgggctggtcgcttggacttgtcgggtcgcagaatgcaggtaaggtgatggtctgggtcggcattgccatctacggtgcctatgcgctgggagcgcccctcggcgtcgcggtaaataaccaatggggattcgccggtattgccgctgccgtggcagctatttcatttctggccttggccgtagttgtaaatgtacacgccatcgcacttacggcaaccaagcgcacaccgttttacacggtgctgggtgccgtgttgtggcccggcatgggcctggcgctgtctagtgtcggattcggactgatcacggccttcatcgcgcttctgttcgctgccaagcagtggggaaactcttcattggtgtttaccgcgtttggactggttttcatcggcgcacgcattttttttgggcatctgcctgacaagctgggtggtgcgaaagtggtaatggtaagcgttgccattgaagcggtaggactattgttcatatggggtgcaggttccgcgccactcgcctacataggcgcggccctgactggtttcggctactcgttggcctacccaggtttcggagtggaggctgtgcggcgtgctcctccgcagagccgcagcttggcgatgggggcctacgtggcattcatggatattgcgttgggcttgacaactcctatggctggcgcactggctggtgcaaaggggattagttcgatctatctggcgggcaccatcaccgtcgcgctggcgctggtcattgccttgcggctgctttcttaa

SEQ ID NO: 249647 - DNA, 648 bp, Klebsiella pneumoniae
atgggggttatcactggtgatttgtatcggtctagcaccgattacgaacgaggggtttcttacattggtttgatggaagttatgttagaaaaaataataaaaaacaataggttaagggtttctgatgttgatttttttcgaggggattcatttcagataaccagcaaagatcctattaatttattaagtattgctgtttatattagagcttatttaagatcatatagtgagaaaaacgacgataaagggatgtatgatgctcgattggcgatatccatagataaagttaataagtatagaagggatgttaactcaatatttgaatcagcccagataaaatcagggcgaagtttagatctcattgaaaataatgaaatgatggtcttcgactcatcactttatgatttaaaagaaatatactctccatctgttattcttctcgatgcattgctttcaatgttatccaaacctcaatcagaaatcctgagggagattgtatatgatagggatgcaagcatttctgaaatagcagaaaaactgggaaagagtaaacaggttgtttataaaaccataaaaagaggctcggttgacaagatagttaagttcttggatgctcatctttcactagttggaataagatttttttaa

SEQ ID NO: 249648 - DNA, 999 bp, Klebsiella pneumoniae
atggggcacggtgtaattgttctatttttgttgttgctgttggttcatataatttttgacttttatttgcaaactgaggtgatggttagagaaaagtcattcgataatggctttgttagggctttaaaggctcatttgtttcatgctgctatgcatgggttttttttatgtctgtcttgtttcgtttttacatatggatttcttagttgtactaatctattaaaccttaagttatttgtttttttgcttattttatttacactttgccattttttaacagatgtcattaagtctcttatttctttgaaaataaagggtttttactctttttttattttcttgattgatcaggtttttcatattttaactatattttttgttatttgttatttctttagtgattatggggtatacatatatgattttgattttgtaaaatatattggcgggatactggtatttgcttgcgctatagcatttttactaaagccttcatctattatagtttacttattctttaaatcatcaggtattggtgatggttcagagaatgttaaaataactaaaagtaaaatagcagagttgctttacgctgtattgcataaagatttaggtgattcaaatattacagattacaaattggtagtaagtaaatataaggaaaaagcagaaaaaattgtaagcggtatttctaatggacaagctgatattaacattagttctatttccaaagttaataatgctggtagatttataggttaccttgaaagattgataatttttttgttcttgattttaggctcggttactgcggttgtcgcggtgttagcaatgaaaaccgccctgagatttagtgatttaaaagatgataatgatagtgggaaagctgaatatataatgattggtacattttttagtcttattataacagtgataatatctatgttagctagaatgtacttgattgagattggtataaaaatcaatgattttagttag

SEQ ID NO: 249649 - DNA, 2481 bp, Klebsiella pneumoniae
gtgattcggattcggacagtgactcggatgctgacagcgattctgactcggacagcgactctgactccgacagtgattcggactctgacagcgattccgattcggacagcgactccgactccgactctgacagtgactcggactccgacagcgactcggattctgactccgactctgattccgactctgacagtgactcggactccgacagcgactcggattctgactccgactctgattccgacagtgattcggattcggacagtgactcggatgctgacagcgactccgactcggacagcgattccgacagcgactcggactctgacagcgactccgactccgacagtgactctgactccgacagcgattcggattcggacagcgattctgactctgacagcgactccgattccgacagtgattcggactctgacagcgactctgactcggacagcgactctgactcggacagcgactcggattcggacagtgactcggattcggacagtgactcggatgctgacagcgactccgactcggacagcgattccgacagcgactctgactctgacagcgactcggattccgacagcgactccgactcggacagcgattctgactctgacagcgattcggattctgacagcgactccgactccgacagcgactcggattctgacagcgactcggatgctgacagcgactcggattctgacagtgattccgattcggacagtgattcggatgctgacagcgactccgattctgactccgactctgattccgacagcgattcggactccgacagcgattcggattccgacagcgactcggactccgacagcgattcggattccgacagcgactcggattcggacagtgattccgactccgacagcgactcggattctgacagcgattctgactctgacagtgattccgactctgacagtgactcggattctgacagcgattcggactctgacagcgattccgattccgacagtgattcggactccgacagtgattcggactccgacagcgattccgattccgacagtgattcggactctgacagcgattcggactccgacagtgattcggattcggactccgactccgactctgacagcgattcggattccgacagtgactccgactccgacagcgactcggattctgacagcgattcggactctgacagcgactcggattctgacagtgactccgattcggacagcgattccgacagcgactcggactccgacagcgactcggattctgactccgactctgattccgacagcgactcggactccgacagcgactctgactctgacagcgactcggactccgacagtgattcggactctgacagcgactcggattccgacagcgactcggactctgacagcgactcggactccgacagcgactccgactccgacagcgactcggactccgacagcgattccgactctgacagtgactccgactccgacagcgattcggacagtgactccgattcggacagcgattccgacagcgactcggactccgacagcgactcggattctgactccgactctgattccgacagcgactcggactccgacagcgactctgactctgacagcgactcggactccgacagtgattcggactctgacagcgactcggattccgacagcgactcggactctgacagcgactcggactccgacagcgactccgactccgacagcgactcggactccgacagcgattccgactctgacagtgactccgactccgacagcgattcggactcggacagcgactcggactctgacagtgattccgactctgacagcgactcggattctgacagcgactcggatgctgacagcgattcggactctgacagtgactccgattcggacagcgactctgactccgacagcgactcggactctgacagtgattccgactctgacagcgattcggattccgacagcgattcggactctgacagtgactccgattcggacagcgactctgactctgacagcgactcggactctgactccgattctgacagcgactccgattccgacagtgactcggactccgacagtgactcggactccgacagcgactcggattctgacagcgattccgactctgactcggacagcgactcggattctgacagcgattcggactccgacagtgattcggattctgacagcgattccgactccgacagtgattcggattctgacagcgattccgactccgacagtgattcggattctgacagcgattccgactccgacagtgactccgactctgacagcgactccgattcggacagcgactctgacagcgactctgacagcgattcggattccgacagcgactctgactccgattccgattcggataccgaaccgcaggcaaataatgatacccatacggcggctatcgataccgtag

SEQ ID NO: 249650 - DNA, 249 bp, Klebsiella pneumoniae
atggatgaagaaatgatgttttcgctcagctatgagcagatgacgcagatggcagaggaggaaataaagcaatgcgattttcacagggttggaacccattatgtctgggaagtgaacaaggctcatgacatcctccgtttctggtatctcctggcgctgcgcggacacacgggcctggccacaacacgggtcgaagcagactataaacggctaaaaacgctcatatccgagagggatgaggggcaatga

SEQ ID NO: 249651 - DNA, 1032 bp, Klebsiella pneumoniae
gtgtattatttattcgtgataatgatccttgcacatttgattgcagatttttatttgcagacaaatgatatggttaagggaaaatcttttaaaaatgggtgggcgaaagaatttttgttgagtcattttaaacatggtgcgattcattatttactttgggggattgctggatttttgtttttatacacaacaagagcagattatcaaccaaagatatataatatattgaaggttggattggttgtcgttgcgttacatatgttgattgatgtggcgaaggaatgggtattagtaaaaaaaggtataaataattttctgtgctttttattagaccaggttatgcatgtattgataataattttaggggtcattgtacttagtaagtattgtgggttcgtagttacacctaaacaacttaatactataactcctattctttatgctctaacaattcttgttggagcaatgttactattaaagcctgcatccataatggtaatgctatttcttgatctttcaatgagtgatggcgctgtaaaaaaaataaatatcacaagaagtcatttggcaaaaatatttgatgagaaatttagcttagaaataggaagcttagttaataaggtcgggttaaacgaggccgacattgaagttaaaatgaatttgtttaaagagaatacagataagattgctaaaaaactcgttgataataaggagtatttaaaagttgatgtttcaggaatcttcccgactaataatgcagggaagtggataggttatattgaaagacttatgatatatattttttatctttgtggacaatacacagctatagctgccgtaatggccataaaaaccgctttcagattcaatgacttgaaggatgataatgatagtcaacgttctgaatatataatgctagggactttttttagtttgtttgtcactattgtaattgctgtgtgtgtaaaacatttcatggatgttaacagttttaaggaaataattataatatttaagaagacatttatgtaa

SEQ ID NO: 249652 - DNA, 669 bp, Klebsiella pneumoniae
gtggaaaacagatatctgggggtgattactggtgatctatacaggtcaactgcaggcttagagagggggatttcttatcaaaacattatgagtttgcttcgaaaaaaaatattacaatcaaaacgatacgatattgaaggtatcgaattttttcgtggagactcatttcaaatatcatgcaatgacccagcatatttaattgaaattgcggcttatttgagaagttttttgttgtcactttctgaggacattgatgacaataaatatgatgctagaatgtctttgaatataacgaagtttaaccgtttttctggttataatagttctgtatatgaaaaggcttttattgaatctggtagggcattagatgatatgccaaaaaacagaatgctaatattttcgtccgatattcaattgctgacaatatcattgaatagttctgttttattacttgataccttgtttagtatgttatcaaaacagcaggcagagattttaaaactcagcatagagaatggacgtttagatatgccttacttagtgcatgaaacgaaaaaggctaggcagacaatacataaactagtaacgcggtcaggtgttgaaaatattttagagtatcttaggctaagtcagcaagagatctcatatcatataaaagggagcatataa

SEQ ID NO: 249653 - DNA, 204 bp, Klebsiella pneumoniae
atgacagacaaaaaaagatttatccgtttacctgaagtgctggaaagaactggtttctctaaggcgtggatttaccgacttataacccagaatcgatttcctaaaccgataaagactggagagcgtgccattgcgtttttggagaatgaaatagacgattggattgaacaggtgatccaatcgtcccgtaatgaagccgcgtaa

SEQ ID NO: 249654 - DNA, 288 bp, Klebsiella pneumoniae
atgcgtaaacctttgttggctttatcactcatcatgctgttatcagggtgtggagatgatgggatctacggcaactatgttaatccacagtatggcgtcaggcttgatattcataaagatgaaatcaagttcaaaaatggtgtatttgctgttaagagctgggacgaaagtcaaaagccaacttatatcgcaaaaacacaaaataaaaccctcggttcttggtcatttaagattgagaaggtagatggcggggttatctatcaaggtgttaagtttgaaaaggactaa

SEQ ID NO: 249655 - DNA, 282 bp, Klebsiella pneumoniae
atgactaataaaacgatccaatgccctttttgccacaatgatcgcatcgttcgaggtatggggacatgcacgcagtgctttgcctcaatagggtatggcattgtgccaatgtgggccttgtcgattgttatgatcattggctccgttgcggggatagctacgtttgcaatctcaaacgcaaacccgatcgccacgttcgcagtgttcctccccatcgttttagggggcgggttcgcattgaaagcggtctacagtgatcgggtagtgtttagccgtcgctaa

SEQ ID NO: 249656 - DNA, 306 bp, Klebsiella pneumoniae
gtggcattacctaaatcatttaaagactttgatagatatgagcactattattttatggcattttgtcgcgtatgtgatagagacagaaagcacagaatagctgtatcttttgatgacgttgatcaacgtgaatacatcacgcgcaaatgtagttgcggtagttctcgtaagatttgtgagttaaaagagtttaacgaggattggctcaggattattaagtatgaaaacccaagagaaaaagaatatgacaaagatgataaccgtttcgatcttctttatgttttagaaagatacttttttctatga

SEQ ID NO: 249657 - DNA, 198 bp, Klebsiella pneumoniae
atggctgatgctatgggtgccgggctaggcatgttatcgggggcttgttttatctggagcattatatatctttgccgtcttattgatagcgccatcagcggcgcttcaaaaggtgtagacgaggcaaaagaaaaaatgaaacagcatagaaaaaaagccctcaaaaaaatgggatggatgtcttcagatgataaataa

SEQ ID NO: 249658 - DNA, 375 bp, Klebsiella pneumoniae
atggaaacagatagaaatcgcggaagaagaaaactcgcagagcatgaagttagaaataaaaccattcagtttagagtcaacaaggaagagcttgattatttgaatgatattgttgcttcttcagggttagagaaaggtcattttatcaggcgtgagcttttaagagttaaaccaaaaagacagccaagtaaaatccctgagattaatcgagagacggtaagactgataaataatattgctaataatataaaccagatggcgaagcgcattaactcttcaagacctggcgttttagagataaatcttgcggataatgccattatcgaagcgcgcaaggttcttatggggattaaagatgaaatcgaaagtaaatag

SEQ ID NO: 249659 - DNA, 501 bp, Klebsiella pneumoniae
atgacaaagatagagacaatgaactcgttaaaagtttctcatcaagaaataatgatgaaccagataatattggacgatcatctgttaaaccagatttcagcaacgatagagccattatcagagacaatgatgatactgtcggagtcggtcagtttagagttgaatcagactcaggagaccttaatgaaggtaaacaagtctttagaaatgacaacacacactttgactttagcccaaaacatcctaggccaacaaacaaaaaaattggaagagcaaaactcaaaactacacaaatactcaacagagttaaaaaacaacacaataaaaaaccaactagcccttatagtaaaggtcgcttcactagttgggataatcaatatgttggcggttctatcggtaggatactttactatacaaaaagagctaccacagccaactataaatttagactcaaaagtagtagctacatcaatagtagaacagttgagattgaaaagataa

SEQ ID NO: 249660 - DNA, 174 bp, Klebsiella pneumoniae
atggattttattgatgaagaaaataatgttaagtttcattcaaaaggagaatgtaaaagcaagtttagactgagactaaaagaaaaaatcaatgaaagtaaaaaccttataaaaacagataactcaacatgtgaagagcgatttattaatgcgaaaagatttaaaccgaaatag

SEQ ID NO: 249661 - DNA, 462 bp, Klebsiella pneumoniae
atgagcgaaaacttaataaccttacaaagcgaagttgaatctaaaatattaacaatgaaagataaagtaaaactgactaaacttaaagcaactattcttaaagtatcaggcttattttttgcggcactcactactgtccttgtcggcattagcaatggtgaagtaaatttatcaacatattctctcataacaagctcacttttgactttaatcgttgggatggaatctcatttttcttttaaggagcagtgggtgagacaaaaatggactcttcttaagctatatcaaattcaaaacaagctcaatcttatgagtgctgaagaaaagttgcgatctgaggtgatatctatttatattaatgactacctgtctatttgggatatggatctttctcattgggaaaagataagaagccgtgattacaatagcttatcaacatctgaaaaggataacgaaaaatga

SEQ ID NO: 249662 - DNA, 987 bp, Klebsiella pneumoniae
atgaatgatatagacgagtttatcgcaagatttgaaagtgatgaaataatttactcctcttggggtagactcgttcttgattacattaaggataagctatccaccaagtgcttagagtcaatattaaaaattgagccttgctttagagttaaagatatttcatctcttattgaaaaagctttttacagggataagggatacaataacccttatgaagctattactgataaagtaggtgttcgcttcgttgttcttcttactgatgatattccagtcattaaagaaatcattgaagacagtccgctttgggaatgttcagatgacagaaacttcctcaaagaaaaagaagaaaaaccatatttatttgattatcagtcagttcattatgtggttaaaaatttggacgacataccattatctgaaaaaatagttattcccgctggcacaccttgtgaaatacaaataagaacgttattacaacacgcatacgcagaagtttctcatgattctgtttataaatgtaaagcaaaaccttcatccgaaatcataagaaggatgtctagaactatagcgttgatggaatcaacggatgagttatttttgctagcaaagaatgagcttcagaaaagcaataccaaaattgaatcttgggctaagttttcgatagatcattactctcaaataaacatcgattatgatcgcactaaaaaggataagattctttatcacatacttaatatttactttgacaatctaaatgattatctatcaaggaaatatgaaaactactttatagaaaatgaagagcttaaggattactttcataagaaattatattctgattctataagcggtggttatttaaaaaaaagcgctgctataattttttgcttttttatggttcaggaaaaaccggatatattcgagaataaatggccttattcaagagatgatcttaatgaaatcatgcttataatggggaaataa

SEQ ID NO: 249663 - DNA, 1056 bp, Klebsiella pneumoniae
atgataaaaagccctctggacctaaaagaccttgatataactgatttaatcatacataggatttttctaccgggacagcaggcccatttcgacgttgagccttcaaaaaatgttatccctttaaccggtaaggctaaaattacgcttcaacaaagacttacaaaggttttgtctaagggttcaaaatgtatagaaatggacgtggacgatacggactcattagaaaaaatccacactttacaagattcgggtcaagaagtatttatctctaagacccaagacatagctggcaagttggcaggtgcgcagacaagtaaacagcatcctgaaggtgtattagtagtagctagatgttcatatggcttagtgaagaagaaaagagctattgccataattaaagccgagcttcatgaaggctttacctctacagtgagagataatgtagctacaatagactatttaaataacttaatactgactccagaacaaaagctttacaaagttgcgtttttttcagaaaacatccgccttcctaagatggacaaaaactcgtatgaggtttttttatttgataataatctcacgtcaaaagatgatcttggagcagctgtatacttttataaaagcttcttgggcctgaaaatagcatccaattcaagtagattaacgcgaagtttttatgaaattactgacgaatacattaatgagaaaagtgattcattagaagaaaaaatagatcttgctggtgcgcttcgtatttacttaaagacagagcaatctgaaataatagggaccagtgatttttcaaaaaaatacatcccaattgaaaagcgcgatgactatgtatcttactgtcaagataaaaacccaataatatcgtctttcaaaaaagataatgctttgataaaaaaccgaattaaaagctctacacttaagtttagtaatgaagtgaaaataatctatccagcggtcgatggcgatagcccttataaaataattgaacgaaatgatgactttactgttataaagattaatggtcgtttgatacgggactaa

SEQ ID NO: 249664 - DNA, 1236 bp, Klebsiella pneumoniae
atggcaaaaatcgcaaagaaacttactgacactgaaatcaaaagcactaaggcatcagagaaagagattaaccttttcgatggcgatggactgatgctgcggattgcccccctcactaaaggtggagctaaaaggtggtatttcagatacgcagtgccctcaacaaaaaaacgcacaaagattagtctcggcacgtatcctcatctcaccttagcgaatgcaagagctttacgagatcaatatctttcactactcgctaacgccattgatcctcaaactcataacactgataaagcaaatgctctcaaggatgctactgaacacacgctacaggctgtatcaaggaaatggttagatgagaaaataaggactacaggtataacaaaagaccacgctgaagacatctggcgtagtctagagcgaaatattttcccaagtctaggccacgtccctatcaaagagatccgaccaaagttattaaaacaacaacttgagcctttggagcatcgtcgcgtctttgaaacattacggcgcataatttcccgcttgaatgagattttccgatgggcagcaactgaagagcttatcgaattcaatcctgccgataatcttggacaacggtttacaaagcccaaaaaacagaacatgccagctttgcctcctgctgagcttcctcgttttatggttgccctatcaaatgcttccataaggcttgaaacacgtctcctaatagagtggcagcttcttacatgggttcgaccgggtgaagcagttcgtgctcggtggaaagatatcgatgaagaggcctgtttatggagcatacccggtcagtttatgaagatgaagcttcctcataaggttccactcagtaaacaagccttagcaatacttgaatccatgaagccaatcagtggtcatagagagtggattttcccaagcattaaagcacctctcaaccatatgaacgaacaaaccgcgaatgctgcgataatccgtatgggattcggtggtgagcttgtcgctcacgggatgcgctctatagcaagaactgctgctgaagaatatggaaagttcaggacagaagtgcttgaatcagctttagcacatagtaaaaaaacagagatcatagcagcttataacagagcagaatacattaaagaaagaacaacactcatgcaatggtggggttcattcgttataaatcagaaagttataatcgcaaaccagatttcttga

SEQ ID NO: 249665 - DNA, 558 bp, Klebsiella pneumoniae
atggcggctacgccttatccggcctacaggggcctctcacaggctcaaacctcgcaggcccgcgcaggcgcagcgccgccgggcaaggtatcaaacacggtacctgtaatttcgccgggtggcggctgtcgccttacccggcctacagagtcctctcacaggctcatacctcgcagcccgcgcaagcgcagcgccgccgggcaagatatcaggcacggtacctgtaatttcgccgggtggcggctgcgcctggcccggcctacaggggcctctcacaggctcatacccgtaggcccgcgcaagcgcagcgccgccgggcaagatatcaggcacggtacctgtaatttcgccgggtggcggctgcgcctggcccggcctacaggggcctctcacaggctcatacccgtaggcccgcgcaagcgcagcgccgccgggcaagatatcaggcacggtacctgtaatttcgccgggtggcggctacgccttgcccggcctacagggtcctcttacaggctcatacctcgcaggcccgcgcaggcgcagcgccgccgggcatga

SEQ ID NO: 249666 - DNA, 804 bp, Klebsiella pneumoniae
atgaatatatttaagataaaaatctcaatttttttagcgctagcattatccgcattcagttctattgctgcaataaattgcgcgccaagtagtgctgactatacttacaatacaaaccaagaaccgactccaaagaaagtgcaatcaaatggacgggtttattttttttctttgccaaaagatgaatgtaaaacaagcatttttttaataaaaaatgacgaattacttaaatatagagaggcaaatggtttttcttttgtaaactatataaataaaaaaggtgctgtcgttgatggatggttacggaatgaagatgttattgccgataatgaacagcaaaaagagcttacgtactcggatttctcatggaagataaatgggaaaaatgtaaatctgcttggcaaagcaatcccagagttaaataaatgggccaaagagcaaggattgaaacttccagagccagataatcatggttttaataatggattcgaatcatggacattaaccattcagaatgaaatagtaacaatttctcaagtaaatgacatccttgagaagagattgggttttaatgatgcatatgtatcaggaattacatttatagatagcaaatatgaaacagcaagaggtgttaaagttggggatgattggagtaaggtaacttcaaaatatggaacaataagcaattttgatcctgaagatgagtgtagattctaccaatatttcgatatgaaacttagtttctgccttgactcatcggaaaaagttcagtcaattttatttgaaaactatcctgtaaaataa

SEQ ID NO: 249667 - DNA, 1755 bp, Klebsiella pneumoniae
atggatgcgatgttcagcgtgcgcagtgatgcggtcaccaccggggagcattatcgttacgcagcgccttatcgttacgcagcgccttatcgtgacgcgggtgacgatgccagcccggagccggaaaccgaatccggcgcgttctatgcgcacatccatcacgagcgggagctcaacaggtcagcccgcattcatctgttcagcaatgcttccggcctgacgcccggacaggtgctggagccgcagggcgatgtcattacggccctgaaggaaggcgtcgtcctcacgctggtgactttccggggagcgcgtgattcccgtctgcacgtgtcggtgtggggcatgccttacactgaacgttactgtttccgtccggcggaaatcccgcgtccggaaattcacggcacacttccggcccggattgagagccgggaaaagaacgatatctacgctcacctggacgggcaggggcgctaccgggtgaagccggacttcgaccgggaggggactgagccgggttacggctatctgtggctgcggatggcgaaaccttatgccggtgaaacactcggctggcatacgccgctgattgatggaactgaggtggcgatagcattcagcaatggtgatattgacctgccgtacatcgccagtgcgctgcatgactcggaacatcctgaccacgtaaaccgggacaatcacacccgcaacgtactgcgtacaccggcgaacaacaagctgcggatggaagacaggcgtggtgaggagcacatcaagctcgccacggaatacggcaggacgcagctcaacagcgggcacctggtggacggccagggacaacgtcgtggccagggtgccgaactgcgtaccgatgaacacggggttatccgtgccggaaaagggctgtttgtcagtgcggatgcgcaggcaaaggcgcagggtgaggcgctggacagggacgccgccctgaaagaaatcgtccggcttaaccagcaactgcagcagctggaaatggcggcggagcaggcgcaggcgctgaaggcggatgttgacagtcagatagcgatgtttgagcagcggctgaaaccgctcaatgaggcgctgctgatgtccgctccggacgggatggcgctgaccagcggtgaagatatgcaactggccgctggacggaacctgacgcttaacgccgggggcgatatcagcgtcggaacgatgggcaatctgaccacgctggccggagaaaagctggggttgtttacccgcaccggacaacttagcctgaaatccggagaaggtccaatcgatgttcaggcgcaaaacgccagcctgcggctgtttgctgagaagaagctgacgctgagttcagcgagtgacatctcctttgtcgggaaaaaacgtatcacgctgattggcggcgggagctacctgcggcttgaagccgggaaggtcgagtatggtacgacggcgacgtatatacggaaggtgaaaaggacgatggcggcgggaagtaattctcaggcaccagaactcccatttttaccagggcctggtgatgtttttcgaaggagttttgttcttgtagatgatagaacccaagaaccaatatcaaatattagatatgaattgacctcacctacaggttcggtcgttagagggatttcatgcgagaagggcttcacaagtttcgtgagtcaccctgatgaggctgaagtagaattaaatattttaaaacaagattcattatttatagggtga

SEQ ID NO: 249668 - DNA, 204 bp, Klebsiella pneumoniae
atgtcactttataagtacttaaaggatgaggattattttttcattgtttacaatgcatccggcgaggtggtttttaaaccattaccgtattatggtacttccaacatgggagcatatgacggtatagaattccagtacggtgatagccattctttactttacccaggaccagaaggctatgaatcatacgaattcactaagtga

SEQ ID NO: 249669 - DNA, 243 bp, Klebsiella pneumoniae
gtgcgtagaacaattaaaatgttcctaaaaatgacgctctggagttttatatcattatctctcatccttttttctataaagatactggcttatgttaaagccacacctagtgaaaaaatgtggaatgagaacaacacttgctatgccatcacttacattcctaactacaagccttttggcggggtgggacggtttcaaatcaatcatttttcgtcgtctatgataaggctggagaaaaaataa

SEQ ID NO: 249670 - DNA, 741 bp, Klebsiella pneumoniae
atgttcgcgcattaccgtgacaaacgcctgacgggcgaaatctatttcagtgagaaatggaagaaaggtgctagccctgtaacaatcaacctcgaacaaagctatctgagtggcgtttttagcgaactgacccgactaggagaatgggcagcacctaacccgctggagaacatgcgcaagttcaccatcgcggaaaaagaaatggcctggctgacgcatgaacagatcaatgaacttttgtacgattgccaacgtcaaagcgccctgcttgttttggtcgttaagatctgcttgagtaccggagcacgctggcgcgaagcggtgaacctcacccgctcccaggtcacaaagtaccgaatcacgtttgtcaggaccaaaggcaagaagaaccgcagtatcccaatcagcaaagagttgtacgaggagatcattgcactggatggctttaggttcttcactgactgctatttccagtttttgtcggtgatggacaaaacctcgattgtgcttcctcgcgggcaattaacccacgttctgcgccacacatttgcagcgcactttatgatgtcgggcggaaacattcttgccctacaaaaaattctcggccaccacgacatcaaaatgaccatgcgctatgctcacttggcccctgaccaccttgaaacagccctgcgctttaatccgttagctacgttgccaagtggcgacaaagtggcgacagcggttggcattgccccgtaa

SEQ ID NO: 249671 - DNA, 198 bp, Klebsiella pneumoniae
atggcagttcgaaaactcaccacaggaaaatggatttgtgaatgctaccctgctgggcgcagtgggcggcgcgtgcgtaagcagttcgccactaaaggcgaagcgctggcttttgagcgtcacacgatggatgaggcagaagctaagccctggctgggtgaatcggtagaccgtcgaactctgaaagatgtggtttaa

SEQ ID NO: 249672 - DNA, 1515 bp, Klebsiella pneumoniae
ttgaagcgcggtgattataattggaactgggatgaagcaatcaccttcacgttagatgatgaagatgaaacactttcaaaagataaattaaatagaagaaggtatgcagaatatctatattactacctaaaagacaaaggaaaaaagaacaacacagtaattaatctcaatgccgagtggggcgcaggaaaaagtttttttataaaaagattttatagttcaataaaagatgtacatccttgcgtttatattgatgcatggaaacaagacttttccgatgatgcttttctgaccttattttcttccttatcacaacaactacaagagtatgcaggtaaacttgatgcgcgattgatacaaagcggccatgctattggtcgctttacaaagggtgtgattccagaaatcatgtctggactaatcaagacctacgcaggaatagaaagtgttggtgatatcgccaaggaggcatctttattgatgctgaatgagcatcaagaaaaacttaaaagcattcaggtattgaaaaaagaattagtactatggtccagacttgcgtttgaaaggaaatttgcaagcccaatatttatatttattgatgaactagatagatgtagaccagactatgcaatttctcttctagagattgttaaacatatctttgacattaagaactttgtttttataatagccaccgatacagatcaattacagcactcaattaaaaatgtttatggcaatgatttttccgccaatgactatttaggtcgattttttcatcgtagattcactttaaaatcaccagaactcaaagaattgattaatggagtgattggtgtatctactggtacaagctttgaaaaaatcagttcaaaaatttatccactaactgcaacattagatgatctatcaagaaacatctcaagtatatttgaggcatttggactgaatctaagagactcaatcaggaatactgaaaggttaatcgacattctgaactctgacttagtaaaaaagaaaatagactatatttttatgatttcattaatgattatttatgataaagatcgtcaaattatagatgctcaagttggcaggcgaaatacagcgcaaactttcatagaatcaataaaacaaagttctaatttaaaaggtgtttcccaatcaactctaaaattgatatttgacacaaatcaacatacattaggagtggattatatatatacgacctctagaagcaggatacatatttctcagatagattcaacactaaacttactacttatcacatatttaaacactgcattgcatttcatccgaaacattaaaaggtttaaaaatgaaattgatgtcaatagacaaaactccctaatgacggtagctcaaggaaagcttgacagtgaatcaactttaaaatatttacaaggagctctcttagaaaatggagcagacacgcccttttatacactaaataactacattgaattaatcgagttggccacatcgtttgactaa

SEQ ID NO: 249673 - DNA, 729 bp, Klebsiella pneumoniae
atgattgaaatgtttggggtcatggtgcaccatttctctttaagtgcggcttgtggcgagccgttgtttctcgtgattagcagtgaaggttccaaaagaaaacttctagccaactttaagatctcttttggaatctgtcaatgtgttttggattgttttggaggtcttgtggatttcaataccggcggtaagaaagtgatcgagcgtttggttgaggcgtacgggtttactacacgacaggcactttgcgaccacttgggcgtatcgaagagtactatggcgacgcgctacatgcgtgacattttccctgctgattgggttttacaatgtgctatagagactggcagctctcttaaatggctctcatttggcgtaggggaaaagaaagatgcagtaaaaaatgaaactcgaatcttagaaaaaaaaatattaatcgatggtaagttagaagatgacggtacatatttatttgataccaaattcctccctcaaaatttaaaaaaagcgatagttgtatctaccctatcctctgaattaatctgtgacatggaatttgaggatgtacgagatggaaaatggttagtcaatattgatggtgaaaattcattcaggatgataactcgcctccctggcggtagaatacatatcacatctaaaaatcattcttttgaatgtgcgctaaaagatattgaaataattgcaaaagtagaagtaagttgttttcgttga

SEQ ID NO: 249674 - DNA, 459 bp, Klebsiella pneumoniae; identical to SEQ ID NO: 199746

SEQ ID NO: 249675 - DNA, 648 bp, Klebsiella pneumoniae
atgattggtcctggatatgttgtcgttattggagcagtaaatacaggttcgattcaatttttaggaacaggattttttatttctaatgaagaaataattacatctcgtcatgtaattaatggcttttcgtctaatctcgtaatttccgtatctgatataaatgactataataactaccaggacacaagtattaatacatgtcgatatttgctagccgaggtggtcgatgaggatccaattaaagatttatgtattttaaagcttaaagatgcaagttttaatggtccaactcttaagcttgcttctattgataatgttaacgtgggtgatagtatcggtattttaggttaccctcactgtaatgaaggtagaaaaatattgacattgcaaacagcaatggttggggctaaagtattactttcgagcagtgatgtgaaatctaagcatgcagttataaatattcaaactagaccaggtcaatcgggttcaatagtattcaatttaaaagatgattcggtaataggcgtgttggttggtgcttatgcaaataattctggaggttctgtgttggttggaggaattaaccctgcggaattacatcaaacaacctatgcagtttctgctgaatatattaaggatatgttatga

SEQ ID NO: 249676 - DNA, 798 bp, Klebsiella pneumoniae
atgggcccattggtcataatggttgtactcgtatgcgggttttggtacacggaaaaccactaccaatcccgcatacgccatgcaagaactaatggctggacatcatacttctatgtagcgatgcatggatgtaaatttgtcattcaaggctttggtttagttctgtttttatacctcgtactgcttgctttaagcctcgtgctttcgatacctcatttgttttcagccacttataagatgaaagacctttattcgtggttgaccgataagacgattctatcgtatccagtattttttgtcctttctatggctgctgccagctttatggcttatgttgcgggcgatgtagccagaaaagcaattaaaaatgaagacgtcaggcaggcagcataccgagaaatggctgcaatggatgggattgagtctcttttggtgcaggctattgatgaagatatgctgatttttgtcacactaaaatcacgcaaagtgtacatcggctatgtcgctgcgcctcgtattgagcacagccatacacagcatttagcaattatcccgtatataagtgggtatcgtgacaaggacaccctccgttaccatgagcagcatcgctactacgagttgtatctggaaaagggcattgctgctaataagcatgagcgaggcctgaacctacaacatttccggcatgtgataccgatggatcaggtcgaagctgtttctttgtttgatacaggcacctatgtatcatttgacacctactctgtaccagagaaagtggagcaggatactactgcatga

SEQ ID NO: 249677 - DNA, 195 bp, Klebsiella pneumoniae
atgactaagatttttggaaaaattatttcaactcctggtcgatggatgcagggtgttatccagcaagaaattgagcaatccaacaacagtaaaattactactgatgccaatggtaacgcggttctgaacatggataacaagcaggttcgggagtcaatgcaagccagaatgagagagctggcagctaaacgttaa

SEQ ID NO: 249678 - DNA, 969 bp, Klebsiella pneumoniae
atggcaataaattacatcaatggcagacaaatacccgttaaaaatcgtgacatacgaatctgcaatttttatattgcctggttagaaataaacaaaaacatcagagcagaaggggttaaccgtcaggaagcaggcagctgccatcaggcagttaatcatctcctcaataagtactatcctgataaagaacagcaagacagactcctggcagatatgcataccgcctgcgacgagaatatcttacctgcagaaaaatttgactggattgaaaacgacgagcgggccgcattctggatgtggggttatctctgtgaagcgagtgactaccagcttggtattctccgttcaggagatgcccctttcggtcagaactggtatcagttccttcaactcaataaatccccggcaagccaccgggaaagaatgcaacttctcttcaatttctttgactggataattattcctgccccaccagttaatcaccttaagagccaggtaatggacaggctcaaagaccagtggaaaaatatttacagcaaacctgctccgctgaaatggttacctgatgaggaagaggcggtactgtgggcatggaacagtcttaaatcgctacaggaagaaagaaacgcccccaccggcggactttcatttacgctttcttcgccggggctgagcacctggtttacccctctgaaccatgctgaacgaaatttagcgctacgtgccgcacttgatttatgggatgacgcaccggataccaaacggctattcctgcttaatctgaataaagcctggaatcagcagaagctacgtcagtcccgcacagataaaaaagcactcaatacgtaccttaagaacgaaactaaaatgcgactcgactttatggctgaacgcagcggagttcgcatcagcgatatgctggaaactctgattaatgaccattaccgaaaaacctgtggtggtgagtga

SEQ ID NO: 249679 - DNA, 594 bp, Klebsiella pneumoniae
atggcattatcaaaggagatatttggggccctaacaaaatacttattccttgaaacattacagctaaccaaagctacacatcaagatatttcaaacaagcataaagatatacttaaaactttaatctttatatcgaaggcagatgagaaagatttaaaaaacaatacttcttttttctcctcattacgttggaaacagggttcgtcacgctttcaagatatagaaaaaaatctaaataacatcatcgaaaataattcaaaacttgatgattacaacacatttaaaaatgaacttgcgggggttggaatctcagacaataatacatatttatttttaagaggccatgatattgaagatttcttctgcgagatactcgacaagagttttaaagcgacgctagacgagaaaatcaaaagactaaaagccgtttgcgctcaaaataaactcaaagctgatgctgtaaaagaaaaaatagcacacattgaaagaacatataaaccttatagcgatatttcaaatgctactgattataacctgtcacaaattccgttcttttgtgacacttataaccggatttctcaggattacgtttag

SEQ ID NO: 249680 - DNA, 456 bp, Klebsiella pneumoniae
atgagtggttccggctttgcattcgaaaacaattactatcataatatgaagtatttcgatgaagatgaggtcgaaaccgtactaatttgggtggaagacagttcagacatagctgtttggacgcaggcgttccccttaaaagacaaaataatttttgaatttcaaacaactgatatgtttgattttggtgatgataaagtctcaacaggatgcgaccgtattgctagtctcattaaagcgggaactataattttaggtaaaaacataatagtttgtctggatagcgattatcatactttaactaaattcaataaaacaaaaagacaggagttatacgagaacaaccacgtttatttaactaaaacacattctatagaaaatataaaacatcactcttctaatatggatatttttttcagtcgctctattgggatacatgaaagccagcttgcataa

SEQ ID NO: 249681 - DNA, 1140 bp, Klebsiella pneumoniae
atgccgcgtgtagttgaaagtaatttctacaatgtgataaaaagaaaattgcataacaatataagccttgatcagccagtgactatcctaaccggatataatggttgtggcaaaaccactcttttaaaatgcctacatgaaacaataacactgtataacaatggaaactttccacacgctcgcaaaggttggggtgtcgaaatcaaatttgacaataacttcaaaattaagaattataatatgccacctgaccttaaaagaatggatcttgaggatcataatttcttcactgaaaaggtcgatattaactcctcattatcaaatggctacaacatcattcttaacagacttaacactcttcctgaaaaaagcaaaaaaaacaaagataattttaagtatgcgaaagaaaagaccgcaatagaaaataacggcctcatgcaataccctggaaaagaaaacctaagaaatgaagttttttcgatattactttgcgatgagttattttactttaacggcgaagagagtgataataaaacattgaaacttgaggaaatggatattttctcacgcaataacaacctttctaaaaccctttatatactgctccaagagtttgctaaaaaatctattttaactgacagcgataaaaaggctaaggaaagcataaatgaattaaaaaaattaatcatagatgctcctgaaaaattgagacttgccataactgataaaattaaagaaattgaagaaaactccagcagcaaagcgctggacgaattcatggagaccctcaatatattcttcagccttaccagacgctctgtatttattgatgaggatggttttatctcacttaattttgatgaacaaaccattagatggtatgatttatcaaaaggtgaaaaaactttaatttcgctatttcttgtaacttatctcaatagagataaaaatgtcattttcctttttgatgaacccgacttatctttacatataaaatggcaaaaaatacttattgaaaatttagccaagatggcgccatcttcacaatttataatctcaacacattcacctgcattgattgggaattatgaagcacaaaaaatcattaatatcagcggaatgataagaggtcaacaatga

SEQ ID NO: 249682 - DNA, 2202 bp, Klebsiella pneumoniae; identical to SEQ ID NO: 190664

SEQ ID NO: 249683 - DNA, 1707 bp, Klebsiella pneumoniae
atggaaaaaacgctgaatatctttaaagcgcagcaagcgaagaatctcgaaatcctcaataacctaagcgcgtttttacaacagggtgagacctttggtattcaaatggaaccacatctgctgcagaaattagcgatcgcgaaagagaacgctgcaaacggcaaactgcacattgcgttgataggcggcttttcggaagggaaaacatccattgcagcggcatggatggagaaactggataaggcgagcatgaacatcagccaccaggaatcctctaatgaggtcaaagtttacgatgtcggatctgatttcgtcctaatcgacactccagggctgttcggttttaaagagcagtttgatgaaagcacacagtcgatggaaaaatataaagacatgaccaaaaagtatgtcagcgaagcacatttgatactgtatgtcatgaactcaaccaaccccattaaagagagtcataagcaggatcttgagtggctgttccgcactctaaatctactggatcgcacagtgttcgttcttagccgctttgatgaagtagccgatgtagaagacgaagacgattatcagtcgaatgcgcgggtgaagtgccaaaacgtcgcctcgcgtctgcaggatcttattgctctgacaccaaaagagcgcgatacactaagtatcgtcgctgttgcagccaacccgttcgatatgggtacggactactggctgcaaaatccggaaaaattccgcgcgttgtctcatattagtactctgcaaactgcaaccagcgaaaagattgtactcagcggcggcctacaggcgttggaagaagagactagaaagagcgttattcgagacatactaacacgcaaactcccggtcgccatcaagcaggatgagcgcatccgtgaggaggtcgctgatctggcgacaatccatcaacgcatgcgtaaagagatgagcgcgatgcagtctaaaatgatagatatccgtgcgtcgttacgcaaatttgtcaccgattacttcgccgatctgattatccaagccgaagggctgagtatggaaacctacgcggcattttttgaacgcgaagttggtgataaaggcatagtgttgtcgacgcacctgcaaaacgaattcgatcgccgacttcaatctgtatcgcaggcgctcgataaaatgcagactagctataactttgaaatcagccactacaatggcactcttacagcgatgggcaaacaaggactggaatatgtggtgaacagcaaaataattaacaataccacggtgatcgccacgcgcgatggtgtggtgtcgctggctaaaatggttggactggatctgggaaaaatgctgaaatttaagccttggggcgcagtaaatctagctaaaggattaaatggactactttcctttgccggactcgctttagaagcttgggactcctttgaacaggcaaaacgcgaaaaagagtttgccaaaaacattcaaaaaatggtgactaactttagctctcagcgtgaagagttgatcaacctgctgaactcagatgactacgaagagcgcttcttctctggatatgtagtgatgaaggaagaattagaagggcttgagcaaacactgcaccgtagtcaagagcggcaagcccagttcgcaaaatggcgtgagcaagccgaggctatagacgccgaatttacccgggtatacgcctga

SEQ ID NO: 249684 - DNA, 1800 bp, Klebsiella pneumoniae; identical to SEQ ID NO: 190662

SEQ ID NO: 249685 - DNA, 927 bp, Klebsiella pneumoniae
atgacccgctatgcctttttcggtgatatccatggtcagtatgccaaactgcaggctctgctagctattctgcaggccgagtcagcggactggttttatgtctttgttggcgacctgattgacaataaaagaggcatcactgagagccagttaaacacgctggaaaccgtgaaatctctggttgatagcaaaaaagccctttgtctgatgggcaaccatgagtttaatgctgtcggctgggccctgcgtcatcagaaaaccgggcagccgctgcggccgcatacggaaaataaccgcaaacagcatcaggcttttcttgatgcggtgacagaagactctgctctgcaccagaaatggattacgtggttccagagcctgccgctgtatgctgacttcggtgccatcagagcggtacatgcctgctgggatgaggcggttatccatgctattcagccctatctgaaagccaaccatgccatcgcagaggcttattgggaggaggcatttgagaaaaactcgccgctgtacaacatgacagaaacgttgttaaaaggccccgaactggctctgcccgaaggcattatgtttcacgataaaaccggtcagccccgcaaaaatatccgggttcgctggtggctaccgcaggcgacaacctatcgtcaactggcccaggtgccgcctgacgctgagtcgctgattccggatctgccacttgataagacttactctcctttatcatctgagatcccggtggtgattggtcactatacgctacacggcgagcctacgccgctttcagaactgataatttgcactgattttaacgcagccaaaggggataatccgcttgtagcttactgctgcatggtagaagacggatacttgtcatcacaagggtttatttccagtaccggaaatagtgtctag

SEQ ID NO: 249686 - DNA, 1254 bp, Klebsiella pneumoniae; identical to SEQ ID NO: 190660

SEQ ID NO: 249687 - DNA, 1263 bp, Klebsiella pneumoniae
atggcgttaacagatatcaaggtcagaacagccaagccaacggataagcaatacaaactgaccgatggcagcggtatgcacctgcttgtccatcctaatggttctaagtactggcgtttgcagtaccgttatgacggcaagcaaaagatgttggcacttggggtttatcctgaaatcacactggcggatgccagagcacgtcgagacgaagcgcgtaagctgctagcgaatggcgtcgatccgggagacaaaaagaaaaatgataaggttgaacagagtaaagcacgaaccttcaaagaggtggcgatcgagtggcatggcaccaataaaaagtggtctgaagatcacgcccatcgtgtgctaaaaagcctggaagataatctcttcgcagcgcttggtgagcgtaatatcgtcgagttaaaaactcgtgatttattagcacccattaaagccgtagagatgtctggacgtcttgaagttgctgcccgtcttcaacaacgaaccacggccatcatgcgttatgcagtgcaaagtgggttaattgattataatccggcacaagagatggctggggcggttgcttctggtaatcgacaacatcgtccggcgctggaattaaagcgcatccctgagctacttgagaaaatagacagctataccggcaggccgctaacccgttgggcgacagaactcactctgcttatctttattcgatccagtgagctgcgttttgctcgctggtcagaaatcgattttgaaacgtcaatgtggaccatcccgcctgagcgagcgcctattcctgatgtgaaacattctcagcgaggttcaaagatgcgtacaccgcatctggtgccgctttcaaaacaggcgctggcgatcctgaagcagataaaacagttctgtggcgaacatgagctgatcttcattggcgatcatgatccgcgtaaaccaatgagtgaaaacaccgtaaacggtgcgctacgggtcatgggatatgatactaaggttgaggtttgcggccatggcttccgtacaatggcctgtagttcgttaattgagtcagggctatggtcgaaggatgccgtggagcgccagatgagccatatggaacgcaattcggtgagggcggcatatatccataaagcggaacatctggatgagcgcaagttgatgttgcagtggtgggctgattttctggatgccaatcgggagagaggaattacggcgttcgactatgcgaagatcaatcggggtaatatgtag

SEQ ID NO: 249688 - DNA, 303 bp, Klebsiella pneumoniae
atgaaactgctaaacacctatgatgacaaagatgaagccgaagaagcactgaccaagctcctcggtgaaaaacgcctggccagtgaacgagatagcactgtggtgatctacaacctatttggccaacctacctggggtaacttccatcgtcttggcatgttcaacttgccggagctgcagaagatgctggagcagcgcaaggcagggcatgtcattgacaaagccagacacagcgaaattttgagtatgctgcgctatgccgcacaatcctttgaactcaccattccgcagcattggatgtaa

SEQ ID NO: 249689 - DNA, 2841 bp, Klebsiella pneumoniae
atgagtctgaaaccttggcgcgagattgcgcgcccgcatcgggatgtactggaaggcacctttaaacagtcggaatttgcggcagatattactcaggtcgctaatggctctgccccagcagaatatcaggatgctgagcagttttttgcgcgcacctttatcacggaagggatgcgtttgctattgggctcggttgccgagcggctggctggtaagggcggtgaccctgtgatccagctgcaaacagcttttggtggcggtaaaactcacaccatgcttgctgtctatcacttggcctcacgcacagtgaccacggatcgcttgcagggtattccgccgattttggatgcggcagggattcatgacttacctagtgcccgagtggcggtgatcgatgggattaacttgtcggtgagccaagcgcgtacgcatggtgtgatccatgccaatactctgtggggagagttagcctggcaacttttgggcgatgaaggctatgagctagtggcggacagtgaccgcgacggcacatcaccgggcaaagagcagttagtcaaattgctgaccaaggcggcaccctgtgtagtgttgatggatgagctggtggcctttttgcgccagttggaagtaggcaagcagtttaatgccggaaccttcgactccaatatcacctttattcaggcgctgactgaagcgatgaagtcggtacccaatgccatgttgttggcttctttgcctgagtcggccttggaagtgggtggcactatggggcagaaggcgctggattcgctggagaaatattttgctcgggttgagtcggtatggaagccggtagccactgaagaggcctttgagattgtgcgccgtcgtttgtttgagtcggctggtgatgccgctcaggtgcagggtattgcgcagcagtatgctgatttctatcgccagcatgcgcaggagtttcctaacgaaacccaatccagccactattacgaccgactgtgcaagtcatacccgatccacccggaggtatttgaccgactttatgaggattggtcgacactggacaagtttcagcgcacccgtggggtgttgcaatatatggcgatagtgatccatcgcttgtgggtcgcggataaccgcgatgcgctgattatgccggggtcgttgccccttgatgacagcaatgtgcgtggcaagagcattcattatttgccacaaggctgggaaccggtcatcgaaaaagaggtggatggctcgcgctctgaagcggcagatatcgataatcaagatacccgttttggccaattccacgctgctcgcagggtgatgcgtaccctgtttttaggtagtgcacccagtacaggcgatcagatgcatcgcggcctgctggctgagcggattatgctgggcgcctgctcgcccgggcaaacagtggccacttttaaggatgtgttggttcggctgcgagatcgtctgacctacctttatggcgataaagatcgtttttggctggatactaagcctaatctgcgtcgggaaatggaaatccgcaagagtaaagtcagtgagcgtgaagagttgacgccactgcttaagaagtcagtgactgcatgttttggatcccagcactgctttgccgggatacatgttttcacaccttccagcgatgtgcttgatgaatacggcaatggtccgcgtttagtggtattggagccgtcggcattttctgcttatagccgtagtagcagtactaaccaggcattcaaagcagctgaggtgatcttgtttaaacgtggtgagcaaccacgtgtgaaacaaaatcggctgatctttctcgcagccgattatgacagcctgaatcgtttgaaagatcaagggagaacgtatctggcctggcactctatcgttaccgatatcgaaaatggagtgttgaatcaggatctggcgcatttgacccaagccaaggggaatcgcgatacggcgaagaagcagtttgatagcttggtccgcgacacttataagtggctgctggcgccgctgcaggatcccggtcagcagctagaatgggaggtgtcgcaaatctcttccagcgcacctaaattaatccaggaaattgaaagtaaactagctgaagaggagtggttgatcaaagagtggtcaccagttcatctgcgcaatttgttggaaaaatactattttaccaatggggtagagtcagtcagtgcagtgaaggtctggcaggatgcctgtcagtacctctatatgcctcgtttagttaatgaccaaatattgcgtcgaactgtagaagaggctgtcaagagtaccgattacttcgcttttgcgtccggtctgcgtgacgatcgctttgaagggtttgcttttggcaaatcatccaccatgtttttggatgagaacagcgttctgattagccgggatgctgcgctgcgctatcaagccaagctggagcaagaagcccgtgaaaagagtgaagaagagcgtaagaaagacggctgcgatgggaccgataaggacgaatcggatggaggcaaggacacgggcactggttctggaactggttcagtgagtccccaaccgactgtaacagagagccagaaaacacggttttatggttcagtgcgacttgatgccatcagagccaaaatggattttgcaaatatcatggacgaggtggtgcaaaattttgctagccaatatggtgtagaggtagagatctccattgagattaatgcacgctctgagaaagggtttgatgcaaatttacagcgagctatcaaagaaaactgcagcatgctgaagtttggtaatgctgaatttgaagagtaa

SEQ ID NO: 249690 - DNA, 510 bp, Klebsiella pneumoniae
atgaccaccatcaccgagggtgcattgacctttacctttcccgtcggggcgctggtgtgtaaatacgatgagatggcgttttatcgtaatcaatttaccaaaatggccgatgggataaaggcgatggatctggtttttgtcgatagtcagacattttggcttattgagatcaaggattacagggtgcatcggcgtaccaaatcgattgaattagcggatgagatcgctagcaagctacgcaacacgttggctggtttatgggctgccaaatataacgctaatgatcagggtgagcggcaatttgcagcggcagccattaacacgagcaggattcgtgtggtccttcacttggaagagcctcatcaacagggacggctggccccccaaaagtcccttaaagccgggttgctgcaaaagatgaaacaaaaactaaagagtgtggatactcacccctgcttagtggatcaacattctctcaagccagcaatgaactggacagtaacaggatag

SEQ ID NO: 249691 - DNA, 1029 bp, Klebsiella pneumoniae
atgttaaagcaagcgagattcaaaaactttaccactctacctaatgaaaccctagtgtttgcaccgggcctcaatgtgattgtggcggaaaatggttgtggcaagacccatctcctaaaggccatttatgcgctgctcagcgtcaacactggcggcgatttgtctaagagtagcttgcaaaaagcctatgccgataagcttgtgggggtgtttcgtccagagagtctgggtcgtttggtcaagcgcagccaaggccgtgagcgctgtgaagtggcgctgactatggctgatgagcaacaaagttgtgagattaattttgcttctaatgccagcagtggcgtgcaacttggccagtcgccagagatcagcttgttgcaacagcccgtctatttgccgactcgcgagctggtgaccctgtgcccttggtttatcaacctatacgataactaccatctggagtttgaagcgacttggcgtgatacctgttcattgttgggcgctccatcggtaaaaggccctcgcgaaaaacgggtgtcgcaactgctgcaaccattggagcagggcatgggggggaaggttttggtggagcccaacaccggacgcttttatttgcaacaatctggccagaagctggagatgccgttggtggccgagggattgaggaagatggccatgctggcgcgcctgatcagtacgggggttttgcttgagcagggttatctgttctgggatgagcccgaagcaaacttgaaccccaagcttatcaaaacactagcccgggtgattttggcgttgtctgagcaaggtattcaaatctttatcgctagccattcgttgttcttgctgcgtgagttagaagtgctggcacgggatgactttagcagtgtgtctcgtcgttactttggcctgagtcagggggaggatggcacagtgttggagcaggctgatacactggaagatatccaggctctggtgttactggatgaagagctagaacaagccgatcgctaccttgggagtgatgcatga

SEQ ID NO: 249692 - DNA, 2922 bp, Klebsiella pneumoniae
atgacacccatcaaatcccccaaaaaactgatcgaagtggccctgccgctagacgatatcaacgccgcagcggcgcgggaaaaatccatccgccacggtcacccctccactttgcacctatggtgggcgcgccgccccctggccgctgcgcgggcggtgatttttgcccagatggtgaacgaccctggttaccagcagggtgatggctttaagtacggggtgaacaagcaagaggcggccaagaagcgcgagaagctgtttaatatcctgcgcgagctggtgaaatgggagaacaccaataatgaggctgtgctcaatcaggcgcgcgcggccatcatggagagctggcgcgaaatctgcgcccttaacaaagaccacccagatgcggccgaactgtttaaccctgaaaagctcccaggttttcacgaccccttcgccggtggcggcgcgctgccactcgaagcccagcgtttaggattggaatcctatgcttccgacttaaatccagtggctgtcaccatcaacaaggcgatgattcagatcccgcccaaatttgccggccgagcaccagtggggccagagccggtcgccgataaaatcagcaagaaaaaggccactaaagatgccttagaagattggtcgggggccaaagggctggccgaagatgtgcgtcgttatggcacctggatgcgcaatgaggccgagaaacgtatcggtcatctctatcccaaggtgatggtcaccgaggcgatggtagccgaacggccggatctaaggccttacttgggcgacgagttgacggttatcgcctggctctgggcccgtaccgtcaagagtcctaacccggcattttcccatgtggatataccgctggcctcgacatttattctttcctctaaggtgggcaaagaggcgtatgttgagccagtggtagtagaggatagctactatttcactgttaaagtgggtacgccaccagagtcagccaaaggcggcactacggcagggaagcgcgcagcttttatctgtctgatttcaggttctccagtcgattacaaatatattcgcagtgaaggcagcgccgggcgtatgggtcaacgactgatggcgattgtagcagagggcaaaaagggccgggtgtatctatctccaacggatgagcagcttttcgttgcacaagaagcacaaccagcatgggcacccgaggttccgcttcacggtaagtgtcgtgtcaatgtctctaactatgggttggatgtgtacggcgatttattcacaccccgccaattaatggcgttgactaccttctctgacttggtgggtgaggccatagcctgttgccgtgaagatgctctcgctgccgggatggcggatgatggcgttggcctcgatgccggcggcaccggcgctatagcttatgcgcaggcagtgggggtgtatttaggctttggtttgagtagagcatctgatgcttggagtgctcaagttacttggcgaaatcaggttgatgcaacaagaaatacgtttgctagacaagcgataccgatgacatgggattttgcggaagttaacccattttctgactcatgtggaaactggtcagggaactcgactgagtggatacagaaaagccttgagcacctcccgctcaaccctttgcagggttgtgcagtgcagggggacgcacaaacacagaaaattagtattaacaaagttatttcttctgatccaccttactacgacaatatcggttatgcagatctttctgactttttctattcatggttaagaaaaactctgcgtccaatttttcccggtctctatgccaccatggcagttcccaaggcggaagaactggtggcgaccccctatcgccatggaggtaaagaaggggcagaggctttctttttaggcggcatgggcaaggcgattcatcaactggccgagcaagcacacccggcgtttccggtcaccatctactacgcctttaagcagtccgagactaaggaccacggtacttccagcgccgggtgggagacttttttgcaggcagtgatcgatgccggttttgccatcaatggcacctggccggtgcgtacagaaaaagaaggcagggctattggtaatggggccaatgcgctggcctccagcgtggtgctggtatgcaataagcgggctgcaaaagccgatactattagccgccgtcagtttattcgtgagctcaatgcagtgctgccagaggcgctggatgagatgacccagggcagcaccgatgctcagggcctcagccaatcggcggtggcgccggtggacttgtctcaagccattattggccccggtatgggcatcttcagcaaatacactgcagtgctcgaagccgatggcagtaagatgagcgtgaaaaccgcgctacagctaatcaaccgctttttggccgaagatgattttgaccacgatactcagttctgcctgcagtggtttgagcagcaaggttggcgcgtgggccgctttggtgaggctgatgtattagcccgcgccaaaggcactagcgtggcaggcttgcaagaggccggggtaataagtagcggccagggtgaggtgcaactgctcaaatgggccgaactgcccaccgactgggcgccagagcgcgataaccgcaccccggtatgggaaggtctgcaccaactgattcggatcctcaacagcgaaggcgccaacggcgccggtgccatgctggggcggctctcagacaagagcgacgcgatccgctcgctggcgtatcgcctctacaccctctgtgaacgtaaaggttgggctcaggatgctcgcgcctataacgagctagtcaccgcttgggatgcgatgcaaagcgccatggccgacagtggacaacgcggtgaaaacttcaacttggacttttga

SEQ ID NO: 249693 - DNA, 450 bp, Klebsiella pneumoniae
atgaaaattgaacaagttagcttaaaaaactttcgatgttttgagcagctcgatgtgactttccacccgcagttgactgtgttaatcgcccccaatggtgcgggtaaaactacgatccttgatgcagtacgcattgcgctatggccctttgtcaaaggctttgatctgggtagccaaacaggcaagtcggccaccattcagattgaagatatgcgtattgaacgccgcgaacaagaaatggaactgatattacccacactgaccagaaggcagcgtcacccagtcgtacaaacacgtgacatgctgggggtgaataaggatccaaatctggtcattgaacggaaaaaatggttcacccaagctgtaactatgctaaaaacggcgccagacgattttgatcaatttttgcagtcagcgccttttcgcgcgctgattgctgcatccatttaa

SEQ ID NO: 249694 - DNA, 3543 bp, Klebsiella pneumoniae
atgctcaagctcgaagagatcaagaaagatgctcaggtccgcggcattgtcgaagggcaagtggttcgcgtggtgacagtggagcagatcggtgagcacgctctgactgtttactacaaagacagtaagggcgtattggcagaacgcatgttgtttcgaagtgatgagatggcgcttgagctcgcgacagtgggccgagcatgggcgtttgatgctgacggaggcgatttcaaactggggctggaagcatatcggatatcacaggctgctctgtttgatccgatgatggctgttaacatggccaatgttgaccccttgccgcaccaaatttcagctgtttacgaatatatgctacctaagcagccgctgcgctatgtcttagccgatgatcctggcgcgggcaaaacgattatggctggcttgttcatttctgagctgctgctgcgagctgatgccagacggattatggtggtatcgcctggctcactgaccgaacaatggcaagacgagctatttgaaaagtttggcctgcaatttgaaatcttcagcaaagaaaagcaggagcagtgtgcaacgggcaattttttttccgaaaccgatcgcctgatttgccgtctggatcagctttcccgtagcgaagatctgcaagaaaagctgcgcaataccgactgggatttgatcattgtcgacgaagcgcacaaactctcagcgaactattttggcaacaaaatcaataaaaccaagcgcttcacactgggagagctgcttggatctatttgccgccattttttgttgatgacagctacgccacacaacggcaaggaagaagactttcaggtctggatgtcactgctcgacagtgatcggttctatggcaagtttcgcgaaggcgcccataaagtcgatattactgacatgatgcgcagaatggtgaaagaagagctattgacctttgatggcacaccgttatttcctgagcgtcgagcctatacagccaactatgatctttctcctctcgaagcaagtctttatgagcaggtcaccacttatgtaagagaagagatgaatcgagccgacaaactcgacaacaagaaaaaaaacacagttggctttgcactaacacaattgcaacgacgattggcatccagcccggaggcgatctatcaatcgttaaaacggcgtcgtaatcgtcttaaagacaagcttgcagaaatgaagctgttggcccgtggccagaaggcgaaacaaacaggtgtggctgaaacgcttggtagctatacagtgactaaacagctcgatttaccggataattgggacgaactggatgaagacttaagcgctgaagagtacgagctttacgctgagcaagtagcagatcaggctactgcagccgagaccatattagagctcgacgctgaaatcgagtcactaaaggctctggaacaacaagctctggtgttggtgcaatcaggcaatgataaaaagtgggaacagctatccgctttactgcaagactcgccggaaatgaaaaaccgcgatggtagccgtcgtaaactgatcatctttaccgagcataaagacacgctcaattatttgcgtcagcgagtcagtgatctgcttggccagtcaaacgctgtcagggtgatttacggcggaaccaaccgtgatgaccggcgtaaaattcagagtgaatttcgcagtgaccccaccgtgttggtactgattgccaccgacgctgcgggtgaaggtgtcaacctgcaaaacgcaaacttgatggtcaactatgaccttccatggaaccccaatcgactggagcagcgttttggcaggatccaccgaattggccaaaaagaggtgtgccacctgtggaacattgtcgccaatgaaactcgtgaaggtgaagtattccaaaaactgttcgccaagttagaaattgagaaacaagcacttggcggcaaagtattcgatatcttgggggaggcgttcgacaacgtttcactcaaacagttgctaatggatgccattcgctatggagaagatcctgctgtgcgcgccagaatggaccaagcaattgagggggcactggacagcgaccacctcaaggagatcatgcgccgcaacgccctggtggaatcccacatgggaatggaagggttgtacgccatcaaagagcagatggaaaaagccgaagcgcgccgtttgcagcccttttttatccgagccttctttcaggaggccttccaaaggttggggggggatttgcgcgagcgcgaacaaggccgatacgagatcaggcatgtcccagcggttatccgcgagcgagatcgcaccataggggaaagccgtacgccggtactaccgcgttacgagcgggtctgcttcgaaaagcagttaactcgtcctactggcaaggtgttagctgagctgttgcacccggtgcatcctctgatgcattccgtgctggaccttaccttgcaagcccatcgcggcaaactgaaacagggcgccgtgttggttgatccggctgatgatggtgatgaaccccacctgatcattatgttggaacactcggtcagagaaacggcggaacaagcaaaaagtatcgcgtcccgccgcttgcaatttgttgcgatagatagggcctgtcaggccagttatgcaggctgggcgccacacttggacttagtgcccatcagcgagggggacttggcactagtacaagatattctctgctccccttggttatcccaaccactggaaccactggcactgcagctggcctctgaaaaactggtgccagagcattttgctgaagtaaaaaaccggcgtgagctgcaggcagacaaaactttggcagcagtacatgagcgcttgatcaaagaaatcaactattggcaagaccgctatctcaaacttagtgatgatgtgaagtctggcaagcagcccagaatgcagccagaaaacgcgcgtcggcgcgttgatgaacttaccgcccgtttacagcagcgcacagctgaactcactgcgctcaagcaggtggtctccagcaccccggtggtcattggtagtgctctggtgatcccgcaagggctattggccaaacgtaagggggaggtcatgtttagccccgatgcggccagccgcgcctatatagaacgggtcgcgatgcaggcagtaaccgatgctgaacaggctttaggccacatggttatcgatgtagcagcggataaatgtgggtgggatatcaccgcacgcccgccactcaaaagtgatggctccttgccacaagatcgtcacattgaagtgaaaggccgcagcaaaggacagacgaccatcaccgtcagtcgtaatgagatcctctatgccctcaatcaggcagaaaaatttttgctggctatcgtactggtagagggggagaaggctgaaggcccgtactaccttcgccaacctttcaccaaagagcccgatctgggagtggcgagcatcaattacgacttagcggatttgctggcacgatccaccgatgctgaaggaagcttatga

SEQ ID NO: 249695 - DNA, 360 bp, Klebsiella pneumoniae; identical to SEQ ID NO: 190683

SEQ ID NO: 249696 - DNA, 240 bp, Klebsiella pneumoniae
atgaccacgacgaattcgaacattaatgccagtcctgacacactgctttcagctcaggacccgcttatcgacatgacttttatcaccacgtacaccggtatgacggacaagtggttttataaactgattggcgacggtctgtttcccaaacccattaagctgggccgcagttcgcgctggcgcagaagcgaggtggaaacctggatgcagcagcgtatcgcagattcccgtggcgcctga

SEQ ID NO: 249697 - DNA, 570 bp, Klebsiella pneumoniae
atgagttacacatacgaccctttctggcagcaacgcatcgccgataccttcagttgtgcgcttaacgcttacacccgcttactggccctgcgtgttgacctccgtctgccggatacgccagcggcaagcgatacagccgttatctcccgtttcaccgattccctgaaagcccgaattacagcccttcaggcgcgtcaacgtcgcgagggcaaacgcgtctggccgaccacgctgcgttttgtctgggcgcgggagtttggtgaaatcaaagggaagaagcattaccacgcggtgctgttgctgaaccgcgatacgtggtgcggaccgggggattaccaggacccggattcgctcgcaggtatgattaaacaggcgtggtgcagtgctctgaaggtggatgcacaggcgcatgccgttctggcccgcttcccgaagagcccggtgtcctggctgacgcgcggtaataccacagagcttcaacaggcgctggcgcaggccgcttatcttgccaaacgcgaaaccaaagtcaccggcgatggtgaacgtaacttcggttgcagccgcggttga

SEQ ID NO: 249698 - DNA, 177 bp, Klebsiella pneumoniae; identical to SEQ ID NO: 190684

SEQ ID NO: 249699 - DNA, 543 bp, Klebsiella pneumoniae
gtgagccggctgaccagccagaaggggctggatcttctgtttggcgcgctgccgggaattatatctaagggagggcagctggcgctgctgggatccggggacccggatttgcaggcccgttttctgaccgccgaggcgcaataccccgggcaggtgagtatccggatcggctacgacgaggcgctgtcgcatcagatgattggcggcgccgacgtcatcctggtgcccagccgttttgaaccctgcggtctgacccagctttatggtctgcgctacggcacattaccgctggttcgccgtaccggcggactggcggataccgtcgccgactgttcgctcgaaaaccttgttgacgggctcgcgaccggatttgtgtttaccgacagcgagacggaatcgttattacatgctatccaccgggccagtgtcctgtggtcgcgtccctcgctgtggcgttacgtgcagcggcaggcgatgagcatggattttagctggcaaagtgccgcaaagtctttccacctgttgtatcagcgtattatttaa

SEQ ID NO: 249700 - DNA, 825 bp, Klebsiella pneumoniae
atgattttatataaatatgttgactctgacacagctgaattaatcattcaaaattcaacattaaaattttctagagcatcatcactaaatgatccatttgaattaactggtttacactatgggtcagaggaacaatacaaaaaccaaactttaaaatttctctctgcctctatgtcatatggtattttatctctgacacgagcgccaatgaacccccttatgtgggcacattatggtaagggcacaaattatgatgataaaaaaggcattcgaatcgacaaagacaatggctcacatgctggggtagttttcggcattgatgctaacgaagcagggctaaacaatgaaggcgtgaatattattccagcaaaatatgggagtgttatttatgcatcgactaaaccccacaatccttatataaactctgagaaccaaaacttctttgaaggaatgcagtttcaattcaatcctgattttttagaagcactccagcgaaccttcctttacaaaccatcttattggtcatatgaggaggaagttagagtagtaagaaacatttccagatgcagaggtgaaattcagcctataaaaaaatccagcattaaagaaatttacatcggcatcagaaatgcttataagcatgattatttagtatttatgcgtgaaaaaataaacaagcagcttcctaactgtcaagcttatgtttgtttttttgatgtatacgagtgggccttcattaaaatatctatagatgaagctattgagcaaatcgcttcacaatacttacctcccaataatccaacgaagaaggatatctctagttaa

SEQ ID NO: 249701 - DNA, 738 bp, Klebsiella pneumoniae
atggtcatggttattaaatctaatgttccgtctaacaccattgcaaatccagacggatggaatccgccatttaatacagatggcatgttatatgcgggtatctacgggcgtggccttgcaaagaatttcgcaaagaacggggttgatgctgtggtgagtggctcccctgttattgataatcagtttgcaaaatttaccgcaaatgattttattgatacgggggtcgccaataccaaagaagcgacactcattgtcattgcaaaaaggaaggttgagacacgccggcaatttttaatatcaagttacctgggggatcgaaatttcgggcgttctgtgttgattggctctggcgccggggcgctaacgatatattcacattatgcgggcgtcaatggctccggcgtagaaaccagcctgtcatacaccgcgtattttgtgccagatcctctggatggtagtccggcatttttgtgcggtcgggatacagggaaaaccctgacggtatcggatgtaacggggggtaagagcgacagcaggaccgcatcaggcacgctggagtcatttgttaacccggctctgacgtacatgattggacgcagccacaataatgcggaagtccctggcgataacgaaatcgcggccgcgctgatttttgaccgtgcgctgtccgatgctgaaagccaggccatttatgtttattttcagggctattttgcccgccgtggcattaacatttaa

SEQ ID NO: 249702 - DNA, 1080 bp, Klebsiella pneumoniae
atggcagggaaaaaatatattgcgattctgacgcctgccggagaagcgaaactggcagcggcagcactgacgggggagccggtaggcttctcccatatgggcgtcggagatggcggcgggacgctgacgcaaccctacgccacgcagacggggttgattaatgaactgtaccgcgccccgcttaacaggctggttatcgctgacagtggcgcaaatatcatccgggccgaaatggtgatgttcccccaggtcggcggattctggctacgcgaagcggcgctctatgacgatgagggcgtgtgcctggcactggcaaacctgccgccgtcgtataagccgcttctcgctgaaggttctggcaggcagcaggcgctaaatctgtggatagcggttaacaataccgccgatgtacagctgatgaccgacccggccgttattgttgcctcagtcgctgaggttgagcgggcaaagaatgaggcaaaggattatgccgacaaggttgcgggccaactggatacggatattcagcaggtgattgccgatgcgataacggcggcaaagcgagatttctgggaagatgataacccggtgggaaccacccgcttttttaaccagaacctcaatcccaatgaacgctggccgtggtcccaatggatgtacaccggcgaaaacaaaacgatccgcgtcggaaaggctgacggttcgaacgtcgggcagagcggcggcggcgataacgtcacacttcagcaggccaacctgcccgccgttcagattgacgtgagcggcgaaaccagcgaacaggggcagcaggagctgacgacatcgggcaacggaaggcaccggcacagggcaggtgacggggcgccgggggatacctggcaggatgccacacacggaacggataaccagaaatatacggggtggaactataccgactatgcagaagaccatcagcatagcgtcacgattccgccgcacaagcacacgacaaacggcaaaactgccaacctcggcgaaggtaaatcgttcagcgtggtggaagcccacaccctgctgatgtgctggagccgcgtcgcctga

SEQ ID NO: 249703 - DNA, 1761 bp, Klebsiella pneumoniae
atgaaaaatattcctagtttagatgatttgaaagcagccacaacacgccgtgatttagcaaagcttctgaatgtgaaactagtttttttgacgaatgttctttatagaatcggagttgataatcaatattcaaattttccaatccccaagagaagtggtggggttaggattatctcagcgccttctagtaaattaaaagatttgcaaagcaaaattgcaaaattgctaattaactgtaggcaagaaatattcgctatcaatggcattgagaataatctatcacatggttttgaaaaagatcgaactataataaccaatgcattaaaacatagaggaaaaaatgtcgtattaaatttggatttaagtgatttttttaagtctttcaattttggtagagttagaggtttctttttatataataaagactttaagttacatcctgatatagcgactacgattgcaaaggcggcatgttatcaaggttcattgcctcaaggtagtccttgttctccagtaataaccaaccttatatgtaatgttttagatgtacgattggcgatgcttgctaaaaaattaggttgtgcttatagcagatatgcagacgatattacattttcaacaaacaaaaaggatattcctgaagagcttgctttgaatgttaccgatggagttacattagggcgtaagcttcgaaatgaaatcgaaagagctgggtttgaaatcaatgattctaaaaccaggctttcttttaagcccgccaggcatgaagtcactggactaacagttaatcgatttgtgaatgttgacagacgttactcaaaaaaagtacgagcattggcacaccgtctttatcagacaggttcttacactatcaagaacgccgatggagaggttgatgggactctacagcaattagaagggatgtttggtttcatagatcaaattgataaattcaataatatagtcaataaaaaaaatagaaacaaagagaaatacatattagcgaaacaatccatcttggagcatcgttcgagactaaatgcaagggaaaaaacttacgctaagttcatctattataaaaatttccatggcagtattataccgacaataatgactgaggggaaaactgatagagtttacataaaaacagcattattatctttatctggtcgctatccaggctttataattcgtgataataaaacaaaaaaagaaaaaattaatttaaagataattaacccacaatttaaagagaagtattttctcgatatagaagatggagctgcatcgttcgaaaaattcgtaagaagatatgattcggagtttaaatctttttatggaacaaaagctaacaaccctgtagtgatgatattagacaatgatactgggcctaatgaacttttaaattacatctctagagagtgtcctacttgtccaaatacagtagaggatattagaaaaatgccgtttgtacatgtaatgcataatctataccttattcttacgccgcttgatgctacgggagggatgactgcaatggaagacctgtttgatgcaaaaacactggggaaggatttagaagggcgtaaatttaacagaggtaaaaaattcaatccaaaaaaagaatttggtaaggatgaattttcaataaaagttgttagggatatggcaaaggatatagattttaacggatttaactcaatatttgaagcattgacggatgtagtcaaacattaccgggattctataaaagcaccttga

SEQ ID NO: 249704 - DNA, 612 bp, Klebsiella pneumoniae
atgagactctgtttgacgagatgcgcctcaaatgatacaaccagtctcacaagagaccattgtagagtcattttagatatgggaaacaaagtaaatgaggctgctgagtctcacgaagttttggatgccggaaatttcaattttgttcaagttagcagggcctacttgaaggaatggcgcgcgttgacgcgcaaaagtcctatcgcctctgagattcttatgtacttggtagagaatatggggcgaaccactaatgccgtggtttgtagttacaccactcttatggaagtcacagctgtctcacgtgcgtctgtcgcacgtgctgtgaagttgcttaaagatgatcgatggattgaagctattaaaatcggaaatgccacagcttattgtgttaacgccagtgcgttttggcaggcagccaggaatcaaaaaaaatacgccatatttcaagcaactgttattgcttcctcaactgagcaagataacgatttcatcgaaaaatctaagcagcaactacgttatattcctttcgttggtgaaaaaaatgatcgagcgatcgttggagatgatcttttacctcctcctgatcaaaccgacctcgatttaaactga

SEQ ID NO: 249705 - DNA, 1215 bp, Klebsiella pneumoniae
atgtctagcagaactgctacacaagcttttagtgaggcatggaactctgcgtttcaggggcagcattcacaaatagcttcgtccggtacccagggaatccaacaattaatccaaaatatagcgtcagaaatcagtaatggggtagggtcaaatgtaggtgtttctactgatgttgcaaaaagtagtgcaatcagtgctgtgctccaggctgcaggtagtataggtgcatcattggggcttggtggagctggaaaaggtatctcagggcaattgactgggttgataaacggtcaaataaatagcaactcttcactcactgatggcgctaaaaaggcaatgactgaaaacctttctaacttaattaaagatgggagcagcttttcaaataatatttcgaaattagcaacaaatcttactcaagatggttttagtagctctgacacatatcagaaagccgctcagaaaatggaccaatatagccagtcaatcagcaataccgaaacaaattcattcaacaaaactggtggtcaggcatcccagctggctatgagtaatagcctaaatattgatggaaatatgatatcagataccatgagaacaccggcaaccgaggattcagtaagagcctgggcgtcagcttcaggtctaaatgcagatgcgatagctggtcagtggaagtcaacccgcgatatgatgaacaggagtaacacgctcggttctgataaaaatggtaatgatgcctttgcaaaggtattacttgaccaggcgcaagctaaaactcaaatggaatccggggaaaccgtcgccaaaaatctggctgatattaaacagacatctgcgatgttcaaaaatgcagtcagcatgatgggagccaatgaacaaattcttgcaccagctgcagaaaaattagatcagtttgtggctttgggaagtggcggtcagtatgccaactaccaagaacaagctcaaatggcccccgatacttcagctgtgccaacagcaggagagattggtggaaatgttgccgggcagagagctcaagctactgcgaacctgagtcaacacagagatgcctccacagcacaaccaggtaatacaattggcggaattacggctcaaagccttaacgaggacaatggccgtttgcacgttgcaaatgaaggtggcgcaggtgaaggacgagtactttctcaggcagacagagatactctgtaa

SEQ ID NO: 249706 - DNA, 516 bp, Klebsiella pneumoniae
atggccttaccacgcaagttaaaacacctgaatatttttaacgccggtaacaactggatgggcattgctgaatccgtcaccctgccgaaattcacccgcaagctggaaaactaccgcggcggcggtatgcccggttcagtcggtattgatctggggctggatgatggcgcgctggatacggaaatgaccatcggcggcactgaggcgcttctgtttaaacagatgggcaaagccacggtggacggcgtgcagctgcgctttaccgggtctattcagcgcgacgacaccggcgaagtgcaggccgttgagttggtcgttcgtgggcgccacaaagaggtggattccggcgagtggaaaaccggcgagagcaattccaccaaagtcagcagtgttaactgttacgcgaagctgaccattaacggtgaagtgctctatgaggtcgatgcgatcaatatgattgaagttgttgatggtgttgacctgatggaagaacaccgtaacgccatcggtctgtaa

SEQ ID NO: 249707 - DNA, 516 bp, Klebsiella pneumoniae
atggccttaccacgtaagctaaaacacctgaacatcttcaacgccggtaacagctggatgggcattgctgaatccgtcaccctgccgaaattttcccgcaagcttgagaactatcgcggcggtggtatgcccggttccgtcggtatcgatctggggctggatgatggggcactggatacggaaatgaccatcggcggtactgaggcgctgctgtttaaacagatgggtaaagccacggttgacggggtgcagatgcgcttcaccggctctatccagcgcgatgacaccggcgaggtgcaggccgttgagctggttgtacgcggacgccacaaagaggtggattccggcgagtggaaaaccggcgagagcaatactaccaaagtcagcagcgttaacagctatgcgaagctgaccattaacggcgaagtgctctatgaggtcgatgtgatcaacatgattgaaattgttgatggcgttgacctgatggaagagcaccgcaacgccatcggcctttaa

SEQ ID NO: 249708 - DNA, 432 bp, Klebsiella pneumoniae
atgaacaaacctcagtccttacgccgcgccctgaataagtcggttcagtatgtcagggacaacccggacaagctgcatttattcgtggataacggatcggtggtggcaaccggcgcggcgtctttgtcctgggagtaccgctacaccctgaacgtggtgatcgtggatttcagcggcgatcaggggttgctgatggctcccgtgctggcctggctgatggagaatcagcccgatgctatccataacccggaactgcgcgaaaagctgtttacgtttgaggccgatatcctgcgcaatgatatctgcgatatcagcctgaatctgcaactgacagagcgcgtggtcgtcagtgctgacggtgacgtgtccagcgtcgaagcggtgccggaaccggacgaaccggacgaaatgtgggcggtgagccgtggctga

SEQ ID NO: 249709 - DNA, 234 bp, Klebsiella pneumoniae
atgaaagctgaatttcctgctgacgtgctgctgcaggcactttcactgacggatgcgctggatatgccggaccagtcccgcgccagactgcataaagccatcgccgccgtgatcagcgagtcccgcccggccgcagccctgaatcactacacgtttgcgctgcagctcgatccccgctgcggtgtgaaaaaagacaaagagcggctggagcgccatttgcgtaacagtcactaa

SEQ ID NO: 249710 - DNA, 429 bp, Klebsiella pneumoniae
atgctgcagtttagtgccagcgcaaaaagcaacccgctggcaggccgtaaacagaacccggaaaacctctttaccgccgcagaagaaacgctgatcgagtgggaagaggaccagggcgaaaaaccctccctctttgcccgcgtcaccgcgatgtttaccaaaaaagagcagaccgatgatgcgcgtttctctgatgtgcatcgggctgttgagctggtcgccactgagcagcagagcctgggcgagcgcaccgatcaatccctgttcgcgcaggataagcgcattgctgagctggaaaccgcactgcagaagcagcagaccgatttttctgcgcttaagcagaagctgagccaggaagacagccgtaaagattatcgccagcgtgcgccaggtggtgaagcacctgcaggcacactgaccaattgctga

SEQ ID NO: 249711 - DNA, 507 bp, Klebsiella pneumoniae
atgggcagcaccacggcagaagatggcaccaccaccgcagacccggtgaaggtaggcaagggcggtaaatatgccaacctggatgcactggtgatggatgccgttaatgagctgattgacccgattttccaggatgatgctgatttggtcgtgatctgtggtcgtgagctgctgtccgacaagtatttcccgctggtcaataaggagcaggaaaacagcgaaaaactggccgctgatctgattatcagccagaaacgcatgggtggcctgcaggctgtccgcgccccgtcattcccggctaatgctgtgctgatcacccgtctggataacctgtccatctactggcaggaagacacccgccgccgttctgttatcgacaacccgaaacgtgaccggattgaaaacttcgaatccgtcaatgaggcgtatgtggtggaggattaccgctgcgtggcactggtggaaaacatcaccatcggcgacttcagcgccggtgccggggagtaa

SEQ ID NO: 249712 - DNA, 270 bp, Klebsiella pneumoniae; identical to SEQ ID NO: 237986

SEQ ID NO: 249713 - DNA, 270 bp, Klebsiella pneumoniae
atggcgatcctcaagcggcccgtctcgcggaaaaaccacaccaacgtgctgatgcatattcagggttatttccgcgaccagctgaacagccgccagcgcggcgagctgcgggaggtgatcctcaactatcgcgccgggctgctgccgatcctcgccccgctgacgctgcttaagcactatctggccgagtatccggatcgctacctgcaggcgcagaactattttgacccctacccgcaggatctggccctgcgcctgacggtgaactga

SEQ ID NO: 249714 - DNA, 171 bp, Klebsiella pneumoniae
atggagatggacgtggcctctatgatgaccgtgatcccccgtatctccacgccgacgctgaccccgcaggaaatggcggacctcgacccggcagaccttgccgcaatgtcgatcgaggtggtcctttttttgttgccgaagtcggcgtttgccgatttgccgacagcctga

SEQ ID NO: 249715 - DNA, 1860 bp, Klebsiella pneumoniae
atgtcttatttttttgacacagcagtaaatatcgaaggcaataccaaacttagagctccgcagattgaagcctatataaaaataaaagatttcttcagcgatgaagaaaataaagaggctttagttgtcttgcctacaggtacaggaaagagtggccttatctcaatagctccgtttggtgttgcacaaaaaaaagttttaattatcacccctggacttatcacaaaagatagcataaggaaaacccaagaagttctctctgataatttctgggtaaatttcgatattgtatttagcagtaaagacatacccattgttaatgaatattctgccgagttatcagacgaacatcttttaagtagccacattgtttattctaatatacaaaaggttgcatcaactcgcgataatgcattaataaatagagttccttctgatttctttgatttaattatcattgatgaggctcatcatgcacctgctcagagctggcgtgatacgctccgttacttctctaatgcgaaaatacttcatgtaacaggaacaccttatcggggagataatcaggaaattccgggagtaagaatccatgaaacacctttatctgaagttatgagagataaatatgtaaaatggttaagaaaagaaacagtcaatgcgcatgagttatttttttcaactccagagcaacccggcataaaattatctaaagagcaaatactaatgctcaaagataaagaatggattgaaaaaagcatcgcattatctaaagagtgctctttagatgttatagaccatagtattagtaaactcagagagcttaaagaggcctcgccaaacgttcctcacaaaattttatctgtgggttgtagtatcgctcatgctgaagacttacttacttggtataaagacagaggcatgacttctgtaatagtacatagtgaaatggaacaaagtgaattagctgatgcattaatgaaagttgaacatcatcagtgtgatgttgtaatttccgttaatatgttgatggaaggctatgaccataaatacttaactgttcttgctatatttaggccatatagaagccttaatgcttttgctcaagttgtcggtcgtattttacgagttattcctgaacctgaaatcacacatttcgaaattgataataatggcatagtgatatttcatgaggaaataggcctaaatgtaatgtgggaaaatttccagaatgaggttgaaaaagctcgtagagcaactgtacgcgagtatacgtttactgatagagactatgtcgaaagaagcaacgaattagcaggtgtcgaaactgaaagtgcttatgtcagcgataaagattcttacttaaacgacattgacttcaatgcgttattcgaacaaaaacgccatgagataagcgattcggtaaatcagcaaatagaaaaaattagactggctggcttagatcttccagaggatacattagaagagttacgccagaaattagctgaaaaagaagttcagaaagctgctgaatacattgatcctgagttaattgagaaaagacctcaccaagcaagaaaattaatgagggatattctgaaaacacgcactcaagacgcggtatctaatctactgattgataatggtattggtgagaaaagctcagagctttatgcgatttttagccgttacatgccatatttaaagacaaatgaggctaatgatgctatattggttcgatatgtttttataaagctagccaaagcttatggcccagttgataagcgagataacaaagcccttctccagtcgattaatgatttagataaggttctcgcagaagttgagaggatgattaaatga

SEQ ID NO: 249716 - DNA, 423 bp, Klebsiella pneumoniae
atgacaaaccatactcaaatcatgaaagagattaataaaataatttctttttgcatggtaaaaggggtgcagcctcatgagttagttacatctatttttgagcgtgaatataaacacatcgaaacttataagaaaggtgagctagttcatttcattttaacttattcagacattcatgatgatggtgtcaatttaattaaaatgaaatatgtctataacgataaacaacaattactatcgattgcccaaaaaattgattcctcaagctataagatccaatgggatcgcagtgaaaagcttgatgcactgctcagtaatctagcatcgcagttgcctaagaacagttcgattatcagtcaacttagagaggcaattcctgatgattttaaaactattttttatccagttttaaaagttgcctga

SEQ ID NO: 249717 - DNA, 903 bp, Klebsiella pneumoniae
atgcccattaacgaacgagtaaaacggattgtctgggtcagagatggaggctgctgtgcgatttgtagggaaagacttcttattgaagatgaaagtggactgtcatcacagtttatcggagaggtagctcacattgttgcagagcagcctgaaggtccaaggggaaattcaccgttaaatcttaagcaacggaatcatgaatcaaatttgttgcttctttgttgtaatcatcatactgaaattgactctggggtagaaaattttcctacagaacgtcttttggaactccagcgagagcattctctttggttaaaagacaagcttaaagctgaaaatccatggaagactacattacataatttttactatctaaatgtcccaaggctgttagccctagctgctcatgcaggcatcaaagttgatctctctgaatacagtaaaatcattgcgttacacgagttaggatggaatttaaattacctaatgatggcatttaaaaatctctttaaacagatagaggtaaaagccattactcctgaaaagctggtagagcttgggtatcaggctagaggatcaatcgttgccttcgatcagcaattccgaacgaagaatatagaaatgcctagttctttaggtgcgtatgctcaggctgttcgtgggaatgcttcgacagatccacaaatctatacctcgttctcaggaattaaggcaacgcttattattgatcctcgttggattactactactactgcttttgtccaattccgaccttcaggtgggcgtggaaattttgctgggtttggtattgttaatcatgttgacgagactcgtataagcatcacaccattggtgattggattaccttctaacccctttatggaagcgttgtatggctccgcgtaa

SEQ ID NO: 249718 - DNA, 636 bp, Klebsiella pneumoniae
atgacaagtaactccgatttttttgatgtctctgagctttttaatattcctgagcaattcgatatcccagatgctttttatcgtattgacgatttttcgaaaaaatttaatgtaagacaggaagatattatatctacatggctggataataaaattagtctctatgtcaatcttcgttcagaatactgccgaataattcgtaatgcgaataaaaaagaacatcgttatgatacctttgatatcagagcaggaggggacttttatcaacatgagagcagctctcagtttgcagtaagaacatttataccttgtgaccaatctgaaataaatgagtaccctgtttttagcggtagttctttttttaaatatatttacaatggatatgccagtggcttttggcgactacaacctacgagtacaactcacttagctacagataattacaatcttaaaaatgctaatgaattgtggaatgaaactccaggagaagttagagtttttggtcgggatgacagggattgtttgatttttgataaaaatattttgtctcccatgaatgtttgtatattgacaactctggatatcaagagttattccaacaatttaaaattgaagaaaataaaacccatgaagtag

SEQ ID NO: 249719 - DNA, 237 bp, Klebsiella pneumoniae
atgaatacaacatttacccccccacctgctgaaaaacgactacagattttgcgcgattacggtgagaaaggcgaccggttggtgcgggaaaaggaacggcagtatatcacgtccatttctcggtcaacagcttggaaactggaacggtcaggtaaatttcctcaacgcaagtcaattggtctgaaatcctgtggttggttattaagcgacctactctgttggatcaatgaacgctaa

SEQ ID NO: 249720 - DNA, 1410 bp, Klebsiella pneumoniae
atgtcaggaaaccaaacatttcctatacatctgtttccggcaagaatcgggcatgcaatttatgaggtagagcaacaaactcaggctccacttcccttgattgcagcagagatgcttggcgtgatttctctggtttgtcagaaccagattgatgtctgccggctgaataatctgcgtagtcctacatcgctttttatcgtgacaattgcagaatcaggggaaaggaaaagtacagtgagcaagcttttaatgaagcctctgtatcaacgagaagagcagctttttgagcactataagcaggagttcatggaatggcaaaataacataagggtcttcaaggtggaagaaaaggccttgatgtcaaagctgaaatcggagattcgccgtggtaaagacccatcagcaacacgtgattctttgaaaacactgcaagcaagttgtcctatagaacctgtcaggcacaagtggatatttaacgatgtgacacctgcggcgctaaaagagcatctctgtgggcacaacaggtcagttggcatgatgtcagatgaggccgggagtgtttttaatggttatacattaaatgagttaccactcattaataaaatgtgggatggatcaacttattcagtagaaaggaaaaatgagccagagagattaataaaagatgcccgactgacgctatctttgatggttcagcctttagtcatgaacgggtatattgagaagaaaggtgatatggcaaaagggataggattttttgctcgtactctgattagtcatccctactcaacgcaaggacagaggaaaataactaatccggttgtttctagtgagcacttaccggtatttcataagcgattaatggagatcgttgatgaaggtattattaaccagggtgaaagaatttgtttgcatttttccgctgaagcggaactggcatggattgatttttacaatcgaatcgaatcagaaatggggcttattggcgatctgtcagacttcaaagattacgcctccaaagtagctgaaaatatggcaagaatcgccgcattgttgcactacttcaacgaagataaaggagatatatctcttgtagccgtggaagctgcaatagcgatcagcctgtggtatgcaaatgaacacgttaaccttttttctaaacctaaggaatctgtgatgataaatacagatgctgatgaattgtactggtgggtaaaaaattactgtagccaacattttttaccatacatcaggaaaaacaccatacagcaatatggtcctaatcgattccgggataacaaaaaaacaacagagctattaagtatgctttattctcaaggtaagattaagacctataaaaaagggaaggctatttttattcagcctgtggatatattagatgtgatttaa

SEQ ID NO: 249721 - DNA, 618 bp, Klebsiella pneumoniae
atggaattataccaaggttcccatggtgagcatatccttgcataccgagacagaattgctcagacagttagtaatgctatcaatcaatttcctcgtacaatggcattaagagtggatcttcattacccacctatttgggataatggtgatacggtttgctgttttcctaaccttgaaccaggtgcaatatcacgctttcaggattcgcttaaagcgattcttgaagcacatgagcatcgcagaaagtttgtagggatcagagttaacaaaaatgttgtacgaaatgtctgggcaagagaatactcaaagagtggaaaatgccatttccatatctgcttattttttaacaaggacgcttactaccatctggggcatattcagcatagtggtacacttagcaacatgatagtcagagcctggtacagtgctctcggactggaggctgaagattgtcgcgaacttgttcattttccagataattgtcgttatatacttaatgtaaaagcatctgattttgacattatatataatgctcttcttagtcggcttgattatctgactaaacttgatacaaaggtatttggtgagggagataggaatttcggatgcggtagatag

SEQ ID NO: 249722 - DNA, 1794 bp, Klebsiella pneumoniae
atgactgatataattgacagctattctgagttaataaaagaggcttttattacgcccattcgtacagtaacggtcattgatgacgaatatcccacactactttcattaataacagttccacccgatgaaaatgcaaaaaaagttgatttagacaatgctaataccaatcgactaaaaaaaataatctctatgtgtcattcaacatatcgatggagtattgacgtattagatggacagacaccagagtttgggaaagtcgagcctgtgccatctcatattcggcacagtgatttaatcattcttgattaccatcttgatggagaaggtcctgcggatgaaggaaaacgcgcccgtaatataatccaatcgttagctaaaagtaatcattacaatttagcacttgtgcatactaagggattggatggagatataaaaacggttttcactgaaattctcaaggatctaatctatattagtccaaagcatgaacttcttccgtctaaggagactgaagacaagatagaagcatggctcatcgagaatgaagatgagattgactatgaatggctcctagaagatatagggttgtacgatgtgctcaaaatttatttatcgccaactccagagcgctgcatcaaccctagagcgccagagcatccactccgaaattttgctacagaaattactgaagttgcgggtaagattgatgttactcccgttgattttatgaaatggcgtttcgctgaaatattgaaaaaaaatgatgtgaagtttagtgaagactttgattccggtttagattgcttttggtgcgaagaaacaaactatatcagcactggtaaaatgtttatttccgtcattaaaaaaggtaccgaggatcctaaagaagagttaattgactcgctgattaaggcgctaacgaaacgtaacgcttcgccaatgcatctgttaatggcaaaaatgcgttatgaattagatgaaaaaggaattgaacaagcagcaaaaataatcagcaaccggtacgctcaggctggttggctatataatctcttaaagaattctgatgatgactctgctcatgataaagccattaatttgcactgggaacagttagcaactgcttctagattggaattaagaaatttttcaaaaagaattatggcagttgctaaaaatatgcaccctggggatgaaaagcaatttgtgaaaactttcttccgtgaatgcatgaatcaacaagaccttacgctaggtcacctaaatgcattctcatgttctatgccaataagcaatagccatttaatgacaggcactgtcttgaatattgagggtgagaaatgggtatgtattacgcctgcatgtgaccttgtaccaggtcagaaaactccacaatgggaatcacgtattgggcagtcttatctggtgtttaaagcagtgaaacttgaaatagctaaactggaaacagctaataaaaacgcaaacagaaatgattacatttaccttaatacagatacagtcccctcagcatatgaattaggtagcgataatccatcgtgggatacattttatgccgctgacttagggcgttatggtaaagaacattcattaactcttttttgtgcacgggaatgtacggttccaggagaaaaaacactattaaaaatgaaagagttgacagctcatgccatagcagaacttcgttatgagtatgctttgaatttattgcataaatttggttcctcacagactcgagttggattagattttcaaaacaaaaataatatgtgggcataa

SEQ ID NO: 249723 - DNA, 2916 bp, Klebsiella pneumoniae
atggctaatgtagatgcggcagaacaaaaactaaggataatacttgccgaagttagggctgatattggttcggttgagagcgaagaagatgctaaggtaaaaatcatcaacagaatatttcacgagtgcttggggtggtcttttacacaattttcttgtgaaaatcagcacgactctgggtattctgattacgttttaaaaattggcggagagccatcattagttgtggaggcgaagcgtattggcatccttggtatagaaacagcggtcctggatagacatcgtgagttcaaaatatcagggtcatcgctcaagggggcttttcctgggatccaacaagcatttagttacgctagtgaagctggaattcctgttgctgttgtaactgatggggttagatggataattttcaaaacttgggtcaagggctcatataaggataaagaggctttcgtttttccctccctagaagcgttagaaaattcattcagtatattttacgagctattggcttacgagcagttctcggaaaaagtttataatattttatttgatgatatccataatagtcgtcagaatctcagtttacccctcaaggctgctttggaaccggatgaaataaaaatccttcccaagtcaccgattgcgtttgatctcgaaaaaatattcaataattttttcactcagttgactggcgagcaaaatgcggaaattatgactgagtgttttgtagaatcgaatgaaagccgtattgctgattattctctagagaaaattacaaccgcgatcttaaacaaccttccaaaaaataataaaattggtagtgagttgagtgatttgatccatggcaacgttaatgcgcagttgccggcagattcagatatgtcagtatttatagttggtcctactggatcgggtaaaacaacctatatccagcgttttttttctaaaatcctcccgtcaggaacacgggacagctgtcttactgttaatataaatgctctagatgcaactggtgaagagactgtaactactgcttggataacagaagccattattgcatctcttgagtcgaagctttttagtgaagggtatccagaatatacggatctacttgggatgtattttagtacatataaaagaatggcttccggttatctgaagaaaatatatgagagtgatcgaggttcttttgatcagaaattttcagaatttcttgagggtgaagtaaaaaataatagagagggttacttaggtaatcttcttcaatttacagttcataataggaaaaaacttccaataattattgtggataatactgatgaatttactttggattttaaagtaaaggtatttcagttgtgcaatgcctatcgtcggcagattaagtattgtatgcttatgtttcctgttactgataaatctgcatggagtttttcaaaaactgatatcttcaccattcatcaatctcgttctttctttttacctactccatcgccacgagaagtgtttagaaagagaatcgattatttaaatagaaagttagtcaccgctgatgtagtggaaaaacgagaatatctaaccagcaagggtataaggatagagcttaaggatgtatcgcgattcgctcaagttctggaagacgtatttgtcgaaaacaactttacagctaaggcgttaggtgaattaacaaactataacatacgttcgatcatgaatctttccaaaagggtgatcacttcaccagtaatgaggatcgaggatcttattacaagctatgttacgactgagcctatcagttatacaaagttcgttgatgcactcattcgcggtgattatgaggcttatcgaacagttactggggatgattttggcattatttcggtgttcaaagtatatagcgagaaagtttattcgcctctcttgactttaagaattctagcccttcttagagctatccggatctcagggcgggatgtagatgagaggcatatatctgtgtattcgtcggttaattactttgaagcacttggcattgatgtggttcatgtccaaaaatgtctggccgagatggtatcagtgcggttgattgaaccatatgatccgtccgtcagtgttttaagtgataatcaaaaaattgcaattacttataaagggcttgcacattacgatttagctactcgtaatagcgtttatttttatcaaatggctcttactaccgccttgtccgatccggaaactgcgaacaatattgcatctttttataaatccaataagccctttggagaaataacagcctacgtaagaaagcggttttcggagtatttactatttgaagatgcgaagttcgtttcttcagggcacgacagggaacagtttgagtgtcaggtggaattgttacgggatatcaaagcgttcgccattgatagaaatggagggaatggtgcgattcctgacaatataaccagtttcctcggagagagattagttggggaagtagaacgttatgatccagaaaaagattatgggttcgtttatgtaaaagaactagggcatcaggtctatttcaaattggcaaatgtagaatctaagggcatcgattctctctatgattctgatgttgtgtattgtacgctcggccaaggtgaaaaaggggtggtggtcaagtcgatagagggatttgttgaagaattgaataatttgaaagttgaactttgtgaagttaagttttataactccaagaaaggatatggcttcgcagccataggggcgacttcaaatgaggcattctttcataaaactgcgttcccatataatttttacgagcatcttaaagaggggttacagtttgaggctgaggttaggttgaagaaagatggaaaatatcagatacgtaggtcaacaggattgagttga

SEQ ID NO: 249724 - DNA, 318 bp, Klebsiella pneumoniae
atgagcaaccccacatggggcctgcagcgggatatcacgccgcgcctgggagcccgtctggtgcaggagggcagccagctgcactatctggctgaccgggccaatatcatcggtaagttcatcggagcagaatgtcttaagctggatgtggcatttccgcattttatcagtcagatggaatcgatgctgaccactggtgaaatgaactctcaccatgcccactgcgtcactctgtaccacaacggtttcacctgcgaagccgatacccttggcagttgcggctacacatacatcgccatttatcccactcaacgctaa

SEQ ID NO: 249725 - DNA, 864 bp, Klebsiella pneumoniae
atgaaaattcatgaaggtttgcagtcgctgcagaacccgctttctggcctgccccaatgggtatctgagcgcattctgcagcagataaatcagttaacacactacgagcctgtaataggcattatgggaaaaactggcgcgggcaagagcagcttgtgtaatgccctgtttgccggggaggtgtcaccggtcagtgatattgcagcctgcacacgagaactcttacgcttccacctgcaggtgggaaagcgctatatgacactggtggatttacccggtgtaggggaaagcaatgcgcgtgataaggaatatgccacgctctaccgtgaacaacttccccggctcgacttggtactgtggctgattaaggccgatgaccgggcattggctgtggacgagcatttttaccgtaaggtaattggtgaggcatatcggcataaggtgctttttgttatcagtcagtcagataaggttgagcccaccagcagtggtaatgagttaagcaccgaacaaaaacaaaatatcagccgcaaaatctgtctgctgcatgagttgttccaacctgtaaaccctgtttgttcggtgtcagttcgtctgcagtggggactacgggtgatggcagaacggatgattcgttgtttacctcgtgaagccagcagcccggttgtagctcagcttaataccccacttcgaaccgatgccgttaataaaaaagcccgtgatgattttggtgaaacggtcggctcggtactggatacagtaagttccatgcccctgataccagccccggttcggtcagtcatccagtctgtgcgcgacatcgtggtatcagtcgcccgtgcagtctggaatttcttcttctga

SEQ ID NO: 249726 - DNA, 1209 bp, Klebsiella pneumoniae
ttgaaagcaattgatttgtttgcaggtgcggggggattctcactagcagcccataaagttggctttgatgttcaggcagctatagagcttgataaaaaagcggctgaaacatactactataatcttgtaaacaaatctggtgctcaaactcaagttttttctcaagatatcaatgatgtagacattgattctttaatgaaatttcaaggggttaagcaagaggaacttgatctattgttgggtggtccaccgtgccaagggttttcatcacaccgcatcaacgatgcaggtaaagatgatccaaggaatgctttgttaatccgatacttcgattttgtcaagaaacttaaaccaaaagcttttttggtcgagaatgtcccaggattgctttggccacgacatgctgaatatttagataattttatgactttagcacgagaccatgattaccaagttataggcgataaaccgtttatactgaatgctagagattatggtgtaccacaaaaccgtaaacgtgcttttattctagcagtaagacaagatatttgtgcagataggctacaatggcccccagcacctacacatactaaattgggcccacaacgctggaagacagcctccagcgtttttgaacgtccatctcaatcgatattgattgaatttaaagagcgtcttatagagaaatttaatttttcacatgacgctgccgaaaattgtattaatcggttggaatggggtaagccaatcgacgaaagtgatccatgtaatactcatatgattcattcaccagaaatgacaaaaatttttgagaatacgcctcttatgggggatcgcattgaatccgggaggcaacttaaatgccatagaaactacactgggcatttagatgtttatggaagaatatatccccacactccatcaaatacaattactacaggatgcaacaacccttctaaaggccgctttgttcatccatggttacctcatggcatttcattacgacatgctgcgagattacaaacttttcctgatgagtttatttttcagggaggttctatggcagtcgcgaaacaaattggaaatgcggtacctatcaagctaggtgaggcactacttggtgagataaaaaatatgttgataaataaatgctcatctttggcatccgatactaagactgttaattgcgataaggaatatacgctatga

SEQ ID NO: 249727 - DNA, 2664 bp, Klebsiella pneumoniae
atgacgagacatatcacatttcaaacacgagcaagaacaatagatcatcttggccgtgaacaaattgcagattgccctacagcaatttctgaactctggaagaatgcttatgatgcttatgcccgtcaggtcgcgcttcatatttttgatggaaatataaaaatcgcggccatcgttgatgatggccatggaatgaatcgttctgagtttgaatcaaaatggttaattgtaggtacagaatcaaaaacaaatggttttgatattcctgaaaaagatagagatggtttacttaatcgtcccaaacaaggacaaaaaggtatcgggcgattatcatcggccgcacttggccctctattattgctaatatctaaacgaaagaacgatgattttgttgctgcattaattgattggagacttttcgaaaatccatttttatatttaaacgatattcgtattcctgttacagaatttagtgttaaaaatgaactttacgacgtactcccattattatttgaccaaatgatggggaacatttggggggcatcagacgatcccggacgaactgctcgtattgcagaagcatgggatgcttttagcagacaagagcttgaggatggacaagaaaaaactacacaagaaaaaatcgaacaaacactcatagaagaaatttttaccgagcaacattttagcaaatggccagtctggtctggtgaatcttctcatggcacggccatgttcatggcagatgttcagtacgatatttacatccaactttctgatacacctctttctcaagcagatgacactgaaaaaagcacacgtgaacgtttttttcagactttatcaaacttcacagatcctttttcacggaatggtgaaccactaattgaagattttaagtatactgttaccggatggataaacaatatacccaaaattatcatcggtgaagatcgtgagtttgatctgcgtaatcttgaagaccttgaacacataatcgaagggaccgttgatgatgaggggtattttagaggtagaattcgggtatttggtgagtggatagaaaactatactattaaaccaaaacaaatttataagactcggaaggacagtgcattcggttcatttcatttgcgcattggtacttttgaaattcaaccaagtaattcatcattaaatgagctacagcatgctaactttgtggagcaggcagagaagtatgctggtttcagaatttatcgtgatggactccgagttatgccttatgggcgagtggataatgattacttctcaatagaagaacgccgttccaagcatgctgggcgttatttttggtctagccgtcgaatgttcggccgcattgcaattacaagagaaaacaatccaaatttaaaagataaggctgggcgtgaaggtttcattgaaaatcgcgcctcaaaattatttagggaaatagttgaaaaaatattattagactctgctgacaaacactttggtggaagatccgaaggcagaaaaagcacaatagcagatatacgagaaaataaagccttattaaaagcagaagaggacagaagcaaacttcttaaaaaagaaagagctcgcatccggtcgtcaattaaaaataatatcaactcactaattaaactcgttgatacactcaacgaatttaaagaaaacattaatggacgaataaatttagattccattgatgatttgcatgctttcaaaaaagccattgatgattattctgaagtacttcaaggctattctcttagtccaatacctacaaatttgggaagattagaggatgaatatcgagcctataggaaagaagagctttattgcagagatgcaataagagaactaacatatgtcataaataaagccattactgattcaacacaaaaaagtgactatgaaaaagctcaagaggtatatcgaagcaaacttgcgagtataaataattcaattactcgatatgcgacacgtggaaaagaaatgcttcagaaacaacaagttgaatttgaagaacttgttcgccaatgcagaggggaatttaagcaagttatggacgattatcttgaagacctgaaactcaataattattcattatcagaagtacttgataaattagatgcagagcatcaaagaattgaaatagaaaactctcagaagttgtcaccttatgtaactgctcttgaaagaattaatgagcaaattgatttggaaggtttagcaatccatagcatgaatgagacaactagatatcgagatgaattagtacgattacactctctggcacagcttggaattacagttgaaattatcggtcatgaacttgaaggtttagaccaagaattaacttatgctttaaaaaccattgatgatggtaaattaactcacgcgcagcaaggaaatattaatacagcattaaattgccaccagacattaatggataagttgaaatttctgtctcctttgaagttatcaggaagaaaagagcttcaaagaataaacggacaggatataagaaaatatatcaatcaatatttttcaaaacaacttgaaacggcaggaattaaattatcatactccaatgagtttgatgaaattgttattgtagactgcccaatacgtgattcccattgtggagttttctga

SEQ ID NO: 249728 - DNA, 540 bp, Klebsiella pneumoniae
atgagtcctgattatatttcttatgaaacattaattgctgcacgcgaagccgcttactgggcaaagctttcaatgattggcacgtggttttcaggaatagcaacttttttagctgttatcacttcactatggatagccttaagggacaggatgccattcatccgggggcgagtaaggtacgggcgcataataactgaggatatcgataaaccaataataggcgtaactgttatcaatcggtcttttcactcgataataattaaatctatatgctgggatgtcgggagagaatatgaactacaacaattatttacaaactcggattcagacccgctcccagttcgattagagcatggtgaagaagctaatttcagaatcatccttgatgatgatgattggcttaaaagaatggctttgcggttaacaaagttaaactcgcatcccaaaaaactccgctgtgtgatcgtactttcaaccggagagagacgccgattaaaggtagctaaacggataaaagaaaaaatccaacaatttatgtaa

SEQ ID NO: 249729 - DNA, 528 bp, Klebsiella pneumoniae
atgtataaggttattctttttcttggaatattgctgagtttttctgtgagtgctacatggaaacttgagcagaaaggtgagttgatagtattaggcgctgatggtactcataatgaatggcatttggctctatatgttcaaaacaaaactgcagaatggcatttgactccaatcaagaaaatagaatgcgtcgaagatccatcttggaaatcggtcgagctatttcttgatgggaatgttggtcatggttatatgcgatgtttaaatggtaatgtagaatacaggatatttgagtcgggaaatcgcaaggatgatactggtgttactttctctatatcatacttgatttttttaatgcagttggaaaaacaatctttaatagcaacaatatcagaaaaaacacttgactcattcgaaggtcgtgggtttaaagcgcgtttgcagaggctcattgagttaaataaacttcctgatgagattcaggaggagttttctgaagagccagactccatcgaaaatattcattaa

SEQ ID NO: 249730 - DNA, 531 bp, Klebsiella pneumoniae
gtgactccaaatcagttctacaatatgaacctgcgcaaaacatacagtgaggttttgtttttcagttgtatagcgttctctcgctacttgcaattaacctcaatgtatgtgatgttgctgcttaccgaggttggctcggttagggcgggggaagctaattttctcctaagttacttttgtgattacgaggtgagaaaagtcatgaatttagtagatcgagcgctaattcgtagcgtcgcctataatcaggtgaagctagagaaggaaaagggtagggtatactcaccagaatctgtgattgacatttggaataccgattataatttagtcaatcataacgacttacctgccctgcagaagcagtatgctctggaagtcgccgcagagcgcgcgtcagtgggagtttcgattcctattaacaaaactggtgtagttgagattaaatttgatgccctacgtggtcagctttcattagggccaaaagccccttctggctctccaggtaatgcaggctcagcaatcgaagcataa

SEQ ID NO: 249731 - DNA, 639 bp, Klebsiella pneumoniae
atgaacacgatgacggcggtaagctttacattagccacaatcatctcttcaaccggcgcaacagtaaccaacgcagccagcatgcctgctgcatacgttgctggaaattttaagcaggttgaacgtcgttcagtacaacctcgagccacttcgagaggtggttcgttgcaaagttatctgcggtttgctgtgtcatttaagcaaatggtaaccgccatacagcgcgaaaattcaaaaatggataccgctattgatgaagcgctgacagctttagaggcaggcgaggaaataatcatctctgatgaggttgaattgttagctgctactggtgtcaaatttgcgaacgcgggtatagatgtatgtgtacaggcctttgataaggcattggaaaatgcaaatgcaaatgcaagggaagcgaagcaactcactgaacttcgtgaactctccatcgaaacattaatgggggtaatcacatctatgaataaagtgactgaattgaagaaaaaggcggcgagcaatcgacctgaaccaacattagtcattgatttaccacgtatggaaatggcattatcttctgaatcaattcagatcgagaagaaactctcacgccaagaaatccgtgatttgttgagcgcctaa

SEQ ID NO: 249732 - DNA, 180 bp, Klebsiella pneumoniae
atgaataaccgcattaataaagtaccttacagtagtagcggtgataaaccagcactccctaaaaccgataaggttaagttttatcatgaagacgagtatgcttttgctcatttcatgtatgacgatataaccgacgaacaagacaatgcagaaactaaaagcgagaataataacgactaa

SEQ ID NO: 249733 - DNA, 600 bp, Klebsiella pneumoniae
atgagtttcgatccagaaataagcacaaaagaaaaatttcaagatttaatggatatatgcaaatccaattttcaaatgactgatgacgaagcaaagtgcttttacattatgatgaatagatgcacccccagggttgatatggggccaaacagagttggaaagggatttaatgaattacctaaatcgatgtttgatttatcaagaaggtttgaagaatgggaaaatttagttacattgggtcatgcttcgaattataaaggtattccttttgaaatatatataaaaaacaataataccttagctgagatcctccttgaaccagccgaagcaatgctacttaatcaaatgtgtaattttaataacatacctaaaccaccgtcaaagctaacaatggcaaaaatatttaaattttataaagattctgaaatgccaacggttaaagtcaatcattcaagcacttcatttaaagaacataaatttcaccctatatacgaatcatgcgaacaaataatagcagaacatgaacagcaaaagatatcacaggttttccagaacggcacacccggcagcggggcaagtaaacccaaaagaagaatgtaa

SEQ ID NO: 249734 - DNA, 1947 bp, Klebsiella pneumoniae
atggcacaaccaaaacaatctgtaaatgcaaagggtttaaaagaatataatcacaaaggtttccttgcttcaaactctggtgctaacaatgtagatagcccgctttaccccgctattggggatgcaatgttttttgatgcagtttcaacggttaccgtaactgatagcaatcctgcaaagttagttctcgatatagaggagggagtttatgctgatgttaaaccccaaaccaaatattattataatgaacttaaaatacagggtgtacttggcggtaaggcagtaaacaaaaacaaagaagctcttcatgatcaacatgaaggtgaacattttgttttatatcttgatggtattccacaccatcagcaacaattagcagtagaaatagcttttagagtagtaacccaccctcactattttataaaaaaagaacaaggtaaaaacagacctccacaatggcaagcacatataggaacacaaagtgctcttatatgggggattcatcgtggtcaaaaagattacactggtaaaaacattgttcctgaccatgttcatatatttagatcaatgcaatgtatatcagataaaaactatattgtcgatttccagaacggaagaccaaaagcagttatagatgctattaatccaaatagacgaaatgtattgccatctatgtcgttagctcgcaacgacataaaagcatcagtacaggagcagattaacgaagcatgggcgaaggctggtatagatgcaaaagttaacttcggaactctacaagatcctatcggtgtagcttccgttattaaatctcaacaaataactaccgaagcagaagagaataacgaacctgttgcagaaattgcacagaagcatatcaatgatcaatctcttagtgaagaagatatttcagactcattgaataatcttggaaaccttgatgaagaatctattgaaaaacttgaaacaattattaagaagacagcatttgatagtgttcaacaagttaaattgaagcagtctcgcattaaagatcttatggcagagattgttaaagaagaacaagaattacaggctattaataaaggcattctttatgaagctaagtacattcatgctaaaaacctgttaaatgaaacttccagaaagcttgaatctgtaaataaagaacttgaagaagcaaataaactaaatgacgatttcaatgaaaaaatcattgaaaatacgaatactatttctaaccttaatgatgaattagcaagagaaagaaaatataacgaagaacaagaattacaacttaaccagttagaagtagagcttgaaaccgaaaaaaatataaatgcggaaaaatcagcactcattacaacccttaccgacaagaatactgttttaaccgctaatctggaagttgagcaagagaaaacggcagaactgacagcagaaaatgcagaacttaaagagaagcataaagttgagatcgccactcttcgtagtgagttcgctcagaaactggttaaataccgtaaaaactttgtggctcgtgttaaaaacaaagtggcaacggctgttgaacatgcaatacaggcatttagagataatgaattaccttcattacttaaagatgcaacaaccaaagctgttagtgaatataaattaaaagaattgcctggaaaaattagaaaagtaagagaggaagaagccaaaaaatcagagaaagaaattaaagcattaaccaacgatgtttcaacattgaagactaatgtaaatactttaacggctgataaagatacattgcagaaagattttgacgaattgtttaatgcaagcaaagaaaaagcaacagaaatgaataatgaaattgctcgtcttaaagaaattcttaaaagcaatggaataaaccctgatggtgataactcaccaaaaaagcctaaaaatgacaataagatataa

SEQ ID NO: 249735 - DNA, 909 bp, Klebsiella pneumoniae
atgattataactataaatgataacgagtataacaagctatatgaggctgggaatttagatagagaagctattattgatacaatagttaaggcagagggtaccgataaagtcaaagttagtgtttgttacaacggacagaatccattggatataaccataaatgaggaagagaaagaaacattagatacattatcgtttttaaaaggaatatttgaagatataaacaatgttattatagaacatacaccgagcgacacaatctgtatagctcttataaaatggggctatgatatgacacagcttgatgattttggcataccccatattgctaacttcggtaaggaagcactattagaagtgataaagaacgggttagatatgagtcaatttacacaagctgatcattttgattttaatcataatcatagattctctcgttttataaatacaaatgaaaagcttgaagtctttcttcagtctggattattagcacctgatactataaaagactatgaatgttttgaacatcacaaactttataataaacctgatttaaatctaactgataaggggtttgaattgcttttaaaatgctatgacagcatatcattaaacaccgaaatgatgagttcttatagtatattttcaggtaaaaccacaaataacccggcagtatttaaattaacagacaatgataaacatttagaccatttgtttaaacgatatatagaagtgagtacggataaaattgaagctgttaacttcataaaagacttgtttcaaaaatccgaatctcacgaattaaatagtgggaactaccctaatacggttacgacaatagaagatattgaaataaagaatatatttaagcaatcacaaccaaaagccattaccagaagaagaatgtag

SEQ ID NO: 249736 - DNA, 909 bp, Klebsiella pneumoniae
atgagaatagaaaatttaaaaatgaaatgtttatataagaaacacaggttttctgggaaagaagacttttcagatatgattaatgttattacaagtcaaggaggcatggataaaataaagattatccctgagtacggagacataaacgataatactataaagtttcttaaagtaataggatttgacattaatactttaaacattgaagtaggaactattgaatctggaatagctttaataaaaaacgggtataatctatataaaactggttcggcatggataccatccattgctaagtgtgaacttcctgtaatcaatgaagcattaaaccgagggttagacataacaaaattctcttataaaaatcattttgacactcatgaagcttacaacgaatttgatgatgaatattatacggtaaccaatcctttttcacacttccttaaaaatcacaataatggtatggacggggtgttttctaaatttgattttatatgtgaagacaggttaaaactatttctcgataaaaatattttaaacaaggatactttgaaagagtttgaaagagaaggtcatccactttattactattacccatgtaataagggattcgaagataaaaacattgagcgattaatgaatctttatcaaaaggtggagataaacgaaggtaagatttttgaacaccacaggcaagcagtaagaaatcatatattcaaacgacagattgaactcagcgaaaatccagttcaaacttgtaaggatatagttgaactacataataagtggaggatagatataaaatcaagcgacgaaattcttaaaccacttattgagagtgttttaaattctaagcccgtagaaccacaaacaccgcaacgagtgaaattcaccagaagaagaatgtaa

SEQ ID NO: 249737 - DNA, 921 bp, Klebsiella pneumoniae
atgaccagtcgtccccagatgataatcaacgtgttacaggcgaatcccggccagcagttcactgcccgccaactggcgcagaaaatcatcgatcactacagtacagaactggctgagaaacgtaaaaatccacgttttgctagcgatgaggcttttttaagtcaaattaccgctgaagttggtggcagtcggacagttaaagcgaaagctatgtgtccgcaggtgatgacgcgtgataagccaagaccacgattgttttattggggggagtctgtggttgaacaggcggatcctaatgtagcccccgaaccaacggttgaaacagttagctttaccgagcattcgttatatccgctcctgattgattacctttcacaggaagaggggttactgtgccgtcgtattgacgaaaagcgttccagtaacaacaaagggttgggtggcaaccattggctttatcctgatattgtcgcattagagcctcttgataaagagtgggatgatgtggttcaaaactgcgttcgacatagcgtagggcgtttgacacggctatggtcttttgaggtgaaaaaacagctaaaccgtagcaatgtgcgtgaatgtttcttccaggcagtcagcaattccagttgggcgcatttcggctatctggtggcgactgaaattaacgaagataagcagcgtagcgtggagcgtgaacttcagatgctctgtgcgttgcacggtattggagtgatcctcctggatccacatgatttctctaatagccagacattgatcccagcgcgtgaacgtaccagcgtggactggcagtcagtgaaccgtctggtggaagagaatcgggattttaaagattttattgaactggtgggggaataccatcagactgggaaaattcataaaaccctatggaataaatag

SEQ ID NO: 249738 - DNA, 3099 bp, Klebsiella pneumoniae
atgtacgaatacaaggctgttgccgaatcaaatagctttatcgttctcgatagatacgccagggcatggcagcttaatgaaagctaccagagcgaaggtgacctggaacgagagttcattcaggatttgcacaatcagggctatgagtatgagcctggtttaaataggcctgagaagctgctggccaacgtgcgcgagcagttgcagaccctgaacaacatgcagtttgctgacggtgagtggatgcggtttgtggagacctggctggacaagccaggcgatgacatcgtcgataaaacccgcaaaattcacaacgactatatccatgattttgtgtttgacgatggtcatatccagaatatctacctggtagacaaaaaaaacattgcccgcaataaagttcaggtcatcaagcagtttgagcaacagggcagtcatgcgaatcgttatgatgtcaccattctggtgaatggcttgccgctggtgcaggtggaactgaaaaagcgcggcgtggcgatccgcgaagcctttaatcaggtgcaccgctacagtaaagagagttttaacagcgaacattccttgttcaagtatttgcagctgtttgtgatttccaatggcaccgatagccgttattttgccaataccacccagcgcaacaaaaacagcttcgacttcaccatgaactgggcgaaagctgataatagcttgctgaaagacctcaaggactttactgcaacctttttccagaaggacaccctactcaatgtgctgctgcattattcggtgtttgatgtgagcaatgcgctactggtgatgcgcccttatcagattgccgctactgagcgcatcttgtggaagatcaacagcgcttatcaggccaaaaactggagcaatacggaaagcggcggttatatctggcacaccactggttccggtaaaaccttgaccagcttcaaggcagcacgcttagccactgagctggagttcatcgacaaagttttcttcgtggtggatcgtaaagatctggattaccagacaatgaaggagtaccagcgtttttcgccggatagtgtgaatggctctgacagcaccgcaggactcaagcgtaatctggacaaagatgacaataaaatcatcgtcaccaccatccagaagctcaataacctgatgaagagcgaaaacgacctgtccatttacaacaaacaggtggtgtttatctttgatgaatgccaccggagtcagtttggtgaagcccagaggaacttaaagaaaaattttaaaaagttctatcagtttggctttaccggaacaccgatttttccgcaaaacgctctgggggccgacaccacggccagcgtattcggccgggagctgcactcttatgtgatcaccgatgcgattcgagatgaaaaggtgctcaagttcaaagtggactacaatgatgtgcgcccgcatttcagagccattgaaagcgaacaggatgagaaaaagctcagcgcggcggaaaacaggcaagccttattgcatcccatccgtataaaagaaatttcgcagtacatcctgaataactttcggcaaaaaacgcatcgcctgcatgcaggagcaaaaggctttaatgcgatgtttgccgtgagcagcgtggatgccgccaaactgtattacgaatcgctcaaggatttgcaaaaagacagtaataaaccgctaaaaatcgccaccatattctcttttgtggccaatgaggaacaggatgccgtaggcgatattctggatgaaagttttgatgtatcggcaatgaacagcagcgccaaagagtttttaagtgccgccatagctgactacaacgcgctattcaaaaccaacttcagcgtggaaagcaagggttttcaaaactattaccgcgatctggccaagcaagttaaggctaaggagatcgacttgctgattgtggtcggcatgttcctgaccgggtttgatgcgccgacgctgaacaccttgtttgtggataaaaacttgcgctaccacggtttaatgcaagcctattcacgcaccaaccgtatttttgacgcaaccaaaacctttggcaatatcgttaccttccgtgatctggagcaagcgacaattgacgccatcaccttatttggcgataaaaacaccaagaacgtggtgctcgagaaaagctacaaggagtatatggaaggctttaccgacgtagtaaccggtgaggcaaggcgtggctttgtggacgtggtaagtgagttggagcaacgctttcccgatccttcggccattgaaaaagagtccgataaaaaagcctttgcgaaactctttggcgagtatttacgcgttgagaacgtgctgcaaaactacgacgagtttgccagcctgaaagccttgcagaacattaacatcaacgaccctgaggcggttgaggagttcaaggccctgcattatttaagcgatgaggatctggcgacgctgcaaacgattaaaataccgtctgaacggaaaattcaggactaccgttcaacttataacgatgttcgcgattggctgcgtcgggaaaaatcttctgctgaaaaagaaaagtcgactattgattgggatgacgttgtcttcgaggtcgacttactgaaatcgcaagaaattaatcttgattatattctcgagcttatttttgaacacaaccgtaagaataaaagtaaagcaggcttaattgatgaagttcgtcgattaatacgtgccagccttggaagtcgagctaaagaaagcttagttgttgattttatcaatcaaacagacctggacaaaattagtgacaaggccagtattatagatgccttctttgcttttgcacaggtagagcaactgcgcgaagcacaagagttaattggatccgagagtctgaatgaagaggcagctaaacgttatattaccatttctcttaaacgagagtttgccagcgacaatggcacagagctcaatgatgttttgccaaaaatgagccgactaaacccccaatacctcaaaaaaaagcaaaacgttttccaaaaaatcgcagcgtttgttgaaaagtttaagggagtgggtgggaaaatatag

SEQ ID NO: 249739 - DNA, 1203 bp, Klebsiella pneumoniae
atgagcaagacgctagcagaaatcgcccagcagcttaaagacgccaataaaaaagtacagttgatctatgcctttaatggcacggggaaaacgcgcctgtcgcgagaatttaagaaactgatcgcgccaaaaaacgatgaaatcgaaggtgacgatgcagcagaacaactagagatatctcgcaacaagatcctgtatttcaacgcttttaccgaagatttgttctattgggacaacgacctagagcaggatgccgatcccaagctcagaatccagcccaattcatttaccgactgggtattggaagagcaagggcaagatcgaaacatcattaccaattttcagcgctacgccaatgagaagctaacaccaaaattcaacgaagaatataaagtcaaaggcaaggacgacaaagagatcactgtaaaggctttctcagaagtgactttttcccttgagcgcggtgatgatgagcaatccggaaatctgaaaatctctaagggtgaggaaagcaatttcatctggagtattttctatacgctgatcgagctggtgattgacattctcaatgttgctgaaccctctgatcgtgaaaccaacgtttttgatcagttggaatatgtatttattgacgacccggtaagttcactggatgagaaccatttgattgaattggctgtagatttagcccaactgatcaagtcaaacaattctgatgttaaattcatcatcaccacgcacaatccgcttttttataacgttctgcataatgagctcaacagtgatgacggtggttacaagaaaaaatggcttgataagtatcggatggcccggcttgacgacggcacatttcaattaatccaacagcccaatgattcgccattttcatatcatctttatttgaaatcagaactcgaaaaagccatcgagagtggtcagttgagcaagtatcactttaattttttaagaaacattctggaaaaaacctctacgtttcttggctataagaaatggggcgatctgttgccaaaaactgatgacggaacaaccaatccgtatgaggcccggattattaatatctccagccactcgaaacatgcgggcgaagaagtggccgatctcactgaagacgacaagcgtgttttgcggtatctggttaatgaaatcaatatgatgtatcgctttcagcaggctgaaaactaa

SEQ ID NO: 249740 - DNA, 1215 bp, Klebsiella pneumoniae
atgagcagcgtgagctttatggaaaagctgctgaatggcgttgaggtggagtggaaggcgctagggtcggtggttcagactttaacagcaccagctaagcttaaaggtgaagcctatcgtgtaactgggaaggttccaattattgatcaaggcatagaatttatagctggttatactgatgagaatataatctccgtcccagcagatgagtatattatttttggtgaccactctgaacatataaagtatgttgacttttcttttattcaaggcgctgatggtataaaaattcttcgtcctatttctgacaatgcaaagtacatctattattcttttcaaaacttttacaaaaaagaactaagctataaacgacattggtctactgcgaaagagacattaatccccatcccatgcccagaaaaccgaaaaaaatcgctcgaaatccagggcgaaatcgtccgcattctggacacttttacctctcttacagccgagcttacagccgagcttacagccgagcttacagcccgtaaaaaacaatacaactactatcgcgaccagttgttgagttttaaggaaggggacgtagagtggaaagcattgggaaagattggcgaatttattcgaggaaagcgctttacgaaagctgattatgttgaagatggcattggtgttatccactacggtgagatatacactcggtacagcgtctttacaactcatgcactttctcaagtcagaaatgatatggcaaagtcacttcgctatgcggaaccaggagacgtagtgataactgatgtcggagaaaccgtcgaggatgttggtaaagccgttgcttggcttggagatgacaaagtggctattcacgaccactgctatgctttccggcattcaatgaacccgaagtttgtttcctattgcatgcaaacagcatctttcattgccgagaaggcaaagtatgtggccagaaccaaagtcaatacgttattaattaatggatttgctaaaatcgcaattcctgttccgtatccaaatgaccttgaaaaatcgcttgccgaacaagcccgcatcgtcgccatcctggacaaattcgatgctcttatcaattccatcagtgaagatttgccacgtgaaatcgcattacgccaaaagcaatatgagtattaccgcgatttgctgttgagctttcccaaacctgaagaggtagcggcctga

SEQ ID NO: 249741 - DNA, 1557 bp, Klebsiella pneumoniae
atgacaagcacccaacaacgcgccgcactgcaacgccagatctggcagattgccaacgatgtacgcggtgcagtggatggctgggattttaaacaatacgttttaggcgctctgttttaccgcttcatcagcgagaattttgccaattacattgaaggcggtgatgacagcgtcaattatgcaacactcccccggagcgtcatcacccctgaaatcaaagacgacgctattaaaaccaaaggctatttcatttacccagatgatttgtttgttaacatcgccgcaggtgctagttctaacgaaaaattaaataccgatctggctgacatcttctcagctattgaaatgtcagccagtggatacccttcagagaacgatatcaagggtttgtttgcggattttgataccaccagcaaccggctcggcaatacggtaaaagacaaaaatgcacgtctggcggtggtgctcaaaagggtggcagaattagattttggcgattttgaggggagtcacatcgatcttttcggtgatgcttacgagtttcttatctccaactacgccgccaacgcaggcaaatccggcggtgaattttttaccccgcaacatgtgtccaagctgattgcgcaactggccatgcacaagcaaaccagcgtcaataaaatttatgacccggcgtgtggttctggctcgctgttactgcaagccaaaaaacactttgacgcccacattattgaagacggtttttgggggcaggaactcaaccacaccacctacaacctggcgcggatgaacatgttcttgcacaacatcaactacgacaagttcaatatccagctcggtgatacgctacgtaatccgcattttagcgatgacaaaccttttgatgccatcgtctccaacccaccttactcggtgaaatggataggctcagacgatcccactctgatcaacgatgaccgttttgccccagcaggtgtgttagcgcccaaatccaaagctgattttgcctttgtactccatgccctcagctacctttccagcaaaggccgcgcagccattgtttgctttcccggtattttttaccggggtggcgccgagaaaaaaattcgccaatatctggtggataacaactacgtcgaaaccgtgatttcactcgcacctaacctgttttttggcaccaccatcgccgtcaatattctggtgctgtccaaacacaaaaccgatatgaccacccagtttatagatgccagcgggctgttcaaaaaggaaaccaataacaacacgctcactgataagcacattgagaaaatcatgcaggtgtttgatagcaagactgatgttgatcattttgccaaatcagtgaactttgaagatattaaggccaatgattacaatttgtcggtcagtagctatatcgaagccgaggacaaccgcgaagtagtcgatatcatcacactcaatgctgagctgaaaatcactgtcgccaaaatagaccaactgcggacggagattgatgcgattgtgacgcaaattgaaagtaaggagatgggggcatga

SEQ ID NO: 249742 - DNA, 885 bp, Klebsiella pneumoniae
atgaatgaacgtgaactttcccttatcagggctcttggagaggagttctcccaggcgctaagcgagcttcgtgagtccttcgacaaaagcctcaatgactatcagcagagaactgaagaaaaactgaccctcctatctcaggaggttatgtccctaaaggataccacggcacttaacattacagcacaactggctgatgcagtggcatccatcccggctccgaaaatccctgaattgccggatattggcgctatggtcagcgaggcggtggcggctttacctctgccacaggacggcaagagcgtgacgccggaagacgtgcgaccgttgcttcaggagttagtcaccgcggcggttggtgaaattccggtcccgcgtgacggcaaagactacgatccggcagtgctgaagcaggcggtggaggatgcggtcgccgcgttaccgccggcgcaggacggacgggatgccttacacctggaaatacagcctttcattgatgaaggaaagagctatacgcgcggctcttatgccacccacaacggaggcctctggcgtgcttacgagaaaacccatggtatgcgtggctgggaatgcatcgtcgatggcgtatcagatgttgatataagcatgaatggtcaacgcaattttattgtcaccgtcaaccgtgccagcggtgccagtgagaaaaaatcttttgatataccgactatggtgtaccgcggcgtattcaaatcgggcgatgagtacctgcctggcgatacggttacatggggtggttcactctggcactgtgacgaacagacgcaggataagccgggtgaaactggctctaaaggctggactctggccgccaagcgcgggcgggatgggaggggtaaagcatga

SEQ ID NO: 249743 - DNA, 219 bp, Klebsiella pneumoniae
atgcagcacatggccggattatatccgatgaggacggtcttcgaacgtctgttattggcactcatgggacgtccagggcccgggagtactcccctagacgcatggtccagattgatcattatgattttttatggttttgtgaagataagaataacgagagccaaaaaggctaaaattgaagaggagcactaccatgagcaatccagtaataaaaaataa

SEQ ID NO: 249744 - DNA, 171 bp, Klebsiella pneumoniae
atgaaaattcaggtctgcaaaaaggaagatgaattacaaccaggtatttattccttccatttggattctgatacttcatgtgatacctacaaaagagaatatagaaaattagaagaaaaatataaaacaacaaaggggaatgactatgagattaataaaaatacgaaataa

SEQ ID NO: 249745 - DNA, 540 bp, Klebsiella pneumoniae
atgagattaataaaaatacgaaataaaggttttagccttttagaaatattacttgttcttgccgtggctgcggctctggtaatcggtgcatttatgctttatccgaagctggtagcttctcagaagatagagaaagaaagtaagaacataaccaccttacaggcgggagtgaaagccctgtatgcgggtagatccaggctctccgggttaagcccgaccgttctgattcagtcaaagaatgttcctgacaacatggtgcaggacgggaagcttatcaatgagtggaaaggggaagtagacatagcctaccagggtaaccacggcaaatactcgatcacttacaacggtgttccagcggaagcatgttctaagtttattaccggtgtttctggcaacttcgtgagcataaccatatacaacggcggtagcggtggcgatgtgaagaacgacgaagaagggaagcccttagatgtcgccaaaacagccagtgcatgtggttctgataccgtttcaaccattatgttttcttcaatcatttaa

SEQ ID NO: 249746 - DNA, 528 bp, Klebsiella pneumoniae
atgagactacacacacgaacaaaagctttctcccttcttgaaatgatgctggttctggcggtggccgctgttctcgttataggtgttttcatgatttacccgaaggtaagttcaagtcagaagatagacagcgatatgaagcttctctccaccattaacggcggtatcaagggcatatttgcgagtaaggcgaactatgacggcttatctacggatatggttataaaagcccagctcgtcccggaggacaatgttgaagacggtcagatctggaatgcctggggtgctaccgttctgatagatacctggtatgacggttcctaccgtatcgggtttgaaaacatatctcctgatgcttgtcctaagttcatatcccaggcaggagccagcttctttaagattcaggtggaaggaacagaagtgaagaacacagcagacaataaagattttaatgtggaaacggcagcacaagcctgtgcctcggtttctgataacagacccgttacagtttacttttacgataaataa

SEQ ID NO: 249747 - DNA, 699 bp, Klebsiella pneumoniae
atgaatttaagtaaaatagtaacatatataacattggctgtttttagtatattagtgttgattccaataaatatagaaaatacagaaatcgccgctcatattggaattattaagatttccttaacaatcgtagtgcttactatgttttttattattgggattgtagcggataagtatgaaagtatcattgcagcgataatgtttgtgcttttatcattgccttttggtcatgtattaagtaatgactcttcgataaagaaactaactatttcaatgtgcgaaaacgaaaaacaagcaggaattgaaaaaaaaccatatgagtgcgaggaaattgccaagccatcatccaactttgaaagtgttttctttacttacggtttaattgtaatgagtttactattaacaaatcaatatattgcatcaacacgaaaagtaaatttattattaagtctttttgaagaagaagaagaagaacattcatcaaccgaggaaaaacaaataaagacaaaaggaagagttgccagcttagtagaaaaagcaaataaattttgtgaaagaccagttgtaagggtatctgtttttattgtcggttcaatcttggttttattaatagcatttatgcttatgtaccatgtatctgttaaagatggtaataactcaaacataatgacaaaagaaatagcaacaacaaaaatctaa

SEQ ID NO: 249748 - DNA, 354 bp, Klebsiella pneumoniae
atggaatatatagttttaaaaggcttatttgaacctgatagtgttgcacactttgctggcagcttatttacaatggttttaattggtatgataatttatagtgtggtttatgatttaatccatgattataaaaaacattgcaagagtgtcattaataaacttcgcatatccagcattgatagcttgcaagttataatgttattttcattggtgtttgcggtttttgtatttgtagtcttaatacttacacatccttttattgggtttatcatattgacaatcaactggatcatattaggttcactggaatcatctaacggattaaataaaaacaaaaaaggagataaagaatga

SEQ ID NO: 249749 - DNA, 432 bp, Klebsiella pneumoniae
atgaattattatgttacggaaataaacacccaaatggtgatagatagcatttttgaatattacatgcagtttaaaaaacaaaatagcaaagatattgactgggcggcaggaacggatgacttaatggaatttcataattggctatgctacaaatctggtgacagatatttcttttgggtgactaacctttataaaaagagaaagaacagacataaaataacagaataccagtatgaatatgcagaaagctatccttcttctatgggttgttatggtggagactacaaaagacctcaatattctgtatgtgaaatccccaatctattattggatataactaatcttaatgacagcaaaattgagtctggattgcgtgttaaatggcacctggaatcatttatacaattaaaccaaaaaaggaaaatgaaatga

SEQ ID NO: 249750 - DNA, 933 bp, Klebsiella pneumoniae
atgataaataaaaaagaaagagaaattgaattagaagaagaaattgaattagaagaatgggatgaggacgaaacatatcttgattctataactctgacggaggaagaagactataaaaaaccagatagcactatcagaatcttgttcttccttatccatttagggctatacaaagttgctggcatgtgtttaaacgggttcgtttggggattggcttatatctatggactaaatatcagtataagaagaagagttgaagaatatacagacagtgtttcttacagttcggcaaagagtaccagtaaccttaataaaatagaacaggcattcaaaaggcagactcaaagagatttagaaaattgtatatgtaaattaccaccgggttataaaaagaaaggtctggaatttatcagtaattacaaagatattcaggacaatgagatttattttacattagccatgtctgaattaaattacaaagccgattaccagacaatacatccttttaatttcaccaatattgtctctggtagattaaagacagtatatttttgttatgatttagagaatatgagaaaagacttagcaattaaagctgcaaaaaaatatgggtatacacacatagaatacagtatgtacgactacttatacaaagataatatgaaagtgataatttattcatttttatttacggatgaaaaaagtgggtacgaattaagtttagacatatgggattactttgttgatcgagttgaggacgatgattatatttaccaatacacagtgtatcgaacagagattaacggtttggatattcatagtttggttaaatcaaaatatgaaatgcacgaaattaacaaagacagtttaaatatcagattggtattcgaagataataacaatgaactaccagtaaaaaagaaaagactttaa

SEQ ID NO: 249751 - DNA, 645 bp, Klebsiella pneumoniae
atgggaagaaatatagaaagcaaatcattcgtcagtatatggaaagaagtaaaaagctatacttgcactgtgaatgagacagaaacttttgaaatgctattattagtaatgaaagggcgaggatttagattttacaaacatgagagagttatattttcaacaagagtacaaatgagaagcaagcaagtaaatagatgtaactcaaacaaaaagttttcttacaagtccgtagaagaagaaatgaaatctgtattcagagcattaaagcaaatccataacagaaatgagcaagacggaaaaagactattgaaagggagggatgaaattattcgccgtttcaaccgaacaagaacttttaacagtatctggaaggaattaatagaattagagatcactactgacgaaatagatagttatgaatgccttatttttataatgaagcacagggaaataaaaatccctaacactgcattagccgctatggaactcaccgctcttaattcactgaataggaaaaaagcatacagggaactacattccattccatttgaaattgattcaatcaaaaaagaactaaataacatatacaacttactaacggataatattaaatatgacaaatttcaaacgatacacactatataa

SEQ ID NO: 249752 - DNA, 852 bp, Klebsiella pneumoniae
atgagcaatattactttaaacaccacaccatattcaggaatgatcattttaggtaagcgtggttcagggaaaactacatttttgaaccagataacaagcgaactccctgatctattttttaatatggacgacagatataatcattacactgacacagtaatagaaatggcaaagtcaaataatcaatttctattagcttctggtaccatattaagcagagaagaaaagaatgaatttaaacacaaaggcttcaagatattaaattcagttgaagaggctaaggacttttataataactatctaatgaacagtttaatgataaaagcgagtccagaagacatgacaaatatttattttgaattttatcgtaaatacagagagaaaaatgatgcggtgccttatgtatatacagcagaggattatattaaagcttaccattttaatgatgatgaactaataaatactgcacttctaatgtatgaatctcataaagataatttatcctccataatgtcttgtgatagattacttataaataaagaaaggaatagaaggaattatgatgaagcaatttaccactttgatagtatttcagaatcaaacccatatgcaccgcattcattctttatagatatgagagcttcatataatgttgagcttcttaaagagaaagagttagactttttcaataaattgattgaggttattccttccaggaaagacagaaaagatttgttaaaattaaaaaagtcaggctattttgcttccactattgccagaatagaacaaaaagaaatagagcaggtaatgaatgaaaagccagttaccattaagaagaaagcccgattgtaa

SEQ ID NO: 249753 - DNA, 1374 bp, Klebsiella pneumoniae
gtgagatcgatagcaggcggtcgaaaaacaaaggcgccggggattcttacgctggcaaaagtccctggcgttgatgcagaggggaacccgctaaccagcaataaggatgcggcctggtatcagatccgtcctgaaggtggctggttacccgccgacagcgttaagaaagtgtcgcagtatgcgcttggtgagctcgggtttgtcacgctgaataaggctccggagagttttgacctgattgatgggataaaacaaccgaataacgtggtgaaggggattctggaacagttgtataaagcggcacaggatgaaacgcgcaccactcacgcgctgaacaagtataactataaacggctgctggaattgatagacagtaaccaggacgggtattaccaggagcaggagtatcttcaggcggtacataatatctcttaccgcgaccgcctgtaccgtgtaattgcaaaacacgccagtgaatggtactacggcaaggatgccccgctctggaagacatacctcgatacgttaaccagggatgcgccattgtggaagacgtatctggaaacgtttcttgataagatgacgtggatgaagacggtatccgaaaagggcgttgcgctggggtcggagccgtggcatatgcatcctatagtatttttaaattctataaaaaaagggaaatccaaaattacacgagagatgctcaggagaatttggtctgacccaggaaatgtttctgactctgttcttgatgttgttgcagaagaattttcgaataaatttgaagtttgtaatattaatactaaaaatagactgtatcacttttttgctcaaatatatcaagaagtaggccccactttcaatttgaatgaggggtttaattataggccacaagtacttataaataagtttgcatattatcgtaatcatcctcaagatgctcaaacggatggatatattccgggaagacaagtagcaaataaacagaatattgcgaacagagcatatggtggtcgagaggggaatgataatattgcaagtggagatggatggcgatatcgtggaagaggaatgaaacagttaacatttaagaataactatagatcttttacaaattatcacgaaagagtttggggagaacgtgttgattttgaatccaccccagatctcctagttgaaacggtttatgcggcaagatctgctttgtacttttgggatcagaataatttatttagtagcgctgctaatggcattagtagagctgtatcagactcaataacgcgaattgttaatctctatgataatcactatgaagatagacataataatttaataagatttctacaagagggtatttttgatgaaatattctaa

SEQ ID NO: 249754 - DNA, 1032 bp, Klebsiella pneumoniae
atgacttcatttttcttaattactagaccgcttgattctcaaagttataattacattaatactgaaatattcggtgacgtagagataagaagcgcaaatcatgatcttgatgttgaaagacatctattaaagaatgctgaaggtagtccattcgctggaagtttaaacactagtgattatgacttttcaaatagaatgtctaccatcgtggaggcggaggatgaaattgaagccattcaattggctaatgataagttcgttactgtcttggatttgaaagccaatgaattatctcttgccaacattaatttatctaaagtcggatttgttaggaacttgtctacaggcgctataaaagcatttttaattcgtggcttatttaaatcagcagttttcgttagaaacctttctgatattcaacgttggagcacaattaatttaatgctggacaaagatggtaatactgaaaaaaaagaagaattgtccgaaaggtttataaaggctattcactggtcccaccatgctagtgatgaagaaaataaacagttaaaagtaatatttaactatttttgcttagaggctttattcaaagaaaatgagaatgacaatataactagcatggtccgatgctttttaggttttcctggcgggaaatgctatagagatgttgacaaaactattattgacaaactacaggagaacaatgattatttagccttggctaaagatattccaaaatatttagatgacattcgcaagttcaggaatgatagtgtacacgcaggatttagatcaatagacataagcaataaaaaacttaaactctatgacactttattaaatttggcaaaaagtcgttgtctcagtgctgtaaaagcatccattgttaataacaatattaaaagtctatcggaatttaaaaatgaagctggtattatttttaataaaacagtgctgataaatgatattttaggcactgttgttttctcactgaataatgaccacaatcatgatattttcatcgttagttag

SEQ ID NO: 249755 - DNA, 483 bp, Klebsiella pneumoniae
atgaatgaattagagtatgaaaaatttttttcctttaacaaatcgagcgataaatataaaatagagttaacaaaagcaataaaattcctattatccaagcaaagagttatcgaagctaagcatcatttttttgaattggaaaaaataaacccaaatcacaaaattgttatggaactgggttttgaactaggtatcaaaacctttgacagggaaatgtctgttaaataccataatttacttaatgagaataaaaaatatagccaacatgagcttgctctcaagaggataatttaccacttgtcaataaatgataaaaaaaatgcgtcttcagatgcagcctctcttttggatgatatgagtttagataaagacaggctgcttaagttatataatctaatacattatgaattaaatgaagagtgtcttttgattaaggctgatgatgttttaaaaaagaaaaatcttcgaattattaaggggtga

SEQ ID NO: 249756 - DNA, 1179 bp, Klebsiella pneumoniae; identical to SEQ ID NO: 246452

SEQ ID NO: 249757 - DNA, 132 bp, Klebsiella pneumoniae
atgctttttggacattggttgaatcagcgtgaaataccagatccgtataagaaaagcgaggaagcttttgcttctgtctataaattgatcgagcaggctggccaaacctggattagcaagcttggtgtataa

SEQ ID NO: 249758 - DNA, 780 bp, Klebsiella pneumoniae
atgaaatactatattgctgtgccaacttataatggcgggaagatatggaaagaagttattacaagcataaaaagatatgctccacaaaatttatatgttctggtgatcgactcaaatagtaaagatgatactgctgcaaatgccctagcagcaggttttgatgtagatactataaatggtgcggacttcaatcacggaggaactcgtaatattgcagttgaaaaggcgcagcatgaacatgacattattattttcatgacacaagatgctataccgcagcaagattttattattaatatcattgatgcattcaaggatgaaaaggttgcatgtgcctatggccgccaattaccgcatgtggatgcaaatcctcttgcttcacatgcgcgatattataattacccaacaaaggattatgtctgtggatatgaggacatacctgaaatgggtattaaaacagtatttatgtctaattcattttcagcatatagaatatctgcttttaaaaagttaggagggtttccttctaatacaattctttgtgaagatatgtactttacagcaaaagcggtgaaggcaggttttaaagttgcttataccgcaaatgctgttgtacgacattctcataattataccccgatggaagaattcaaacgatactttgatatcggcgtatttcacgcagatgaaccatggatacgtgaggaatttgggggggcgggaggagaagggaagagatttatattatctgaattaaaactgtctcttatacacatctga

SEQ ID NO: 249759 - DNA, 321 bp, Klebsiella pneumoniae; identical to SEQ ID NO: 245724

SEQ ID NO: 249760 - DNA, 1779 bp, Klebsiella pneumoniae
atggcggcagatgccgcgataacgatggacccggtgctgcgccgcctcactgagcgcaatatggccaagctggtcaccgggcagtattcagtttcccctgccgagttcatcagtgaaaaaataaccgtcaaaaacagcagtaaaactgtttttgcgggagacagttataccgaatcgatgcatgcactgaaagataagtcgtatgccgccgtgctgtcttcgttgaccgactggcggatcgagccatatggcgtatcagggaacacctatctgatgattaacgatcgcatcctgaataacagcaaaacgttcgggtgggggatcggagacatgggggccagccacgtggtgattatcagccagacgaatgatgcggccattcgcgcaacaaactggcggtactggcaggccagcatggagagagtcgtccgctctgtacgcgcgttaggagcaaaacccatcatttgtactgagcaccctcagatcgagccgtatgcctacgcacagatgagagctgtcgcggatacgctgggcgcagagttctgggatatcacgacggaggcgcgaaattttgaatttttctcagaaccacgcatatgggccggttctcaccccggaacgcgaaccaactcccagctctggtctccgatactaaaatgtattaatgcgatgccgcgcccgcgcagtggaattaaaatattccggccacggccaggcgtcactatcagctcagtgagtgatctggtttatggaaatattctggagagggcgaagaagttcaaagagatcacattgggccataccgccattccggatgcgaaacaggcctacttcgatgatttgactgtactgaataacgatatcggcgcaaaccggacccgttacaactctgaatacggtcagctggcgcagggaaattcactggcgtttacgaattacgcccttgttgaggtcatcctcccttcaaccggagagggtgtatcgtccgtgaatcttgtgacaaagggcgatgcggtcacggtttatgcactgaactatctggttgcacctgaccagagcagcccggaagccacattcaacagcccggttgcagcctggcagcaaatcagtggaccgctgacgggaagtgatgcggtgaaatttatgcagggggataaaatcagctttttactggtggcttccgggaatttcagcctgtcagacatccatgttgattacacagggcgagacagcaagcaggtcaataactggcaatcgcaggaaaaacgagcccgcgggagtgagctgctttcgcagactcgctttggtgatacggaaattgcctcatggaatcgtattggaagtgtgccgcgttatgtcccggcgggcggtaatcctccggcaggatgcacaaaggttgtggcggttgatgatacaaattttgtgtctcaggactttatggtccccacagaacaggatgccgtcgagctggaaataaaaatctggtgccgtcgatggctccccctgttcagttcaacgtccgatttttcaacctctccaataacaccagactctcaggattttgccgagttaaagcttcttatcgggcagcaggccgacggaaaagagacgctggcgatgcaatacagcctgccagtagggctgggatggatggagcacaaggtaagatactgggctgtcggcgggaatgctgccgctacaaaagcattgcggcttacacttttgggagagacgggaaagcagatcgatatagcgtgggtttcgatcagggaagtttaa

SEQ ID NO: 249761 - DNA, 990 bp, Klebsiella pneumoniae
atgaataaaatcacagcggcaatcgtaacatatagcgaaagagcgcattttgttgaaactgttgtgggggagtgcattaagcagggagtttgtgattttgtaataattgataatggttctagcaacgagaataattcaaaattaaattcaattaaaacaagatatagtaatgtgaaaatatcaataataagaaatgacacaaatgaaggatctgccccgggatttaaaaaagctatcaagattgcctctgaaattaataaggaggacgggtgggtttttgttttggatgatgacaataaaccaagggataattgcgttaataatttattgtttgtatcgaataaaatgggcggcgaaaaaagggtttattcatgctttagggatgatagagagcattatattaaatttcttgaaactctgaataatgattttatattgggccctaagaattcattcatggcattttcaatctctaactatataaaaaataaaataaaaaagaaatctaaaaatattaataaaaaaaatgggtttcataaagaagttgtgacaataccatgcgcaccgtacggtggtattttttttaaatcttctattattgataaaatcggccttccaaatgctgacttatacctatatttcgatgatactgaatacacacttggaatggcaagtaaaggggttgaaattttattggtgacggattcaagagttcaggatatcgatgaatcatggacattaaacaaaaacaaacaaagatttcactcaccttacctggagggctctgaagtaaaaagtatttattctttcagaaatagagtttatcttgagagaaaatatcttgttacaaactctttaatgtatgttattaacattgtttcgttaatgataataataggtattaaagcaattgttagatgtaaaatgaagcgatattttgcattgtgcaaagcaattgttgatggttggaacatggcgagtttaaaataa

SEQ ID NO: 249762 - DNA, 1794 bp, Klebsiella pneumoniae
atggaaattgttgctttatacatcaatgaatttaatggtgttattgacagtttcataaacgtcaatagttcatttacgtgttcgtataatgagaaactgttgagaatcacatccagtgtcaaccgctcaagttattacgataaaatcccatccactcttttaataggccaaaatggctgtgggaaaaccacaatacttacttttattgaggacttttattatgataatgaaaactcaggattcatcgtatggtacgatgatgaaagtataattgttacatgcaaggggatatctccctcccaaataacctcagatatcaaatattcttgcatacatacaaatgctcaagattttagcaacctacatatatatacaataaaatccaataacaccgttgacttcaattcttatttatttggcaaaaggaaaagcactgcaagaaatttcattgatatttcgctaaatagtataggaaaaagaaacgcaaataaaaaaaatgaagttgataaaatccttaaatatataaagcaaaaaaagccacttcctgacacattggcaaatcgtgaactatctatttcagccaaattaacatttggaacaggtgatacttcaaaaaaaatactaaaaaacttaaattttaaagaaaaatatgaagaggaattaagtgttttttttacaagccaaattaacaactatagaggaaattatattataagccctgttcatcccgaatttcaaatatcattagattaccctttcgttaacagaagtcatttaaactcttacatcaagtcaaaaaaagaaaaatggggtgtaagcttttatccttttatctttagtaagctccctcataaaaataacagattaaacatacatgaagtgaatttttattcgatcctttccattctttactcttttacaagaaagctgaaagtagaccgaaacacctcagacctcctctttcttaaactaatagtagtcgcgtatttttcatcacaaactaatttaataagtagaattgaattctttatgaaagattcattcccaagggcgatggatgataacaacttaatcatggaaatgattaacttagacaaaaacattgataaaatctcaaaaattgcttattgctgttttaaatatagtaaaaaaacaacatctgaaggtaatactgttaactattttatagatgagagcaatactgttccagaactcattgaaatgagcaatcaactcccaaaagaattagattcaatttttaacgtagagtgggatggcttaagcagtggtgaagtctcactacttcatattttatcaagtataagctatgcaatcgaaagtgtgaagttaaaaaatggaacgaaatctattcttcttcttctggatgaaatagatctttatctacatcccgaatggcaaagaactatactgtcaaccttattaaatcttataaaaagtataaataataatgtaaaagtacaaataatcatgtcttcacattctccaataattgcttctgattttttatctgtggacatagttacccttttacggagcaccaagaaaaaaatcaataccggaactttagaggaagttgggtatggcgaatccatagataaaatgatgagtcaaggtttcttcttaaaatctacagtcggggatagggttttaactacaattgattttttaattaaaaatcgagataataaaaaaatattagaggaaaatgaatatattacctcattgattaagaataaaatgttgctgcatgtactaggaattaaaaatgattaa

SEQ ID NO: 249763 - DNA, 2667 bp, Klebsiella pneumoniae
atgaaacagccattatcgcccgtattacgtgccgcactttatcgccgcgccgtggcctgtgcgtggctgaccctgtgtgaacatcagcgccgctacccgcacctcacactcgacgcactggagaacgccatttcagccgagctggagggattctatctgcgccagcacggcgaggaggaaggccgtcagattgcctgtgcattactggaagatttaatggaagccggaccactgaaagccgcgccgtcactgtcctttctcgggctcgcggtgatggatgaactttgcgcccgtcacatcaccgcctgtactgcactgagggagaaaataacaatgaaaatgaacgtaacggaaaccgttaaacaggcctgcggccactggccgcgcattctcccggcgctgggtgtgaaggtcattaaaaaccggcatcaggcctgcccggtatgcggcggctctgaccgctttcgctttgacgataaagaggggcgcggcacgtggttctgtaaccagtgcggcgcgggtgatggcctgaaactgattgagaaggtgttcggcgtatcggcttcagaggctgccggtaaagtggataccgtgaccggcaacctgtcgccggttgccccggaggtgattgcagcggcagaggccggaacgaaggctgaccgcaaagcagcggccgggctggccgtgaagctgatggagaaaacccaaccggccaccggcaatgcctaccttacccgaaagggcttccccgctctggaatgtctgacgctcaccgccctgcataaaaccggcggcgtgacgttccgcgccggtgatgtggtggtgccgctgtatgacgataccggcgcactggtgaaccttcagcttatcaattctgacggtctcaaacgcactctgaaaggtggagcggtaaaaggggcatgccatatcatcgaggggcagaaacaggcgggaaaacgtctgtggatagcggagggctatgcgactgcactcaccgtgcatcacctgaccggcgaaaccgtcatggtggcgctgtcgtccgtgaacctcctttctctggcgagccttgcccgacaaaagcacccggcctgccagattatgctggccgccgaccgcgaccttaacggcaacggccagacaaaagccgctgcggccgcagaagccagtgagggcgttgtcgccctgccgccggtgtttggtgactggaatgatgcgtttaggcagcagggtgaggaggccacgcgaaaagcgatttatgacgccatccggccaccggctgacagccctttcactaccatgagtgaggcggaattcactgccatgagcaccagtgaaaaggcaatgcgggtgcatgagcattacggcgaagcgctggccgtggatgcgaacggccagctcctgtcccgctatgaggccgggatatggaaaatcattccgccgtcagattttgcccgtgatgtggccggattgttccagcgcctgcgtgcgccgttttcttcggggaaaattgcctcagtggtggaaaccctgaaactgattattccgcagcaggattccccggcacggcgtctgattggttttcgcaacggcgtgcttgataccgccaccggcacattcaaccctcaccataaatcacactggctgcgcacgctctgtgatgtcgattttaccccgccggtcgagggtgaaacactggaaactcacgccccggatttctggcgctggctcgaccgcgccgccggtagcaaaccggaaaagcgcgatgtgattctggccgcgctgtttatggtgctggcgaaccgctacgactggcagctctttctcgaagtgaccgggccgggtggcagcgggaaaagtattctggccgaaattgcgaccatgcttgccggggaagataacgccacgtcggccactatcgaaacgctggaatcaccacgtgagcgcgcggcgttgattggcttctcactgatacgcctgcctgaccaggagaaatggagcggtgacggggctggacttaaggccatcactggcggtgatgcggtatcggtcgacccgaaatacaaggatgcgtactccacccatattccggcggtgattctggccgtgaacaataacccgatgcgctgtaccgaccgcagcggcggtgtttcccgtcgccgggtgatcctgcatttcccggagcagattgccccggaggaacgcgacccgcagcttaagaataaaatcgcccgtgagctggccgtgattgtgcgccagttaatgcagaagttcagcgacccgatgaccgcgcgcacactgctccagtcacagcagaattccgacgaggctctcagtattaaacgagatgctgacccgacatttgatttttgcggatatctggaagccctgccggagcctgaggggatgtatattggcaatgccaacatcattccgcgtcagccgcgcctgtatctgtatcatgcctatctggcgtatatggaagcccacggctacaggaataccctgagtctcacgatgttcggtaaggggttgccagccatgctgaaagagtacgggctaaattatgagaagcgccgtaaaaatcagggcatacagaccaatctggtgctaagagaagaaagtaacgccgactggttaccgaaatgcgatgagccagctgcgaaataa

SEQ ID NO: 249764 - DNA, 1110 bp, Klebsiella pneumoniae
atgccgcgccctcgcagtggaattaaaatattccggccacggccaggcgtcactatcagctcagtgagcgatctggtttatggaaatattctggagagggcgaagaagttcaaagagatcacattgggccataccgccattccggatgcgaagcaatcgttttttgatgatctcactgtgctgaataatgacatcggtgcaaaccgtacccgctataactccgagtatggtcaacttgctcagggtaacgcgctgaccttcacgaactttgctctggtggaagttattcttccgtctgccggagagggtgtatcgtccgtgaatctggtgacaaaaggtgattcagtgacggtctatgcgctaaattaccttgttgcacctgaccagagcagcccggaagccacatacaacagccctgtagctgcctggcagcaaatcagtggaccgctgacgggaagtgatgcggtgaaatttatgcagggggataaaatcagctttttactggtggcttccgggaatttcagcctgtcagacatccatgttgattacacagggcgagacagcaaacaggtcaataactggcaattgcaggaaaaacgagcccgcgggagtgagctgctttcgcagactcgctttggtgatacggaaattgctgcatggaatcgtattggaagtgtgccgcgttatgtcccggcgggcggtaatccccctgcaaactgcgtcaaagttattgcaattgacgatgccaattacgtttcacaggatttcaccgcaccaacggaacaggatgccgtcgagctggaaataaaaatctggtgccgtcgatggctccccctgttcagttcaacgtccgatttttcaacctctccaataacaccagactctcaggattttgccgagttaaagcttcttatcgggcagcaggccgacggaaaagagacgctggcgatgcaatatagcctgccagtggggctgggatggatggagcacaaggtaagatactgggctgtcggcgggaatgctgccactacaaaagcattgcggcttacacttttgggagagacgggaaaacagatcgagatagcctgggtttctgtcaaggaagtttaa

SEQ ID NO: 249765 - DNA, 165 bp, Klebsiella pneumoniae
atgcgtaagaaattatgctcttataatgcaaaacatatgctgttaggaatatatttcataatagcctggtttttagccgaatcacgggagtttggaaacctgtggtcagtgaggtgtatgctggtatttaacaaccagacattgggtagttgcagcggtcagtag

SEQ ID NO: 249766 - DNA, 2148 bp, Klebsiella pneumoniae
atgatgaatagacgctcattatttaaatatctcggaattgcaacattaacaggacttgtcaaaaattctgttgccaataacactataaaaaaacaaaaagccgatatcctgtacttgttacaaattgaaaaattgatagaggtttcagaaaatttagaactatatatttatcttggcaaacctggcttagatcccttatttaaaaaaaatcaaattgaatatactgaatttgcaaataaaaataatcaatggcagcgaaaccagccaataacattcagcaatgaagattcgatacatcccatttttgtaactgaggaaaccatctcaattgcaatacaaaacaaaagaaatgagacattatattcttcaaaccaagtgacgttaggacattcagcaaaggatattgttaagccatttgaatcaatttattgcaaaacatttgaagacttaagaaagacgaaaccacaatataaatttcaagaaatacaagttgtttcacattcaagccatgttgtatcaggtggcggacttttttatttcgatgatacagatcatgagacaccagacaacaacgggacagtaattgtaacggatactggcgaaaggtggaaaagaactattgacagtacaaacccatttgtggatgctacgtggtttggtgttacaataaatttgaatattgattcttccgatgccctgcaaaatgcaatcagtgaaggggaaagattagtaactcaaaaaaaagcaaaacgagtgtctataaaattaccatcagcattgaacacagcaaaacctatttatttaaatccagcatatacgtttctggaaccaatttcaggtgtaacagaatggcaagtcgataatagttctcaacatttcaaagataattacgccctccatatttgcggtaatgtgctccgtaggggggaggaaaatgacatcccatatgtcaacacaacaatatttgctttatcacatatttacatgtttgagaaacaaaccattgagacgaatagaataaattgcatcaaacattatgcaacactaaataataaaaaaggcatttcagaaaccgtatcacaacttggtattttaaagtgtaggtttacagggttttcagacgtttatactaatggtgacaatggttggggcatatgtttctgggaatgcggttttgatagctataagcgagctattgttttaatgtccggccttaataattcagaaaggatctcttttagagaatgtgtattccaaaatggagaattagccttcgacatctataattggaccggcggtttactaatagataattgttctttaaattacaattctaaaggcgaaattgtcaatagaggaggacatgtaattgtaagaggtggacacattgagactaaaaatcgctcaaagccagtatgcataaacgaagacacaagtaaagctattgggaaagctaaatttcacgaagtcacatttgtcaattttgcagtcaacgggaatgatgtttatttatttagaacaacccgaagacataacttaatcctcgaagacaaccgatttagttgggctgaaaatgaaagacaacaagaaattgcatcaagaaatacaaaaattactgatgatattggctgcattttcattagaaactggcaaatgagtggtaaggaaggaaaagcccccttttcttccgaaggtttgatacaaagtccactaccaaattatctgaaaagaactaattccggaagtataactactgaaggaaagaacggaaaattaaaaattacaaatttaccattgttcgaccacctaacaagctctgatataagaaagagtgacttaagcattttttgcccgattatcaattcattccaacacagatatttaacatggttaataaaatttgaagaagttaagatttcaaaggagatagcaattactgtctatggatcatatgagaatgagcaaataagagataaattaggagaaagcatattttacaggggtgaacaactagtattgacacctgcagactatcaaaatttcattaacaatggttactctaatttaataattgagttttcactcctgaatagcaagagtgaagactttttcataatagaccgaataggcgcaattgcatataactag

SEQ ID NO: 249767 - DNA, 171 bp, Klebsiella pneumoniae
atgaacagcacaaggaattgccggagtagtaaccagaaggtgataatagcccccttacagggggcgctctcaaaagccaccttctttgatggtgatcttttactagttatatgcaattgcgcctattcggtctattatgaaaaagtcttcactcttgctattcaggagtga

SEQ ID NO: 249768 - DNA, 996 bp, Klebsiella pneumoniae
atgtttcaagcctcgctggtttggatatttattggtaatgctatatgcggcaagacaattttattcaagtattgtcggtgtcttcttatcctattaattaatggtgttacaatgcctgttatacatgctattatcattacttataatcctgacagggataatgttatttccttagctgctgcgttagagaagcaagtgaatcatacctggattattgataatggtagttcaatcgatatttcgcagaactttgagcttgtttctaatgcttcttttgtaaggttaaatgaaaatgttggtattgctaaagcgcaaaatatagcaatagaatatgggaaaaaaaaaggtgctgaattttttgttttctttgaccaagacagtgtaattggtaatgattttgtttatggattatatttgtcgtacgcgcatttgagccagtcacgaaaaatagcagctgttgggcctgttttcgaagatagtcgtttcaagtttatgtatccgcaaattaagctaaactccattggtattaggaaaagaattgtcccgaagcataacactggaccacttgctttgtcgtttattatatcttcgggaatgcttacctctgtggcagtcttgaatgatatcggcaatatgaatgaagacctctttatcgattatgtcgatacagaatggtgtttgcgagcgattaaatgtggctatgaaatttttgccgatactggtgtttgcatgcaacattcaataggtgataataacatcaagtttcttgtatggaagttgcctgttcattctcctatgcgacggtattacaggatgcgtaatatgtattatctttttaagatgaaacatattccctttattatgaaagctcgtgagtttataactaacactattcatcaattccttatcacgttagcctctaaacaaaagtttagttattttaaattttggattaaaagccagcgagatgggttggtttattttttttcaaagtag

SEQ ID NO: 249769 - DNA, 312 bp, Klebsiella pneumoniae
atgactcaggaagacattattaccccgattgccacggttgccacccgtcaatgtatgatcacctctccctggtttgtgcagaatacagaatactcaccgatgccggcgacctataagccgctggtaaacggggaagaggcgtttgctgccgtttatcatgccatcatgaatgcacagaaaacggtggatattatttgctggggatttcagccttcgatgtactttatccgtgatggtcagtcgttgtgtatcggcgaattactttgcaagattgcggaaacaaaaaaagtccaggtgcgtattctgggctga

SEQ ID NO: 249770 - DNA, 1065 bp, Klebsiella pneumoniae
atgaaaataattgtcactggtggtgctggttttattggttctgcagtcgttcgtcatattatcaataatactcaagatgaagttatcgtgttagattgtctaacatatgcaggaaatctggagtcattattacctgttgcaaaaaatccacgcttctacttcgagaacgtcaatatttgtgatagaaaagaattggatcgagttttccgagaatatcaacctggcgcagtgatgcatttagcagcagaaagtcatgtggatcgctcgatcgatgggccagcagcgtttatagaaacaaatattgtgggtacctatactctgcttgaagcaacaagacattattggaattctcttgacggcaaaataaaagaatcattccgttttcatcatatttcaacagatgaagtgtatggtgatttacatggaacagaagatttatttaccgagtctactccatatgcaccaagcagcccatattctgcctcaaaagcatctagcgatcatttagttcgagcttggttgagaacatacggattgccgacaatagtaacaaactgttcgaataactatgggccttatcatttccccgaaaaattaattccattaatcattcttaatgcacttgatggaaaaccgcttccagtttatggggatggcggtcaaatacgtgactggctctatgttgaagatcatgcccgtgctttatacaaagttgttactgaaggtcttgttggagaaacttataatataggtggtcataatgaacgaaaaaatattgatgtagtcaaaacaatttgtcagttattagaagagctcgcccctaataaaccccatggaattgcgcattatacagatttaattacttatgttgccgatagaccaggacatgacatgagatatgcaattgatgcacaaaaaatattgaatgaattaggatggcagccattggaaacttttgaaagtggtatccgcaagacggttgaatggtatctcactaatgaggcttggtggagtcgtgtaaaagatggctcatatgccggtgaacgtttaggtttgtccaactaa

SEQ ID NO: 249771 - DNA, 537 bp, Klebsiella pneumoniae
atgaaagtaatcgataccaaaatagctgacgttaagattattgagcccaaagttttcggtgattcacgaggttttttcttggaaacatttgagaaaaaacgttaccaagaaatgttgaatattgaatacgattttgtacaagataatcattcacgttcgacaaagggagttcttcgcggtctccattatcaaacacagaatgctcaaggtaagcttgttagagtcgtccgtggggaagtttttgacgtagcggtagatattaggcctgattcccccacttatggtgaatggcaaggtgtgattctttctgaggaaaataagactcagttttggatccctccaggcttagctcatggctttttagttctttcagatatcgcagattttgaatataaatgtacagattactataatcccggttttgagggatgtttaatatggaatgatcctgatgtcgggattaaatggcctgaattgacaccattgctttctgaaaaagatcaatgtggtaagcgcttgaaggagttaagtttatga

SEQ ID NO: 249772 - DNA, 855 bp, Klebsiella pneumoniae
atgagaatattactcacaggagctaatggacaattagggcgttgttttcaagatagggtagaagctggatgggaagttagagcaactgatgctaacgaattggatataaccaatctaaaagatgttgttaatgctattgagcaacttaaacctgacattgtagtaaatgctgcggcttacactgctgtggataaagctgaaagtgatgaagtaatcgctgaggctgtaaataaaaccggaccatataatttagcattagccgctaaaaatattggtgctctatttatacatatctctactgattacgtatttgacggactttcaaataagaaatataaggaaaatgatcaaactaatcctttgagtatttatgggaaaacaaaactagctggagaaatagctgttactgatatttatgataaaactattatcataagaactgcttgggtatttagcgagtatggaaataactttgtcaagactatgattagattggcaaaggatagagatcaattaaaaatagtttcggaccagtttggttgcccaacatatgctggagatatagcctcagcaataataaaacttatcaaagagaaagcacctgcaggaatctaccattactgtggtgacgaagaaactaactggagtgattttgcaaggaagattatagaggttgcctatgataaacaacttctagattctaaaactgaagtgttggatatttctactgaggaatacccaactgccgcaatcagaccaaaatattcttcacttgatctaagtaaaattaaagggcttaatataaaaccatcggattggaaaaaagcattacaggaagttattgtaaaactgtaa

SEQ ID NO: 249773 - DNA, 693 bp, Klebsiella pneumoniae
atggtgttgtctggtattattgcgatgttagtcatttttgttaattttaacatttccctgcagattgtaaagtttgatattatagggaagtattttaaagatggttggcatatttttacatcacgcgttttttcttctttatataaaaattcggcagttcttatattggggttctttactacacatcaagtcacagggtattactccgttgcagaaaaaattattcgcagtttacagacgcttcaaaatgttattggcgatgccctatatccacatttggtaaagtcttttcatgatggaaaatattcatataatgatttttcacggaaatataaatggatagtcactattgcatatgtctgtatggctctttgcgtactggttttctcagacattgcagccaaaatatttgtcggagttgcttaccatcaggtttcgattaatattaagattatgtctttgattatatttttcggtgggttgaattattattatggaatactcgggttagtagcgttaaattataaaaaggaattttctagatatgtcctaattacaggcatcgttagtattatttcaatgattattttttcagtactttatgaagatgtcggcgcatcaatagtatctgtattgagcgagtttcttttacttgtattgatactaaataaacttagaaagatcaaagcataa

SEQ ID NO: 249774 - DNA, 621 bp, Klebsiella pneumoniae
atgtctctgttacgaagcttgcttttctttttcggcgcggcggtcgcggccgccctcgcggtactctgcctgtgggtggatattcgggtgtttggcaacgacatcccggaggtgtcgctcaccgaagtggtccaggagagcgtgctggccgttatcgtgctggttcatctgctgctggcgcggaaatatgcccacttgcgctatagcaatatcctcatcggcggcttctttctcgccatgctgatccgtgagctggatggcctgtttgatttactctcccacggcagctgggtgtggtttgccctgctggccaccgcggggtcgctgctgttgccgttgcgccatctgcgtcagaccctgtcgcagctggcggagtatacccgcaccccgtattacgggatgatgattagcggcctgctggcgattctggtcttctcgcggctgtttggcatgcacggcctgtggtacgccgtgctggaagagaactacgcccgggtggtaaaaaatacggtcgaggaaggcagcgagtcgtttggctatatgctgtgcctgaccgccaccctgggctacgcctgctactttcgcagtctggcgcaacaggcactgtcgccgcagcgctaa

SEQ ID NO: 249775 - DNA, 339 bp, Klebsiella pneumoniae
atgaaaaagtttatatttgcgatagtctgcattgcactttcttcctcagtcatagccgctgagaagtttaaagagatagacggcgctgcatatggtgacaagtggcctctaacctttgaaaaggcaaaggtatcatgtgttaaccgtgcttatgcttttgtgtatgacatcaaaactgatgatagatatcctctgaatggcatggcggtagatgctgttaaatcaggaaagctggaggggtctaacttagatgacgtatggaaggatgaccctgagtatgacggcgttaaaatttcaatttcaccggtgattgatgccgctacagccctttgtaattaa

SEQ ID NO: 249776 - DNA, 846 bp, Klebsiella pneumoniae
atgtctaaaaatgatgttaatgcgtctgccgcattggaacgtgtcctttctgcatacggctttaagcagcaaaaggaactagccgaaaggcttggcatacatgcaaacaacgtgagtagctggcttgctagaaacgtaatccctagcaacgttttcgttgagtgtgctcttgatactggagctgacctgcgatggctaattaatggtgagcttgcaaatgcaagatttgaagtggtgaaaactaagcttaaaggtaagcaactctatgatgaaatcatggcaaatggagggagggcggttctgcgtcggattctcgatgcgtatggttttactctgcaaaaagagcttggagatttattaggcatatcttccggcactataagcacttgggttagacgcgattttttccccggtgacgtggttgtcacttgcgcccttgatactggcgtatcgttagaatggttatcaaccggaaaaggccagatgcgtaacagtaatgatggtgaaccggcaaatgctttaacgattagaaagtgccgcctcgaggcgggcgaactcaaagatatcggacgctggactcctgatatatctatggttccatcaaatactgatgatttagtgtttattgatggtgtgagcacatcttggcttgttgatagttctaactcgaagataggaaatggtcgctggcttattggtattgatggcgcactcgatgtttttgacgtaatcaggttgccaggcggaaaggtcaggttatcaaataagtctgctgagtttgaatgtaatatttcagatatcacaccatcaggtgcggttatttttactttggaaaagcatgtttaa

SEQ ID NO: 249777 - DNA, 1494 bp, Klebsiella pneumoniae
atgatcgactatgaggctactggtcttaacgacacgctgagctggctggggcctttcctcgtatgccctgagaatgaagtggtggatgcattcgaggtgaatttctccttcccgaacggcatctgtggctttgacagtaagggcaaaaaacggatccgccacgttgagtgggagattcagtatcgcgtctacggttccggttcggggtgggtgagtcaccagggcgagtatgcgctgaaaaacgtcaacgggttaggtttcactgagcggatcaccctcagctctccgggactggtagaggttcgctgtcgccggcgcaatgagcagggctcaaacaacgccagggattcgatgtactggcaggcactgcgcgggcgactgctgacacgaccttcatcctatcccggcgtgtcgctgatggcggtgaccgtcgagacgggcgggaagctggcggcgcagtcggaccgtcgcgttaacgttgtggccacgcgcgcctatgactcaggaacggccagaaccatttcgggggcgctgctgcatgtcgggaactcgctggggctggagatggatgtcgacaccatcaacgcgctggagtctgcgtactggacgccacggggagagtatttcgactttgctaccggcgacagtatctcagcgctggaaatgttgcagaagatagccaatgccgggaagtcacgttttctgctgagtgatggcctggcgacggtcaaccgtgaggggattaagccctggactggcgtgatcactccgcatgagatggtggaggagctgcagagcggatttaccgtaccgtccgacgatgattttgatggcgtcgacgtgacatacatcaacgggactacctgggcggaggagaccgttaaatgccggacgccgggcaatcccacgccggtgaaaatcgagaactacaaactcgatggggtactgaatcaggatcacgcctaccagattggcatgcgtcgcctgatgaaatacctgcagcagcgggtgacgttccagaccactaccgaactggacgcgctgtgctacaacacgggcgatcgcattgtgctcacggatgatattccgggcaacaacacgatttcctgtctggtggaggcgatgacaacggctggtggcgtgacaacgttcaccgtcacggagccgcttgactggtctttcgaaaatccccgcgcgctgatccgctatcaggatggctctgcatccgggctgatggtggcgagcagggtgggtgattttcagctgtcagtcccgcacctgagcgagtttgatgacccgatgaaggttgacctgtcgtcggcaaccatcgagccgatccgcctggtgttctgcggctcaacgcgccacgtctacgacgccattgtagaggagatcgctccgcagtcagacggaacctgtcaggtcaccgctaaagaatacctcgaatcgttctaccagtacgacgacgccacataccccggcgacgctgcttaa

SEQ ID NO: 249778 - DNA, 1494 bp, Klebsiella pneumoniae
atgatcgactatgaggctactggtcttaacgacacgctgagctggctgggaccattcctggtttgccctgaaaatgagaccgtcgatatgttcgaggtgaatttctccttcccgaacggcatctgtggctttgacagcaaggggaaaaagcggcttcggcatgttgagtgggagattcagtatcgcgtctacggttccggatcggggtgggtgagtcaccagggcgagtatgcgcttaaaaacgtcaacgggctgggattcactgagcggatcaccctcagctcaccagggctggtagaggttcgctgccgtcggcgcaatgagcagggctcaaacaacgcgcgggacagtatgtactggcaggcgctgcgcgggcgactgctgacgcgcccttcatcctatcccggcgtgtcgctgatggcggtgaccgttgagacgggcgggaagctggcggcgcagtcagaccgtcgcgttaacgttgtggccacgcgcgcctatgactcaggaacggccagaaccatttcgggggcgctgctgcatgtcgggaactcgcttgggctggagatggatgccgacaccatcaacgcgctggagtctgcgtactggacgccacggggagagtatttcgatttcgctaccggcgacagtatctcagcgctggaaatgctgcagaagatagccaatgctggcaagtcccgcttcctgttaagcgatggcctggcgacggtcaaccgtgaggggattaagccatggaccggtgtgatcactccgcatgagatggtggaggagctgcagagcggatttaccgtgccctcagatgatgattttgatggtgtcgacgtgacgtacatcaacgggactacctgggcagaggagaccgttaaatgccggacgcctgataatcccacaccggtgaaaatcgagaactacaaactcgatggggtactgaatcaggatcacgcctaccaaatcggaatgcgtcgcctgatgaaatatctgcagcagcgggtgacgttccagaccactaccgagctggacgcgctgtgctacaacactggcgatcgcattgtgctgacggatgatattccgggtaacaacacgatttcctgtctggtggaggcgatgacaacggctggtggcgtgacaacgttcaccgtcacggagccgctggactggtcttacgaaaatccccgcgcgctgatccgctatcaggatggctctgcatccgggctgatggtggcaagcagggtggatgattttcagctgtcagtcccgcacctgagcgagtttgatgatccgatgaaggttgacctgtcgtcggcaaccattgagccgatccgcctggtgttctgcggctcaacgcgccatgtctacgacgccattgtagaggagatcgctccgcagtcagacggaacctgtcaggtcaccgctaaagaatacctcgaatcgttctatgcctacgacgacgctacataccccggcgacgtcgcgtaa

SEQ ID NO: 249779 - DNA, 345 bp, Klebsiella pneumoniae
atgagtacgttaacttttgtcgttgattttgaagacggaaaggaacctgcggttcattccaaaatgaatattcttggcggggagttgaccgcggtggcttggagggactcgcttaaatcaaatgtggttgccgttgtggattgtcttccggctgcgaatcagcaggttttgctcttcgattctaacggagagggttgggttattggctggcgctctgtttggctttctgaaggtatgaaagaaactggcgattgggaatggagctatcaaatagagagccttgatgatgaggatatgaacattactcattgggctcctatgccatcagaaccggaggccgaatga

SEQ ID NO: 249780 - DNA, 192 bp, Klebsiella pneumoniae
atgagcgatgcgttttttgaagagttaacggatggtgacgccattcccgaccagtcacaatttgatatctggtaccaggaattatgtgcttatgtacttgatcatggtggacgcgctccttataaaatggcctggcttgagttgtttgagcgcggtatgagtgtagaggaagcattcagggaatttaactaa

SEQ ID NO: 249781 - DNA, 1002 bp, Klebsiella pneumoniae
atgcaacgaaacattatcgtagattccatgcgtatcattggtctttttttaataatactggcacacgtattcccgccagaaaccttattccagctaaggtcattcgatgttccaatgatggttttcatatcaggaatggcttattattgcgcagggaaaagtgatatttcaatttttccatatgtaatatcaagattccaaaggcttgtatttccagtgtgggcttttttggtattgtttttttctattatattcgtctttaagatctctattttttataatttcttaaacttaaaaaccattttaacatcttttttattgttgaatggaattgggtatgtttggattattcgggtatttttaattattgcaatactttccccctttttcgttagcattgtaaaaggtaagagcgggatgtatgcaaccttaatatctttgttaataatatgtttatcttccgccttatcctttgtaggtatcaacaatgaggtggtgtcacatttattaaaagatataataatcccaacatttacttatggtgcaatatttatgcttggatacaaatgtctatccatgaaaagaacagagaaaactttaaccttcatattcttttctgttttattcatatcaatggcagcatacacatacttgagcaagggcataattcttgggccacaagacttcaaatacccaccaaccctgtactttgcatcatattctattgcaatgacctatgttacaatgggcttactcactttatttttgaaaaataagtctgacctaccatacttcttaaacttcatatcatccaatacaatttggatttatttgtggcacatccctatcgttgagtgctttaaaatcacacatatcattgataattttgcaattaaatacctaataacattggcgctctccatctcaattacttatttacaaacctcattaataaaaaaaacaacaaaaagaaaattaatacgaaatatattcacagggtaa

SEQ ID NO: 249782 - DNA, 216 bp, Klebsiella pneumoniae
atgaaaatggtgctgggcaatccatgcgctgtcgaagcccaaacgctccgcgtggcggatctgttcggccgccagccggtagcgcgtttgcgcggagccctgatcgagcagacgggtaaaaaaaccgaggcgttttggcattatgcgttctccgtgtgggcctgtgctaagcggggggaaacctggggaatggcggcgatcagttcgcgggtgtag

SEQ ID NO: 249783 - DNA, 327 bp, Klebsiella pneumoniae
atgggcaacaagaaaagcggtaatccggtcgacacggcggcaaaaatcgcgccgctcgacaacaaagcgtacgagaaagcgctgcgcaaactccacgttgagctggtgaaactgcagcgctgggtagtgcacaaaggactgaaagtatgcattgtctttgaaggccgggacggcgccgggaaaggcggcaccattaaggccatcaccgagcgcgtcagcccgcgtatcttccgggtcgtcgccttaccctcgcccaccgagcgcgaaaaagccagctttactttcagcgctatatcaagcatctcccggcggccggcgaaatcgtga

SEQ ID NO: 249784 - DNA, 294 bp, Klebsiella pneumoniae
atggtggtgatggcgactaccgcccatcaccgggaaattgtggagcggacggcacggacgattttacgtatcaaggggcgagtttgccgggtcagtacgcagctacaaacccaagccagcgccacccatatccgcctctaccccgttactgttccaggggaggaagcggcaaaagccgcgccggtcgatattatcggtccgcaggccacctcgcagtttgacgccctgcttgcagcacagcgggatttacagcaacaagcgaaaaacgatccggcatggagcaaacagcgatga

SEQ ID NO: 249785 - DNA, 642 bp, Klebsiella pneumoniae
atgaattacgatcttatctactgtgatccgccgtgggaatacggcaaccgaatcagcaacggcgcagcctgtaatcattacagcacgatgagcattgatgaactgaagtttcttcctgttcgaaagctggctgctgataacgccgtactggcgatgtggtatacggggacccataaccgcgaggctgtagaactggctgaatcatggggtttccgggtcagaacaatgaaaggctttacctgggtaaaactgaatcagaacgccgctgaccgcttcaacaaggcgctaagcgccggagagctggtggacttcaatgatctgcttgagatgctggaccgtgagacgcgcatgaacggtggcaatcatacccggagcaatacagaagacgtcctgatagccaccaggggaaccgggctaacccgcgccagtgcatcggtaaaacaggtggttcacacttgcctcggtgagcacagtgctaaaccgtgggaagtaaggaaccgactggagaaattatacggcgatgtgaaacggatagaactattcgctcgggaagagtggaaagggtgggaccgctggggaaacgaatgtaacaacagcattgaaatgatcacgggccagataaaaggggtgaatatccaatga

SEQ ID NO: 249786 - DNA, 579 bp, Klebsiella pneumoniae
atgattaatccgtctgaagttgggaaaaaaggtgaaatggttcgcctccgcactctggaaagcatctggatacagggaaagctgcgtatgtggggccgctggtcgtatatcggcggtggtagcggcggcaatatgtttaaccatttactggcatccgggaaggtaactaaaacggctatcaatgaggcactacgccgaatgaagaagtctggcctaaccaaaccagagcttgaggcgttctttaaagagattctcagcagtaaaaacaaaagcggtcttgcgttctgctctgacgaagaggggttaaaaattgatggtgttattgccggggtcctcatgaatgaggactaccggtcactctatggtgtaattgttgagcgccatcgcttacgcaaaagtaaacttcagatggctaacgagcttctggaaaaacatcctgaatggacactgattacttgccgcagaagaattgacacatggataagtttggcagaatcgatactttacgcaccattatgtgacgcgttcggcacaaatggcgacagattttacttgcaaagtgagcaagaaagtgcttga

SEQ ID NO: 249787 - DNA, 1701 bp, Klebsiella pneumoniae
atggcccttaatccgccactcgggaacacctctccggaggtactgctcgataacgccaaacgtctggatgaactggtgaacgggcctgcggctaccgttcccgaccgcgccgacgtcccgctggactcctggcgccagattatggcgatggttgccgcagctatcattgaggcacaaaacagcatcaccgcgatcggactgccgtttagcacactcgatgatgctcaggccgccgtatcagatggaaaaatccccgaaggggctgtgacctgggttcgcgatatcgatgacaccgagctggccgacgagtacaaaaatatttccggtaccctgactgcaaccgggcgcaagatgccctcgcagcagtccatcgataaatattttcaggttctcccggacggaacatttgcgttgatggctgataacggggttgtttttgctatcgataaaaacgcggtgattcgtgctgtttccctggctgtgcaggatgtgattggcattggtgacgcatctatccgcctctatccgcaggcgagcggtttttacattctgggagaaaatggcatgcctttggcgctggggcctgacagcgtgctgcgtctcgtcgctgcgaatatcagcggcgtcggttttgaaccggatctgattggtgttcccctgttaatcagaggtgataatggtatcgctttggctttggataatgggggaaatttaagaactccggggattgttactgataaactgattgttggcggtaaggatattgcaggcggaggggattctgtatttagcgcaggggatcgttatgttaatagcgatggggacttagtgcctttacttccagacacaaagaaaatgtcggcgtggggttcgtcgtctctggtcgtatcgggcggcagtgcaaactttgcagcgatggcgtcagagctaggtgtcgaggactggaataatcaggggcaacccggtgaatcatccttccaaagcgcggcacgctttggcggtgtcccttttactctcagctttcccggtaatatcattccagccagtggttcggttgctgtaacatgcacccagaccccgagcaacttccgaaactcgtctttgaagtcctttacggggacggtggccggagtgcccggaacgctgtcatggtcgtcgtcgtcgcttcgatttacccgaacggaagctggcagtgatgtgtcattgcccggtggcgcggacttcattcccactattcctgcgtcatatcgcgatggggtgatcctgctgtggatgtataaaaacgacatcaagtgggatgcggcggcgaacccggaagttaacgaggatgtgattttcaataacgtgttaaaaaccgtaacacacctgacaacgttagggaaacgagccttagtaattggcatttttaacgactcctcctactccaactcaatctttaaaaccagactagagagtctgaataatcggatgagggattatttcggggatttgtactgcgatacgcaagattatatctgtagcccacaaatctgggtcgatactggtattacaccgacctctagcgacttggaaatgcaggcgcaaggatataaagcgacgtcgttatctgctgactccggacatttaagctctgtggctaataaggcggttgttcagaacgtgattaaacccaaactagtcaatctcggctggtacaaataa

SEQ ID NO: 249788 - DNA, 843 bp, Klebsiella pneumoniae
atgaaatcaggattagctattaacatcccttcgtcattcactcgggtacttagcgacctgtcgttcatcccggacgtgaatgaagatagcctgacctataccggcttttttggcgggagtctgagcgagtcgttggttaaccacgctaaagacgtcgctgggaatgtcgttgcaattgaaggtcgctcaaccgaaaggctaagtttcaacaaggggtttttctccttcatagggcccggtgcagacatttccgcagggacaggtattcgttcagatgttaaatcagacaatttaatcactgccgggtatccctgtacgattgcagtggccttcaagtccattagaaaggcagcaaaggagcaataccgccgccagtaccccattatgagttttttcacgaacccgtggtcaacagatgggcagccagcgctgttcctgtctgcgaccatgctcgataccggccagaatatccttggcgcatggtcgggtggtattggaggtgggagttctgatgcgcttgtatcccgttgctcggttccgattgactggaatacaacagacgacgttatctgcgctgcaatttcgcgttcagctgatggtcgaataaatcttgcagttaaaaaaggctcagacgctattttgacgtcaacgtatggtttccctgtccaaacgccgccagcaagctcaacagcgactcggatcttgttcgggacaagcgaatcgcggacactcagcagcggtgacattttaatggggcaatattggcacaacacggcgttatcgatgtcagaactgcagcagcaggtcgcgttgattcatctaaaagctaatgcccgcttataa

SEQ ID NO: 249789 - DNA, 234 bp, Klebsiella pneumoniae
atgcaacaggaactgaaggcccgctatgcggaactacggcaggccggcgtgttctcaatgaagaatttcgaaagcctgtttctggggctgaataatcaaataccatactcctggcacgatgatgatgaggcgctgtggggcctgattgatacagccaatccgctgtggatcctgtcatggctgaaacagcggctggcgtattttgacagctattttgaatataccggaggctaa

SEQ ID NO: 249790 - DNA, 174 bp, Klebsiella pneumoniae; identical to SEQ ID NO: 200875

SEQ ID NO: 249791 - DNA, 3480 bp, Klebsiella pneumoniae
atggtaaaaagaatgggtaaaaaaagaaaagaacagacgcctctttcaaaagtgctgtcgtcttcagatacaagaaaagtagttctcaaccatttttttggtaagctgactccacatgaaataagattatctgtcgcttctttagttaatcacagacatttcaaagaggcaatttccactcataaacagaattttaaatttatttactccaagatgacaccagattcaacactaatcaaaaatataggctggtgtattggcttgttagaaactcataaaaaaatgatagagttatttttaaaaaaagaaaatgagattcttctggcattttttgagggtgatttcgatgcttgcctagccattattggcgatttagaaaaaaaatgtggcgtgtctttatggtctatcagtttaagaggtagcctattatctctttcaaataagaccgaagaaaaaagagagttgacctttgaaattaatactaattcttcaacaaatctctttctcaaaacaacagctaaccttttagcaagtaaatacgatgataattcgacattacctgctttcaataactttgcagaacaaaaaattaggcgtagctttactggtgggttattgcattttttaatgtataaaattgttcctacaaattacctatttccttttgatttcaatgaaatattgaacaaggaaaagaataccaccgcaattgacattttcaacactcttttagatatggtgagattttcaataataagcaataataaaggcagccattatcaagagtcagaattagtaataacaagtttatacaagcttttcccaacaaaaaaaatagaaagtttagccaatgcctttgatatagaaactccttatgagtttataaaagatgaaatcaatatcattgacgattatacagctggtaattactcctctgtgtgccgtacctttgaagaaaaccaacaatatgcacttaaattttcacttttcgaaatttgggtgaaatcagcatgcagaacaaaaaaattccccaaaaattttctaggtgaacttgtttcactgacaacatctataattttaaaagatgacaattacgactcagcactaaatagagtttatttgctctgtcagtcatttaactcgatttcatggtttaaagaatttgaaattttcataactcgtgaagcaagattcatttcaaaggaagtcaatgggaggttagataatgcatcaacaataatgtcagatgttaactctccactacgctttgaaaagttacctaaaaaggtttctattgaatatgctaaagcattaataaaacactcaccagattctaattcagttagattatttcttagtaatgtagagatagatgataaatttgagagtagtttagatatcgaagccaacagaaaaaaaagatacaaagcattaaaattaataaaaactggtgagcaagctaaagcaattgaaatccttaaagaactatcacaaagcgatgatatcattgtaaagaatgaggcttattattatcttgtttccacatatatttcagtgggagagattgaacgcgcgctatctgcttatgtgaacattgtgatgagcaattttaatttacttgactcatttgatagtgcaacattgtgtgaaagtgctcaagaaataattaaagagtcaaaagacataacaatatcaatagctttatcacttcattcaatcaattttaataatgaatatgatgccgcattaaagtttgcttttgaaaagtttataactaacaatggatttttaacgccattggaattatttgaacatgatttaaaaattgaaaaagaacagttgcactattttctagaatatgtttgcatacccgaaaacatgaagctttatttatattttgatactaataaagaaatagaagaatgtagaattgaaatttgcaaaaaactaattgaaagaggtcattcacaaggaaaactcgtttttgaagtaaaagagaggacaaagcgccaggtcatattgaatgctgttaaacaggttgataatagtagaatacatgctgacattagcaaccttataaactcaaccaatatacgtcagctttttgactcatttactaaccttagggctaaaattattgttagtaccgaagatgaaattcaatttgaaaatttactagcttctatcgatgagcttaaaaaacaaaatgcatttgaacaggcattatcaatgattcatgttcaagacatagtgctaaatgaaaaaaactcaatatttatgcgcttagttaaactagtcagagacgagtttacatttggagcgaaaggattaaatggtcatttaagtaccagaattaggcatggccatttaccaaacactttgaagaactgtttttcagagcaaaatttggtttctcctaaagtgagtgccacaggaagttttaaaaagaatgaattttggttgggtaaatttggccatttgtcagaaccaaagctttatttgctcgataaagacttttctgacttctcatcaaaattatttgacttgattaatgagattaatgataagtggcttcaggtagtcgtttatgatcaagatattgctgggcttgatggtggtgatttgaaaaaaatagctttatttaattattctacgacttatgtagaaagctattatctccaaaaatctctatcaattggatctgattatggtgattttattaaacaagtgaccgcgtggttatggaggaaaacagaacacaatcttgaaaatgttcggcatgaaatagacacgagtttacgtaaccgattaatcaagctacttgatggacttgagaaagcagtgttttctcaagttggggactgcataggtttggcagagttcaacgaatcaatggccacatctcgacgaaaaataaattcagctcttgatttaatcattgggtggtttcatcgttctaaaggactttccattccaagctttgattctgatatagttatttcaatcactgaatggtctgctggcgcaaaagttgagaatgtagataagactgattatagttatcaaggtcgagcattaacttattttgtagatgctatatatgtcttactagaaaacagtgtagataaatcgaaccttgaaaaaaatcagttaactattaatacgtcatgggaagttgttgatagtgatcttttaatcaaaatagtaaataactgttctccaatagcatctctaacagattctaacaaagcacttgatttttatagagaatcctacgggcaggaagaatattctattaaagctgctcaaggtgagggtaatagtggcttttttaaggtatggaagagcttgtataaagaccttgacttagagcattctatttggtttggatatacctcgataactgagttttcggttataataactatacctcaatcacaattagaaaaggtgttatatgatgcaaattctactaattga

SEQ ID NO: 249792 - DNA, 459 bp, Klebsiella pneumoniae
atgatgcaaattctactaattgaagatgaacatgataaaagagaaaaaataagatctcaagttgagctcatacttgactccagagcaatcattattgagcgagaatctctgaggggtggattaaaggccatcttaacgatgagtgatttagatctaatattattagacatgagtatgcctagttttgatctcacagatcagtttaatagtgaagatcctgaaagctttgctggcattgaaattatgtctcaaatgaagcttcgagatatcaatgtcccagttttagttgttactcaatataaaagcttcgaaaaaggaagcgtaacccttgaagacctaattgaaaaaatgtcaaatgaatttaaaccattctttaaggggactatctattatgactctctactagagggttggaaaaaacagttagctgactatcttgaaaaaccggataaggtataa

SEQ ID NO: 249793 - DNA, 1194 bp, Klebsiella pneumoniae
atgaaaacacttattgtagatgaccaatacgaggataaagcaaagatcattgcatctattctaacaagtattggagagcctgattttaatttagtcgtggacgcaaaaaatgcgataaaaagcatgaccgctgaaaaatatgacttactcatactagacttgcaaattcctgaagttttgggtgaagatgcaaaaaatgacggtggaactcaacttttaaaatttatagaattaaatgaatcgataaagaagccaactgttgttttaggaataacatcacataaagatgcttatgagagttgttccgatttttttaaaaaaagaggatggtctcttattcttggtgttgatgatcaagaacacatatccagtgtattaaaaacaatgaaggttcatgtgactactttagaaaagaaatatgatgttgtattcctgactgctcttccacacatagagtatgaagcggtgttggatctacctttggattggaaagaacaccaagaagtcaacgatgatagcatatatcatacatctgaaattacaacatcaagcggttcattacttaatgttattgcaacaacgttacctcatatgggaatagcagctgcatcctcaactacggcaagcttatgtgttaaatttaagccatctttaataataatgactggaatctgcgcaggcattttagacagagttaatttaggagatattttagttgctgatcctacctgggactgggggagtggtaaattaactatcgaaaatggggccgctaaattcctaagtcaaccgactcaaatgacgctagaccccgctttgagaagaaaagttcagcacattgcaacatctaacatctatatgaatgaaatttatgctggttggaataaaacccgtcctccccataaccctaaagtacatataggtcccatggcaacaggagctgtagttttagaagatcctatgacagtagatctaattaaggctcaaaaccgagcaacaaatggaattgaaatggaagcatttggtgttatggctgcagcttattattcaggcccaaacaggccaaaggttttaattgctaaatctgtatgtgatttcgctaaccccgaaaaaaatgatacttggcagagttatgcagcatataccagtgctcagttcgcatataacttcttaaaaaatgatatagttatttaa

SEQ ID NO: 249794 - DNA, 1116 bp, Klebsiella pneumoniae
gtgacaacacctgttgctggcctgttcgcctgctctgtcgggtggctgcttgaacatatccctatggacaagcatatacttcgaaaatggttgaaagccggaatcatcgagaaaggctcttttagcgaaacgttctccggaacgccacagggagggattatatcccctgtgctggcgaacatggctctggatgggctggagggcgaacttcagactcgctttgggaagaaacgttcgaagaaatcatggaagaaccaagttcatctggttcgctatgctgatgacttcatcatatctggatgttcaaaagaaatcttggaaaatgaggtgctccctttcgtgacttcattcctcctaaagaggggactgacactatcgaaagagaaaaccgttatcacgcatataacagatgggtttgattttcttgggcaacacattcgacgctttgataataagcttattatcagacctgcgaagaaaaacgtgaaatcctttctcgcaaaggtcagaaatactattgatgaaaataaaaccgtccccgcatggctgttgatctataagctaaaccctctaattagggggtgggcaaactatcatcgacatgtggcatcggccagtacattcaacaaggttgatcaccagatctggcgaaaaatatggcaatggtgtgcaagaaggcatccaggcaagagccgccgatgggtatttcgtaagtaccatacgactatcaaaatgcggaacgggatgttctatggtatcgactcggatggacgaaaatatgttctccagcgagccggagctgtgcacattttccatcatgtgaaaatcaaaggggcggcaaatccgtttgataccgaatgggaagagtattttgaaaagagattagattactcttggagagaatcccgacagggtcagaagaaaatcctcgtaatatggaggaaacaaggatcgtactgttctttgtgtgaacaacccataactcgaaagactgggtggaacatacatcatatcctcaagaaatctcttggcggaagtgacaatctggaaaacttagtcctgctgcatccaaattgccatcggcaactacacagtaatgacgccggtcccagttga

SEQ ID NO: 249795 - DNA, 588 bp, Klebsiella pneumoniae
atgacgtttgaaggccttctgcggatcggtatcgaggtagatgaaggggtgatggataacatgctgggggtgagtcaggactcagttgctcagtgcgtggttcagctaagggattgtggcgccatgacgagccctgcggtatatgaaatgtttaaacacgttgagcaactggcgatgcgtttagccccagactggtggaagcaaatcgtaccatggtcgattcagccactgcgttattaccaggaagaggctaaggcaaaacgcgagcgatttattgtctgtcagagggagcgccagtaccccttaatcctctacgtaacaggtcaggtagaatatccggaagatgacccgatgtatggcacgtacgttacagaaggtacgttcctggtgggtaaagcgaaaaccatacatgatgccctagactgcgcaaaagaagcttttccgcggggtgaatggattgtccaggatgggttcgttgatcacctgacaggacgtcaccaagggccggtgagtttttccgaaaggactatagaaatccgcgataagggtgacaggctggtgttaacaggcaatgcccgcacactttag

SEQ ID NO: 249796 - DNA, 429 bp, Klebsiella pneumoniae
ttgcctgaccagctgtatctgcacgagcgcatccaggactacactgccgacctactgaccaccgtgcctgacgccatcaataaggcgatgtatatgtgcaccggctccgaagctaacgacctggcaatccgcagtgctaaagcctggagcggcggctcagggatcatcgtcagccaggaggcctatcatggtaccagcgagctgacctctggcgcctccccggcgctcggcagcggtcagccgctggcacccaccacccggctggtgccgccgccggatcgctatcgggtggacgcctccgatctcggcatctggtgggcgcaggagatccagaagcaaatcgatgacatggccgtccacggcatcaagtttgccggactgatggtttctcctccgatggtgtactgcctggtccgcagggtttcctga

SEQ ID NO: 249797 - DNA, 288 bp, Klebsiella pneumoniae
gtggtgcacgccaacggcgggatctttattgctgacgaagtacagccgggttttgcccgcaccggagagcgtttctggggctttggccgccacggcattgtgccggacgtggtgacacttggaaaaccgatgggaaatggcatcccggtctccgggttgctggcaaaagccgacgtactggtcgccttcagtgacgatattccttacttcaacaccttcggcggtaaccctgtgtcgatggccgccgcccaggccgtgctgcaggttattcgcgaggagaagttgtag

SEQ ID NO: 249798 - DNA, 609 bp, Klebsiella pneumoniae
atgattacgttagaagaagcaacatcagttcatgagtacctaacagcttattatcaagattctgaagatccgatttcccctccgggaataaaaaatgtagaacttttagagtctgctatagcaaggccgttcatgacgatgaacagaaaagatgtttatcctgatgatttagataaagcatcagcattgtttcatggcgtcatttcaaaccattgttttcataatggaaacaaaagaaccgcactactccttactatgtgttttctagaccgagcaggatattggttagataagtgcgatgacatccaactttttgaatttacgagaagtgttgcagcgcatgagatatgtgaacatagaagagatgaaataaaaacgatcaaagcattcttcagaagtaattcacgaaagaaaaagataacagacgagcaattaagctttattgcattaagcaggcatttgactaatgcaggttttactattaatgaagatggcgactattacgctatatataaaaatggtaaaagatacacaaaaataataaaaaaaggcgcatcaggccatgagaagtatgacccacaatatattaaattgatcctacccgcgtaa

SEQ ID NO: 249799 - DNA, 237 bp, Klebsiella pneumoniae
atggattttaatgcacttgttgatttgttaattaacacgggctatacgccggaatactacccgctcaaggtcaacaggattgtcgaagttctcaacgggatgtcggaagctgactataaagactattgcctggtatgtaaaaagcccttcatacatgcgccggacaggtatgattcctgcccgacatgtagcgcaaaaaaatgcaaagttgctattatgcgtggctttgttgaataa

SEQ ID NO: 249800 - DNA, 1011 bp, Klebsiella pneumoniae
atgagtgcttttactaaacgtactttggtatcgaaactctttttctttattaccgctatcccacttgcattatctgggtatgggttttggtcagtagtttttggtaatttaatgcaatatttttccgctgctttacttttgtttattaccgttcgaaaagagttaccaagaaggataaggtttgattttaaaattctgaaggaattacttacatttggtgtctttgtaatggttgagaacgttttgtggagtgtattaagcagggtttttagcttattgattgcgacatttcacggtacctatgcattgggtatctataatatgtcaaccagattgacagatgccatattaaatgtgttaaatacgatagtgggacgtttagttctgcctctattttcgcgccttcaagatgattatgagcagcttgaaaaagctttctttaaagctactcagcttttcaacttgatatccatgccggcgtttataggcttagggttaacatgttatgactggattccggttattcttggtgatgagtggattcggattgctcctatcatacaaatcatatctgttatgaacgccataatgttctcaagaatgtttgtgggcacaacgatgaaagcaattggccaatcaaaaaggtttatgtatctttcagcactttctgcatttttatcgattatgactgtagtaataacaaaagatacgtctttaataaccaccatgctttcttggacgactataagaataatcattaccattccctttggaatgtatttgatgtataaaattatcaggattacttatttaaatcaacttaaacctatttatttgcctttcattgctactgtcataatggtattgttatttgaaccattgcataatcttttcataaattatggctttaaagggagtgttttattagtgctggatgtggtttgtagcggtttagtatacttggtttcagtttttattttcagcaaattcaggatgtttaggggtaattaa

SEQ ID NO: 249801 - DNA, 234 bp, Klebsiella pneumoniae
atgatatccttcccgtcaggcacccgtatctggctggttgctgacgtcacggatattcgtaaatcgttcaatgatctgggcgagctagtacagcatgcacttgatgaaaacccgttctccggccacctgtttatcttccgtggccgcaagggagatactgtaaaaatcctctgggccgatgcggatggcctgtgcctgtttaccaaacgtctggaagaagtcgtgttcatctga

SEQ ID NO: 249802 - DNA, 207 bp, Klebsiella pneumoniae
atgctctatttcacgctcttcgttctctattttctcttccgcgcggaccagcgccgaactcaggaacgactcagtctctgcaacgagactgagctggctgtctttctggcgaagcgcgtcttccagcgcggcgatacgggcgagatagtcctgacccatgaccacatttttaatgcggccatgttctttttacaacttcgtcagtga

SEQ ID NO: 249803 - DNA, 171 bp, Klebsiella pneumoniae
atgcagcagatactgctggtaatggtgcggatgcggcagggtgtactcttccggcagccagtcgtcgtaacgcaccagcgccgccagccgctgcgccacggcgtcaagcagcggggcggtctggtggtgttcgcggtgcaggcggtctacctcatgaatgaaatggcgtaa

SEQ ID NO: 249804 - DNA, 2328 bp, Klebsiella pneumoniae
atgaatgatgtagacagagttgggggcaaaaatgcctcccttggtgaaatgattacgaatctgtccggtatgggtgtttccgtacctaacgggtttgccaccaccgctgatgctttcaatcagttcctggaccaaagcggtgttaaccagcgcatctatgcgctgctggatgaaaccgacattgacgacgtttccgcattagcgaaagcgggcgcgcagatccgacagtggatcatcgatactcccttccagagcgaactggaaaacgcgattcgcgatgcttatgacctgctgtccgccgatgacgccgaggcctcattcgccgtgcgctcttccgccaccgcggaagatatgccggacgcctccttcgccgggcagcaagagacattcctcaacgtgcagggctttgacgccgtgctcgttgccgtgaagcacgtgtttgcttcgctgtttaacgatcgcgcaatctcctaccgcgtgcatcagggttacgatcaccgcggcgtggcgctctccgccggggtgcagaggatggtccgctccgatctggcctcctccggcgtcatgttctccatcgataccgaatccggctttgaccaggtggtgtttatcacctctgcatggggtttgggcgagatggtggtgcagggcgcggtgaacccggacgaattctacgtccacaaaccgacgctggccgctggccgtccggcgatcgtgcgccgcaccatggggtcgaaaaagatccgtatggtttacgcgccgacccaggagcacggtaaacaggtgcgtatcgaagatgtgccgcaggcgcagcgcgatattttctcgttaagcaacgaggaagtgcaggagctggcgaagcaggcggtgcagatcgagaagcactacggccgtccgatggatatcgagtgggcgaaagatggccacaccggtaagctatttatcgtccaggcgcgtcctgaaaccgtgcgttcccgcggccaggtgatggagcgttataccctccacgctcaggggcagatcatcgccgaagggcgcgccatcggccaccgtattggcgccggtccggtcaaggtgatccacgatatcagcgagatgaatcgcattgagccaggcgacgtactggttaccgacatgaccgacccggactgggaaccgatcatgaaaaaagcctcggcgattgtcaccaaccgcggcgggcgtacctgtcacgcggcgattatcgcccgtgagctggggatcccggcggtggtcggctgcggtgatgctaccgatcgcattcaggaaaatcagaatgtcaccgtctcctgcgccgaaggcgacaccggctatgtctacgccgagctgctcgacttcagcgtcaagagctccagcgtcggcgacatgccggatctgccgctgaaggtgatgatgaacgtcggcaacccggatcgcgcgttcgacttcgcctgcctgccgaacgaaggcgtcggtctggcgcggctggaatttatcatcaaccgcatgattggcgttcatccgcgcgcgctgctggagtttgacgaccaggagccgggcctgcagaacgaaatccgcgagctgatgaaaggctacgattcgccgagagagttctacgttggccgcctgaccgaagggatcgccaccctcggcgccgctttctatccgaaacgggtgatcgtgcgtctgtcggacttcaaatcgaacgaatacgccaacctggtgggcggcgagcgctatgagccggaagaagagaacccgatgctcggcttccgcggcgccggacgctacgtttccgaaagcttccgcgactgcttcgccctggagtgcgaagcgatgaagcgcgtgcgtaacgatatgggactgaccaacgttgaagtgatggtcccgttcgtccgtaccgtcgcccaggcgaaagcggtggtcgaagagctggagcgtcaggggctgaagcgcggcgagaacgggctgaagatcattatgatgtgcgagatcccgtcgaacgccttgctggcggagcagttcctcgagtacttcgacggcttctccatcggttcgaacgacatgacccaactggcgctcggtctggatcgcgattccggtgtggtttctgagctgtttgatgaacgcaacgacgcggtgaaagccctgctgtcgatggccatccgcgcggcgaagaaacagggtaaatacgtcggcatctgcggccaggggccgtctgaccatgaggatttcgccgcctggctgatggaagaggggattgatagcttgtccctgaacccggataccgtggtacaaacctggttaggtctggcggaactgaaaaaataa

SEQ ID NO: 249805 - DNA, 333 bp, Klebsiella pneumoniae
atgagcaaagttatttatgtcgtcagtaaaaaaccagtaagtacaaattatattccgccagcgctgaagggcgctttacctctgattagccagtatgaggttattaaacgaaccgcaaaaggctatcgcctgaaagtgagttatgccggcgataaaggttctatgtacctcgatgagcattattcattttttgaaagttattccgaggcgctggagtacatcgcgtcagaggccaatcgcgttgccggtgcgcttgaggaaatgaagctgaaagccattcgccttatgtgtgaagcgcatgacgaattgagagggagcgtgccgcatgactga

SEQ ID NO: 249806 - DNA, 1155 bp, Klebsiella pneumoniae
atggaaaactttaaaacacgccttaaaaatcatattgaacacgttaaaaaggttagagagcactgtaccactgaagagacaacaaagcaggctttaatcctgccatttttagatatactaggttttaatgcttatgacccacaaaaagtaaaggctgaatatggtgctgactttccgggtgtaaaatctggagaacgcgtcgattacgcattgttctgtcaaggagtcccggtcatgttcattgaggcaaagggttgcaaagaaaaaatggacaaccattgcccgcaattatcccgatattttaattccacacctgaagttacaatttcggccattaccaatggcgtagaatggcgttttttcacggatctaaatgaaaaaaacataatggattcaacaccattcctacgtattatgatggatgatattaaagactctgatgcagagcaattatttagatttcggcacgataagtttaaaccagaagctctaagaacactcgctgaagagagtgtctacatctctgcttttataaaagttgtgagtgctagcctcagggaggtggatcatgagtttgttcggtatgttgcaggcagagcaaacataggccgtcagctaaatcagagatttatagaatctatcacaccattggttagacaagcggttgaacgctcagtaagtgagatggtcgtatcaggattatcttcaagaacctctccccccagcattgagccatcggataatgttccagaaaacgtcgtcgttgacgagcgtgaggacattattgatccagaaaatccaaatattataacgacttataatgaacgtgttttatttgagaagattacttcaatcgctgggcaagaatacgatctacaagctaaggataccgagtcatattattccattctttttcaaggcaagaccaatcgatggttgatacgttattacgataagaagaataggtcttcaattcagctacctattgatataagtgagataacagggaatgaaataaaaagagctggactagaatatgataacaacaggatttttttagaaaatcccgaggatgtgttaaggatttcaggtttgattcttgattccttgcagtatgtacaaaatgatgaaaattttagaaagcgtcgctcttaa

SEQ ID NO: 249807 - DNA, 477 bp, Klebsiella pneumoniae
atgcttagcggtaaagatttgggccgagccatcgagcaggccatagacaagaagattgcaaaaggttctgccaagagtaaggcggaaattgcacgtcatttcaaaatcaagccaccatcaatccatgactggattaataagggatcgatatcgaaagaaaaattgccagagctttggaattatttttccgatgtggtgggacctgaacattgggggttgaaaggttaccctgtcaattatgatcattatcagataactgaagcatctattgaaaatggtgcccttgaaaagctttaccgtaaggcttcttcagaaaagcaggctatcgttgactttatcctgcttgaggagggccaagatccgcctgagtgggctgatagcgacgcgcgggcatacattgactcacttgagctgaaggtaaggagatggtcagaacaaaaggatattgggaaaaaaccgaagaaagccacagcttag

SEQ ID NO: 249808 - DNA, 195 bp, Klebsiella pneumoniae
atggcgttatcaaaagaagaagagacccagcgactgattttgctaggcgcaatcagtcaactggatgaagcggaacggaatgaaatcttcgccctgaaaggtaagtttcttgaagtgtttaaggcggcaaccaagccagagtatgcatttgcggctttgggattattgtccgcagaagttcagaaagatgaatag

SEQ ID NO: 249809 - DNA, 294 bp, Klebsiella pneumoniae
atggctaaatacgaagtggtgcgcccatggtttggtgtgaaggttggtgatgtggtggagttgaaagaactgcacccggcgctgaagtctaacgtccgtctcatgaatggtgaggcaggcggagaacttaccccgtcgacgcctgatgccggtaccggtgataaatcccgcaaagaggttatcaaggctcgtctgactgaactgggcatcgagttcaaaggcacccttggcgctgaaaaactcggtgagctgttgcctgacggcgagctcgaaaagcttttccctgctgaataa

SEQ ID NO: 249810 - DNA, 156 bp, Klebsiella pneumoniae
atgctccagcacaaaatcagggaggcgttctgcgcctctatctctcgcaacccgaaagggtatcagtaccttcacacccgcgacttcgttaccgcgcttcgccggcgcggcattcactttaccgaggtggaggcgaactcctggatcgcacgctag

SEQ ID NO: 249811 - DNA, 396 bp, Klebsiella pneumoniae
atgaaacgtgtttctcaattgaccgcactcgccctgctcatggggcttgctgcttccactacctgcgccgctgaaaccatgccagcgctcactctctcccacctgcaacagcagcacggcgtggccatcgacacccggctgagcgcttattacaacggctggccgcagcgcgccaacggcccggaaggccatgagccgcaggccctcaatctttccgcccgctggctcggcgccatgagcgacgatcagctgcgcgcctgggctaagcagcaccagctccagtccgatacccccatcgcgctgtacggcagcccggaggataacgtcagcgtcgcggcgcggctgaaacaaacgggtttcacccggctcagcaccctgagcgatgcgctgagctag

SEQ ID NO: 249812 - DNA, 147 bp, Klebsiella pneumoniae; identical to SEQ ID NO: 244026

SEQ ID NO: 249813 - DNA, 162 bp, Klebsiella pneumoniae
atgactaaatcagcaaccgtaagtaagaaaccacgtaaacagcattcgcctgaattccgcagcgaagccctgaagcttgcggagcgcatcggcgttgccgctgccgcccgggaactagactggccccatgaacctccagacagttggtatcacttaaattag

SEQ ID NO: 249814 - DNA, 1053 bp, Klebsiella pneumoniae
atggcgctggccgcaatggacagcgagccggtggcgtggattcgtgaatctgcaattacagacactagtgatggtgcgtggaggcctattattgtgatggaaaataagcgtactgtggcgaatctgtctgagtcatggggtactagttacattccgctctatagccacgcgcagcagccggtagttgatgccgacgataatttctattcgtggtttgggagggagtgggcagagaattatcagcacaaccaatacaccacagcggccaagcaaatgcttggtgtgatggctgaatctgcgtggaaagcagcaactgaaaggcaacggcaaaagcaaagcgtttctgtccctgatgtgaaaatgtacgaagacgtgccttatgaagttgggcgcttcaaaactcatcgggattgctattgcgatggctggaatgcctgccgcgccgccatgctcgcagccgccccgcagccagcggtagaaagcgattttatccccaaaaatcttgataaggcgcttggtgttcttggaatggctatcccggaatctagggaggaattcaatttccagacagaacgatggattcagcgcctaattgaccgtgttattcgatacgccgatgagttccaagggcagccagcgccggtagtgccggaggatgtgctggccgcattgcagaaggttgctcgtatacgcctcgacctgaatgacttcgacggcgattgccgtggaatcgctgattgcctgtgtgatgccgaagaggcactcatcgaggtagtaaaccgccgcgccgccatgctcgcatcttctacgcagtcacccggcagtgaaaccgctaccgtgccgggtaaatggattccggtaagcgaacggatgccgatagagtttgaggcagttatcgctttcgatggagatcaggtttatggcgaggccatgtatagctctgatgatggatttaccattgacggctatgatccatgcgacagggtgcaattgcaaaacgtaacccactggatgccgctgccggcagcaccgcaggaggtgaagagtgagtga

SEQ ID NO: 249815 - DNA, 150 bp, Klebsiella pneumoniae
atgaaaactggctattgtccaaaatgtgggaattcgtgtgaagtaaccttcacaccctatgtgatgaaggatggtaaaatcatccgccctaaaaaggcgaaagtttttgttatccctcattgcaagtgcagcgagaaaaaagctgcttaa

SEQ ID NO: 249816 - DNA, 483 bp, Klebsiella pneumoniae
atgcatttaatgcgcggcacacgtgtacgtcctttgagtgaaattgaaataaaagcaatagctgttaatgcttgcttcgcactcggatttactagcaagtataaatatcggcgtagaccgcgcagatttgacgtagcgctggaaacattatctcaatggaatattgtcctcgatccaatggatgatgacgaatggttccaggaaacgctgggtcttacgattggacactgtgaacctgacaaactgacaatcagggttccaaaccacatctatgaaatggcatgtgaaggtgaacggtcagcattatttgttatatttcacgagcttggtcacttgctattacagcataagccagccttacattttgcgaatgccatgccagagcaaaatgaagattcagaatggcaggcggacctttttgcagaaacgatgctggaaaagctaggatatcaaacagcacagctttgctttgaattttattga

SEQ ID NO: 249817 - DNA, 177 bp, Klebsiella pneumoniae
atggctgcgatcggctgcgttccttttgagcgcggcaacgaagccaaagggtttttgatagtgaccgctgcggccgatcaggggttggtcgatattcacgaccgccagacgctggttctgacgccggaagcagcacgcgaatggatgagacaggacaagggcttgaacgaagcctag

SEQ ID NO: 249818 - DNA, 792 bp, Klebsiella pneumoniae
atgaatgcactctctgttttctcatttcaggaagaacatcctgttagggtggttatggttgatggtgagccgtggttcgttgctatggatatctgctcagccctccacatcgccaacccttctgatgctttaaagaaattggaccatgatgaaaaattgaccctcggtttaaccgaggctcaaaaattagatcgtatggcaagggaagttaatgtggtttctgaatctggactctatacgctcatcctccgctgccgcgacgcggtgaagcagggaacgacagcctggcggttccgcaagtgggtcaccaatgaggttctaccagctattcggaaaagcggtgagtacagctacgtcgaacccgcgccaaaaatcgccggtgaaccattggactggcggcaaaaggaagaattacgcggcctgataaacgatatagcccaaagttttcggtaccacaacgcatggaaaagtggtgtatggctggcgctacgtcgcgcctgcaggaatccatcccccaatccgattacggttgacgatctcccggccatcactgccgagttgcgccggatattaacgtcggcagaaaccgcgctggacaatatgcggacctacgagcgggaatttttgcgtgaggtggttcgtggggcgcgtcggagtgtgtcgcgagaggaattatcaatcatcgaccttggctcagaggtggagaaggtgctgccagcgcatttcgagctggccatcaataaactggaggccttatccacaaaattagaggctcctgccgtctcttcctga

SEQ ID NO: 249819 - DNA, 168 bp, Klebsiella pneumoniae; identical to SEQ ID NO: 180609

SEQ ID NO: 249820 - DNA, 336 bp, Klebsiella pneumoniae
atgatttatcgcagaggatgggtgccggtgcttcatcgttatcagctggaaaagaagctgaaggatgaaggtttcgacaattacgaagaaatcaccagtttcttatgtggaggccgcctggaggatgagcgtagccattttgcctatcaagtcgtcgataacaccgaatgggtagaacgccgtgacgcgacgttctggcagcgtctgaaccgactgtggttcgtgccgctgtatctgttaacaattccgttccagtggcttatccgtgggcgtatggggtttgaaacgacatctaaaacgggcgcattcttcagccggttaaccgggctgaaataa

SEQ ID NO: 249821 - DNA, 249 bp, Klebsiella pneumoniae; identical to SEQ ID NO: 199851

SEQ ID NO: 249822 - DNA, 1500 bp, Klebsiella pneumoniae
atggcgatgtatgaagtcggtaccgtcacgggtgccgcgtcgcaggcacgggtgacaggtgcgacaacaaaatggtcacaggaggcgctggggatacagcccgggtcgattctggtggtctaccgcagcggtagtgctgacctgtatgcgatcaaatccgtggacagcgacacgcaactgacgctgacccggaatatcaccaccgcattttccggcgcctcttacggcattattaccgctgaaaccgccagcacctcgtcgtttgctaaccagctggccagcgcgtttgcattctggcgtagtgtggtggagggctggtcgatggccctgaccggcagcggcgatatcaccctgactgacccgatcaccggaaagcaggtgaccgtgccggcgatagccgggatggcgaaggcatcagatcttaacgcgctggcaaaactcaccggaggaaacaaactcgacggctcgcaggttataaccagcgataatgccggttttattttgggcaggaattcagatctggctctgctcaaaaaacaggggcaaggcgggacaattgccgttggctcgggaacaccgttcagggttcaacgttcaagagcgaccactgtatcaccgtcagacacctatgatgacatcctcgttattggcaccaacaaccagacgacgttgcccggagatttggttgtcggtggtggtttcgataatacggcaaagggcaagctgtattcccaggcgttagagctgtcgatgggcactccgtacatcgactttcattttaactacagcaccgacgacttcaccgggcggattatggccactgccgccgatcaaattagtgtacaaggtagtcattggcgagttgacagggatcttcgtgttggtggtatggcagatattggagggtgggcgcaatgcggagtcgacctttcggccaacagaacagactttggttcccctgctgatggttcgttggtttcaggcggacgtattcgatccagaatgctgggacgcggcggtaacggtgacacctccggggcgtggggcggtttctatgttgaagagtacgtgggaaccgaacacaggattatcatgtatatggacggcttcgggagaaccgacgcatggtcattccgcgcaggtggggtaatttccacgcccaagggcgacgtcatgacgaccggttccgacgtgcgactgaaaaccgacttcacacaagcgcctggaaacgcctcagagcgcattgaacgcttaggggtgtgtgagtaccggatgaagggggaaacgcgccggaggcgtggttttatcgctcagcaggctgaaaaagctgatgatctgtatactttcctcggcatcgagcaggagattgatggcgaaaaatttaaggtgatgaatgtggattacacggcaatcattgctgacctggttacggtggcgcagggtttactggttaaaaatcaggaactggaaaggcgtatatctgtactggaggggatctga

SEQ ID NO: 249823 - DNA, 549 bp, Klebsiella pneumoniae
atgacacgcttactcaagacaatcttgcccatcatcctctgcgccctcttcgggttatcgttcgcttcacccacgcaggctgtcgccagtctgccgatcgttcttcccgcgctgacatgcgatgcgctaagcgctaccgacttcagcgcggccgttggcgcaaaggtcactatcaatcacactgaaatgcagacctccgcgcagggaagctggtgcaaggtgagcgccactatcgcccctgagattggcgtgcagattgccctgccgactcaacgctggagtcaacgttttttgcaggtcggctgtggcggactgtgcgggagtattaacctgagtctgtcgaatgccagcggctgcctgccggcaatgaacggcgagtttgtggtggcagcaaccgatatggggcaccatggcagtatgatggatgcgtcatgggccgaagatccgcaaaagcgcatcgattttgcctggcgcgccaaccacctgaccgccgtgctggccaaagcggtgatgcagacgctttaccgccagccgccaaagtatgcctag

SEQ ID NO: 249824 - DNA, 345 bp, Klebsiella pneumoniae
atgaataaaaaaactaaacattatgcatactgtttggctcgcgttaacgaaccggagatttttgaagtcaatacaaatgaaacagatagcgaaatactccgaatgtttaaacaagcccgtttagggcatgacatggagcatggtagtggagattaccaccttcaccggaaacgtgagaagtttaaagaaatgtgggaggaaaagagttcttctctaagcctctacgctgtttttataggtgagagggatgttacagagaaggatattattgatactagtgatgatgcactgataccagaggaacttgcatatttgattgagtttcgtaaaaataatgatctataa

SEQ ID NO: 249825 - DNA, 225 bp, Klebsiella pneumoniae
atgctgttaatagtgctgtgcaggatgctgagaacatcccacacagcgatccgacaaacaacaaaccaccacggagagttaagaatgccgaacaatcacattatggcgttagcgctcgcgctgtgcaacgccggaacaaatagccgggtgacaatcccccgtttaaccgggagagaattacgagaattgctggaatggctgtcagtgctgagagtgacagtataa

SEQ ID NO: 249826 - DNA, 366 bp, Klebsiella pneumoniae; identical to SEQ ID NO: 101526

SEQ ID NO: 249827 - DNA, 366 bp, Klebsiella pneumoniae; identical to SEQ ID NO: 101526

SEQ ID NO: 249828 - DNA, 1314 bp, Klebsiella pneumoniae
atgaccaccaccttaatgggcgtgtttgatggcaccatgatcaacattgccctgccctccatggctcaggagatgcaggtacctgccagtattgccgtctggttcgccaacgggtatctgctggcagctgcgatgacgctggcgatattcgcggcgcttgcggcccgtctgggttatcgccccgtatttctggcgggcctgacgacctttaccctgacatcactgggttgtgcgctggcgaataagcccgaagtgcttatcggtatgcgcgtgcttcaggggatcggcggcgcggcgacgctgagtattgcccccgcaatactcaggtccgtatttcccggacgcttacttggccgcattctggggttccatgccctgctcattgcctcgagctccgctatcggcccggtattgggcggtacgatccttcacacccttagctggcaatggctgtttgcgataaacgttcttcccggcaccctcgccttactgctggcggtcagagcgctgccgcgggatgcgatccgtatgcaggcgcccttcgacaccgtgggcgccatattgtcggcgctgctgttgggttcgacgatcatggcggcgaacagcctacagaacgctacttctcaattcggcagcctttgctggatggctctcgctgcgctgagcggcatggcttttatctggcaaatccgccgcacgggtcatcccttactgccgccgagcatgtttaaaaatgaacgttttaccctcgcggccttcacgtcgatggttgctttcgtcagccaggggatcacctttattgcgctacccttcctgtttcagagcgaatacggctacagtccggtagtgtctgccctgctgtttacgccgtggccattagggatcgtgctgattgcgccgcatgcaggccgttgggcggacacgatatcagccccggcgatatccaccctggggctggtgatatttgtcggcggtttgatcctgctggcgacgttacccgccagaccttcaatgtgggatatctgcctgcgaagtctggtatgcggaatagggtttggctgctttcagagtcccaataaccgggaaatgctctcaaacgttaatcgtgagcacgcgagttatgcgtccggtgttttatccattatgcgcactttcgggcagtgcctgggagccgccgccgtagccgttctgctggcagcagatgaaaggtcaattcatgttgcgctgtggagcgccgccgcggcctctgcggtatcggtcgtcgtcagcgcgagccggttgcgtaaaatcactcatcctgcggaaacaggataa

SEQ ID NO: 249829 - DNA, 261 bp, Klebsiella pneumoniae; identical to SEQ ID NO: 191821

SEQ ID NO: 249830 - DNA, 294 bp, Klebsiella pneumoniae; identical to SEQ ID NO: 191822

SEQ ID NO: 249831 - DNA, 516 bp, Klebsiella pneumoniae; identical to SEQ ID NO: 191825

SEQ ID NO: 249832 - DNA, 528 bp, Klebsiella pneumoniae; identical to SEQ ID NO: 191826

SEQ ID NO: 249833 - DNA, 657 bp, Klebsiella pneumoniae
atggcggtgatcaatgccaaacgcgtataccgcatcatgcgtcagaatgcgctgctgcttgagcgaaaatcgacaataccgctctcaaagcgggcgcatacagggaaagtggccgttggagaaagtaaccggcggtggtgctctgacggcttcgagttcagctgtgataacggtgaaaaactgcgggtcacgttcgcgctggactgttgtgatcgcgaggcactgcactgggcggccagtaccggtggctatgacagtgaaaccgtgcaggacgtcatgctgggtgcagtggaacgtcgcttcggtaacagcctgccagcatcccctgttgagtggctgacagacaacggttcagcctaccgttctcatcagacgcgtcagttcgccagaatggtaggactggagcctaaacatacggcggtacgtagcccggaaagcaacgggatggcggagagcttcgtgaaaacgatgaagcgtgattacatcagcatcatgccgaagcccgacgggttaacagcggtaaagaaccttgcggaggccttcgaacattacaacgaatggcatccgcatagtgcactgggatatcgttccccacgggaatatctgcggcgacgaaccagtcatgggttaagtgataaaaagtgtatggaaatatag

SEQ ID NO: 249834 - DNA, 810 bp, Klebsiella pneumoniae
atgaagatctatttaactataaatgaatcgtttaaaaagtatcttaaacctggaaatgacagggcattctttctcaagatacctgatgccatcccctctctatttgaaggattagaatgcgacttagtcatagtgggtgggagtgattatatatgcattgatgatttctcacgcattataattgataaaaatagtaacttctataatgatattagtgaacaattatccaaaagtggaacgatagagatctctaaattattaactgctaaaaataacaaaagtttctttagccaggttatgtcagataattcatattatcagataaaagatattctaaaaaccaagtcaaaaagatttcttctaaaaataagagatataggagcactttcagaatataaaggcgatgtaaaacccaacagatatatattagacaggttacttgttacaaacaaacagaaatatgcttattctaaaggaataaaatatatttcatctcgcagtgacaaagcttacatatcaaaaactgccgtcgataatttgagctgcgaaatacagcaccctattgaaaactatactatcgctcttaattttaataacaatgcactaggcagaaccccaataaatgttttcatcgggaagaatgctacgggaaaaagctttgcactgaaacatatttcgcatgaatttatttctggacacagttcttcagatgtcataaataaagttatagtcatttcaaatacaattcaagatcaatatgttaaaaatcaaaagcaattcaaaaaaaataagcaaaggtattcctgttga

SEQ ID NO: 249835 - DNA, 450 bp, Klebsiella pneumoniae; identical to SEQ ID NO: 220716

SEQ ID NO: 249836 - DNA, 693 bp, Klebsiella pneumoniae
atgcaggcacccggtataccggagaatgaagaacagaggctgaagtccctgtatattaccggccttcttgatacccgtgacgatgagcgttttgaacgcctgacgcggctggcccgcaaagcctttcaggtcccggtggccctgataagcctgctggatcgcgagcgccagtggctcctcgcctgccagggcgtcggcgtgcgcgaaactccacgtgatatttcgttctgcgggcacgccattctgcaggaagggccttttatcattcacgatgcggctgccgatgcgcgatttcacgataatcccctggttaccggtgagccacacatccggttctacgccggccagccggtgagcctgccggacggcacggtggccggcacgctgtgcctgatccacaccgttccccgcgccttcacggatgaggacattgcgtccctccgggacctggcctgtatcgtggaggacgaattcgaggccatcagcatggccatgacggacagcctgacgggcattggattggcccctatatttccatacactttttatcacttaacccatgactggttcgtcgccgcagatattcccgtggggaacgatatcccagtgcactatgcggatgccattcgttgtaatgttcgaaggcctccgcaaggttctttaccgctgttaacccgtcgggcttcggcatga

SEQ ID NO: 249837 - DNA, 522 bp, Klebsiella pneumoniae
atgatgaatagcaataaaaaaactaataaatacgtaatggtaataatttgtataaccttcacactctctatgttctacctatccacaaaggctgtaatttatattctcaacaagagagatgttgagggttttgcagaatctattctagaaagaagtgttttattcatggagcaaatagagtttgtggaaagtaaaagcaagagtgtaaatgaatcagcagtttgcacaaaagaacacataaaaaagctgcgagaaattctctggcctcaacgttttattaaagacattgcttatgctaatcaaggtacgctcttgtgtacggctttgtggggtgatgacttagcaccagaaaagctcaacaacaattataatagtgtaaagtatggcaaaggtttttggttgcttgatgtaaaacctgggatcttaggaggtaataatatatacgttataaataatttagcaatcataccttcaccattcatgtttgctaggttttcattagattctacaaataaaaaataa

SEQ ID NO: 249838 - DNA, 1044 bp, Klebsiella pneumoniae
atgctctttaaaaatattaatatggtagccccggcattgttagctttaatttttcatgtaaacagtgcaggtgctgaacaaaaatgttttgtaataccagaacaagcaaatgcatatttagataatatatcgcaagttataaatactaataaacaacctaatgcaatggctagagtgcatatcgaacattcattgccgggacaacctaacgttattaaggcatttgatgcatataatcaattcaaaatgatgcgtaatgcagcattattatggagtgagagcaacgatgaaaaatattttcttttttctaaaagttatctcttggcttggctaagtaattatagaccatctttgaacccaattgatgaaactccttttgatgcattaattgacacatatacgataatcaaaccaaagttaaatgaaaaagaaaatgaattgattacatctttttttaaagaatgggctaatgattatatcaattatataatacgcaaggaaaattcaattaaggggttaacaccggacaactggcaaagtcataggataaaaataatcacgatgcttgctagtgctaccaatgataaagatttattttctaaggcaacagagattttccaaaagcagattttaaaaaatataaagcctagtggcgaagtctatgatttttctgagagagatgcaataagttatgctgtctttgatcttcttcctctttcccaggctgccttagtagctaaaaataatggatatgattggtttgggtacgtaagtccaagtggctcatcgctaaaaaaaggaattgattggttggtgccatacatggagggattaaaatcccataatgaatttaataatactaagtctgaatttgataaggtaagaagatcaattggaatgaaagatttcaaaggagtctttaatcctgttcgggccgctccattattttgggtggcttctgccttagatgaaaattatcttccgttggcaaaaaagttaaaagctatgcctgaaccattagcagtctcgtgtaaaaatttataa

SEQ ID NO: 249839 - DNA, 519 bp, Klebsiella pneumoniae
atggataaaagatactcaagtcaggccttctttgatttcctgtatacccttccttctttggggctgttgaaggatgcgacagctcgaaacctcaaaaactcagctttgctgttactttccgctgtggatctcaacagtgaagatgacattcgtgattttgatgtcgaacagttgatcgacagatatgttgaaaatcaaaattcgaaaccaactgagtcaagtattcaaaactatagaagccgttttaagagcgcagttaaaaaattcgatgagtacgtatctgttggaacggtgcttgacaggtctgaagacgacaatgaattcgcggggttagatgctgtggaagaaaaaattgaaaaggctaaattagtacccgacgagaaagtaaaaaccttcaatttaccagtgctactccgtccagagacaggggctttgattactattcaaaacttacctacgaactttactgaagaggaagcagaacggatcttatccattctgaaagcttacattcggtga

SEQ ID NO: 249840 - DNA, 294 bp, Klebsiella pneumoniae
atggaaatgaagattgacgccctggccggcacgctggagtccagcgatgtgatggtcaggattggaccggcggcgcagccgggcattcagctggaaatcgacagcattgtgaaacaacagtttggcgctgcgattgagcaggtagtgagagaaacgctggctcagcttggcgtgaaacaggccaacgtggtggtcgatgataaaggcgcgctggaacgtgttttgcgagctcgcgtacaggccgcggcgctgcgcgcggcgcaacagacccaattacaatggagccagctatga

SEQ ID NO: 249841 - DNA, 3747 bp, Klebsiella pneumoniae
atgaaatggataaaagcacttaaccttcagcaatgggcagattctattcctgcaaaagtcatttttccagcactaatcgctgatcttatacgtgcaacggctaacaatattactgaaattagatttcctaatggtgataagggacagattagaggttatgacggtgtacttaaagctgagggggagggcccctatgttcctgatggcgattcattctgggagtttggtgttaatgaaaaattgcttgataaagctaactctgactacgaaaaaagaacacgcgaagttgctccagagatacgtctaaagactacttttgttttcgcttcattaagaacatgggataatcctaaggtaaagcttgaagactggctacaagagaaacgcagtagtggtaagtggaaagatatcaaattaattgatggttctatgcttgaagattggctcggtgtttgccctgctgtagcggcttactacgctcgctaccatcttgagctcatgccacaggttggtgttagaagcattaaggagttttgggatgaattttccactaaatttagtccccctttaactgaagcagtcttgctggcggggagagaaaagcaaaaagagcgttttttgaatgagttacgagaaaatggtcgaaaaatatctttagctgcagattccccagatgaggttattgcttttgcgattgcagctatcagaaccactgaagcggaacttagacgttcctttcaaagtcgagcactaattattgatacggatgatgctgcaagacagctttctggaaaaagaggaatgatcttcttaccacgtgatcgagcaagagttttagccggtttattacagcaatcatctatcacagtggtaagtgccggagccgatgaatcacgaactgatcacgaacttctgatccgcccggatagcatatctttaggtaaggctcttgaaaccatggggtttgattcagctaaaagttatcaaatggcgcggcagtgtggccgaagtttgtctgttttggctcgccagatctcaagtagcacggctgaatcacctgaatggaaagacaaccctgagttgctccctgctttattagctggtgcatggagtacatgttcagagaaagataagttaattctcaagcaactagctggctatacagactattctcaagttgaaaatccattaaggctattaacaaagcgtcgcgattctccaattgatcgagtggatgatatttggtcattgcgttcgtcggtagatgcttttgtacatttaggctatttactgggtgaagaacacttggagcgttttgagaaggctgtaagagaggttttttcctatattcctgaaccaccaaaggccgaagatctgtttgttcctgacaatgttattaaaacgtcttatagttcgtggttacgtaatggaatgacaacagttttgctacatatggcaatactacatgaacaggccgaattccgggttactggtatgacaccccaagattttgttaacaaaatagttcagagtattccaggacttgctaacgaccatcgactttttattagtttgcgggatcaacttccactgctggcagaagctgccccgggccctttccttgatgcccttgagcaattgcttaagggcaatggggaaatgattgctccaatattcaatgaagataaagggctgttaactcctcgaagtcattatcatggattaaaatgggcattggaagccttggcttgggaacaaacatatttattacgcgctgcaatctgtcttgcaaaactcgctgtaatagatcccggtggaacttactcagatcgccctcttaatagtttaagaaccatttttctggcatggtctcctaatacatgggcaccagtaaaagttagaaatgcaattataaaaaaaattatcactattgttcctggtatcgggtggagtttgttacaaaatctccttcctcgttcccatgatacctctgatcaaaaccaaaaaatgaagttcagagagtcggataaagatgtagaaaaactaacgtggggcgttgtttgggagggacaattctttattatccaagaagcaattaaacttgcaggtatactcccaacaagatggaaaatcctaatctctcatttaagctcattccctgaaaatgcaatagatgaaacacttgctcatcttgaactttgcctttctaaacaaaatgatgaggatcagttcatcgtatgggaggctttgcgtcatgagtattctcgccataaaaaatattcagatgcgaactgggcctttaaagttgagtctatggagaaaattgcgaaaatactcgatgattataaaccaaatgacatagttagagccagtttatggattttcaatgattgggattctgatattgaagagtcaattgaaaatgctggcgggattttatcctctgtcgaagaaatgcgaagtgaaaagcttagggaaatatattttactttaggcttgcctggggtgaaagacctttttcaacaagttaataatgtttttattgcagcaaagcatatatcagcactctcgttggatgaagaaaagctaaatgatttgtttgtaatgcttattaacaacaaaaaaaatattgatgaagcttgtgggttgttaatacaatatggtgttgaacgctttggtactgaatggcttaataaaataaaagtgtattttaaacagtttgaaattactcctgatagggctgggaaaatcttagcatcgttaagagattcacaagagatatggaacattattgaaaggtttgaagataacatcagcgaaaaatattggttgcaaaaacaacctattgcaatgatgggtaaaacttcagatttatttgtcattatggataaatatatagaaaggggccgggggcttgctgctattatatcagcaagccaacgcctttctgagattccatctacaacacttttatatctactcgatatagtcgttaaagaaataaatagccaagatatccaatttgatacaatgctatcgtattatgtaaaaaaagtttttgatgaactaaaacaacgtagcgatgtctctgaaacagatttggcatttaaggaaatgacctacttgccttgttttccggatagagatgagccacttatcctgcatcgtctaatgatgaaaaagccagaggtttttatagaagcaatatgtattgtatatcgtagtgacgaagatgaacaaacagaaccatcggagttggaagttaaaagagctacttctatatacagattacttgaaaaattacaaatactccctgggcagatagacaatgaaattgatcaagataaacttgaagattggtgtgagaatgtacgtcatttagcaaaattgcatcatcgcctagaaatcactgatcatgtagtaggcaaaattctggcacatgcccctaatagctcagtagataattcttggccacatgaagcaattcggcacatcattgaaatattatcttctgatgagttagagcaaggtatacaaattggtaggtacaataaaaggggagtatttactcgtatgctttacgaaggtggaaaccaagaaaggaaattagctgagcagtaccgagaatgggcaaattcaatgccccactgcgtccgtacttctgcaatgctatttagaatcgctgacgaatgggagtactccgcaaaacacgcagatattcgagccgccaaggctgatttaaattag

SEQ ID NO: 249842 - DNA, 3852 bp, Klebsiella pneumoniae
gtggcaatctttgacattgaaaaggacgaattgcttcgactttccgatactcagctagaagagctgatagctcggctagcagaagctgaagtggcaatgctcggtcatagcccagcatgtgtaaattggtctggttcaattacagcccctgatggtggagttgatatccatgttcaggtcccagttgatcaagtgaaggctggctttcttgtaaggtctgatacggtctttcaggcaaagaaacctaagatgccaaaggcttcaattgagaaggagatgggtactggcaaagctctttcatccatcatctctgaacaagccagaaagcaaggtagctacatcattgtcagcctgggtgatgattgctcgccgtcaggaaaggcagagcgtctcaaagcgatgagggatgcagtaaaagatgatcctaacaaaagcaatcttcatctcgatttctacgaccgttccaaactcattcaatggcttcgccaacatccatcagtcatgctgtgggtaaaagggaaacttggacaagggtattccggttggcaaccctatggagcctggagcaatccgccccaaggtgttacagacactttaatctcagccccaggtgtaaccattactttaccgtcgggaaaggggcaaaaactcaaaattgatgaagcaattagcccaatgcgagcacttatccgttcgacggataaggctgttcgtattacgggattatctggtgtcgggaagactcgcatcgttcaggcgctctttgatgaaactgttggaacagatgcgcttgaccggacagtagctatttatgttgatactggctctgagccattaccgtcggctacagcaatgcttgataagctgatcgctgaggaccgacgagcaattatgatccttgataattgcccatcagaactccatgctttgcttgccagcaaggtatcagccgcagggaaaaaagtaagtctcatcacgatcgagtacgacattagggatgacaaaccacagacaactgaggtcatccacattgagacagatggtccggaggtggcagagcaacttcttatccgtcgcttcccttctattggtcagaataatgcccgtcggattgctgagtttgcagatggcaatgcaagagttgctttggctatagcagagagagtgaaggaaggtgagagtttagccctactttcagatgcgcagttgtttaatcgcttgtttgaacaacgtaatcatcccgacggccatttacgggagcaagctgaaatattgtcactggtgtattcgttctcggtatccagtccagatgctgctaccgatgaactagaaatattgggtgccatctctgggtatcccaaaatccagttattcaaagctgctacgaagttaatggaacgccacgtcgttcagaaaagatcccactggagagccatccttccccatgccattgctaacaagttggcagcatctgcacttaatagtattccggttgagcaacttagggcgacctttgaagctccggagcggcaacgattattgatgtcgttcgcgcacaggttggggctattgcacagccatgatgtggctaaagagattgttgaagcttggttacagcccgaagggctgcttggaaaaataataaacctagatgaagtatcgacacgcattctgaattatgtcgctccagttgcccctggagctttgcttgagcggattgaagaaacgcttgttacgtctaattttgaacatattaaatcacgctacaacccacagcgaacagcaattatcaaattgttgcagttacttgcatatgaatcgaaatactttgaacgatgcattaagctcttaatctgtatcgcagaccaggaaagcacgggcaataattatgattcggctcgaaataagataaagaggtttttccaaccgtatctatccggtacccatgcctctttagatcaacgtgttgcgatcatgaatgaatgcattggttcaagtatggccggacgtagagggctggggctcgaaatgcttgaaactgctctcagcggaccatcgtggacaggattcgggattaatgagtttggtgctcggccaagagattatggatttcggcccagctacgatgagcttgttgagtggctaatcaccttcatcgatattttggtgagattaggaacctcaggagtgcccgagcttgaagacgatgccaggcggatcttggctgataaatttcgctggatttggcgtcatgaaggaataaggtcaaaattaattgatgcggctcgcaagctacatgcccatcgcccttggggtgaaggctggaaagctatccgctcaacaatttactttttccatacaaaaagaaaagataacgaagacatagaaccattgccggaaatacttgtgacattggaacgagaattagaacctaatgacttggtttcggcagtcatggcttatgtactcagtaaggggcgcgatttttgggcgctaaatgctgattatgaacaccaaggacctaacaaattcagtaaaatcaggaaaatacttggcgccaaagctttcaagttgggacacgaatttgcagtatctacccatggacttgatgagttgtgccctaatctttttttgcgggatggaatgccctatcgcgtcgaatttggtaaaggcttagctaacggagctcctgacctacgaatttattggcagcaactaatcattcaattggatctacaacgcaaatctcaaagtgatgtttcggtcattcgaggtttcattgaagagactcattctatcgattcagcattagcgcaggaactgctcgatcagtgcgcacaacattccgaacttcgattcgaattagtcaacctgcatccttggcaggagtttactgaaatcgatctggatcgctgcatgtcacttctggatgactctgacatacagccccatatgtatggggcaattctgtggggtgagcaattctctaatttgccagaaagcagggttctcgagcttgctcaaaggctgctgaataaaccgaatggtgatgaagtagtattggaagcactgagtatgaaattagctgataaaggagatgctacggatacactaggtcttgcgctacgaagaatcggactatccgctgcaatccagaggttccgaagagatcacaacgatctcggcggatatctggattatgcaatggaacgtgttatcgatgccacattgcgcttcgatggcaacgaggctgaaaagctagaatggctaagtacaatcttcgctgttgttgatgagcattttggctacatttattctttcgaagacgctatcggtatcaccgctgcatggatgccaaaagaatttctcagtcgcatttttgatggtacggaagatcaacaacagaggcggctgcatttcatcaattatgatgattcacatcagtctcctattgcgaaaatcgatgtagatattttgattgaatggtgcgggaccactaaagaccctcaggtttgggcttcagtcgcttcaggtattaatctatggtcaaaagacggggagcaaagtcctatttgcttgcaggatgatgctctgagatttctagaagcctcacccgagccacgagccgtccttgagatctttgccgaacacgtagcaccttcatcatggtccggtagtcgtgcgaacgtgatgcaacccagggttgaagcgataggccggttggtcacccacgagcgtgcagacatttctaagtcggctagagctgtttataaaaaactgactaactgggttgaaaaggaaaaagaacgcgagcgattggaagatgaggcattggaacaacggtttgaatga

SEQ ID NO: 249843 - DNA, 717 bp, Klebsiella pneumoniae
atggaatctgcacgtgataaatataccagtgagattattgaggcagaaaatctttggttacttgatgttgtagatacgaacggttacgtatgctggggatgtgggattgagatgtatccttctgcttggcaaaaaggaagtaagaaaagaccttcgtttaataaaatgcctggaaaagagcacattaattgcgatgctgatgcagaaagcacagtggttaaacaggggcagaagaaaagcgtccgccgcatgttagatagcgcaccaggtttgatgcctgcaggattaaaactgattgaaaatcgacccgttgttgatcctgaccctactggtagcaacaacaaacccaatccaatacgttctacaacatcggcatccagcgagggaaatgctccagcgcggcaatcccgccgcccggttaatgctattcgccagatttgtagggcatttattcgcttcccgtatgaccgtggtatgtcattaaatatccctagtattgatgccggtacttacatgaccgcgtttaataaacttaaagatccggttcagccttaccctgggcgccgaattttttattcacagttgttgtggcagaaatttgaacaagacgaaaaccgaattgtcattccgctctctggagaatgggtaaaagacgaatctggtaagtttaagccctcgcgtagctataaactacacattgagtggggatgtaaatag

SEQ ID NO: 249844 - DNA, 837 bp, Klebsiella pneumoniae
atgttaaaggttaatttttttgataaaaaggttagggcgatattttataggtatacaacaggtattacaggggctattgctgcaattgttttattttgggatattcctgtagaatataaaaatcctgccgggatcgcttgtggtattattttgtttgtgatctacattataatatggatcgtttcaaataaaataaaatctattgatttaactgttgacggaagtacagtaacaattaaatctggagatattttttctgaacaagggtttaaagtcatagcttttaacgaatatttcgatacgcaggttgacgataaaataatcgcctatcacagtcttaatggattgtttatcacagaacatctttcctgcacagttgaggaacttgataaccatattcaacggtatccatttgcaagggatgatgttttagattttaaatacgaaagattgtctggtaaaaaacaaaaatatgaactaggaactatttgtgtatgggagaattatttattaacagcattttctaaatttaatgattttaatgaagcccgtttaacaatgccagagtatcttgaattcttgatcaatttttgggatagagtcaatcgagtatatgcacagaaaagcgtttctgttcctatttttggttcgggcatcacacgtataaaagagcataaaaatattactgatgaagatttattaaaaattatgctttggacatttagaatcagtgagatgcgttttacgcaccctgctaaattaaccataattattcataagaataaaatcgacaaaattaatttattcgaccttcaatcagcacgaaatggattgtga

SEQ ID NO: 249845 - DNA, 279 bp, Klebsiella pneumoniae
atgaaagcctccgccgcccgttccggtcaggcgcagcagtggggcggcgagcgcacagcagacggcaaagaccagccgcgagttgcctgcacagagtgcggcgacctgctcctgccattccgccagcgtaccggattgtgcaaagccgccagtcaggtagtggctgccctgaagaatgatattgtcgccacctggaccgataacctcatctggcagcacgtacacgccgttgtgccagccggttttctccacgcaggtgacccggcgtccggggagtga

SEQ ID NO: 249846 - DNA, 3474 bp, Klebsiella pneumoniae
atggataactggctggcgctttttgacggacagacccgatattttctggatatcaatgacagttcagtgaagccggatattctgcgctttcgcggcagcgaagccctgagcgagcccttccggtgggacattgagtttacctccccgcaggcggacattccaccggaacaggtgctgatgaaatatgccaccttccggatgcgtggcggcaaaaatgtccacggcatggtgacccgcctggaatggctgtccacatcaaaagaccagtcgcactaccggctcacgctcagctcccgcctggcgctcctcgggtacacccggcagtgcgccgtatttcagaaccagtccgtcccggaggtggtggagcaggtgctgcgcaaacatggcctgcaaggacctgattttgacttccggctggagcgcacctacccgccgcgtgaaattatcacccagtggcgggaaacggatttgcagtttatccggcgcattctgtctgaggtggggatttactggcgtacggagatggatgacacccgtgagctggatacgtacatttttgccgacagccagctgaactaccggtttgatgtgcgtctgccctacagcgaaccatcgggcctatttgacggcgcggcagaatcggtctgggatgtgcggacctggcacaacatcgccaccggcaccgtcaccacgcgggattacaactaccgcaccgccaccacgccgatggatgcaacggtcagcgtgcgcagtgatgcggtcaccaccggggagcattaccgctacgcagcgccttaccgtgaggcgggtgacgatgccagcccggagccggaaaccgaatccggcgcgttctacgcccgtcttcatcacgagcgggagctgaataaatcagcccgtattcatctgttcagcaacgctgctcatctcacacccggacaggtgctggagccgcagggcgatgtcattacggccctggaggaaggcgtcgtcctcaccctggtgacctaccgggggggccgtgattcccgtctgcacgtgtcggtatggggcctgccttacaccgaacgttactgtttccgcccggcggaaatcccgcgtccggaaattcacggcacgcttccggcgcggattgagagccgggaaaagaacgatatctacgctcacctggacgggcaggggcgctaccgggtgaagccggacttcgaccgggaggggacggagccgggttacggctacctgtggctgcggatggcgaagccttatgccggtgaaacactcggctggcatacgccgctgattgatggaactgaggtggcgatagcattcagcaatggtgatattgacctgccgtacatcgccagtgcgctgcatgactcggaacatcctgaccacgtaaaccgggacaatcacacccgcaacgtactgcgtacaccggcgaacaacaagctgcggatggaagacaggcgtggtgaggagcacatcaagctcgccacggaatacggcaggacgcagctcaacagcgggcacctggtggacagccagggacaacatcgtggccagggtgccgaactgcgcaccgatgagtggggcacaatccgtgccggtaaggggctgtttgtcagcgcggatgcgcaggcaaaggcgcagggtgaggcgctggacaggaatgccgcgctgaaggaaatcgaccggcttaaccagcaactgcagcagctggaaatggcggcagagcaggcgcaggcgctgaaggcggatgttgacagtcagatagcgatgtttgagcagcggctgaaaccgctcaatgaggcgctgctgatttccgctccggaagggatggcgctgaccagcggggagcacctgcagatgacggccacgaaaaatgtcgccattaatgccgggggcgatatcagtgccggtgtcatgggcaatatgaccgcactggccggggagaagcttgggctctttgcccgcaccggccagctgagtctgaaatccggagaagggccagcggaggtgcaggcgcagaatgccagcctgcggctgtttgcggagaagaagctgacgctgagttcagcgagtgacatctcgtttgccgggaagaagcgtatcacgcttatcggtggtggcagttacctgcggcttgaggccgggaaggtggagtatggcacgacagcgacgtatatgcgcagagtgaaaaggacgatggctgctgcacgaagcgctttacctctgaatacctccccgctccctcctccggctaccatgcgggagtttaatcccgaaacgctgactccctgggtgacgccggtttatgcgaaatcctgtctgaaagagaaaggctgcaccgatgccggtaccaccgacgagcctgtagaaaacttcggccagatgacgatttttgcacaatcggttgaagatgactgctgtgggtatggtcatcagcatgctcatgaagaagtcgttcagcatgctcagtcagccaaaaaacgcatacccggtgccgggagcgaaaaagctcccgcagaagcatccgccgcaccgcttgctcttggggcggcaactggcgtcatgacgcaggtgtggggagagtggtccttaaccggcgtactgggagctgcccggggaattccgtatgtgggggcgatgatgtccgcgttgtatgtcccgtctgcgggtgaaggtagcagtaatgtgcctggacgagatgaattctggtacgaggaagagctgcggcagaaagcgctgaccggagcaaaagccacgacccgggtgaggttcttctggcggcaggatgaacagggtaacatgcgggtctacggcgtccatacgggtgaaggcacgccgtatgaaggtgtgcgcacggctgaaatgaagtgggttgaaaaaaacaaccgctatgagttcacccccgctcacggtgttgatggcccgttgataacctggacaccggaaagcccggaaaacggcgacattccatcgcatacgggcagcaacatcagccccatcgaccaagcgacaatactggttaccccaataccagacggcaaggacgaatatacgacaccaccattcccggtgccggaagagcgcgatcttaacgattatattctggtattccctgttgattccgggattaagccgatttatgtttatctcaatgaggtcaaaacatcttatactcatggttacaagcactatccacctaaaaataagccctggagtgaagtagtaaaaaatacaaagtctggcccagcgaaatttaagccagaagttaatattgagtctatagatcatgatgtttgggagaatggcacccccactacaaatggtcagaattggaagatcaaagaattcgatagcgtgcaaggcgcatacaaaggtaaagaaaccaattgggtagtaactaaagaatcacaaggaactatccactctcatccaatagggcctcaagaggctgggaaactaataaaatga

SEQ ID NO: 249847 - DNA, 330 bp, Klebsiella pneumoniae
atgaaaaaatactatcgtattctagatgaagttcagcaactggacaatgtagcgaatatttatgatgagctttcaagcttggactttactaaaagtatatttgagcaaacgaataaacttgatgaagatctatttcagttgacatttatcaatggaaatattatcgatattggttggtatccagcatttgaggaagatggagaatttattattcaggttatatccgatgagaactgggatgaaccagcgttcaaatcaacatcaagttgggataaaaatgaactaattgagaaagttaatgatgctttaatgaactgtccatcatcatag

SEQ ID NO: 249848 - DNA, 291 bp, Klebsiella pneumoniae
atgatgtccgcgctgtatatcccgtcagcggatgaaggtagcggtagtgtccccggacgagatgagttctggtacgaggaagaactgtggcagaaagcactgataggggcgaaaagcgacaacctggtgaggttcttctggcggcaggatgaacagggaaacatgcgggtctacggcgttcacacgggtgaaggcacgccgtatgaaggtgtgcacacggctgaaatgaagtgggttgaaaaaaataaccgttatgagtttaccccgctcacggtgctgatggcccgctga

SEQ ID NO: 249849 - DNA, 1851 bp, Klebsiella pneumoniae
atggccctattacaaattagtgagcctggtctgagcgccgcgccgcatcagcgtcgattggcggcaggtatcgaccttggcaccaccaattctctggttgctaccgtgcgtagcggccaggccgaaactctgcccgatcatcaaggccgctacctgctgccgtcggtcgtgaactaccacgcttcagggctgaccgtcggctatgaagcccggctgaatgccgctcaggatccggtgaacaccatcagctcggtgaagcgaatgatggggcgttccctcgccgatattcaaacccgctatccgcatctgccgtatcaactgcaggccagcgaaaatggactgccgatgatccagaccgccggcggcctgctgaacccggtgcgggtctccgccgatatcctcaaagcgctggctgcccgggcgaccgaagcgttggcgggcgatctcgacggcgtggtcattaccgttccggcctatttcgatgatgctcagcgtcagggaaccaaagacgcggcgcgtctggcgggcctgcacgtgctgcgtctgctcaatgagccgaccgcggcggctattgcctacggcctcgactccggccaggaaggggtgattgcggtctacgatctcggcggcggcacctttgatatctccattctgcgtttaagccgcggggtgtttgaagtgctggccaccggcggcgactcggctctcggcggcgatgatttcgatcacctgctggccgactatctgcgcgagcaggcaggtctccgcgaccgtagcgataaccgcctgcagcgtgagctgctggatgccgccgttgcggcgaaaatcgccttgagcgatgccgacgtggcgcacgttgaggtcggcggctggcagggcgatatcagccgtagccagtttaacgatctgattgccccactggtaaaacgtactctgatggcctgccgtcgcgcgctgaaagacgccggcgttgaagcgcaagaagtgctggaagtggtgatggttggcggctccacccgcgtgccgttggtgcgtgagcgcattggcgaattctttggccgtaccccgctgacctctatcgaccccgacaaagtcgtcgccattggcgcggcgattcaggcggatattctggtcggcaacaaaccggacagcgaactgctgctgcttgatgttatcccgctgtcgcttgggctggaaaccatgggcggcctggtagagaaagtgatcccgcgtaataccaccattccggtggcccgggcgcaggagtttaccactttcaaagatggccaaacggcgatgtctattcacgtgatgcagggcgagcgtgagctggtgcaggattgccgctcgctggcgcgttttgcgctgcgcggtatcccggcgctgcctgcaggcggcgcgcatattcgcgtgaccttccaggttgatgccgacggtctgctgagcgtcacggcgatggagaaatcgaccggcgtggaagcctcaatccaggtgaaaccgtcttacggcctgaccgatggcgaaatcgccaacatgattaaagattcgatgagctacgccgaacaggatattcaggcgcgtatgctggctgaacagaaagtcgaagccgctcgcgtactggagagcctggaaagcgcgctggccgccgacgccgcgctgttaagcgccgcagagcgtcaggttatcgatgccgccgcggagcaagttcgcaccgccgcggcaggcgaagatgccgacgcgattaaagaagccattaaaaatatcgacacacaaacccaggaattcgccgcacgccgcatggaccagtcggtccgcgctgcgctgaaaggccaatccgtggacgaggtttaa

SEQ ID NO: 249850 - DNA, 453 bp, Klebsiella pneumoniae
atggggctgctcctgctggccggtagccagctggctcaagcggagcagattggttccgtggatacggtcttcaaatggttagggccggatcacaaaatcgtcgtcgaagcctttgacgatccggatgtacagaacgtgacctgctatatcagccgggcgaaaaccggtggcatcaaaggcgggctggggctggcggaagatacctctgacgcggcgatttcctgccagcaggtcgggccgattgagctaacggacaaaatcaaaaacggcaaaagccagggcgacgtggtgttccagaagcgcacctcgctggtgtttaaaaaactgcaggtcgtgcgattctatgatgcgaagcgcaatgcgctggtctatctgacctactcggataaagtggttgatggctcgccgaagaacgccatcagcaccgtgccgatcatgccatggaataaataa

SEQ ID NO: 249851 - DNA, 1233 bp, Klebsiella pneumoniae
gtgattccgactcggacagtgactcggattctgactccgacagtgattccgactctgacagcgactcggattctgacagcgactctgactccgacagtgactcggattctgacagcgactccgattccgacagcgactcggactccgacagtgactcggattctgacagcgactccgattctgacagcgattcggattctgacagcgactcggattctgacagcgactccgactccgacagcgactcggattccgacagcgactcggactctgacagtgattcggattctgacagcgattccgactccgacagcgactccgactcggacagcgattcggatgctgacagcgactctgactctgacagcgattctgactctgacagtgactcggattctgacagcgattctgactcggacagcgactcggactctgactccgactccgattccgacagcgactcggattctgacagcgattcggattctgacagtgattccgactcggacagtgactcggattccgacagtgactccgactctgacagtgattccgactctgacagcgactctgactcggacagcgattccgactctgacagtgactcggattccgacagcgactctgactcggacagcgattcggatgctgacagtgattcggactctgacagcgattcggactccgacagtgattcggattcggacagtgactcggattctgacagcgattcagactccgacagcgactcggattctgacagcgactccgattccgacagtgattccgactctgacagcgactcggattctgacagcgactccgactccgacagcgactctgactccgacagtgattcggactctgacagcgactcggattctgacagcgactcggattctgacagcgactccgactccgacagcgactccgattcggacagcgactcggattctgacagcgactcggattctgacagcgactcggattccgacagcgactcggattccgacagcgattcggattccgacagcgactctgactcggacagcgactccgattctgacagcgattcggactctgacagtgactcggattcggacagtgattccgactccgacagcgactcggattctgacagtgactcggattccgacagcgacagcgactctgattcggataccgaaccgcaggcaaataatgatacccatacggcggctatcgataccgtag

SEQ ID NO: 249852 - DNA, 534 bp, Klebsiella pneumoniae
atgacgcatgtcgttaatcttcttccctggcgcggcctgcgtcgccgccagcgcctgcgctacgtcctgttgttaaccatcggcattgtgctgctgggcgggatgggcctgctggtgagccgaacggcgcgtctgcagcgcgacttcctggcgacgcttcacacgacggccgacgcgcagctgctcgcttcgcttaagcagcgcgagcaggcgatgcgtgaggcgtggcagcagcatcaacggcagcgccagcagtaccagcgcagatcggcgatcgccgcctggcaacccaggctgcaggcgctggcggcagatctgcccgcgcaggcgtggctgacgcggctggagtaccagggcgtactcctcacgctggacggcctggcccttaacctgcaggcgttaaccagcgtggaggctgcgctgactcgcgtcgcgggattcgcgccggcaaaagccggcgggacccagcgcgacgccgaggggcgttggcagttcagttttaccctgacgggagcgcgcgctgatgcggattaa

SEQ ID NO: 249853 - DNA, 1941 bp, Klebsiella pneumoniae
atgcatgagcttccatctgaattgcaaaaatttataccagctgtggcccgggcagtgaacttaccggatgatcaatggaacctgatcaagttgtttaagaacgaatttcgcttgtcattactcaactaccccaacttttatagcgattcctatccagtcctggaacaaagcctcaatgtagatttgagcaaactcagtcataaagtaacttgctaccgctcttctgataacccacctattttacaccgaaaggaaaccatgattttgccgggaagtgactactatgaacacttcactacattaacagaagaaggggagaaggccgggttgtacgaaaacacccgtacgatagggttcaaacgttcttggctaaatttgattcagaaaaaaggttaccagctagttgaagggcggctactaaaagcagatagtgcacctccgagtattggcgcttcagaacctggcatcgatcgctacaagactgctattgtccgctatgagttatctgggccgatgaaaacgttagctaagcaaggttatctagatggtcgattttcaatttttgactatgggtgcggtcgaggagatgacctaagggagcttgaggcaaatggtattgatgccttaggttgggaccctgtattttctcctgataacgacaaagtaaagtccgatattgtgaacttaggttttgttcttaatgttatcgaagatcaagatgaacgtctcgaagcgctcttgagtgcttgggatttagctgaaaaaatgcttgtcgtatcagtaatgttagctaacgaatcgtatatcaagcagtttcagccttataaagatggcgtaattacttcacgaaataccttccaaaagtattatgcgcaatcggagttcaaagagtacttagaacgttctttgcaagatgatgctattgcagtcgcacctggtattttttatttgttcaaagataagttagaagaacaacgttatcttcagagtaagtatcaaagacgttataattggcaacaactcacttctcctcaacccattgagcgtaaagatcgagcaaaacttgttattacccaaaatagggaggtctttgataatttttggaatatttgtctagagcttggtcgtataccggcaaacgatgagttcaagaattctgaagagatgaggaatttgattggatctcacaaaaaagtctttggcttgcttaaggaaatgtttggtgctcatgaatttactaatgcacaaaaatctcataaggaagatctactagtatattttgctatggggttatttgagaaaaggaaaccatatacgcaccaccctgaaaatctaaaacgtgatgtcaaagctttatttgatgattaccgaactgcgaataatcttgcgaaagaattactttttgcgatagcagatacgcagttaattggagaggaatgcattaaagcacacgaacaattgcctgcaagtattcttaatagtgggcactctttaattctccacaaggactatattgaggcgctgccacttttattgcgtgtttatgtcggtgctgcattgcaactttacggagaactagatgacaccgttgagctagttaaaatacatatcaactctggtaaactcacgttgacacgctacgatgatttcagcaaatctgttccttatttggtagagagaatcaaaataaaaatggtcgatcaaaatatagacttttttgactatctcgatgaaagtcgccgcccaccactgctcaataagcatttgctactaaataataaacacgaacagtatgaaaaacaaaagaactttgatgagcgactgtcaaagctcttgggaataacagccacaggcgaggttatcctgaacaggcagatatttgaggaacggttagcgctcaccggaaagcatgtggctggctttaggctaatttgtcactag

SEQ ID NO: 249854 - DNA, 1062 bp, Klebsiella pneumoniae
atgaataattactacgactatgctgcatctacaccagtttctccgcaggttttagaggcgatgagcgactgggagaccgaaaattttgcgaatgcttcttctgcgcatcaagcaggaaggctgagttcccaagcaatccaatttgcaagagagctaattgcagataaaataggttcacttcctagtgagattatttttaccagtggtgccagtgaagctaacaacatggctttgaaaggagtagctttcaaatatcttaataccaaaggccatattattacctcagccatagagcacaaatgtattctcaatacttgtgtatttctggagtcgatcggcttcgaagtgacttatttacaacctgacaggagaggctgcatatcggcatcctcactcgctgcggagataagaaaaaatactattcttatttcaatccatcatgtaaataatgagctagggacaattcagcccattaaagactttggtgcgatagcttttgaacacaacattccttttcacaccgatgcagcacagagcttctgcaaatgcgatattaatgtcgatgatatggatatcgatatgctttcactgtctggccataaaatttatggacctaaagggatcggtgcactttatgtgcgtgatgctagaaactcagaattagttccccttattcatggcgggggacaagaggctgggttacgtggcggtacatcccctactcccttgatagtaggtcttgcagcagcagtagagagctaccctactcaagcaagcccaatagaaaagcagtttctagaacttatggcgcaatatgatttcataagaaacggtagcgaggcagtggtaccgacaatctggagtgtaacatttccctccgacgaggaggtaaaacgttttacgaatgattgtccatggttcatatctcaaggttcagcatgcaatgctctttcaaatgtagcttcacatgtattaaccgcaatggggatgtcggaacaagtagcccgccgcacttaccgcattagtcttccgccctataagactagtgacaaattagcctaa

SEQ ID NO: 249855 - DNA, 453 bp, Klebsiella pneumoniae
atggctgaaattttagactggcgtaagttacaggttcaccgggattctcgtttcgaatctttagaagagcgattttgctcaactaaaggagctaacaatgactctcgggtgtttagtacagtcaaagaacttatggtttttgctgcgttagtgggatttcaaagcaatgaatatcaaccacttgagcctaaggttaaaaccacgccgatcttacttgatacttatgcaacaacaggacatgatgcttatatctatcttcttgcgttaacaaaagcgtcgtctctagacatcctcaaaaacgaaaatttaagagaagcgattgctatttttgagggatattgcaatagtggacttaaaatcattgatagttggataatgaacaatattggtgagccactagtgactaatattatatttaatcaaacattagagtacttagttgaaaatgaataa

SEQ ID NO: 249856 - DNA, 2061 bp, Klebsiella pneumoniae
atgaaactgataagacttgagataaataatttccgtcaattttatggaaagcagtctatagatttcgctgtagatcctgagcgcggagttacactaattcatggtgagaataatggtggcaaaacagcattgcttaatgcgcttcgttggtgcctttatgaggaaaccactgaaaacttactcgaccctaaaaatcttcttaataagcatgcagaatctcaaggtaagaatactttcagtgtttctattcaactagaacatgaaaatcgcttacttgacgttcggagaattcaagataagaataatggtagcagtaacttacatgtttatgaaattattgatggttgctatgcagaaaaagctgaggaaaaccctaatactttaatcaatacttttttaccaaaagaaatgtctcagtactttttctatcaaggcgaaggaaccggtactttaagtagtcaaaatgatttctctcacatcaaagatgctatcgaaaaagttttaggcctcacggttgctaaaacaacactaagacacttgtctgccgttaagagtagttatcaaaaagatctcaagcaatatgatacaaacaatgaaattgatattttattgacaaacaaagataatttagcttcaagtttagaacgtgacaagatgctactggagaaaatacaacgcgagctagaagtcgcggaaaaagaatatgaaaatcaaataggtaaacttgctcgttttgataagacaacaattgatgaacaacttaagcttcgcaaacagaaaacagagttacttagtgactacgaaaggcagtataagcagttcatgtctgaaaaaatatcaaaaacacctgactgggcgttgaggacatttagccaaaagcttgcttcgttcgatgtttcagcaattaatactgaagagctcaataagtcattgcgttataccgtagacaggcaattgttacgtgagattgtacacaataacgaatgtatttgcggcactcatattgaaaaagacagctcggcggcacggcttttagaggaactcggtaaacatgccgttgaccctgatcttaagcaccgctgggtgagagcgaccaagctacaacaaaggcttagcagtcagcaactaccaaaagctagtatggagaagttattagctaatattgatgactacgaagttggtatgcaggaacttgaacacagtataaaagagttaagttttacgatagtcgagtctgacattgatgatattaagattatcgaacgtgccaaagacttggctaaatctcagtgtgaccgactcaaaggacagattcctcagttagaacagaatatccgtaaaaaagatatcgatattaaagaaattgatcgccgagtgagcagtttgtcatcgactcagcccaaggcccagaaaatccgcaacctgattctagcgacagacaagataattgagttatatgaggaagctatgaattcctcgcaaaagggagttgagcaattattattgaaaaagatgcaatcattgtttagtcaagttgcttttaatggctacacggttcaaaaggacaccagaggaaaatcagggagctttacatgggcaattgttgataataaaggcaaacgtgcagccgctggtaacggatatcaagctatgcttgcgatatcttttatcgtcgcactaattgagttctcgaaagttcgcgcatataacaagcagcatcttcttacccctggtactattgccccatttattgcagactctattcttgcctttatcggtccagataacggtcgagagcttgttcgttacatagcggagaaagttgagcagtcaatctttttgttttctcaagctcaatggactgaaacacataccgacaaaggtatacggcataaaataggtaaggagtataatcttgttcaacatacagtgcttaccaaggaagaatttaaaggccagtatccgacgcaacttacggtgaatggcgttaattacgaagttgttcgttttggtagtgattttgacaaagtaactatcgaggagattcctacccatggctga

SEQ ID NO: 249857 - DNA, 231 bp, Klebsiella pneumoniae
atggaccttgatgcctttaaagctttgttaaagcaagtcgataaagatacccagatcgctcatcaggattactcaaagaaatctgctgtgcataaagcggcactgcaggttatgcaatttgagaaagagctttactatggagatttagtgcaaagtcgtcatcttcagaagatcaaagatattattgaggctaatgtggaagatatcataaatgaaactgataagacttga

SEQ ID NO: 249858 - DNA, 2154 bp, Klebsiella pneumoniae
atgcggttctcagaccttgaactcaaagctaagtatgactcagatgaagaaagtatacttgaatgtgtacatatccccttgcttgctcgcgcagatcgctatgatagggccgtgggatacttttcttccgatgtattggtttctgctgcgcaaggtctggataagtttatccattcagaaggtaaaatgcgccttatcattggagacccactatctgacgatgagtttgaggcggttatggagggggtatcaaatcctgttagagctctatcacttcaactagcagatttgttgcttgagagcacagaacgaaatctaaaactgctaacgtatttagtggctaaaggactacttgagattaagttcgctttcacgcaccaaggtatgttccacaaaaaaattgggatcttttatcaacaaaatgaaaccgttgttttcagcggctccgcgaatgaaactatagctggattatctaagtataattctgaggaaatttctctatttttcagttggcgtgaatcttttgctgattatggtcaagtcgaagtagacaatttcaatgctctttggagtaataacaagaagcgagtgaaagttgttgcaattgattcagatgcataccaaagaatccgggctggtgttgatctggacgtgttaagtaaagaattatttccggcataccctcattccaagacgaccaaacctttcttctcgtacagcttccctaaatcagaacaagagttaacaaaactaaatattgaagtgaaaacacctcgtaagccattgatagtaaaagatagagcgtttgagttgtttccacatcaagtcgaggcaatagaaagctggcgaaaggcagattataatggcttatttaaattagccacgggttcgggtaagacattcacatccatctctgcgatggttgaattgtatgaagaacgtcataagaatggtaatgcaacctttgttattattagtgtcccttatatcgaattggctaatcaatgggtaaaagagctagccccttttaacgttgtccctgttcaatgttacgatagctctaataattgggctgctgcactggataagaaaatattacgttttcgaagcggaactttagattttatttgtgtcattgctgttaacaagaccctgtcatctgagttatttcaatctaagataaccaaaataccatttgaggatatgttgttaatcggcgatgaatgtcaccatcttggtagccaaggttatttcgatgcgctgcccccagctcgatatcgaataggattatcagctacgccttttcgcaccgatgatgatgaagttgaaggagcaccattccctgataaaataagacaaaatttgctttcatacttcaaaggcattataagtgaatattcactgagtgatgctattaaagatggaatactttctccttatcggtatgatcttgttccagtttatcttgatatgcaagagcaagaggcatatgaagattattctgcaaagattcagaagctaattttaagagctcaatcaacgaagctatcaactgatgagcagtcaatgttgaccaatttgtgtggtgcaagatcaaggctactggccactagttcaggaaaattaccggcattactctcttatttaaaagatcatccgacattgtcgttaacacactcgttaatctatgtcggagaaggttctgcaccgggggaaagtataccatatataactaaggtcactaattgtctacatgaacgtggctgtaaagtttcaaaatttacttcccaagagacatcgtcggagcgacgtatgattatggaaagtttcaaagaacaacgcattgattctttagtggccatgaaggtattggatgaagggattgatgtgccggtatgtcgaagcgcttttatcttggcaagcacccgtaatccaagacaatatatccagagaagaggccgtgttcttcgaaaatctttggataaaaatgaagccttaattgtggattttgttgttcttccattaccgggagtagtaaataatattagtcaaaatttacgacgtgcggagttgaaaagaatagatgacttcaagttaaccgctataaaccccgaagagattgataaaaaaatcatcgaattaggactctattaa

SEQ ID NO: 249859 - DNA, 2340 bp, Klebsiella pneumoniae
atgcaaaagtctctggatatttttaaagcagaacctcaatcagtctttgatgtcatctgcaaacgtaaaacaacaggtttttatatgcctgcttatcagagaccatattcatgggaagaaagtcatattagagatttgttttctgattgtgaaaacgtatttagaaatcttcttgactctcatgatgcgattattttcctcggttccatactcagtgtggatgatagtattgccctaaccatttaccctttagtaaaaagggataaaccggaggaaatcaaactaatcattgatggacaacagcgcctttcgactttgatgttgataatactctgtattaatgaaagattaagaatacttttaccgagtttgaaaaaagcaattacctcagaacaagatgaagaaataaaagacgtccttgatgaattacgccaagtagtttcccagctagagatcgacacttcgaatacggttgtagagacaactgcagaacatgaagtatacaaatatctccctaaaattattcgttcacaggtcgattgttggggtagaagtgagaagaacgctctttatgacagtccaatagctgaattgttgtatgtctatcagcgtcacattgtggatcaacgtgatagttcagtgtttaagcctttagatttatcattgatgagtacttctgcaaaacgtgtagttaacaacattaaagaaattagaaaacagcttgattgtgtacaaaaaggctttcaatttcaatttcctgatagcgaaactgaagaaaaaattaatatcagggacttagtcgatgttgaaacattagatgtgtgtttagatttccctgttgataaagatttggcattggttgctgaatcgtatcctaaagttgcagaagttatttacatcgccgtatttgcgaaatttttgcttcatcgcgtttgccttacatacgttgaagttaacaatgaatcgtatgcattcgatatgtttgaagctttgaatactacgggcgaaccactcacagcgattgaaacatttgtaccaaaagctattgaattcataggaaaaaagcgtaaagagggagctccggaagaagaactggaagcagcaatggatattctcaattccataactgagcgttttgaaaatatcatcgatagtaaagaaaaaaatcttaaaactaaagcgttaatactagcatttgtacgagcttttgaaggaaaagtaaaagttacgagtttaagggatcagcgtgatgcaatgcttaagagttatgaaaattgcgactatgatctcaaaggtgtttacttaagccagctggcaacatctgccaactttttatttgatcattggcaagcagtaataccaaacgttggaaaattagttgattctagcgttttagatatttctaatttatgtcttcgataccttgtggatatgaagcatgatattgttcaaagtctattgatacaatttgtattaattgatgagaaatttgaagcaacaggtacagaacattctgacttcgcaaaagtgcttaagtctgtaacagcgtttagtgtactttggcgagcaatgagtggcggagctgatggtattgatgctgtttacaaaaaattacatgaacgcggtgtgaatgcagatcaaaaagggttcacattaggtcatggttctctgacgtcggatcggtttaatccagatattattaatcagtttttcagagtagaacttgaaaacaaaattattacaaaaggttctccaaaagatacagtagatgaaaaatggcttgatatctgttcgaaacagcaaattctaaccaaaccgaagagtatcaagatgttgctcttagctggtttgcatggtgttgaacttgaaggcgttgatcaccagatctcaaataaattgagtactgacttcctaacaaccatgatgtgggaattaatttctgggaaaaacgctattaagaaggtcttcaatggtggttctacagaaggctggggggatgaggagattgcaaacccagaggtttataacaagattggtaacgtattaattgatgtcagagacggagtttccaactccaatccaccgtcttggtataatctgaaacaacatttacttcaggccttagctaacgattcaattaaggatattgaagatatcttatcatcagattgccatatttctgaacatgctaaacgtcatgcttcagtattgatgctagagaaaaaatttggtgatataacgttcgccgataaatggggaaagcagcagattgatgaacgcagttcattactcctgagtaacgcatggcgcaatcttactaaatggcttgattgggagtaa

SEQ ID NO: 249860 - DNA, 795 bp, Klebsiella pneumoniae
atggtactttctgtccggcactggattcgagcactgaatttagtgatatgcgttgataacaaagaacaaatttatcaactgacaccgcttgctgaacagttatttactcataaaaacggtagagcagcatatgatgaataccttgataagatcgggacgatctggttactacattggctattgcaatctatcgatacaagaaatgctgaattaaatgcgtctcgttttttatttaattatttcaatgggataaaagtaaagaaagagtttttagcaaatgaaatcaaagatgcactaactaatcacgagaaagagcttactgaagaaactctaaacaaagatatcgactgtctgttgcagatgtatgcacataagtcattgcaatccaaaaaaattaatgaggacagctttgcttcacctttcacagagctaggtttgctgaagcaagaagatgccaggagctacttggcagaactttctcggcgtccttcactgcccgtagaggtctttacctatgccctcattgactatatgcagagaaaacaccaagagagtaaggtaaacacgttgtcttttgaagcattactgaatgacgtaggctctcctggtcgagtttttcgtttatctgctgccgggcttagtgacaaacttgatcaagttgaaacattaaccgaaggcaaaatagcctggacagatacccaaggtttaaggcaagtacaacactgtttcgaagatatcaataatattaaagctgatcagtaccttaagtattactatcaaccagaaggaaaataa

SEQ ID NO: 249861 - DNA, 3351 bp, Klebsiella pneumoniae
gtgactcttagtaaactttactctatcgctacacgccatcaacgttctacccgtatcgatagtgatttgagcgccgatttctttcctggtttggtttaccatggaactgcacaatcttccttagaaacgcttttccggcagtacaaacaaaccgggcagagcgcctatacacttactggtgcttatggttcgggtaagtcgacggttgcgttgcttgtagctggtttactacatgctgatattaatattcgtagtgaagcactcattactataaatgatgagtctaaaattctattagaagaaagtgtcccttaccagggagggtggttacaaatacgctccgtaggtggagttagaggccctatcgcatcattttggaatgcaactcttagagcacttgaagaacatccaaagacatgcaaatccagcatattcaataagtatagcaaagtgagcgtagagagtgacagtgagctccttaactcatggaaagcactgttcgaagacattgctccatacgttgatggtgtacttatcatcgcagatgaaatgggcaaaagcctagagtacattaaccgaaatggtggtgatttacatttatttcaggatatcgcagaagagctatctaggattaacacgccagttatttttttaggattattacatcagtcatttagtgaatatgctaaagaacgtggcactaagttacaggatgaatggggtaagattcaaggacgctatagcgatattctttataatgtatcaactgatgaaacggttgcattaattagtagctcgataaaaacaatattaccgaaaaacgatggtgatcagctcgttaaacgcgtacttgcagcccttgaagataagctacagcgtaaagagctgctacttacacgattggagcaatgtattccacttcatccattaaccgctttgctattaggacctattgccaagcgaagatttagtcaaaacgaacgcagtacgtttagttttttgaattctcatgaacagttcagttttcaacttttcctacagcaaacaagtgaccaaaacgctcgatatgatcttagtcatctttgggattatctagaagccaatatggaacatgctattttgggatcccctgatggtcatggttgggcgacagcagctgatgcaataagaaaagccttgaaacaagacttttcaccgcaatgcatcaagctgcttaaaagcatagctttgattaccctgtttggtaaatctgccaacctcaccggcactgagaagatactgcttaccgcaaccgagattacacagcaagaacagcttaatgcgtgcctacaacaactaaaagacgcttcctgtattgtatttagaaaatatctatcctcttgggtggtatttgaagggtctgatctcgatattgctggtttagttgaggaaaaacttgatcaacttcataatagtcatgaagcgattgatcgtattaattttagctcccaagttattgctaaaggccattatcatgaatttggtacattacgatgggctgctcaatcggtagcaatgcaacttagtagtatcgagattagttcattacttacttttcgaaatggtgaattcgcaaatttcttactattacttaaagaagaatcggaagcgcgattgaaggagttgacacgaaataacaagtcactgatgcttgcttgtgccccaaatgctaatgaaattattaaccttgcgaatgaaaaatacgcgttagatcttatccagagtgataaaataactggagctgcgcttactcatgataaagtagctcgcgaagaacacaatgctcgtacttttaatgcacaatcagcccttgaaaccgctttaacctatgcattcaacaacgcggtttggtttcacaacggagttgcttatgccaaagagaccattagtgaaatagcaacctttgctgccgacagcatatttttccaaacacctaaaatcctcaacgagcttgttaatcgtaataagttgtctgggaccgcagtttctgctttaaaaaagcttctcgaagccatgcttgataaagaagactgtgaggatttaggtattgaggggtttcctccagagaaatccatgtatataagctgcttaaaaaatacatccattcactcggccgaaggtgaaaaagggcagcattggttcagagattatttggatacaaatctcaatgccatgttttccgcagcggaacaactattgaaagatcgcaaaggtagtgaagttggtttgtctgaaatcgccgaattatggggtagcgcaccctttggtttaacgaaaggtgttattccgattttcatactcgcttttttgaaatcaatgggtgaacaaatcgcatattatgaaaaagatatgtctggcgaatttgcctttatcgcagagccagacagtgactatgttcataaactgattaagaacccaggcgatcttgccgcgaaatatatcgtattagcaactgacgaaaaagagtggttgcagaaccttgcgattttcgctgcagcggaaaccaaccgtaatatttcaaataacatattatcagttgcgacaccattagttaccacaatacataatctaccgcagtgggtaaaaaacgcacaccacattgtgccagataatgatgaacgtaataaaacctatttgagagtacgagatctttttttgcaagcaaatgatccacatactctacttattaagaagttacggaaagagctggtagattttggtgctagtgattttacgagtcaaattgatctcttggaagactgttttaaaactctcaggcaaaagcacgagcaaatgttagtttcgatcaaggccagagtaaaaaatatttttccagaaaatggtgaagaattagctcaaatgtgccggtacgttgagaaaaattcaggtgacttgcgcttaaaagcctttgctagggagctcgccaaaagcgatactggattattacagtggctagagagcataattcaaattgtcactgggcgcggaaaacaaaactggaatgaaggaattcttcaaacagcatcaaacaaaatcagtgactacgcacaagattttttgagtgtggtaaagtcgcagcataatgacgaagctaactctaactctggtaaaacaaaattggtctccttagtattagaaggcgatgatggtaagctaacctcatttaagcgagaaattagagttgttgaaatggatgaattgcaaaacacaatgaatactattgaaggtcatctttctggacttgatgaattccataaaatcaatgtgttgcagcaattgctgagaaagtcccttgaagcaaaagttaaataa

SEQ ID NO: 249862 - DNA, 1698 bp, Klebsiella pneumoniae
atgagcataaaatcacaagagataaatagttgcataggtaggttggctaataacattcgagctgagagaattgattacaatagttatttggatctttactccggtgaggaaaatattagaaatattgataatattaataacacggttgtttatggtcggcgtgggtcaggaaaaacccatctcctcaaagcattgtctgaaagggttgttgataattatcctgtggataaagtttttccggtttatatcgacttaaggagaattatacctttggtttcaccagaggtggaaaacaaggaggttgatgctcttttgatttttaaatacataatgcaagaagtttcatttaatttgtatggtaacttacccattctattaaataaaaatgaatttgattctaaaaatgaagctttgtttgattccaaaaaagctcaattaaatgatttttttgaatcactatatttggaattcaatggtcgagaattaaaaaaatctaatgacttaacggtatctgaggaggaggtgaaaagtttaagtggagaagtgaatatatcgaaaagccctagtgcaaaattatcggcgtcaggtactgttaaagaaaataaacaaaccggccgtagagggcatgtctccattttacatatcactaatgcacttgatgaaattttaaatgagttggatttacgcttcctaatgattttagttgatgaatggtcagaaatacctcgcgaaatacagccttcattggcggaaattattaaaaaaacattttctgcaattaatgtggttacaaaaatagcggctattccgaataggactactttgggtattaaaactgagagtaaattttttggtctcgaagaagggggggatatttttggataccctttagatatgagatatgtttttgaagttaataaaaaccaaactagagatttctttaatgatcttctctacaaacatctttcttcaataaataaaacagccattgataatcttgtcaaaaaagagaagaaaactaaagacagcttcatcaatatactttttgctaatgttgcgttaaatgaaatattaatagcttgtgctggaataccacgagacttcatgaatttgtttcttaatagctatgataaattcatactgtcatctagttcgacagcagcgaggattagtgttaaaaatttacgactagctaatgcagaatggtatgagtcagacaaaaaagaacaggttgataaaaatgatgttgagaaaaaactattaactgaaatagtgagggaagtaatagaaaaaaagaaatctatgcactttttgattcctgaaaaatattcgaataacaaacacattcaaaatcttatcgacttgcgcgttattcatttgcgtaaaagtggatattcgcataaagatcatcctggggtatcatacaatgtttactctgtcgactatggttgttataactctcttaatataacgaaaaacaaactagatacgtcaatgcttaacgacctcaatataaaggatctacgtgatgttcgcaggatttctcttgaggatactttcttccagtcatttatgatggaaatcggtgaggcctttaggtgtccacattgcaaagctccaattgatgttaatcatgcagcttataaaaaaagagggttgtgtaatcactgttttgaatttgttcaagcagaagaatga

SEQ ID NO: 249863 - DNA, 702 bp, Klebsiella pneumoniae
atggctggcgctttatcaacaaccaaagcacgacactatccagcattaccctctagccggttccctgagtttcttgctcgtcttggagcatatcgtggccatataatgacccggatcgcggtcgagctttctctgctaacttttgtgcgttccagcgagttacgcgttgctcgttgggaacagtttgatttcgataaatctctttggcgtgtacctgcaaagcgagaagaaattaagggtgtgcgttattcgtatcgtggtatgaagatgaaggaggagcacatcgttccgcttagtcgtcaggcgatgattttgttagcccagttaaagcagattagtggtgataaagagctgctttttccgggggatcacgatgcaactaaggttatgagtgaaaacacggtaaacagtgcgttgcgtgccatgggatatgacacgaaaactgaggtttgtgggcatgggttcaggacgatggcgcgtggtgcgctcggtgagtcagggttatggagcgatgatgcgattgagcgtcaactgagtcattcagagcgtaataatgtgtgtgcagcttatatccatacttctgagcatttggatgagaggcgtttgatggtacagtggtgggctgactaccttgatagaaactcaaatgggtatgttacaccttatgattttgccaaacttccgcgtagtgcctttgaataa

SEQ ID NO: 249864 - DNA, 447 bp, Klebsiella pneumoniae
atgaagctcaacgccagacaggtagggaccgcaaagccaaaagacaaaacctacaaaatggccgatggcggcggtttgtatctcgaggtttcggccaagggttctaaatactggcgcatgaaatacctacgcccctctgacaaaaaagagaatcgcctcgcttttggtgtttggccaactgtgacgcttgctcaagcaagggccaagcgcgacgaagctaaaaagctgctagtgcagggcattacccctaaagccgaacagaaagaagcccaggctgagaattcgggggcatacactttcgaaactatcgctcgtgaatggcatgccagtaacaagcgctggagtgaagaccatagagcgcgagttcttcgttatcttgagctttatatcttccctcatatcggttcgtccgacattcgccagcacaaaaccagccacctgtgttag

SEQ ID NO: 249865 - DNA, 624 bp, Klebsiella pneumoniae
atgagtttttttgcaactactagcataatagaagcatttttaaagcttggtggtgtttttttattatcccttgtggagtgggataagcttaaactatattctgtaatcatgttgttagtggttttcataattaccattgtttattatttatattgtagaaataattttaaagaatgtaaatttatattggtaagagataagggaatatatgctgagttgtcttcttatgctgggtggaattcttttacaactttggctaatattggcctagatcaaggaatcaatgttttactgaatatattttttggccccgtagtcaatgctgctcgtggaatcgcatttcaaataaaaacacaagtcactgcgtttgtcggcaacatacaaatggcatcagcaccacaaataataaaataccatgctggcaataggaaaaacgaactcgaaaaattagtttttttgagttcaagagtcacctattattttatgttctttattgccttgcccgtcttattacaaacagagatgttgctcaaactttggttaatcaaagttccaccacatgctgttgtgtttacacaattagtcatagttaatatactcattgagcaacatctctgtttgtaa

SEQ ID NO: 249866 - DNA, 381 bp, Klebsiella pneumoniae
atgaatccaagatttacaataggtattcctgcctataaggcctctttcttaagagaatgcattgatagcatccttagccagacgtttaaggattttgaacttattattgttaacgatgcctctccagaaaacttggattcaataatttcaagttatgatgacacccgtattcgttattacaaaaacgataaaaattgcggtgctgaaaatgtaattgataattggaataaatgtctgtcatttgctaatggtgattattttattcttatgggtgacgatgataagctggacgaagattatttgtctgagttcaataaaattattacggcaaatccagaaatgaatgtttaccattgccgtagtttttgctgttgcggttaa

SEQ ID NO: 249867 - DNA, 138 bp, Klebsiella pneumoniae
atgctgatcaacgctattggtacctactccgccagccagccgctggaatcaatggccatcacccgccgcgacccggggccgcaggatgtacagatcgccatcgcttactgcggcgtctgccactccgatctccactag

SEQ ID NO: 249868 - DNA, 330 bp, Klebsiella pneumoniae
atggggtttccctcgccggctaatgattatgtagaacgaagattaggcatcaacacgatatgcagactggatgccaatacgcgagcaattgttacggattgtggttatgcggttattgatttatcgagaaaggctaagcagggtaatacggttctaatcaggagcgaaggaaggatcgagtttgcaaaaatcttgggccgggcttttatcacagcagatggggagtcgatagaaggtgaggcgcttgatgaaactgaagtgattggcgtcgttactttcctgattacagacgtaaattcagagggaacggaaggttgccctgtcatctag

SEQ ID NO: 249869 - DNA, 243 bp, Klebsiella pneumoniae
atgttcgttgaactcgtctatgacaaaagaaactttgaaggtctgcaagatgctaaagggatcatccatggcgaactaaccaaacgcatacatcgtatctttcctgatgctgatatcagagtaaaaccaatgatgtccttacccgctatcaatacggatgcaagcaaacacgaaaaagaaagaattagtgcagctatccaagaaatgtttgaagaagcagatatgtggctgggggaacaatga

SEQ ID NO: 249870 - DNA, 429 bp, Klebsiella pneumoniae
atgatgtatcaacgcacggatctgacgctctccatgttctatgcatccagcgttgatgccgacgggaataaagtggctacgttgacgatgcaggtcgtcgcggcagaagctggcgctgttcagaccagccagttggtctgcatcactgatgctgcgaagaagaagacgtacgccgttggcgagcagtctgtcagtaatggttctgacccgctgctggtggcgatcgagagccactggcgtcagagcactgacactgtggtgaaagggttgattgatgaagtgacagacttcattgcaggcaatatcaactcggtcagtacctggattggccagtacggcatgaaggtcctggaaggcgtgccgttgactgaacggctgccggagagtgttctgcaggctgatggacaggtggcgacagctgctggctga

SEQ ID NO: 249871 - DNA, 255 bp, Klebsiella pneumoniae
atgtcatcagacgaaaaaatcgccattcttgaagatcgaattaaaaagattgagggtgtaaccacgcatttactcattcgctctgaactaaccatgtgcatcgtgtcagcaatgattggtgcagacgtcataagccgcgacggtgtgaaggagatgatcaataaaatcgacttatctgaattccaggcacctgccatcaccgaagctgaaagaaagattatccttcaacttgttgacagggttgaggtagtttaa

SEQ ID NO: 249872 - DNA, 426 bp, Klebsiella pneumoniae
atgaaaattgaacaaaacggctgcgcaatcatgaaaattgaacaaaacggctgcgcaattttgccactggcaaaagattttaaattctgtctgggtcagttggtaagtctgcgtatcagtgaagaatttggtgaggtacaagcgcgttcgcagagtcttaacggcgagaatcagtacttcgttcattatcaggctgcagataaatgtgccactgagcgctggtataacgaatcgcagctggtggccgtggaagatgaacgttcaccgggcatgccagtgtttggttgcgtggagttgtcaggaagtgagatagcccggaataaaatgcctatggatgtggatagcgacaaaccattattaacgactgccgctattaaaaaaggtgaaattaaactacctcaaccctgtcaacaagttgaaggataa

SEQ ID NO: 249873 - DNA, 255 bp, Klebsiella pneumoniae
atgctcaagcccaaaccgctgcagcgcgtgctgctgccgctaatctctctggcactgttaaccagctgcgccagcaggcaaaaaaccttgccacccgcctggacgccgcaaagcacaccgcaagtcttgccgctaccgtcagaagcaaaacaaccggcgccaccgccggaatgcttgccgacatgcttggagaccttgcagaagaagctcgacgatatgctgcaatcgctgacgaacgctacacagcaggaatga

SEQ ID NO: 249874 - DNA, 138 bp, Klebsiella pneumoniae
atgaacattatgagggtccaaaatctggacgttcagaatctgaaccttcggattctggacgtccaggatctgaacgtccgaaagagccaaaaaatcagggttctcagggtccagaaactggacacgatccgtcagtaa

SEQ ID NO: 249875 - DNA, 558 bp, Klebsiella pneumoniae
gtgggtaatgagccaatctggaaagtagagcgtcagcctgcttggctggtggccgcgatcaagaaaacgatcactgaattgcctgggggttatggcgaagccgctgaatggctcggtgtaaccgaaaatgctttgtttaaccgcctgcgtgttgatggcgatcaaattttcccgcttggatgggtgatggtgctgcagcgtgctggtggcgcaaatcatatcgcagacgctatcgcgcgccaatcaggtggggtattcgttccgttggcggatattgaagatgttgataacggcgatattaaccagcgtttaatggagtcgatcgagtggatcggcaagcattctaattttgtacgcaaagcgacagctgacggcgttattgatgatgccgagcgtgctcagattgaggaaaacagttatcagataatcgccaaatttcaggaacacatcacgcttctttaccgggtgttttgtgtggcagaaaagagtgacgcccgcgagtgtgcagctccgggcgtcgtggcgaataaatcaatgtgtatggagaaatccgcatga

SEQ ID NO: 249876 - DNA, 420 bp, Klebsiella pneumoniae
atgcttgacgtcagtgcgagcgctggtggtggatttattcagggcagtgatgttattgatgtcataaggtctattgagtacaacaacgaccaagccatgactttattcggtggtagaacaccagacacagtgaaggtcattaacgttcggggcgacagcatggctgacactattcagccaggagatttgattttcgtcgatgtctcagtcaatagctttgatggcgatggcatctacgtctttggtttcgatggcaaaatatatgtgaagcgcctgcaaatgataccagataaaatgctcgtgatttctgataatcccaaatacagagaatgggaaatcgatcgggctaatgaataccgtttttgcgtttgtggcaaagtaatgatcagccagtcacaagccttcaagcgccacggctaa

SEQ ID NO: 249877 - DNA, 573 bp, Klebsiella pneumoniae
gtgaaccatttaatgatcgacctcgaatcaatggggaaaaagccaaacgcgccgatcgtctcaattggtgccgtcttttttaaccctcaaacaggtgaacttggccaagaattttacacggctgtctcgcttgaaagcgcaatggctcaaggcgcggtaccggatggagatacaattctttggtggctaaaacaaagcccggaagcgcgctcagctatttgtgttgatgatgcgatgcctatcactgatgcactgtcggaacttagccatttcattcaccggcatgcatataatctcaaatacatgaaggtctggggtaacggggccacctttgacaatgtgattctgcgcggagcttacgaacgcgccggacgcatttgcccgtgggaattttggaacgatcatgatgtacgcacgattgttaccctcggtcgcagtgttggtttcgatccgaagcgtgacatgcctttcattggcgatgttcacaacgccctggctgatgcgcgccatcaggcaaaatatgtgtcagcaatttggcagaaacttatccctgccaccagcaccaacgagtaa

SEQ ID NO: 249878 - DNA, 1077 bp, Klebsiella pneumoniae
atggataaatattttaccaccctgaccgctgcaggcgaggcagcttttgctcattcagccattacgggagagcccgtcggttttacgtatatggctgtcggcgatgcggaaggcgcgccaggagactcggttaaagagcgtggcaccctgataaatgagtgttatcgcgccccgttaaaccggctggtgattgccgatcagagccagaatattattcgcgcagaaatgattatgctgccacagatcggtggcttctgggtgcgcgaggcggcactgtatgatgaaagtggggtatgcctggctgtcgccactgtcccgccgtcttataaaccgctgcttgctgaagggtcgggacggcttcacgcggtcaacctgtggatagccgtcagcagcacagcggatgtagaactgaaggtcgacccgtcggtaattctggcaaccgtagcggaggttaatagtgccaaaaatgaagcaaaagattataccgatgaagtagccggttcgctgaataccgatattcagcaggtgattactgacgcgataacggcggcaaagcgcgatttctgggaagatgataacccggtgggtactatcagattttttaatcagaacctgaaccccagcgagcgctggccatggtcaacatgggtatataccggcgaaaacaaaacaatccgcgtcggaaaggctgacggctcggacgtcggcactaccggcggcagtgataccgtcacactccagcgcgccaacctccccgtcgtgcagattgatgttactggcgcaaccagcgagcaaccggcgcgggaactggcggccagggcggcaggcgggcataaacatcagggaggcatggcggcaccgggtgagatatgggacggggattacgttgttggttccgataatgacagtcaccgtacccgtaattacaccagtgaagctggcgatcatacccatattgttgatgaaccagcccatgcacacgcaatcagtggaaaaacggataatctaggcagcggccaggcgattagcgttgtagaggcgcatattctgctgatgtgctgggcgcgggtggcgtag

SEQ ID NO: 249879 - DNA, 756 bp, Klebsiella pneumoniae
atggctacaggtatcataaataagaatgcggcattttggggcgctaaagcagccgtacttcacacgcagtttgacggtgcatgggaggggtatttctcttttggaatagatgcggagacttcaattagaaatttaatcgaagggaaacccgcactgtcaattataggcaatccgctatatggcgcgaattatatcgagttgactggcgggcaggtgtcttacctcgtttcggggattaaaaacagtgaggatatgacaattgtcgcatctgtcatgccgatgaatgatgccagctccgctgtcgtctctaactatcagtcgcagcgcaccgacggtaacggtctgtgcattggcactcagctggggtttgatgttaatacaccggaagatggaaatgtgcaggccacttttaaccacggcgccctggtgaatggggtgtctactggcgcgcgagctaatactcaggacaccccgatcaatgcctggtacctcatcagcggaagggtaaaaaatgctgaccgtacacgtaccgttaataacctgacgacgggcggtgttgggacaaataaaccagccgtcaacccagcagatcttggggatgtactgagatttggatcagcatataacagccagtttggtggaaagctgaggatctgcgagattgcggtattcagtgaatgcctgtcagacgaaaattactccagccttattcagtttatgcgcaggagtgcggcgaaaaaaggcgtagtggtttga

SEQ ID NO: 249880 - DNA, 2046 bp, Klebsiella pneumoniae
atgaatatcagtgaaaaaccacaatgggaaacggaaattaaactgctggagcgactggataaagtagagggtggccgggatggtgcggcaaatattcaggccggtcaactggcaaatcgtacccgatatttgcgtgatcagcttgatgcttataataccctcctaaaatctggtgaactgccatttacaaatgaagtggcggcaaaagcggctattattgcgggacgtatacccgagggcgccgtattttccgtgcgctcagataatccggctttttgggtggaagagttcagaaatatggggggagagcctgcatccacgggaaaatttattacatcatcactgatgacgttgccgcttatcgaaccgacagcgggagatgatgacggaaccacagtcggcattgcagcaactctggaggggcagtattttcttgtacttgagccatcatccagcgattccgccgtgaacctgtatcggaacgtgaacggccaggctattttcacatcgggactagccagcacaggtgcggttgaagatatgagggaaaatatcactcagctcccactctatgatgacgtcatggttttaatggatgaacttgggttttcccattccaggtttatggctgatggtggaattatcacgcctgcggttaagctcttacccgatgaaatgacgtcaggaaatatatcagtcaggaatttaccgcgattcgacagtaataaattaatgctgtctgatgagctgggtttttccgttccggcgacagaaggcagtgaaaacggtaatgtcgatcctggcgagatcacggttgatttacctccgcaaacagcggcgtatgggctgctgtcaaagatgcgtgctgcgctggaagatgtctgcatcatcattaattcagattccaccggtattactcaggataccgatccggttaatggtgtattcaaaaaatggactcgtaagctggcggaattcctcgccgccaattatccggcatataccgtgaattattacacctggtcagcaggagcttatgtcggcccggaaactattcaggtgggaactgccggtaaaacccttcatttttataatgcggcaatcgctggcacgcaaccgctgtatctgatggggcgctattttgaggcggcatatgtgccacggcaggcagacttaatcatttacaatcatggtcataacacggattacaacgtaaacgcgggtgtacaggctggtatgaatctgtccgctatgtatcagatgcttcagcgacaccctaacgccggagcaatcatggtttcacaaaacccgcttcgggacagcaatctgggagcatcgcgcagtacaggcgcacggcaggctgcaatcgcggcaggtttcagtcttgtagatgtttatcagcttttcatggctactggaaagccagttgactggtatctggataacgtgcatccaaacgctaccggcgatgagaagatttttggcctggtaaaaaatttatttacctggcctgccacacctgcgaaatacaccgccggattactgtatggtggcgggctggtaccgaatgctgacttctcctcctgggatgatgatgctggcgtaccggatggctggacgttaacaggatgtacggctgaagaagatacggttaatttcgagtcaggtatctgcggcctcaggctgatatccacaggctcagggagtgcttacgcatcacgatccctgcctgcctctcttgtacgtcgactgcgtggacagacaatcgtggtgggatgtcgggtatacgttccggtggaaaatactcgggcaaacgcaggatacatttcgattgaggggatttctggcagcagaggttacggtattcctgcgcccggaggtcgcggcggttttgtctggaaagcatccgtggtgacagtgccggtaaatgcagatgcactgacaattattgcgggtctggatacgtcaggtggcgcagcaggaaacgtctgtacattcgatcgcatcactctgaccgttgggtcaattccacaggactttatttaa

SEQ ID NO: 249881 - DNA, 609 bp, Klebsiella pneumoniae
atgaataactcattactccccccgtcttccagtgcctggcttcgcagcacggaggcggccaccgtcagattatccgcgatcacagtagccctgcgcacactgtggacgcctactgcctgcccggttgatttactgccgtacctggcctgggcgctatcggtggacaggtgggacaagagctggcccgccgctaagaaagtggcagcgattcggctgtcgtactggctgcatcgccgaaaaggcacccgtgccgccgtgcgacgcgtgatcgaagatatgggcttttctgccacgtttgcggagtggttcgacgtcggcgacaagcagggcacattccggcttgaagtggatgttaacgacgtcggtctgacaccgaaaacgcttgatgaattgaaccgcctgattggcgatgcaaagccagtgagcaggcatctggcgcaactgaccattgcaaccagcacaagaggatgtgtgtggacagggggggcgatatttgatggtgaggttattacggtttatccgccgggatatatcactgatgacctcaccaggtttgacggcacgccattttacgacgggaactatcattattcaggtaaagagcaatga

SEQ ID NO: 249882 - DNA, 972 bp, Klebsiella pneumoniae
atgattgaacaatggaagaaagctgtaattcatttagagtgcgccgctgatagcgagcatatgtacgatagggataaacgaatcaatgagttaagagaaaagcttgataaggacgaaatatcacatgatgagtatttagaacaatcaagaaacaatgggcgtgatatcagaatttacggtacggctatttttatcattcataacaagaaacgatatttattgaccgcgaggcatgttctttttgacgagcgctcagctaagagagaggctcaagaggatgtaactaggcatgagagttttcctcaacacatgcgagattttttgttagcagaatccaatgaaagaaatcttaacagaatatttaatattatttttagagttccatcattagatgaggccctgacagttaaagattttgaagagactacttttttaatgaatcttggggcaggaccttctatgagcttgccttacacattttcatcccctgatttagatttggctctaatttcattggaccagagagataaagattttgcagatgaattgatagcgcggggttatataccaattccgtcagaattaatcagcgacggcccttcctcagaaggtgcagaagtcttttcagttggttttcctggagcaacatcacttatcgcccaaataaaccagcatcccgcatcagctcactggtcttcaagttatgtatctttacctgtattttcttgggggagagtttcaatgttgcactcgcaactccctttttattggtgtgatatgagcatctatccgggaaatagtggcggcccattaattgagaatggaaagctggtaggcatagttagtgcacaagctactctgccaatagaggggatacctcaagttagagcaaggattccatttggtaaaataattaagacaggttttgttaaaaaactttttgaagagcaggatattaaagatcaacgatag

SEQ ID NO: 249883 - DNA, 348 bp, Klebsiella pneumoniae
atgcacttacacctcaccgaatcctcagcccgtccgggaatgcaggtcaccgccgaagccgagcgtgaatactggctgagtcgccagaaagcggcggtgaaagcgcccgctgaaatcgacgttcacgccttccacgacgcgctgggcctgatgtacccgctcaactggtcaacgagtgataacggcgtctgggagacgttcatgctgcaggagatggtctgcggtgacgtgacagagatttatgcccgctgcggagccagatatttccggctgcgggatgtgtgcaacctgagccatgcgcagattaaaacgcgcattaaggagggatttaacctgacgcagaaatga

SEQ ID NO: 249884 - DNA, 339 bp, Klebsiella pneumoniae
atgaatactcgcatcgttcattccatatcgtccgttctgcgtactgatggctttgtgcgcaatatccacgccgctaacccgttcgatgttatccgcgccgatgtggtgcttgcgcgcatcgagaaagaggcagggcgctgctgcgggatgcattacgagctgtatcaggcgcgcgtgctgggcgatgcgctggattatctggacgcgctgccgctgaaagaccgcccggtgttgatgggcgcggcggcaaaacgcgggtatctgctgacattagccgaagaagagcacgcgcaggaagcccgtgatgtgctgatgagtgaactggcggcaaacgagtag

SEQ ID NO: 249885 - DNA, 765 bp, Klebsiella pneumoniae
atgagaaacgacaccttcaacgcgctgatactccgcctcggcgaccggatgctgcgccaggctggctggcccgacgtcattgatatggcgcccgtcgcacccgaaaccgtacccggctggctcgtcgcctgcggctctctcagcggtgcggaaatcctcacgctgacagaacagctttgccagccgctgacgtatggccgggctgcgttgttgctcgccagcgcccggcggctgacgggaaccccggcgcgtctgcatctctttccggtacaggcatatccgcatccggagcggctggctgactgtcaggttatccgcctgccttacgcgcaggagtggctgacggcggcagaatgtgacgatctgctggctttcctgaaagcctccctcacgcagataacggaaatcgtcaggctggatgcgcaccgccttgccgctgcgctgaaaccgtccgtcacgccgcgactcatggacaggcggtttggtgactggcgcgtactggctgacgagtacgagcatgaaaactggctggatgaaaacgacacggacgtactggatgccgtccttgatgctgttctggtgcgcggagcaaggttctgccccatcctgctcaccgtggtcaatgaacgacgggaggaaatcgaagccgcaggcgttatcaccgatatgctgcgtttccccggcgacccggcccgccgctggcttgatcgccgtgtactgcgcgaggtggtgagtgaagcccgggcgacgcccgcacagacttaa

SEQ ID NO: 249886 - DNA, 570 bp, Klebsiella pneumoniae
atgaattacatctttaacgatttctggcagaaacgtattgccgctacctttcagaatgccctggatgcctatccacgagtattaatgctgagggttgatctacgcctgcctgatacccctgccgccactgacgccgctgtaatatcccgttttacagaatcccttaaagccaaaattaccgcctgtcagttgcgtagaaagcaggaaggcaaacgggtacaccccacaacgttgcggtatgtctgggctagggagttcggcgagcgtagcggtaaaaagcactatcacgctgttttactgctgaaccgagagagttggtgtggagttggtgattacaattcaccgcacacgctggccgggatgattaaacaggcctggtgtagcgcgttgcaggtggacgtgcagcagcatgccacactggcgaatttccctgagaatccggcgctatggattgacagggggaacagcgcacaacttcaacaggccctggcgcgggctgattacctcgctaaagaccacaccaaagtcaccggtgatggcgggcgtaactttggctgcagccagggctga

SEQ ID NO: 249887 - DNA, 219 bp, Klebsiella pneumoniae
atgaccacagccactaaccccattctttgcgcagaagacccacttatcgacatggtatacatcaccacatacaccggtatgaccgacaagtggttctacaaattgattcaggatggcaggttcccgaaacccatcaagctgggacgcagttcccgttggtacaaaagcgaagtccagagctggatgcagcaagctattgccgactcacgggggtcctga

SEQ ID NO: 249888 - DNA, 447 bp, Klebsiella pneumoniae
atgaattttaagaccattaccagtgagaatctgcacgccgaaattcgtatgctgaaatgctacctcgccaatgaccaccgtgggcattttgtgacaaccagtgaagcgacaaacatgccggggcaggtatggagctgcgtatcctgtggctgccgactcatcttccataccagcacgcacgctgattcaccttggttcgaacatgaccagaggacagtagctaccagtgcgttgatgggctgtgcgcatattgacccggcagtgaaagcggagatacgcagcagaacattacgcagtcttttcaacaccccagattccccggtaatgtcgcatgcctggtactgcgtctggtgcgctaaacattacagcggggaaaaacgctgcaccgcctgcgagaccggtatttacagcattgaggaagcctgctggcagaataactacacctaa

SEQ ID NO: 249889 - DNA, 975 bp, Klebsiella pneumoniae
atgattagccttgttttttcttattctcatgtagatgaagcactacgcaatgagctcgagaaacatctttcgcccctcaagcggatggggaagatcactacatggcacgaccgccgcatcgatcctgggctggaatttgaacatcagattgatcattatttttccgcagccgatattattctattgctaatcagtagcgatttcatcgcttccgattattgctatcaggttgaaatgatcaacgcgatggagcgtcacaagcggggtgaggcagcggtcattccagtgatcttacgagaatgcgcttggcaccagctgccgttcggcagcattatggcggcgacaatcgatggtaaacccatcaccaaatttgccaaccacgacgaaggttatgttcaggtcgttgatgccgtctcccgcgccattgccagtatggaagcgaaaaaaccacaacagagtgcgcatatcccttctcctgttcgggggaatccagcaacagagacggtttttaatccacgctccggtaatctgtctttgccaaaaacctttaccgatcttgataaagatcgagctaggcgcgaaggctttgagtatgtcgctcgtttttttgcaaactcgctgaatgaactcaaaaagcgccatgcggggctagacgtcgatttccatcggcctgatacagattctttcacgtgtgcggtgtacatcaacgggagcaaggttggtcaatgtggcatctggcgtggcaatcaacatcatggaatgggggatatctgttatagccaggataacgttgttcgaaatagctttaacgaatgcctgaatcttgctgataacggtcagacactcggttttcgtgctctgatggggggatatggccgtagaaattcacgagaacagttgctgacgaatgaagggatgtctgaacacctctgggaaatgttctttggagtaatcaaacaacgtatgtcccggtga

SEQ ID NO: 249890 - DNA, 720 bp, Klebsiella pneumoniae
atgtactctcataatctcgcaaaaactgtcgtgctggctgactctggtgacgttgagtcctatctgcagcctatgaatcttagccaaagtgatcttgcccgtatcctcgaacgagggttatcaggtcgttactcaacgactcagaaccaccctgcaatttcacgtgggcagtatttttatggtgagggtgttagcggcgctcgtgagattcttgcgccaaaagggtacaaacggctatcaattcgtaatgttgaattaaccgttagcgataatgttgcaatttacctatgccgtggctgcgatcaaactgggcttcttcatggataccccgaatctcgcctgaagaaaggtgactttacttgcgatctgatggggttgattcacaacaataccccagggcaaggagatctcaggttcgacgataaccagcttaagttggaccttgatcttcccgaaggtgatgttgtccctctcctgcctaataaaatcggaatggacttatggtttttactctacgatttttatgaaatcgatgactttcaccgtgtaggtatccgtgcagaactttctcgacctatctcgtacaacgataaaaatgtagttaatggcttttctacgcgtttgatacttgatattcacggacctgagccgattatccagagtaatgatgcaccactatttacgccggatatcgacctcgacattttaaaagtaggctaa

SEQ ID NO: 249891 - DNA, 1113 bp, Klebsiella pneumoniae
atgtttaattcagagcgtttacgtatagcaagagaacgaagaggtctgacacaaagggctttagccgaagcagctgaattgaccagcagaacgatttcgaactatgagaaggcaggtatctttgacgctatagccagtgacagtatggataaaatctctgctgttcttggttaccctgttgagtttttcctcgacggagacgtcccttctctttctcctgaatcggttagttttcgagcaatgactaagctaagcgcacagaagagagattccgcgcttggtgcaggcaaacttgctcaagagttatcgatctggattgaagaacaattcaaactaccgaaacccaatattcctgattgtagcttcgatggttattcggaacctgatcgtgccgcccgagctgtgagagaacactggggagtcggtgaattatcgatttctaacttaattcaccttctggaagctaatggtgtaagggtgttctcgctcgctgaaaattgcgttgaagttgatgctttttcgttttgggttgacgaaaaaccatttgttcttctgaacacaatgaaaacaccggagcgtagccgcttcgatgcagctcatgaattaggtcatttagttcttcacaaacattcgagcaataatggcaggcaagctgagctagatgccgaccgctttgcatctgcttttttgatgcctgaacgtagtgttttggcggcagtcccaagaatgccatcgctggatctacttatatcaatgaaaaaaaattggaaagtatcactcgcagctttggtccgtcgcacattcgatgtgggtttatctaccgaatggcattatcgacagttatcaattgagttagctcgacgagggtatcggaccagcgaaccacaaggtatggacgatcgtgagagatcacttgtattagaaaaggtgttttcagcactgcgttcaagtgggatcaagcgtagtacgatcctcgaacaactacggttccctgcagatgaagtaagtgctcttaccttcagcaatagcttctttatgggttccatcaatggggaaggcttatctgagcaaacctctggtaaacgccatccatatttgagtctggttaagtag

SEQ ID NO: 249892 - DNA, 3057 bp, Klebsiella pneumoniae
ttgctcagtctgtttggagatgaaggtagaatggcaaaattaactccatttgcgcttaaggatgcgccatcgctaatagaggcggtatatcctgttcaaaaaatttcttttgaagctcagcaagaaagaacatcagtacaaagtcaaactttgaccggcctcggatcctactggaaaggccgaaaaccccttatcttagtaagaagtatcattttgggatctttgcttcctcaaactaataataaggaaaaagatctcgagttatttgaaatgttgctgggttttgattcactgagcttagcaaagagagcagttacattaggttcaatcaaaccagtagatattgtttcggctatcagtttacataatccgtgggactatttttcccacaatttaaaaaatgatgatgaccgctttcgtgaggttaataccttacatgctcctttcgatagtaatgagttaggtttgaaacttaggtggcgaagggatattacagataatgaaaaaataccattatttaaacaatatttagatcggctggtgacatatgaagagaaatctttgttatgtagacgtccggaagaatgcgaccaaacatggttgtatagccatgtttggtcgtgcgtgaattcacatctttcttcattttccgtaaatgctgacagtattaattgtctggtggaacaactaggcattcttaggtttggacacaagccaaaggttggagatgtattctctggtggaggttctataccttttgaagcagcaagaattggctgcgatgcatttgctagtgatctgaaccctatcgcatgtatgttgacttggggtacgacaaatattatcggagcatcacttaaagaaagggaaaaaatagaaatcgcacaacaaaaacttgttgatgcggtagataatgagataaaagttcttggaattgaacatgatagtgatggtaatcgagccaaagcattcttgtgctgccttgaggcgaaatgcccagagactggatggctagtgccacttataccgagtttggttgtttcaaaaagccgcaatgtaattgcgaaattacgtccagattttgattcaaaaaggttcgaaattgacatcgtttctgacgttccacctgatgagcttaaaaaggcagaaaagggaacagtccaggatggaagtttggtatatgagctagaagggaaaacctatcgcacaccaatcaaaacattgagaggtgattataggcatcaagatggaacaaccaagaatcgtttgcgctcttgggaaaaagaagatatcaagccgaagcctgatgatgtatttcaggaaagaatttatgctatccaatggattacaaaaagaagcctagacttaggaagacaagagacctttttctcatctgttactgaaagtgatcttagaagagaaatcaaagtagaaacaatagttcgcgaaaatttatcagagtggcaaaataaaggtttcattcctgatatggaaattgaacctggtgctaaaactgacgagcctatacgaacaaggggatggacatattggcatcatatgttcagcccaaggcaattgcttgttgctgctattgcaaaaaagaaaatacttgagcaggacgttgatgtacagccagttctaaatctgtctttagccaagatgattgactggtcaagcaagctttgccgatatggcactggcgcagcgagggagtcaatcactcaaactttttacaaccaggcttacaatacaaactactcatacggtgttcgttcctttgtaactgggaaaaattatttatttttaaccagttcaagcagcgtcactaatggacagttacagatcctaaatcaacaagcggctgatgtcgctactagctgtgattattggattaccgatcctccctatgcagatgcagttaactatcatgaaatagcagagttttttatcgcgtggcttcgtaagaatcctccaaaaccatttgatgggtgggcttgggactcgcgtcgcgccttagccataaaaggctctggagatgatttccgcaaaggaatggtgagtgcctataaggcgatggcagaaaatatgcctgacaatggtatgcagtgtgtaatgtttacccatcaagataccggcgtttggtcagacatgatcggtattttctgggcttctggattacaggtcgtcggcgcgtggtatatcgccacggagaccagtactgaactgaagaaaggtggttacgtgcaaggtactgtcatcctgatgttgcgcaaacgtcttgctggtgaaaatgctggatttaagcaacgacttttacctgcagtacgggtggaagtaaaacgtcagatcgaaaatatgttgcacttgaatgatgaagtgaaagataagctgggggaaccagtctttaatgactctgatcttcaaatggccggttatgctgcagcactaaaggtattaacctcttatacccatatcggtggcgaagatgttaccaactttgcactacgtccgcgtatacgtggagaagtgactgttgtggacgaaatagtccaacaagctgctgaagctgcaaacagtttattggtgccagaaggtttgtctgccgatacttggcaaaaaatcaacggcattcagcgtttttatttgcgcatgatggatattgaaactaccggtgcatctaaactcgacaactaccagaactttgccaaagctttccgggttgaagattacggtagggtaatgggcaatatgaccgctagcaaggcgcagctgaagaggatacccgagtttgtctcgcgcgacctaacggatagtaccgagcttggagcaagctggttgggtcatttgatcatcggtttgcagcagataattaatgaaaaagaccctcaagtcataattggtcagcttcagggagacttgccagacttcatcgaggtacggccaacattgctcgatattttaacctttatcgaaaataaagctcccgagaaagcaactcgtgaggctgctgaagtgttgggcgcccgtctgaagaatatgcgtgcatttggccaatga

SEQ ID NO: 249893 - DNA, 1086 bp, Klebsiella pneumoniae
atggccaaggcacaatcaaataaaaccacgacaggtgttaagcatccgacgctgggtttcggtgtgcctgctagcagtgatcctcaccactttaaagtgatcattccaaagtcaagtaccggtaaagtgcaaattagtgagtatcttggtttgcaggcgcaaagcgaagaattttctgtagttgatcgtgtgcagttagaccgcactcgttggacagcgatacgcgctgaagtgcaacgcgcgtttaatgctcgcttgaaaagctacggcttagaaactagctcttggcaagtaggcgaaaacatgctcgaccgtttgttaggtaaggagatttgtgtactcgcttgggcaatagagggcatggaaattgacaatattcccgttgcagttcgcaattggttagcgcttagcccagaagaacgttggtggttatttggcatgacagctaagagtactgggggggttgaagatcgcgatgttggttggcgtattgccttgcgtcacgcacttggcgatatcgtacaaacagagcaaatacaattcactcaagacagcagtgtctcttatagccgatatataccaaaatcacacgaaataaaagaaccatcggttagttatggtgacttgaaatcatctgatgatgtatgcatgttatctcacgatactggtggtgacgattcattatctctcgatgcatcaaatgctcaattatctattgaacctgctctagacaactcaaatgtagaggaattcttattcttgtttgaagctaagctcgcaaaggctatcgggcaaccagttggtgaaatgagcagcccagagtttttagttaaaaaaggttctacagcaaatattgctctagctaaatcattacgtccagccattcgagaattaaggcagaagttgctagatgaaggtgttctcgtgaatcaaggagatgtttattcctttgtacatgaatatcaatttaaaagtcccagtgcggctgcctgtgtgatagctggtaatccgcgcagcggtatggatgcttggcgagatcttcaaggtcgcagcctgaaagagctaggatatggaaaaaagatctag

SEQ ID NO: 249894 - DNA, 960 bp, Klebsiella pneumoniae
atgcctggcggcagtggaatggataccctcagggcagcagcactcaagcaagggcgctggagaatgggggaggatggctatatagaaaaaggtccattcccgaaagaaaaaaccagtgttaacgttacgttggtaggtactaacccagaaaatggagagtcattgatctctttgactccaagaaatgcgggcgagagtccagttatctatttctcgactaaaccagaagtattggatactgatccaaaagttgatgatttggaaaattttagtacgggggaaggtactctttattttaaagttgccgatccgaccggaaagtatgagtgtggccccgcaacgcggtgggttgcagatctaaaaataagacatcaaattgaaccttccgcagataaacgaaaggttaccttacagtgtacgccgaaagccgagatgtactataccttggatggctcgaatccgaaagatgggcaactctatgtttctccctttgaagttggctctaatgctgctcgcttgttggtttacgctaaagcaggtgaagcaaccaaaacagcagacttcccgatacagcatagcggcgacaaaactgtacagatagatgacaccaagccagcgagtttaatcagtggcaagcgtgtacccctcgataccacagaaaaggtcttcaaggtgttaaaccgctttaaagatcaagcaaacacacgctttaaaggtgttcgcattgagatcggtgaaggagagaacactgttggtattcgctttggagagcgtcaaatcacggccgtgatgatcgaggcgactataaatagcctgcgggacgtactgaacgaagctgatgctaatgtctcgattgctgtaagagatggtatcgattttgaaaatggctttgaagccaaagagttcgctaagttagttggtattgagttgaaaccaggtgacattgctcaagaagagtaa

SEQ ID NO: 249895 - DNA, 1125 bp, Klebsiella pneumoniae
atgaggattttactttttgcttttttgctcatgtcgttttcttcatctgctgttaatgtggatttcaaactcgaaggagttccgcttcacagagctattgctatgatttatgatgaagtgctgcacaaaccttatatgattgatccaagcctaacaactgaccagagtattatttctttccatgcgactgaaaaggaagattttaataaatttattactcgatattttagcaatataaatattcgtatctatgaaaaaaacggtgtcgtttatcttgttaaagtgaagccacctgagcctaaagtaattaaggaaagctttgtctataaccctgaacacagggatgtcgagtaccttgcaggctttatcaaagggcagggcgaggtttctgctaacggcgataaactggtctattacggcacacgcgaggaaatttctaaagtaaaaagcctccttgttgccgtagacacaccctccagggaggttgttgttactggttatgtatttgaggttcaggatattcaaaaagaaggtagtggtataaatcttctggcaaaattactttcaggtaaattaggaatcagcataggttacaagcaaaattatgaaaatttcataacgattaatacaggcaatcttgacgcgatgatagagttatttcgtacagatcaacgttttcatgtggtcagcagtccaacactcagggttaaatcaggttctaagggcactttcagtgtaggctcagatgtgccggttctgtccagtgtcacctttgaagacagcaggccgatccagtcggtagaatacagatcaagtggcgtaatttttgatattcaacctacgattaaatcacaagcaattgacctgaagattcagcaacagctttcgaatttcgttaaaactgatacaggtgttaaccagtcgccaacgcttatcaagagagatatcgtgactgatgtaaccgtaaaaagtggtgatgttatcgttcttggcggtcttgctgagaataaatttgattctggcgaaacgggttttagttttctgccacgtggttttatgacgggtaaatccaactcgaaaaataaaacagatattattgtccttttgcaagttaaagaaatatag

SEQ ID NO: 249896 - DNA, 1032 bp, Klebsiella pneumoniae
atgcctattacagcttatgtcggtgttccccgttccggtaagtcttatgaagtagtgaaatcagttattattgccgctgttgcaagtggtcgtcgtgtagtttctaatatctatggccttaatgaagataaaattaaagcttatatacttaaaaattataagaatgtaaaacctgagcagttaggggtactcgttcttgttgataacgctacctgtgttaacgaaaactttcttccatctatggaaaatatggatactttctgtaaggctggagaccttgtaatcatagatgaagtttggcgagtatggggaagtgataaagatatacctaaaaatcaccgttctttcattgctgagcatggccatttcgttcaccctgaaacaggagttatgtcagaccttgtagttataaatcaaactgtttcagatattccaagatttataaaagcaaggattgaaactactttcagaatgcaaagactggttgcacttggccttaacaagcggtatcgggttgatgtgtttcagggggttaaactcactaaatccaacaggactaattactatcaggaaagatacagaaaggaaatattcgagctttatcagtctgttcaaggaagcaatcctgttgagagcaaaaccgataaaagacaatcaattttttcatctaagttaattctgttttctatatttttaattcctgtgctgattggggttagtggctattatgtatattctttttttaacccatcagttaaatcaacaaaaaatgaatccactacagctaattccaataatgctttaaaaatggataaggcagtatttatcccttcgagaccaaaacttaatatttctgataactggcgtattacaggtgaactttccaaaaacggaagttcctatgtaattcttgctgatagaaaagggcagttacgtttagagcctcgcagtctttttcagtttaaagacagaatgttacagggtgaaatcgatggagttatcgtaaactattattccgggggtgcccaatga

SEQ ID NO: 249897 - DNA, 1278 bp, Klebsiella pneumoniae
atgggccgttatacaaggattctctgggttctagttactctttcattaatctccttttccgtacatagtattttgccactactcgcacgtagtgcaataggcggtgttataggacgcgttgtggcgtccagagcagctgctgtagctgctaatgatgctgtatatctaacgatggtaaataacacttcgagagccattgcagtgaatgctgcatctcgcagtgcgctaattccatctcaggcaatgttaaaatctggtgctaatgtgcttacatgggcgggagtcgggtactctctgggacaactcaggaatgatgagttattgccagaaggtgtggtaattgatgataaaggaaattatgttttcaaaagtgatgatattagtaataccgtagtagcagggaaagaattaacttcaaaatatccgtattactcatattatcatgagaagtattatgaaggcttcaacaggcatatggtcgcaaagaaagtttttggtgatatccagataatcgaggggttaacatgtggtttcccgcctaaagcatgtaagctaagtgcaattatttccgtttcagatgctgcgtttgataatgttctaattgaatatgaaggatatgttaaaaaagagcttgttggtggttcttacagtattggcgtatctgaaaattacgactatcattccgaaaatccatcgccaggcgaaaacaatgataaagatgtaggtaaattcatatctgatactttaaattcattaaagttagatgttgataaacttgcgaatgtacttaattctttatggatggaagctgcgtccaaacccgattatgaaggtttgccgtttacatcatcaaatccggtcacagcaaatgaaattaaagccgttgctcctgaggtaataaatttaacccagcaggagtggattaagcccaatcagattcatgaaaattctccggttgaaattcctgtaaaagaaacaggttctaccacagaacctaatgaagttttccctgagtcaccagaaccggattatccgtatcttgagatgccttcagcaatggagattttacagcctttcaatcaattttttcctgagtataaaaatttacgtttgccatcgcgtaatgctacctgtcctgtatggtacatacctttttatggcaaagaatataaagtagattcacattgtccgttactggaggataacaggggagtctttaaggcgatattcttattactgtggtcttttatttctttgcgtaagctattaagtgcataa

SEQ ID NO: 249898 - DNA, 243 bp, Klebsiella pneumoniae
atgggtattaaaaatcgtgtttcttctgctttcctgaaagtgtgtgtactgggttctgtagcactgagttcatccgcttttgctgctgaaacctctgaaaatggttatcttcagggtttgattgataagattgatgttgcgcctattattacgggcgtggttgctgtcgcaggaacagttatgggtgtggctgttgtggtgatgggcattaaaaaagtagctcgcatgttaaatgcattctag

SEQ ID NO: 249899 - DNA, 294 bp, Klebsiella pneumoniae
atgaatagtgaattaggaaatttagaaacgacaattaccggaaagattaagcgttttaataatagcgctggtttttattatacaaccgttgtatcccctgcggcagatgcttacagcttcccgccagtaatacgtattaaatccaagaaaactctaggccgtgtcggggaggagattgttgatattccgtgtcgtgtaacaggttatgaacgtagttttccttacactgataaacaaacaggtgaacaatcgaagggttataacgtagatatgattcttgaattgcttgagtga

SEQ ID NO: 249900 - DNA, 1116 bp, Klebsiella pneumoniae
gtgttctacgattggttgagtattgaacaggattttggctatcaattacccattctttcagacgtggcatatcaacgtatccacttggaaagcggggaagcgagcgcattatctcagccaacattccagcatcgcggatcgttttgtgatgttgtctcgatctcgatccgaggttcagttttgaagatgacgggaaatccctcgcgctggggccgtcttgataacctttttggtctttcttcggtagatgcttgcgttcaagtattcaaccatattcttagtgaattgaagttaccttcatttactaaatgttcaaggatgatgcccggacaatctaaggaaagtgaaaaagcacatttaattacaaatggggcactaattaaagagttacatataacatcaaataaatcagtaggaaaaggcaatgaagatgattatatctcagggctttctacacagccttatagaaatagcatcccacgacttcactcaaatggaaaatcagttgactggctttcgaaaaaagggaatgttaaccttatatatcctacagtatataacaagtcaaacgaacttgaactacatagccttattaaaataaaaaacaaattctctgaatgttctagagagtttaattacatagttaatgttttaaattactgtaaagaaaatggaattgttagatttgaacaaaagttgaagtctcgatttctccagaaacagtccttatgctactggggactatctgattactctattttaaataagttacattctgaatttcttgatcttgataaaaagttatcggtgagtgctatggattttgaaactattagtgaacatcttatcagccggggcatcgttgaaaccactcgcgcagccaatacaactgctatgtatgcaatccaatggtttcaagggcattcatttgatttaaataagcgacaagttaaacagcatagagcaagattaaggatgataggtatagatattgcacaaaaatgtaatatatctaagttttctccggttgttgttaaacaaacaagagaaattaaagtatcagactgtgtgattccatcatggtatttaaaaccatcgcatctgcgtgtggcttaa

SEQ ID NO: 249901 - DNA, 309 bp, Klebsiella pneumoniae
atggcccttttcaaaagaacaacgatggcaatcactgctgagcgcaagatcaaaatggagaggctggcgatcgatgccagtcaggaggccggcacttcaatagcatggacagatatagttaactatcttattgataattattcaaaagatgcagctaaggacattgtatcaaacataaaaagtagaattcgagaagctgaaaatcacaccgctttttacgaagcccatgaagaagctgaaaaaaggcgtcatgatcgcgtaagcagagcagttgaagaaaacaaaaaaaatgcgctgaacaagaagtaa

SEQ ID NO: 249902 - DNA, 327 bp, Klebsiella pneumoniae
atgttggataaagctgctgaggaaacactcaacgttaaaaacagagaagagttgattaaaacctttagggatatctttgtagaaaaagatttttcatgcttgagaaagtcagttcaaaaggaattgaaggcgatctttaacgacgacaataaaccagtatccttacaacccaaaattaccctaggcatgggggctaaagttttgtccaaagcttatggcgatagcgtactaaatatgctggcagaccaaatattgctcatcgatgataaaagcacaatgcaaagagcgtttgaagtggttaagaacagactaatagaagagcactga

SEQ ID NO: 249903 - DNA, 1125 bp, Klebsiella pneumoniae; identical to SEQ ID NO: 249895

SEQ ID NO: 249904 - DNA, 1032 bp, Klebsiella pneumoniae; identical to SEQ ID NO: 249896

SEQ ID NO: 249905 - DNA, 1278 bp, Klebsiella pneumoniae; identical to SEQ ID NO: 249897

SEQ ID NO: 249906 - DNA, 243 bp, Klebsiella pneumoniae; identical to SEQ ID NO: 249898

SEQ ID NO: 249907 - DNA, 294 bp, Klebsiella pneumoniae; identical to SEQ ID NO: 249899

SEQ ID NO: 249908 - DNA, 1116 bp, Klebsiella pneumoniae; identical to SEQ ID NO: 249900

SEQ ID NO: 249909 - DNA, 309 bp, Klebsiella pneumoniae; identical to SEQ ID NO: 249901

SEQ ID NO: 249910 - DNA, 327 bp, Klebsiella pneumoniae; identical to SEQ ID NO: 249902

SEQ ID NO: 249911 - DNA, 1059 bp, Klebsiella pneumoniae
gtgacgaggcttatcaatccatgcgcaaacgaaaggcagcccctcaggataaaaaatcaggatgctttactcggtaaaatccggcgtctcaggaagcaggttcatcagctgcagctcgtacgtgacatactgacaaaggcgaatgaactgataaaaaaagatctgggcgtcagctttctgaaactgaaaaacagggagaaaaccctgatagttgatgcccttaagaaaaagtaccccgttgctgagttgctaagcattctgcaacttgcccgcagctgttatttttaccacaaagccagcaaacgtctgtacgataagtatgcggaaatacgcgtgatcatggccgatatctttgaggagaattaccgctgttacggctaccggcgccttcacgcgatgcttcgcagtaacaacagagtgatttctgaaaaggttgtccgcagactgatggcagaagagcagctcgttgttaagcgcaccaggcgacgacgatataactcttactgtggcgaaatcggtccggcaccggaaaatttactcgcccgggattttagttcctgcaggccaaatgagaagtggctgaccgatattacggagttccagcttccggctggaaaagtctatctgtcgccggttatcgactgctttgatggccaggttgtaagctggtcgataggaacacgcccggacgcgacgctggtgaatacgatgctcgatgacgcactcgatacgctcagcgaacatgataaaccggtgatacacagcgatcgtggtggccattaccggtggccgggctggctcgagcgtatcaacacctccggacttataaggtccatgtcgcgcaaaggatgctcgtcggataatgctgcgtgtgaaggcttcttcgggcgtatcaaaaacgaaatgttctatggcagagactgggcgggtatcacgctggaaaaatttatatgcttcctggacaggtacatacgctggtataatgagaaaagtatcaagctatcattaggtgcaatgagtcctgtgaagtaccggcagcatcttgggatcacaacataa

SEQ ID NO: 249912 - DNA, 795 bp, Klebsiella pneumoniae
atgaattttggtgacgtcaccgacgagaagaccagcgcccgcattctggataaggcgcttgaggcgggtatcaatttcattgatacagcagacgtgtatggcactgaacaatctcccgatatccagcaaggctcggggctgtccgaggaaattattggtcgctggcttcagcagggtggccgccgtgaacgcatcgttctggcgacaaaagtctatcagcctatgggaccgggcccgaacgatcgccggctttctgcttaccatattcgcaaagcctgcgaggacagtttgcgacggcttaagaccgaccatattgacgtctatcagatgcatcacatcgatcgtcatacgccgtgggaagagatctggcaggccatggaactgcttgttcagcagggaaaggttctttatatcggtagcagcaatttcgcgggctgggacattgcgactgcgcagtcagtcgccacggcccgtcatttcctgggcctggtcgccgagcaaagtctttacaatctgactgcccgaactgttgagctggaggtcattcccgcatgccgccattttggcctggggttgatcccctggagcccgcttgccggagggctgcttggcggcgtactgaaaaagatggcaagcgggcgccgtgcaaggcccgcgtttgcccgtctaatcactggcgatcgggaatacccaggcgcttttagctactacaacatgagtgcgcataatgtatatagggattatggtaaaaattgccctgcgaacataaaacccgcagggcaatctttatcataa

SEQ ID NO: 249913 - DNA, 231 bp, Klebsiella pneumoniae
atgcacgaatatgacgccgacgacccccgtgtgagtaacacgggggtagtaccagacgatgacgctgttgcattttctgctgatatggcagagctagttattgagggattcgataattccggatttcatctgcgcatcggggatgtttattattgtgcaaaaaattttgatgatctgatcgctgtttgtatcgatttttttggtggtggtaataatgactattatcgttga

SEQ ID NO: 249914 - DNA, 129 bp, Klebsiella pneumoniae
atggcgcggcaatttctgctgttttttgatcgttgtgacaactgtgattgtgagggttgctcagaatgcaattttctgggcgttatccagattaaaaattttgatggcacggagtgttttgatgaatga

SEQ ID NO: 249915 - DNA, 1092 bp, Klebsiella pneumoniae
atggccagaagcaagatgtggaatgcggttgttgctaatgcgaaagccaacaacatcagtaatgaggagtctttccagcagttgatggatgagtctaggaagggaacggtatcaggtgagatgtatggtaatgctaaatggagtagtggcgaccaattggtcgggaagctgggtaaatgggctacaggactcactgctgaagggggggctaaaattagtgctggagtgaatgcatcaagtggctctactgactcgacaaccgaatctggaagggaatctcatgacagtaggcacgataccagcagccaggcggcgaaagactttaaggaagcatccgattactttaccagccgcaaaaccaccacatcgggtaatattaccgataataatgccagctcgcgtgttgaccagtttgccgcgtcactctccagtgccaaaaacagctacgaccagtatacaaccagccggacacgcagccatgagtacagtgagatggcgtcacgcacagagagcatgactggccagatgagcgagaatctcactcagcagtttgctaactttgttcagcgtcgcgctccacaggatgccgaggctattctgaccaataccagttctcctgaaatttcggcgcagcgtgaagcactggcgcgtgaattcgtcaaagagcaggttgaacccagggttgatgccgcgtatcaacaggggcgtgaaagcatcggacagaatatggctggggtgtcaggtggtggggacaatggttcggtaatggctgactatggacaaaattctggtcgtatcgatgccatgacgcaagacgctggtattatggataatgtgggtcagaaagtggatgggatgattgcagagaataaacaacagcatcaggaaacccgtgaaaacatacaacagcaaggcgttgaagtgaaaaaagagaatgctgaactggaaaatgaccacaaaacaaaaggaaatgatttcaaaaattcttataatgataagaaagagcatcaaaccagactgcctggcgcggattcaaccaaagaactactggataaggcaacaaaattagaaaacgagaaaccaaagggatag

SEQ ID NO: 249916 - DNA, 276 bp, Klebsiella pneumoniae
gtgctggtgattgcggggttaatctgttttagcttcggcggatctccggtgcagttaatttacttagcgaatgtcgcaacggcggtgtcgacgcctgtcgcgggtctgtttatctgcctgctgctgtggcgaaaggatattaataaaggatataagacgccaaggttattacaaatatgtatggcggtcagctatctcttttgtttgttactcactctcgtcgccctgattaacaccttacctaaatttatgtcctctctttcttccatgttttga

SEQ ID NO: 249917 - DNA, 195 bp, Klebsiella pneumoniae
atggtagccatagctataatagctacttgcttttttcacaataccattcagtatacaacctttgattggaacgccactttgttcaaaacgtttaatactgatatcaatttcttttggagtatttacttcgaatcttgctacaagcaatgttgttccaacatatctaccaattattgcagcatctgtaactgctaa

SEQ ID NO: 249918 - DNA, 1758 bp, Klebsiella pneumoniae
atgaaaaaagaaaacccagttagaaatttggtagctagcatctttgagttggaattgcaagacatagtggagaatattggtgcaagctcagatacccttcacatgctaggtgaatttgctgagtttatgtatagaaatgatcgctttactgaaggagagaaaattaggactgcaaatgaaattcttgtccctttactattggagcgatataaatccagtgatggtccacaaaaaaattacgaaccttcagattatgtcgagacatttaattttttgagggcatataatacattgaaagatgcagtgttttattcatatgccgatgatgaagttgttgcgtggagcatgaaaaataacaatatcaaggttactttaaatgacgattcaattttaagacaatatgcttcggaatttatgacttttagtttaaactcacggcacgcgccttacgatcaaacagaggctaatccagaagaactccttcaaggtactaaacatttcgacttaagtaaccctaatgtagaaaaggcttttgccgctatagagagcattgcggactggaaaataaatttttatttttcttatatacctgaaaatagtgatgtgatgcttgatggatataagtattctacattcattggaatttacaaatccttgttaatactagcgttgtatgaacgatacttctccaaagcaaacaacgtttctggagttattacctataaggaagatgaacttttggggcaggctatgcaacaatatcccgaagaaagtccagagagagtgaaaaagatattccaagatatagcagtatcatcaagatcaacattcaactacatagcgtcagaaaataagtatctgctgaaccctacatgtttttcactggtagatggtatttcaaacatgttgaggtattttgccaagaataacccagatggtttttcgaacaacatttctgaaataatgggtaaaggattagttaagaagattaggtcaaagttcgagcaatatgccaactacaaattgtatagcgatgtgaaactagatgaatttgatcctaaactgccagatatagatttattcgcaatatcatatgagccatcactcgggtttcatgtttttgttggcgaagtgaaaaacaatttacccgccgtgtgggctaaagattatctcaaagctaatggagcaaagggctttatcacaaaagccatatcgcaaatagagaatataagtggcttcttgaaaacggataatgggttaaagtttattcataagttcgctgttgaagcatttccgagcctagacatagatcatcttttcccacatggaatatgcatcgttgttgatacaataataatctcttctcaaagcatagggatgtttttccccgaaaacactattccaattatagatggggatacattaggtcatattatagatgaaagtgatggcgatactaactatatcctgttccacctaagaggacatagtaagtttattgatgaatgtaccaagcgtgcaactgaggaaatatctgtcggtgattacaaaatagaatatgatataatttctctggataagttttacggcctcgctaataataaatttgtgtctgttggtgctattgaaaagctagagaaagaatctttggatttgggatatacaatggctggttcgctgagacacttgggtaatgaagagtatttcatgaatagcgaagactggccgcaaaacatatctctttttgttatccactaa

SEQ ID NO: 249919 - DNA, 573 bp, Klebsiella pneumoniae
atgaacaattgcgctgaaaatgaagcgttaaagacgaactctgatggtaacaatgtcatgcttattcgtagagtattgcagcaggcgactgatcattacccacaactgtctgcgctggggtttactctacagtatgcgaattgccactcctgcgacaacgtacaacaaggtaatgcccagttgctacgttttcacgctgaagcctattgcagaattggcgaatattcaaagatacgtattgaagcgggtaaaccgtcgcagcctactcttcttcgctggctgtgggaggcagaaagtacctcgacatgtcggatgatgatgctattcaatttgggtgtttgcagtcttccccgatatgactcttctgcatcggatgaaattcaggaagtaatgtcattgctggcggctgcatggcgtgaagtcgaaccggacggggagttaaaggaaataaaagtccatcggatagagagaaataagccagcagatttcgataagcgttatgctgagttacgagatacggcattgcaaatggcctcgccagttgcttttgccaagagttttccgacaacgtag

SEQ ID NO: 249920 - DNA, 1398 bp, Klebsiella pneumoniae
atgactcagttaatcgaaaatgttgatgtcgttgtaatcggcggtggtgttgtaggttgcgctatgtttcgtcgctttaccctgatgggggccagagtattactccttgaaaaaggcggtgatatcctctcaggagccagcaaagctaatagcgcaattcttcatactggctttgatgcgccgacaggaagccttgagctgcagtgtatgcaggccgggtaccgggaatatatggatatccaccataaaatgaatctgccgcttcttaaatccacggccattgttgtggcatggaatgaagagcagctggccgcattaccaggcattgttaagcaagctcatgataacggggtgctggatgtcgtccagattgatgctgaagaggtttatacgcgtgaacctaaccttgcaaaaggggccctcggcggcgtgtacgtacccggtgaatacgttattgatccctggagttcgcctcttgcctatgtcacacaggccgtccagcatggtggtaaatacagatttaactgtggtgtgactaaagcaacacgtaatgaagatgtgtgggagctcgataccagtgagggtatggtccatgctcgtcttgtgattaattgcgcgggtaatcatggcgatgtgatagacggactatggcgtcagcctgattacgaaattcgcccccgtaagggccagttcctagtttacgacaaagctgcagcgactcagatcaatgccattattctgccggttcccacgcccacaaccaaaggcgttctgctctgccggactatctttggcaacatgattctgggcccgacagctgaagaacagcaggatcgcgagcatgctgaggtgaacgaggaagtcctgaaaggcctcattgaaaaagggagcctgatgctaccctccctcaccaattattctgtaacagcgacatatgcgggacttcgaccggcaacagagaaaaaagaataccgtatttatgactatcctgacgatcgatggataagcgtgggaggtattcgttctaccggtctgactgcagccctggggattgctgcgcatgttgagcagctgtacagggagaatttcagcaaacttttcgaactgtctcctccagcggaactgacctggccgaaaatgcccatgctgtcagattatgaatcgcgtgatttctcctgcaaaggtaacggtggtgtcgtatgtcactgtgagcttgtcacccggcgcgaacttgaagcagtgtttgactcagctgttccaccggagtgtattggcggtttgcgtcgccgtacccgggtcatgatgggccggtgtaatggattcttctgtagcaataatgtcgcagagatcgtaggaactcgtcttgacaacaccctcgtggtcgggaaggtcgaatga

SEQ ID NO: 249921 - DNA, 1215 bp, Klebsiella pneumoniae
atgagccagatttacgaagtaatcatcatcggtgccggcccttcaggtcttgcagccgctcgttcattgctgaaaaaaggcgtgaaaaatatccttcttattgagcgtgagaaagacgctggcggtgtgccacgtcattgcaggcatcccacctttgggatccagacttttctgcgcccaatgaacggccatgtctgggcagacaagatcctgaagagagtggccggctattgtgaaattcgtacttcgacaaccgttaccagtatcaagaccggaggtgaaattgaaatctcctcagataacggtactgaaacgctaaaagcgaaacgagtcatcatcgctaccggagtacgtgaaaccccacgtcaccctcgcctggtgtcagggttaagacctcagggtgttctcacggccggcgcacttcagcaatttatctatcttcgcaagcttaaacccggtctcagcccggtaattgtcggctctgaattagtcagcttttctgcgatctggaccctcagaaatgcaggaattaagacgcttgctctgatcgacgagaacccccgaccgctggctttcagaccgagcgtgctttatgcaaaattactgggcgttgacgtacacctggggtctcacataaccagcattaacggtaaagagcgggttgaaagcgtggagttccgggatgcggaaggtaaggccaggaaaattgtctgtgacagtattatttttaccggtcgctttaccggtgagtacacactgatccgtaaaagccatctggcgttcgaaccggcatctggtcgccccttatttgaccagaatggccagtgttctgatcccgcatactttgtcgcaggtaacatgacccatccggcagatatgggtgatcagtgttaccaggaaggattgcgtgtgggacttaaggttgctgaatcactggccaaaggctctctcaggaccggaactgtacctgtcgtgcatgatgatgtatttaaaatcactgcacctaatatgatttgcctgtcgaaacctgccgataaagccacgctcaatgttcgagtaacgcggtactttaatggtgaaattgttgtgaagcgaggaaccgatatcctttataaaggcaggcatcgctgtttacccgaacgtcgtatcctgctcaagaatatcgatttaagcggggtaacgaaagatgacgaaattatcgtaacaaccgtctaa

SEQ ID NO: 249922 - DNA, 996 bp, Klebsiella pneumoniae
atgaaaacactgtctgatttttttagtgagaaaaatatagagagcactcaccaggagtcgcttgcatcagttattacgtccttcagcattgccggaaaacttattaataactatatcagtatcaaaggattgctcagggggatcgatgacccggtcagtttgaacgtacataatgaagaacagaccgatctggatatttttgccaacgcaaaagttcatgctgtactggcgctcaataaacacgtcgccggtattgtatctgaagaagacgacagtctcgttctctttaatgatgaacaggcctgcaacggcgactttattgtgttatttgatcccctggacggttcatcaaatattgatgtaaacgtttccgttggcactgtattttcggtatacaaacgcaccacagaaaccggaattccggttgaggaaaaagacttccttcagcccgggcggaaccaggtggccgcaggttatctcatttatggctcctctacgatgctggtattctccaccggtcatggcgtgcaggcgtttacctatgataacggcgttggcgaatttatctgctcacacagcggcctggagttgcctgacaatggatgtcagtattccgttaatgaaggaaattatgaagggttcagcgctggtatcaaatcttatattgcagactgcaggaaagacgatcctaccaccggcaggccttactcttctcggtatgtaggctcccttgtcgctgattttcatcgctgtctgtttaaaggcggtatttatttgtatccggcaacgcaaaaacatccttcgggtaaacttcggctactttacgaatgtaatcctatcgcttttcttgctgaacaggctggcggtatgtcggtaactgagcagcataacgttctggacatcattccaacggaaatacatcagcgttctccattcataaccggatcgtcacgaatggttcaggatgcaacactttcattcagtctgaacagataa

SEQ ID NO: 249923 - DNA, 357 bp, Klebsiella pneumoniae
atgcgtaagattttccttgcctgtccttacagccatgctgataaagaagtagtacacagtcgttttctggcatgtaacaaggttgctgctcagattgttgaagccggaaatgtcgtattcagtcaggtgagtatgtcacaccctatcaatcttgagctgcagaagacagaaaaggcaaacatcggtaaattatgggctccggtcgatgctgttttcctggatatgatgcaggaactgattattcttgatctggatggatgggataaaagcgcaggcattcagcgtgaaattgagttttataaatcacgggggcagcgagtcagcctctggtctgaagtcgaatcagagtttgcttaa

SEQ ID NO: 249924 - DNA, 1251 bp, Klebsiella pneumoniae
atgtcggaaattggtactattataatttatattatcatggctggagctctggttggtgcagctgcatcggtgcttcgtccggagagcgggctgggtaaagagttcgtgaatggtatacattctatcggacccgtatttttagcccaggccggcatcatggctgcaataccgataatttcatatgcgatcaccaacactattgggccacttttccagtcaatgggttcagacgtgtccatcgctgcattgtctgtcattgctgtggatatggggggttatcagcttgccgatgttattgcctcaaatcgcgatcaatggatcaccgcgatgttaatcggctatacatcgggcgcaagcattgtttatctgatcccggtcgggttaatcatgctcaatagacaggatcataaatatctggcgttaggagcaatggccggactggtaagtattccatttggtgtactgatatcgttaatgttcattaccctgaataatattccggtgcgagatattatttctacatcctcacctgcaaatcattatttaactatcgattttttgaatgccctgcagcttttagcgccgttatttgtattttgtttcttactggctatcgggctcaaatacaaaaccgactggatggtcaaatgcttccttgcttttggccggctatgtgatgcgttcatcaaacttgtactggccgcctgtatcgttcagcactttaccggagttttcaccaaaatcttcggtggatgggttttcgacccactgtttgctgatgagaaagaattatatcgtgccattgaaattgcaggttatatcggcattatgctggcaggcaccttcccggtatgttatttgttccagaaatattgccagcgcccgatgaagtttattggtagaaagctgaaactcaccgatactggcgcactcggaatcgttatggttctggcgaatatcattgctgtattccatttatttaaggatatgcgagcaagggataaggttctgtgcgtagcgtttggcatctgtgcccaggcgaccttaggcgatcaccttgcctttaccgccaatttccagccgacactggtcatcccgattatgctgggtaaattccttgccggcgttattgctataggcatagcgatttatatttctgttcctgccgctcaaagaatggaaaagctggaccaggagcgtgaagccgatcaggccgaccagagtattctctcggctgaatcagcacactga

SEQ ID NO: 249925 - DNA, 1443 bp, Klebsiella pneumoniae
atgcttaaccaacgttatgctgcaattgatcagggtacgacaggaacgcgtgtcgttgtgttcggagaggatggtaaacatttttctccggcagccatcgcgcacaaacagctgacaccgaatcctggctgggttgagcatgatccaatggaaatactgcggaatatccgatcctgcctgaaccattgtggtgtggttgatgccatcggccttgcgcatcagggcgaaagtatcgtggcatgggatgcaaagtccggccagccgctttataacgccatcatctggcaggaccaaagaacagaatctgtcattcgtaaaatgcgggcggaaggtgtggaagagctggttcgttcaaagacagggcttcctctggacacctatttttcagcgagcaaattcggctggataatgcgtaatgtgccgggcgcacaggaactgtctaagcgtgggcacctgcgtttaggaacgatggatgcttttttcatgttccatttgtgcggtacgcacgtcacggattacaactcagcatctcgtacgtcattatttaacatccacactctccagtgggatgcagagctctgcgaactgtttggtgtacctgtcgaggcacttcctgaagtccgcgacaatgtggggcattttggcgatgtcagttatgaaagcactactgcccccttgactgcatgcattgtggatcagtttgctggcacttacggccacggctgccgtgagccagggcaaatgaagatcacctttggtaccggggctttccttcagtctatcgccggaacggaagtgccggatgcaaaaggctcgggattactgccaacgctgtgctggaagatgccagatgaaaaaccggtgtatggcctcgatggcggcgtttataacgccgcatctgccatcaactgggccggcaaaatcggcctgttcacggaaattgaggaattcagtgattttccggatgaacccgctattgcaagaggactggcctttgttcctgcgctgtctggcctgggctgtccatactgggatcgctctgctgcaggcgtctgggcaggcctgtctcttgagacagaaagaaaagatatgcttcagtccatactcgaagggattgcagtacggtctgctgaagtcatatttgcgatggataaagtaaaacctattggcgaaacaatctcaatcgatggaggcttatcttcaaatatatatttcaaagagtttctcgcaaccttaatccagaagcgaattatatctccgacgaatagagaaataacggcacagggagtggctttacttgcacgcaagggtctggggctaaattacccaatgaaagtcagaaatcaaaatacaattactgaacctggaaagcgcgacctaagtccttattttgaaaaatataaagacattatatcgcgttcccgtaacctgcgcggtgagtaa

SEQ ID NO: 249926 - DNA, 765 bp, Klebsiella pneumoniae
atggattactcaaacggttcagaaagacgtaatattattcttgaaaaactcaaggtaagcggtcaggtcttcgttaatgagctggccgaagagtttgaggtttcccaggaaaccattcgcagggatctcaacaagctggaagagctgcgtcatatcaagaaaattcatggtggggctgtcagtgcgcagttcggatttgaacttgaatttaaccagcgcgcaaaactggctgaagaagataaaaagaatatcgccgctgctgcggccaaactcatcaagcccggtgattcccttttcatcgacttcggaactaccacgcttgagtttgcaaaaataatcagcaccatcccgcagctcacggtcttcactaattcaccggtaatagctaatctgttccacgagagtgcaacgactgatttgattcttattggtggacagtttggtctttcaaagatggaatgtgttggcccggtaacgttgcaggcgatcggttcattttatgcggattacgcgatcattggtgctggtgcagttagcccggaatcgggtgtgatggatcaggatatcaatgaagccgcagttgcccgtcagatgattaaacaaagcaataattctattgtgcttgctgatggacataaactcgacagcagagcaacatcgcatgttgcccactggaaagagattaattgcctggttacttctgatcctgaaaacaaattgaagaaactgacttttcccaagcatctgaggatcatagtggcctaa

SEQ ID NO: 249927 - DNA, 549 bp, Klebsiella pneumoniae
atggaaattgaatggggtaatagtcaaatggaaacttacaagcgagagatgcccagcccggagcgcatattattggagcagatctttagaaaaggaacttggccagcatttacttataaatgggcaaggaaagggctatgtacacctgaactaaaggatgcttttcatcttctatggatcgagcgtgggcatttcattcgttcacggctaaaaaacgatcgaaaattattgaaggtgcttcgtgcactgttacctgcgtatgaaggagaaggactgtggttgtatcgaggggaaaatctggatacctatcgttctggaaagctaggattttgttggactactgatgagaatgttgccattggatttgcgcgtgggtttaataacttcggatcgggtggcattttagtgaaagcatgggctccagcaagttctattctggcagggatgcatccacacagtgagaactggctgcgagagaaagaaatcactgtcgattggttttcaattgagaaattagcggttatccaggaatttaagtccaatgaataa

SEQ ID NO: 249928 - DNA, 2208 bp, Klebsiella pneumoniae
atgaagactgaaaatgtactttcccgtgccggatttgagggcccggtaatgaatgccgaagatgaccgatacgggtatacggtgatagcagaggggctggcccgcagcatttgcgccctagatgaaaatgttagcaccgtgattggtatcgaagggcagtgggggtccggcaaaaccagcctccttaatctcctgacggctcacctgaagacacaagtaccggcaaccacccagatcgtcgttttctctccctgggttaactcacccgatgaaagtccggtaagcgcgttaatgctgacaatcgcggccaggttggcaaaactggatactccggttatggcccaggctggcaagatagtgcccctagcagagaatatcctgaactacgcgcaacagacctcgcgccggcttgcacctgcggcccggttcgccggtaagtttgttccgggtctggaactggtagccgacgggatggacgcactctcggatagcagcctgagccgtcgggaacaaactgcggctgagttgcgggctgacattgaggataaaattgccgggctgggcgtcagctttatcgttgtgattgatgatttggatcgtctggagcctgcccaggcggttgaggtgctccgtatggtacggtcggtagctgacttctcgcgattccgctatgtcatgtgctacgaccgagacgtgctggcgcatgcggttgagtctggcctcggtgtgcagaacggcaaactctatctgcagaaaattatccccctgtcgttcagtcttccccggccggaaagttttgatttgcagagggaatttatagcgggtgtgatccgactatacacatctgtctaccagactgaacccgatgagacgcttcttcaggatctgagaaaggtcgcggatatttacggtgctgctctcagaacaccccgtgaggtacagctgacgcttaatgcgctggccttccgctacagtggcctcagggattatgtctggttaccggacctgtgcttcctgcagctcatgcggacagtcaacccggatctttatgactggacagagcactatctgaccgaaagggcagtggtagagtccggcgacggtatagtcagcgaggcggagcaggctgagatggtcagcagccttggtcagtacctttcactgtttcgatcatcagaagcaaaatccgtgtcatcactcagtcactgggttccgggtatatcaggttataaaacggagcacctgaagttgttcgttcaggcggacgatgacataaaagccgtcctgacggccaaccggcgtctcggcagtgccgcctattggcgatactatttcgcatattcttctccgcagaacgtactgccacctgactatttcagtgaactcttccataaggcaggaaatccggctgaacataccgctctggcagaagaactgctgagccgcatcaacagcaacaacatttcatccaggacctggtttgaacatatcctcagtcagctgacctggccggtgatcatcacacatagctctgcacaatgtgacggactactgcggttcttctttgagcacggcgatgaggtcattgcccgctatacagcccgtaatcactggttcgaaccccatactctagatatgaacagtgtagccacacggttgctacagagactatgtgaggataaatcctggtcggttatcgaaaatctgggtgcaatgctggacacggggaaatcgtggcgctggatagcggagtattttcgtcagttgctatggatgcacggcctcgccggcaacaggacagtgcatgaacagcaacatttattacctgctgaggcgctgaagtcattacagcacaggctggcgttacgtctgaactcccctgatattacccgtcagtttgtccgggaaggtcttatactgactcatatctgggcctggcgtgatatcagtggacttgaaagcgtaagggtatggtttcaggatgaaacttcagaagatgaaaaatttctgaagttgcttcttgcctttcgttacaggggagtcagctccgcaactgggttttacagggcgctgagcctgtctcagctcatggagtttatcggagaggctgaaaagataagctgcagactggagcaaatagagcaaagcggaaatcatgccgaattgttgtcacaggtgaaagaagcaatagctaggaatcatttctga

SEQ ID NO: 249929 - DNA, 588 bp, Klebsiella pneumoniae
atgccgagcacctgctgtgtccactcgaaagcaactgcttcgtgctggctgaggtgccgtgcgttgctggcggaaatctttaccatgccgtggctgaaagccattttcccggtggttctgcgcgggctagaccggaccgggcaaaaagcgacagcgctggcacaggatctgcgcccggtgatcccggccgtgacggaaaccatcgaagccggcatgctgagcctcgatatccgcaccgatggccagcatcccgacgaacgtcctggggcctggtacaacacgccgcgtctgtacctgctggttaccggccaggacctcgtggtaccgtacggctgggaaaccttctccgagctgctgggtctgctcacgctgcacgcccgtaatcctgaagccttgacgcccggctaccagggcgggcgcgtgatgttttccccgccaggaaacgtcacgccagagggattcttcggtatcgacgggttacgaatttttctgtccgcagaggaccttgagacgctgggcaaggagctaaccatgaagtgttatgaaggcttgctggcagaggccctgatcgggttgcgctgcctgtaa

SEQ ID NO: 249930 - DNA, 171 bp, Klebsiella pneumoniae
atgctcagccagcttaacctgcgtttgcaaaaaaagctgagcgaggcgctgaaaatgcacgccgatcgtgaaaataccttggtcaacgccctagccgaatgcttccttgatgacggcctgaaaactgctgctccaagcgacgggtatgttcagctggtcgccgatccgtag

SEQ ID NO: 249931 - DNA, 1023 bp, Klebsiella pneumoniae
atggataagagagtgatatttgcggttgccggctcgggcaagaccacgctgctgatacggcggttgagtgaggaccgacggacgctgttcctgaccttcaccgtgaataatgaaacgcatctgcgggcgcagattatcagacgttttggctttatcccggacgggatcagggtgatgacctggtttgaatttctgcacggtttttgcttccggcctttcctgcaggagcatctggcagcccgtggcctgagcttcgaccagcccccacccagaataccgcgcacgaatgcccggcattatcaggatcccgccggacggctgtatcatcggaggctcgcacacttgctgacagcccgcgggctgctgccggatatccgtacccggcttgcccgttactacgatgaactgcttgttgatgaagtccaggactttgccggacatgactttaattttctgctggagctctgccgtgcggaaatcactgtgctctgttgcggcgatttttatcaacatacctttgatacaagccatgacggcaacgttaattcaacgctgcacgatgacattacgcgatataaagcccgcttcgacgcagcaggtttcacggttgaccgggacacgctcaaccgaacatggcgttgctcggcttcagtttgcgagtttatcaccgggcaactgaacatccgtatcgctgcccatgggatacatgccaccctgattgaaacgatcacagatgcagagcgcacagccaccctgcacgccgataatacggtgattaagctcttctatcgtgaacatcaccgttacggctgctattccatgaactgggggggcagtaaaggactggatcattttcatgacgtctgcatcgtgatgggggccagccactggcaactcctgaaccgaaaggagctgggggctcttcctccttcgtcacgaaacaagctttacgtggcatgctcgcgggcgcgaggaaacatctattttgtctctgagactcatttacgcaggtttaggatctag

SEQ ID NO: 249932 - DNA, 1194 bp, Klebsiella pneumoniae
atgaatttagatgatttttctattctttgtaagaaggaattggatgggtactataagatggttgagtccgccgtatctgaagggagagttgttaataacggggagatagttgatcatgtctattatccaacgactatgttatgcgtggaatctgaaaggaaagttttttctgttgaattgcttggattaacaaagaaacgcaaatcattgagggtgaaaaaaagggataatatttccataaagcagctaacgttaattgacagaaaaaagaaagcggattctgctatgttcacttttggtggcaggggcggtatatctaatcttatgttgtcagatgcaggatcacaaaaatttcaaagttcacaaaatagcccgcttgcagaaaaatttagaacacgcatagagattggaggtgatttaactcatgtaatagggtttaatgaaaaatctacatcatgcatagtttctgagtgcatgctgagttatgtaaacaataatgtttataggttgagatacatccaccaattgatgatgtttaatgctgaattaagtgtcgaagaaatcattgatgagctggattctatgattaatagtgatggagataaagtttttggagtacactgcttctctgatgaaaaagaaatttcgtgggtgaaagcctcgtatttaatgaacttggtattaaatgataaaatacatgaaacaacaattggtgattatttaaatgagcattcagatatattgttaaatgcactgagttataagggtatagtttatgagccaactttggaatggctagagaaaacaaaagataatcctgattcttatatcaatccagatgcattgctacagagggtagataattattatgatatttgtgattttaaaaaaggacttaccaaaagaaaaagtttaactaaaggtgagaggcggcgcagacgctttgttgatgatgtaaatgaggggttggcgcaacttgataattatgaagagtattttaagtttacacaaaatgcacagcatgcattagatcgctttaatgtagaagtacacatgccccggaaaatattaataatcggaaatatagagaatgcgaaacaagatgaggtagagcaagccctacggggtagggctaacacattggttgttgattacgattctttagtatctagttatataggtgcaattaagtaa

SEQ ID NO: 249933 - DNA, 153 bp, Klebsiella pneumoniae
atggccagacgcaatctcaacgacttattctctttcgttaccgtggtgcgtgagggcagctttacgcgcgctgccgcccagctcggcgtgacccagcccgcactgagcaggcgatttccgggcaggaagagcggatgcaaatccgcctgctga

SEQ ID NO: 249934 - DNA, 378 bp, Klebsiella pneumoniae
atgatttttaaaacagcggtagccactcttttcacactctccgggctcgcatcagccctggcagcaacgcctgcttattacatcgcagagtttcaggcgaccgatcttgacgctatcaaaccgtacagcgctcaggttgaatccaccttcaggccttttggtggacgcttcatcgtcagaggaggtgaacctgatgttaaagaaggttttggagcacagggcaggctggttgtaatcaagtttgagagtctcaaaaatgcccagggctggtataactcggccgcgtaccagaagatcattcctatccgacaccgtgccggcaattcgcgaacctatatcgtagaaggattgccggaactggctcctgttacaccatag

SEQ ID NO: 249935 - DNA, 1107 bp, Klebsiella pneumoniae
atgaaaaacgcaccccttacgcttttatccccatataacatcggggaattaacactaaaaaatcgaatggtaatggccccaatgacccgtagtcgggcagttaacggtaatgtacctaaccctctggctcctgtttactatgctcagcgggcgcaggcagggttgataatatctgaagctacgcaggttagccgtcaaggtaccggatatataagaacaccgggaatatattccctcgctcaggttgaggcatggcgtcgcgtaacagatgcagttcatgaagccgggggaattatttttgcgcaactgtggcatgtcggacgcgtttcgcatcctgagttccatgacggtgaccttccggttgccccatctgcaattaatgcagaggcagaggtttttacgtctaatggaatagcacaaactcctgtccctcgcgcgcttttaacaagtgaaatcgccgatgtcgtttcacagtttcgtcagggtgctgaaaaggctgctgaagccggtttcgatggagtagaaatacacggtagttcaggatacctccttgaccagttccttcgtgacggttctaacaaccgagaagaccattatggagggactattataaaccgtgcacgttttcctctggaggtcgtcagtgcagtgagcgaagtgctcggcgccgatcgcgttggcttcagggttggtccaaacatgtcgctacatggtatgtctgattcttcgccggttgaaacattcagttatttagcgactcaactcgacgctattggcatcgcctaccttcacgtaaccgaaggtattgccgggcccgatgctccggtcgcaggttcacagcggattgcaccttatcttcgccagtgtttctcgcgaacttttattctgaatggtggatatgatgctcagaccggtgaggatgcaattaacaatggcgaggccgatctcatcgcctatggtgttccatttattgccaatcccgatttacccggaagatttgcgtgcggcagcgatctcaacgttccggaccatgcaaccttctatgcgccgggacagaacgatgcggtgggttacactgattatcccgcactaaacaataaaagttag

SEQ ID NO: 249936 - DNA, 1884 bp, Klebsiella pneumoniae
atgagcggtaaataccataatctgataacctctataatttctcatattggcgggattgggaatgtaaaagatttaacccattgccaaactcggttgagatttgttttggttgataataatattgacattgctaaattgaaatcccttgaaggggtaatcaatgtcattatgagtggaggtcagtgccaggtggttgtcggcactcatgttaaggatgtttttgatgcatttaatgacgcgtacccagcacgcagctccagcagttctaatatatccacatcgaagaatagaaaaataagtttaagttcagttatggactttatctctggaacattcaaccctctcatacccgctatttccggggcagggatggtaaaagcattgctggctttacttgtcgtgtttaaccttattggtaaggaagagaagacctatgtagttataaactttatgtctgacgctgttttttactttttgccaattttacttgcctataatgcggcatcaaaattaaagtgcaatccaatacttgccgcagtgcttggtggtattttacttcatcctcaatttgtccagttacgattgacaggcgatccaatagagatttttgggttgcctgttaggctcgtaaactatggttcctctgttgttccaattttactcattgtttggctacagtcatttgttgaacgttttttgaatacaatagtgcctaatgccatcaagattatctttgtccctatgttgactctgatgtttgtcggtattatagggttaacgctgcttggtccactgggagggtatattggagattatattgcattagcttttgtgggtttacaatctgtcggtagttggacagtggttttccttgtagcaacactttggccaatattagttatgtttggcattcattttagcattacgccactttctattgcacaacttacaacattaaaagtcgaaaatattattggtccaggtgcgatgatagccaatatcagtcaggccgttgctgcgctggttgttggttttagaactcaggataatactactcgtcaaatcgcacgttcttcaggaatcactgcactaatggggattacagagcctgcactctatggtgtaaatttaccaaaaaaatacccgttaatcgcttgtatgacaggagccgcttgcggtggtttatatgccgggattacagatgtgtatcgttatgcggtgggatcatcgggacttccagccctgcctttatatcttggcgagaacctgtggaacatctttaatattcttattgcattacttatttccattatagtaacggctatccttacctatattcttagtctgaaatatgagccggcttcagtgtgtgccgataaagatgaagcacctgcaaaaccgcacatttatgcagaaaagaatactatagaagggataatgaatccaataaaagggaatgtaatcccattagaagaagtagaggatgaagttttctcttccggtgcccttggaaaaggattagctatcgttcctgttgaaggaaaagtactggcaccatttgatggtaccgttgtttcagtgttcccgactttacatgctatctgtcttgagtcgaataatggtgttgaattattgatccatgtgggtattgataccgtgtcattgaaaggggcgccctttaagtcttacattgaaaaaggacagaaggtgacttcaggacaactcatgattgaatttgatattggggcgattagcgcagccggtctttctctgcagacccctgttattattacaaatcttgaagaaacttcagagcttgaatatacacaagaccaacacaaggtaattgacgccacgaaaaaaataatgagcgtcaagttataa

SEQ ID NO: 249937 - DNA, 1200 bp, Klebsiella pneumoniae
gtgcttgttcgctctgaatcgctcctggttcagactgaatctgtcaagactgctgcaaagtcacatttgaatataggagacagtccatgtactaatgaaaatatcctacatcttcgggttgtagtatggccctatccgttgattaaagatgttggctacatcataaaaggagaattagcctgtagtgctctgtgggggagtttacgtcccaccttaagtctggaacattttgataaaaaatggacttcgcgggaaggagtgtggctttttggtattaagcttatggatgatatatccgtcaatggatatatttctgaaggtattatggtgaccctatcaccatttgtcttcagacgattcgaaactgatatgtattcaaaaaactttagcgctgttgtcggaaatagtaagcatgacaggcattacttcaatataggacctgatgctcctcttcttgatcggcatgatagcgttccactaaggtttagagtgtttagggcatgtagcctacattatgatctctgtgttgcaggaggtgggtattttacggggatattttcagagcactggagcatacaaatgttattagtaacagtgtcactactttccggtttaatgatttatattatcattatgaacagagcagaactcaatagttcactatctgcaaggtttgtaaaggctttgaaaaatgaagccctgtcgctggtctatcaacctatttacagaattgaagacggacagatctgcggatttgaggccttgctcagatggaaagatgaaagactcgggaatattagccctgaagtatttataccgctttctgaaagggaagggttgcaggaggatgtgactttattcgtcattaaccatgctatccgagaatttatccatactgctattcagaatgaaatatttttgagcgtaaacattaatccaagcgatcttgattcagaaaaattcagggataaactactaggattaatttctgaatataacatcccatataaaacaatccttcttgaaattacggagcgtcaaggaggggattttgaaggtatgaaaattcacattgataaatataaaaatcatggtgtcaggtttgccatcgatgactttgggacaggatattctaatcttaatctggtaactgcgcttgatgtagatgaaataaaaatagacaaatcgctaactaaatag

SEQ ID NO: 249938 - DNA, 1068 bp, Klebsiella pneumoniae
atgggtatcattatttgcctgcggttcggtatccgaatcggaatcggagtcagagtcgctgtcggaatccgaatcgctgtcggagtcagagtcgctgtccgaatcggagtcactgtcagcatccgagtcgctgtcagagtccgagtcgctgtccgagtccgagtcgctgtccgagtccgagtcgctgtcggagtcggagtcgctgtccgagtccgaatcgctgtccgaatcggaatcgctgtcggaatccgaatcactgtccgagtcggagtcgctgtcagaatccgaatcgctgtcggaatccgaatcgctgtccgaatcggagtcagagtcgctgtcggagtccgaatcgctgtcgctgtcggagtccgagtcgctgtcggaatcggagtcggagtcggagtccgagtcgctgtcagagtcggaatcgctgtccgagtcggagtcagaatccgagtcactgtccgaatccgaatcactgtcggagtccgaatcgctgtcagagtcggaatcactgtccgagtcagagtcgctgtccgaatcggagtcgctgtcggagtcggaatccgaatcactgtcgctgtcggaatccgaatcgctgtcagaatccgaatcgctgtcagaatccgagtcactgtccgaatccgaatcactgtcggagtcggaatcgctgtcggaatccgaatcactgtcgctgtcggaatcgctgtccgaatcggagtcactgtcggagtcggagtcgctgtcagagtccgagtcgctgtcggaatcggaatcactgtcagaatccgaatcgctgtccgagtcagagtcgctgtcagagtccgaatcactgtcggaatcggagtcgctgtcggagtccgaatcgctgtcagcatccgaatcgctgtccgagtcagagtcgctgtcagagtcggaatcactgtccgaatcggagtcgctgtcagagtccgagtcgctgtcagagtccgaatcactgtcggaatccgaatcactgtcggagtcgctgtcagagtcagagtcgctgtcggaatcgctgtccgagtcagagtcgctgtcggagtctga

SEQ ID NO: 249939 - DNA, 606 bp, Klebsiella pneumoniae
gtgtttgatgggaaatatgtaaaaatacccgcaggtacttatgttaatattcctggtgaaacgttatttcctgaaagcataattcgaataaaaagaggaggtaaaatatctcaatttttattactaaatagtaattgtacatacccatccgtttgtgtcaatcgaagagatgggatattatttgatgctcatgattatatggttttttatactggatgtgcccgtgatgatagattagcctctaaaaaattaagcgttttttataatatactattttacagtaagacatttgatacaatattgcggcttgatgaattccctgattctgcattgcagggcgaaagtatcaatgttttcaaaacatctattgaaaaagttaaagattactatatcgattatagtatcgagtcggcatttaagtttacaggtccagatcaggttatcgttgttgatgaaaaaactggaaaacctcaggagaaggttcaggaaacagatgataatggaaatcctgtcatgaaaaatggtgaaccggttatgattgatgatcccgatggattccaacctgtcattttaaaaagacttcctgaagttactattgccaattaa

SEQ ID NO: 249940 - DNA, 156 bp, Klebsiella pneumoniae
atgtggctgattggcctgttgcaaaagcagcctcagcactatcgcctggatggcccaacgcgcctcaagtttacgcaggaccttgccgagcgtaaaacgcggatggagtgggtgcgccagtttatgcgccagctcgaagagaacgccgccgcctga

SEQ ID NO: 249941 - DNA, 2991 bp, Klebsiella pneumoniae
atgagtaataattttggtaattattacattgaaattgacgctgatgtcttaccgttcctcaaggggatggacaaggtacagagcactcttgatgctctttcggctgattcgaaaaatggcagtaaagcctttgataatttgagctcgtccgcatcgagtgccggaacctcatttaatgaacttgctggctatgcccgctcaatggatggctctctaaaatcgcttaacaccaatgtgaacgcgatcaccagggccatgcaaaatgccgggacgagtaccgcaggcgtaggttcggaattcaccagagcggaagcgatacttgaaagccttggcaaccagttggccgtcctagatgaggcgcaggaaaatggtgcccgtagtgctgctgtgctagcggcgcagttgcgtgccggctcgaaagccactgaggaagaaaagcagaagattggcgaattgactggtcggctttacgacatgaagactggcgtcgataccggggcgaaaagtcatggcacttggaaaaacagcgtgcagcaggctggttatcaggtgcaggattttatcattcaggtgcaaggtgggcagtcggctttagttgcttttgcccagcagggatcgcaattagctggcgcatttggtgctggtggcgcagtagttggggctgtgattgccctcagttcggttgtcgctggcgcgcttattacgtcgcttaatggcggaaaaaacgccatggattcactgaaagatgctgccgaaacgatggataaggtgatcaccatatccaaccagggggtggcggcgctgtctgataaatatgccgtgctggcacgtaccaacgctgatgtagcaacaattcttcgtaaccaagccctcttggagtacaacaatgcgattgctaaaattccaaaagcaattagtgacgcatccaactctttcgtcactctcggtgagcgggccgttgccgcgctgggtggtgcctctcccagcattaaaaagttcaatgatgagcttgcggcgcttgaggtaactgctggtgactggggggatgctattcagcaagccaacagtaaaggtcaacatgcctctggtattgttagctcactttctgccactgttggatctctttcttctcggttgagcattagtcggcaggcggcatttgatttagctaaacaactttcagacctgagcaacaacccaacgccagaagccttacagaaggtcattgtcagccttcaaagcatgaggacttcaaccaaagagggacaggacgcagtagcagggctggttggcactcttaatgacttgtggattgccgctctgaatgccaaacaaagtatcgatagtgtatctaaggctactgataacctcacggcaggacagaagaatctaatccagcaatctgagagaagcctggctctgtccaagcttcagggggaggctcgcgcacggcttcaggctcagtttgctgcggaagatgccgggtttgcgaaagacgacccacacacgaagcaaatggagaatgacgccgcggcgacatatcgtaacacccaggctcagaaggatctcaagtcacagcagacagcgggtgctacagcagcagagtctatcgcccagaagctggctaatttgaagcagcaggcagagttagccgctggctcaacacaggagcttagccgtgaatcagcgatgctgcgggccgaacaatcccttggtaaatcagcatcagccgatcagatacagcaggccagaacctacgctgccgccgtttgggatactacggcagcattgaaggcgcgcaatgccgtaccagagcttaaagagaacgcggactatacagcccagaaatcgcagcttgagatgattaagggcgccaaagacgctcagggaaatttgatcatctcgcagaagcaatacaaccaggcttctgagcaattagagcagcagcaccaggttaatctggcgaaaattcgagccgggcaggttgtgacacctcagcagcaggcccagggggaagttgacccggtacagcggcttaccaaccagcacgcccaagagctggcgcttatccaacagtttgaaacccaaaaggggcagctcactgctaacggtcttgcgttgatgaacgcagccaatacgcaatatgagcaggcgaggattgccgctcagtgggagatattccgcaaccaaagcacaacaaatgagttgatggcatcggcggtcgatgggttcgccagtcaggctgcaaactcgttaacaggcctgattgatggtacacaaagcgcttcggaagcgttcagaaatctggggagcgcgatcgctaatagtgtcgttcaggcgttggtagaggtggggatccagtacctgaaaaatgccgcgatggcgatgattgccgataagatgacatctagctcatcacagcaggccggtgcgcaaaccgctgctgcgtgggctcctgcagcagccgcagcctctatcgccacattcggtggggctgccattgccggtattgccggcatggtagctgcgttcgccatcggcgccgccctagctggcaagcgcaaaaatggcggtacggtaggtgctggtggggcgtaccaggttggcgaagggaatatgcctgaactcctgcagaccaaaaacgggttaattatgattcctggtgaccgaggccgggtattcagcaataaggatgttaccggcagttctccgacgatccagaaggcgtctacaggtaaggaatatctacctgcttcatcagcatcatccagtcaatcgggagatagctctaaacggtcgatacaggtaaatatccagctgatagatcagaccaccggcaaccagcacaacatcactggtgttgaggcagtccagcagggcgatgttgttacagtctctgggttccttgaggatatggatcgcggagggccaatgtcatcaggaatggaaagcctctacgggcttaggcgccgggctaatggctcattctaa

SEQ ID NO: 249942 - DNA, 1140 bp, Klebsiella pneumoniae
atgaaaaagacacttttagcgtgtgttattgccaccagcctcttggctggatgcggcccgaaggagctaactcctgagcaaaaacaggaggttggtaatcttcggagtgaactggctcagacagaaaaagaaatagccgaggcgacagcgttacaggagcagtattctggtggattaatcaaaaatctaacagttgctagacttgaagtcttgggaacaaacaaggctttgttagagcagcgtattaatgccatagagtcgggggctaaaattgaagtatcaataagcagtgtaaaaccaaaccctgaagcagctacggctttaaaagcagaaattgataacctggacaaccagattgctgatgcaaaaaaagaagcaagccaatataccggtggtctactgcaggcgctgaaattgtctgctattgcgacgcaggaacaaacgagggcgatgctccagcaacgatatctttctgctacgtatggcttagctgaagtgaaagtacctagtgagcaagcaagcgaagtaacaacagagaaacaaacagataaagtagtacctaatccctccagcacgcccttactcccagcaggtgaggggccatttggtttagaagtcggtttatctaagaaaaatattgaagatatgatcggagaagaacttaagctaatggcgaataatgtaaatctttatactgctaattctttaccaaaaaataatgccagttttgaagcatacggattgttaatttcaccaaccgtaggtctatgccagataagagctcttggaaaagatattgatacagatagttatggctttgctattaaatcaagatttaaagagctcagtgaatcactatcttctatctatggtaaagcagcgcaaaatgattttctcctttctggttcaatatggaaagaccctagagactggatgatgggattgtataaacatgagcgatatttgtcagcagaatggaaagggacagcagatgccccactaaagaataaactaagttctgtatctatcgaggctagagcaaatagttctgataaagggtacattttccttcagtataattttaataactataatgtctgcgaaacagaaattgaagcgtcgaaaaaaagctcgctctaa

SEQ ID NO: 249943 - DNA, 906 bp, Klebsiella pneumoniae
atgccaaactggaatcaagtgctgggtgagatgacaattcttagccagcgcagcccttttgatgttgttaggaagaaatacatttctcaaatgtcagagcatacagggcgtaatgttattgcttactactctggttttttacaaaaaaatactcaatctatcagtcacttaatttcaatgactgatgatgataaaaatggatttatgactgctattaatggcatggatacaagcaaggggcttgatctattgatccatactcccggtggggaaattgcagctcttgaatcattgggtcaataccttagggctaaatttggtactaacatacgagcttttgtaccgatgatagcaatgtctgctggaaccatgcttgcttgttgcgccaacgaaattttcatgggtaagcaatcgaatatcggccctttcgatcctcagatggggggtatacctgcacatggtattttggaagaggtggagaaggcgaaacaggagattctcgctaatccaggtactgtggcattttggcaattcaatttgcaaaaattgcatccaacctttattggtgattgcgagaaggctatccaatgggcttctgaaatagtctctgattggttgatttcaggtatgtttgcgggtgaagttgatgctgaggataaagccaattcaatttgtcgccagttgaacaatcactccacaacttatgctcattctcgtcatatacatatggataaagcacgagatattggtctgaaaatatcctctctcgaagatgaccaagtacttcaagatcttgtgttgactattcatcatagctttatgcatacttttgggagtagtactgcggctaaaatcattgagaatcataatggtagctcaatggtttggaacgctgcggatatgtaa

SEQ ID NO: 249944 - DNA, 204 bp, Klebsiella pneumoniae; identical to SEQ ID NO: 205082

SEQ ID NO: 249945 - DNA, 627 bp, Klebsiella pneumoniae
gtgagcaatatttacccattcccgaaaatgtcgggaaatgccgaaccattccgtgcagagcctacgcctgcaggggtgaagatcaccagctctggtagcgatggtcgtgaaacagttcggcttattggctatgacgaagccttgaatagtctggatgcgggagattatgacgactccagcgcgggttatgacattcaccttgccgtagcagagggcggaaactgcggatatttcgactttaccgcgcaacacaacgtcactatgtggcgctggctgattgctgcgacgttcgtttctgaaatgaagcgcgagaacggcaccaccatggttactgaaccggacggctccgcgtcacaggtagcgatttactccaatggtaaagcgggaattgtggtttatccattcgctgaacggctggcgatggcgaacaacattgagggtgctcttatcgagcgttacggcactgaacagggtacggaaaacgccattgtgttttatcagtccatgctggatgtggaagccggagaactcacgcccgccgggcgcgagatactggcagagctacatgatggttttattgatggcatagaacaaaacggccttcccgaagtgccggtggcgcactaa

SEQ ID NO: 249946 - DNA, 198 bp, Klebsiella pneumoniae
atgagccgtgaaatcacccttgagcaagccgctgagcgtgctcatcaggcagagatcatctgtcgtcttgttgaagattctcctcatcatctcgttgatagcgaagtatcagcgatcgccactctgttaaagcgcctttcaggtgatgtagcggcatggctgatttcagaactcgcagaaagggagggcaaggcatga

SEQ ID NO: 249947 - DNA, 264 bp, Klebsiella pneumoniae
atgaatataaacgctatataccgccatcctgccgagcttgaggccgaggcgatgttatcccgtgggcaaccttatcctgaagattttacgctggcagagcgtaccgtggaacgcatgacccgcgcccgtaatggtctggctgtcgttatgaccgatttatccccacgccttgacgatgagcaagcggccatcgtgcattgctggctggataaagtcctggcgattgtcgatatggcccgaattgatgcggaggccagcgtatga

SEQ ID NO: 249948 - DNA, 732 bp, Klebsiella pneumoniae
atgattaccgccgcccagggtaaaagcctctctctggctggcctgatgtatacaaaagttaatgctctgctggtcattcgccaccgcaggaaccggtcaaaacctgtcactttgcgggccactgatagtggcgtacaaaatgcttggcggaatttcgtgatcagtaatagcgatgcctttcacacctgcagtaaagagtttttcgagtccataaaaaaggacttgatgttctacgtcatcccggtctatggttatagcgcaccagcaaaatctggtgccgggattggcgtcctgataactctgaaggcgacacatgacgcgccaagcgtctttttttgtgccgttagtctgactcaccctttttttgagcgttggtatataatccagcgcctctcaagagcaatggtggctcaggcaggggcttcttcggaagcgccggtatccttcagagccggttacgccaaccctgtctgggctaccaccagtgaaattggcgtttccggtggtggcgttacccgctatctgaaggaggctgccgccatggctactacccctacccaaaatccgcaatttgtctggattatcgccgctgttcgccgcgatatgccgacaattaaaccccaactttaccatgtcgccgcaccttctgagcgcgaagcccgccgatctctggtacgcgatcacgtctgctttttcgctggccgtatccgtctggaggtggctcatgcttaa

SEQ ID NO: 249949 - DNA, 204 bp, Klebsiella pneumoniae
atgaacgaaagaaaaagacttatccgcttacccgaagtgttaaacaagactggtttttgtaaagcgtggatctatcggctgattagccggggtgatttcccttctccgatcaagactggtgaaagaactatcgcatttgttgaaagtgaagttgacgaatggattgatgaaaagattttttattcgcgtaatcaagcggcgtaa

SEQ ID NO: 249950 - DNA, 195 bp, Klebsiella pneumoniae
atgactctggtaatcaccgatggagaattttggtgctggcgtccctgtaatcgactgtttaatcatttgattattaaatatattaattatttgtgttttacatttaggtgcaatgaagggataaaaaaaatattgtggctaaaaaataagcacattttgaatgtcatgactagcggtgaggagttgaactcatga

SEQ ID NO: 249951 - DNA, 777 bp, Klebsiella pneumoniae
ttggtggctcccggagccacaggtaagagcttctgggcgctggaagccgcaatgaccatcgcgtgcagcgtcgcgggtggtgatcttttagggctttccccggccagtactggccgcgtggtctattgcgccggagaagacccggcagtcgcactggtgcgccgtattcattccattggccagcacctgaaccagcagtcacgcgacgccatcgcgcagaacctcacccttgagccgatcatgggtaagcgcttgaacgtgatggatgagcggcaccttgcccgcgtcattgaattttgcgccggtgcccggttgatcgtactggataccctgagccgcattcatgacagggacgagaacagcaatggcgacatggcaaggcttgtcgccacgctggagcatattgcggccagcaccggggcgtcagttctgtatctgcatcatgtcagcaagggcagtgcccgcgaggggcagacggatcaacagcaggcggcacgaggtgcatccgctctaatcgacaatgcccgctggtgtggctatgtcgccagaatgaccgaggctgaggccgaacgcctcagtgatcgcatatatgaccgacagcctatcggggaaaaccgccggaagttctttgttcgtttcggcgttagcaaacagaactacgccgagattgacgctgatcgttggtatcagcgtcatgacggcggcgtgttgctgccggtggagttgttggacgccaagcaggacagcggaaaggggcgtcaacgtgagcaagcatga

SEQ ID NO: 249952 - DNA, 909 bp, Klebsiella pneumoniae
atgtttgaaaagttgtttgatgtcttttccagacgagataaagacagcacaacggttaaagttaaaccattgacaaaagagttcaggaatcgtgtattaatgcttttacgtgatgagcttaaatatgatttcaccccgtttcttggtgaactccatcagcaagcagcttatctttatggaaaattcggtctatctgaatcatcttcgcgttcctcaccagaaaatgatctggttaactttttccttacgtgcccggatgagaattgtttagatttgatagaactgattttccgttcaaatctgcgcggaatctcttggccacacaatccctttatccctgccatcaaccagtttttcagtattgatgatcttccctatcacctgactaactattcaatcgaagaatacgaaaccatattccatggcacccctaccacggcgagacgtatcgctgaatatccaacgattatacgtaaagacagcgaactaattcataagaaggctatggagcctactcttcgtctgctggatgcatcaatattcaaaaatgccaatgacgaatttctaaaagctttagaagatcacaggaaaggagactatcgagactgtctaactaaatgtggcagtgcttttgaaagcgtaatgaaggttctatgtgagaaaaactccttaccattcaaagcgacagatacagcgtcaaccttactaaaaacgttgttagcaaatgggaaattggatcagttttgggaacaaccattaattttgattgcaactttaagaaatcgtttaagttcatcacatggcgccggaacccaagagaagataatacctgagcatgtagctacgtatgcaattaactctaccgcttccgccatactgctcttatgctccacttttagatggcaataa

SEQ ID NO: 249953 - DNA, 165 bp, Klebsiella pneumoniae; identical to SEQ ID NO: 39929

SEQ ID NO: 249954 - DNA, 195 bp, Klebsiella pneumoniae
atggctactatcccaacccaaaatccgcaatttatctggattatcgccgctgttcgccgcgattgtccgaccattaccgccaaaatccatcatattgctgcaaattctgagcgtgaagcacgccgagagctgttacgtgatcacgtctgtttctttgctggccgcctgctggctcagggggtgcggaatgtttaa

SEQ ID NO: 249955 - DNA, 654 bp, Klebsiella pneumoniae
gtgaaaagctacttaaatactttagaagagaccatcctccgaatttcaaaagacgcagttgatattaactcagggggcggtgatctcgctttaagcgttaaagcaataacctctttgaaggatgattatgagacacctgttttgtatgaaatccctgaccagtactcggttatttttagggaaattgctgtttttaagggcacggagcaggccattgcattcgctgaaaaacatggtgtaaagctacctgatgaggatgtgaaaatttggtctgctggaataatgctagaacatcaaggacaaacagaactagcacaaactatgtacgacgctgtttatgccaataatttgaggaggaaattgtattaccgtatcgaacctaaattaaaagataagtttgttaaggcgaatcttcaggagattgccaagaaaacgcgaaatccacatcgtgattcagcgttaaaaatagccaaagcaacttggcaaaagtatccaggtgctagccttggccaaatgtgtgagaaaattcggagttatttcaataatgaaattagcatcgatactttgaaaagagggattaaaagtgcagggattcgcccgaaatctccgaaagaaagaaaatctttttctctagtcatccctccagaagcataa

SEQ ID NO: 249956 - DNA, 234 bp, Klebsiella pneumoniae
atgaaagataaaagtttccctgtagaactcaagtgtttattttgtgattgccctttagaaggagatactacaaaagagtatgtttctggggatatgcttgaatgtcaaaattgccatgaacttaatgattatgatgccttaatcgacgtcgcagccgaagaaggtaaagggcttgcaactgaatatgtaaacaaagagatggaaaagattctgaagggtctattcaaaaagtaa

SEQ ID NO: 249957 - DNA, 318 bp, Klebsiella pneumoniae
ttgcagggtaaagcactccaggattttgttatcgacaaaattgatgacctgaaaggtcaggacatcgttgccattgatgtacatggcaaatccagcatcaccgattgcatgattatctgcaccggcacctccacgcgtcatgtgatgtccatcgccgaccacgtggttcaggaatcccgcgccgccggcttgctgcccctgggcgttgaaggggaagccgccgccgactggatcgtcgtcgacctcggcgacgtgatggttcacatcatgcaggaagagagccgtcgtctgtacgagctggaaaaactctggagttaa

SEQ ID NO: 249958 - DNA, 606 bp, Klebsiella pneumoniae
gtggtgttgccgggtggcggctgcgccttacccggcctggaggatccactcacaggctcacaccccgtaggcccgtgcaagcgcagcgccgccgggcaagatatcaggcacggtatccgtggtgttgccgggtggcggctgcgccttacccggcctacgttcttacgacctgtcgttcatttattcaccattgttgctgaaactgccggtgctggcggcctcaaaatcgctgagacgttcccggaaggccggggcagcccgcatggatgcgggctgagggccgtgttttgcacggacgctgcctcggcccgacccgaagcctgcagggataagtcgaaggtaccgcgcagcggcgattttgctggccggagcccgggggtacagggggcggcggcgactggccgccccctgtgcgctccctgcgccataagggacataacgcagaagactaaccgggagcgcaatctgcccggaattaacatagaagttgtagccctgccaggcgcagtgcgaacaaggacatttccggttgtgccgttattttgccgggtggcggctgcgccttacccggcctacaggatccactcacaggatcacaccccgtag

SEQ ID NO: 249959 - DNA, 1338 bp, Klebsiella pneumoniae
atgagtgcatatgatatatttcagaagcatttccaattatccaacttgaaaagaatttacaaagaggtggttttgttatctgcggcaacaggtatcgataacatgtcgcatgaagtcttttggcgctttcatgataacgaaatagaaacaattagaagaaagtgtttggctggcacttatcgcttcaataaatacaaactaaagcttataagcaaaggtaaaggaaaggctccgcgagaaatttcaatacctacaatcagagaccgtatcgcattaagagctatttgtgattttttgcaagaggtttacgaatctgatttaagttttgaattacctcagaacatggtggttagagttaataatattattatgagagaacagtataattattttatgaaatttgatgtagcaaatttttatccttcaatacgacataataatttaatatcaaggctcagagcaaaaattagagatgaaaagatattatctctaataagtaaagccattagctcaccaacggtttctaaacctaatgcaagtgacaaacctaatgaatgtggtgtgcctcaaggattatcaatatcaaatatattagcagcaatatatttgatgaatattgataagcacttttcatcaagagaaggtatttcatactttcgatatgttgacgaccttatgatcctttgctgttcagataaggcagaatctttgatagaaagtgttcttctaaagttcagaaggttagggctaaaaatttatgatcctattaagaacccagagaaatctagtatgggtttaataagtgaaagcaagtttggttacttggggtattattttagcgagggaggtaaggtttcagcacgtgatggttctgttgataatttacgacaatctttattatcgatatttacaggatttaaacactctagttttaaaagtcaggaatttttagcatggcgtataaacctaaggattactggttgtgtatttcaatcaaaatcaaagggatggttgtactttttttcagaaattaatgatataacgttgcttcattctctagatgatttcattgccaggctctgtaaacgatacaatgttagtttacaattaaagtcatttgtacgagctcattatcaaattaaacataaaagacgtgagacgaaatatgttcctaactttgataaatatactctagaacaaaaaatacatgtattaaatcattactttaataaaagcaccgaaaaccttacggatgaagaaattgaatataatttcaataaaagaatagctaaacaagttaaggatattgaaacagatgttaaagatgctggttattaa

SEQ ID NO: 249960 - DNA, 330 bp, Klebsiella pneumoniae
atgtctgcacaacccgtagatctccaaattttcggccgttcactgcgagtgaattgcccgcctgaacaaagggatgccctgaatcaggcagctgaagaccttaatcagcggttgcaagatttaaaagaacgcactagagtcacaaatactgagcagctggtcttcatcgccgcgttgaacatcagctatgagttgactcaggaaaaaacgaagacccgcgactacgcttccagtatggagcagcgcattcgcatgcttcagcagaccatcgagcaagcattgcttgagcaaggtcgcataagcgaaagaccagggtcgaagtttgaataa

SEQ ID NO: 249961 - DNA, 357 bp, Klebsiella pneumoniae
atggcagaagaaacgattttcagcaaaatcattcgccgggagatcccgtcggatatggtttatcaggatgagcttgtgaccgcttttcgcgacatctccccgcaggcgcccacccacattctgattgtcccgaacgttctgattcctaccgtaaatgacgttaccactgaacatgaactggccctgggccggatgatgaccgtcgcggcgaagattgcccgcgaagaaggcctcgccgacgatggctaccggttgatcgtcaactgcaaccgtcacggcggccaggaagtttaccatatccatatgcatctgctgggcggtcgtccgctgggtccgatgctggcgcacaaaggctaa

SEQ ID NO: 249962 - DNA, 738 bp, Klebsiella pneumoniae
atgggcaatataaatcttcatagtttttttaaaaaagagacattaatagttgcactggctactgcactttgctacacgggggcatatatatatgaaaggggattttctgtttactttggcatccctacagaattaatctctgtaacaccgggtagcattatcactactgtttctcttttccttgcatttattatggctctatatatgatgtcgaccatccctattgtgatatctcatagcaaaaaaataaaaaacaagtatatcataaccacattaagtttcgctccagtgtggatactattcaatcttattttcttcttaacatctggattcaaaacacaaacgtttactatagtaactattgcatacctttttctatgcgttagccttactattaatttatcgcaaaacccgccccccaacaaacacagtccagatgaaaacaaaaaagggatacaaacatatattgataacgctatgtcctttacctttttcttttctttaatattttttgccattacaagtggaatgggtactttcatagctcgaaccactgataatttcaatgtttttacatataaaaatgaagagtacaagttaattagaaattatggcgataatattatcgccataaaaataaaagacgcaaataagacaaagggtgtttatatccttacgccagaagaactaagtggcattcgcatgagtcaaagtaaaaagtacgaacaatcagaataa

SEQ ID NO: 249963 - DNA, 915 bp, Klebsiella pneumoniae
atggataaactggataccctgaccctgttcgtgcgtatcgtcgaacggggttcgttcagcgctgccgccgcggatctgggtttttcccggccggtggcgacggcagccattaaggcgctggaggccagccttggggcgcgcctgctgcagcgcaccacccggcacgtgcagccgacggcggagggctcgctgtattatcagcgctgcgtctccatcctggcggccctggaggaggccaaccgcagcgccggagggagcatctccggcacccttcgggtggacgtggcgggcaatctggcgcgaaccctgctgctgcccgcgctaccgcagtttctcgcccgctatccggccattaccttgcagattggcgaaagcgagcgcgacgtcgatctggtccgcgaaggggtagattgcgtcattcgcggcggccatcttcccgatagcgagatgatttgccggccgctcgccatgctgcaggagatcacatgcgccagcccggcctacctcgcccggtacggtaccccgcatacgattgacgggctggcgggacacgtgacgatcggttttgtttcatcgcgcacgcaccgaaccttgccgctctgttttaccctggatggccgccagaccgaggtcagtttgccctgtcggctgctgacttccgatgccgacgtcggcgccgaagcggccaggctgggctttggcctgtatcaggcacccttctcccgccttgaggccgatctggcatccggtgggttaacggaggtgctggctgattttcgccctgcgccgctgccgctctccctgctctatcccagcagccggcagctctctgcccgggtacaggtatttatcgactgggtgacggcgctgatgaaggcgcccctggcgcagcaggcatccggaaggctaaaataa

SEQ ID NO: 249964 - DNA, 3357 bp, Klebsiella pneumoniae
atgaatgcaacggatagcatattgcgcttaggtagtcgttttggggtactgatgctgatagctggcgcaatgttgtgggggatatatcactatggcgacaagattggattgaatacgctgcaagcgaaactctatttctgcctgggcttagggatccttattctgctttttcgttatggcggccgtattgtgcagttcatactcggccgccatctgaaggggcagggggcgccattgacaagtggtcagcatttgaagccggcttcccagagtcaccgcgccgttattgagatgaggcagacattgcgtcgccagtatggtcgctttggggctggcaaaatgaccattctgatgctcacgggaagcgtggcggatgttgaacgccttgcaccgggcctgagtagccagtactggcaggagaatggagacacattattgctttggggtggggaaccccagagcgcgtcggataatgactggctttttgctttgcgtaaacgctttcgcccccctgtgaatgggctggtgtgggtcacttctgcgtttgatcatctgcccgcagccaatcagcacgcatcccccgctttgttgtccatggaggatatagataacattgcccatgatctggctgaacgtttctcactgctagggtgggctgtaccactgtatgtctggtcgctgcatccccaggcggatgatcaggccgggcgcatcgtgcaatctgtcggcagtctcttcccgccagactgtcagtcgtcgcagatgcgccagttactgtcggcgttgccttcaagactgttagagactggagtacaacaggtcacgggtaacccgcagcatcattttcttctgggcctggcggaccaactcacgcggcagccggagcggattagtgttcccctgtcgacgtttctggaacctcatcgtgcgttaccgttagccggcgttgtgttcagcccgtcatcgccgcaggcgtcgcacagcctgaagcatcattggcgccacgataaacgctgggacgtgctactggaatctctcagggcatccggcttaaaagcacgaaagaccggctttccctggcgaagagctgtctctgcctccgccgtcgccctgatcttactctgggccgccactctgctggtctcttttatcgccaaccgcgagctggtggcgatcgcacaggagcaggtgcggcaggcctcagcggagaaacagccgctgacggtccgtctgcatgccctgtctgaactgcagaaaacccttgcccggctggaataccggtcacagcacggagcaccctggtacctccgcgctggcctcagccagaatgatgacctgctggcggcgcttctgccgcgctatggcgaaagcgccttaccgctgctgcgtgatgcgacggcgcgccatctggaagggcaactgaacgcctttgtgcagcttccgccggacagtccgcttcgcgagaagagggcaaaaacggcttacgaccagttaaaactgtacctgatgctctcgcgccctgagaggatggacgcgtcctggtttgccaccacgctgatgcaggactggtcgcagcgctcaggcatcgccgacgccgtctggcagggcagcggcccttcgctactggcattttacgctgccagcctggcgtcgcatccgcagtggcgtctgcctgtcgatgacggtctggtcagccaggcgcgcacacggttaattcgccaactgggccagcgcaacagtgagtccacgctttatcagaagatgctcgcgcaggtggcgaaccagtatgcggacttgcacctggcggacatgaccggcgacaccgacgcgtcgcgcctgttcaccaccgatgaggtggtgccggggatgttcagccggaaagcctgggaagagacggtgcagccggccattgagaaagtggtcgcggaacgccgcgatgacatggactgggtgctgagcgacgcgaagcagcctgccgcgcagtcgacgtcgccggaaactctgcgagcccggctggcggagcgttatttcgctgattttagcggcgcctggctggattttctcaacagtttgcgctggcagcgcgcagcgaccctctccgatgccatcgaccagctgaccctgatggccgatgtgcgccagtcgccgctggtggcgctgatgaacaccctgagcgtgcaggggcgaaccggccagaccggggaagccatcgccgattcgctggtcaaatcgaccaggcagctattcaaccgtgacaacccacccgccatcgatcagcagtccggcgcgcgcggtcctctggatgcaaccttcgggcccgtactggcgctgctggacaatcgcgacggcgggacgcccaccagccgtcttagcctgcagaccttcctgacccgcgtcacccaggtgcgtctgcgcctgcagcaggtcaccaacgccaccgacccgcaggcgatgacgcgcctgcttgcgcagacggtgttccagggcaaggctgtggatctaaccgaaacgcgcgactacggcagcctggtggcggcgggactgggccagcagtggagtggttttgggcagacgctgtttgttcgcccgatggagcaggcctggcagcaggtgctgaccccggcggcggaaagtctcaacgcccagtggcgcagcgcggtggtggaggactggaatagcgcttttggcggtcgctacccctttaaaaataccagcagtgaagtctctctcccgctgctggcaaaatatctcaatagcgagaccggacgcatcgcccgctttctgcagacccggctgaacggcgtactgcataaagaggggagccgctggatggcggacagtatcaatgcccaggggctgacgtttaacccggcctttctgcaggcgatgaataccctgagccatctctccgacgtcgcgttcgccaatggagaagcgggattgcatttttcgctacgtccgggcacggcggatggcgtgatgcagacggagctggtgattgacagccagaaacttgtctatatgaaccagatgccggtctggcggcggttcagctggcccgccgataccgaagcgccgggcgccagtctgagctggatcagcacccgggcgggcacccgccagtatgcagatcttccgggggcctggggctggatccgcctgctggataaggcggtggtcagcgcttaccccggtacgagcagcagctggagcctgagctggaaagcgccggatggtctgttgctgaactacaccctgcgtaccgaggcgggggaaggaccgctggcgctgctggccctgcgaaactttacgctacctgagacgatattcagcgtcagcagggggctgagtttgtaa

SEQ ID NO: 249965 - DNA, 588 bp, Klebsiella pneumoniae
atggttgttttgccgggtggcggctacgccttacccggcctggagttcgtgcgacctgtcgttcatttattcaccagccttgctgaaactgccggtgctggcggcctcaaaatcgctgagacgttcccgaaaggccggggcagcccgcatggatgcgggctgagggccgtgttttgcacggacgctgcctcggcccgacccgaagcctgcagggataagtcgaagggaccgcgtagcggcgattttgctggccggagcccgggggtacagggggcggcggcgactggccgccccctgtgcgctccctgcgccatgattgacataactcagaaaattaaccgggagcgcaacctgcccggaattgacatagaagttgtagccctgccaggcgcagtacgaagtacgaacaagacatttccggttatgccgttattttgccgggtggcggctgcgcctgacccggcctggagttcgtgcgacctgtccttgatttacccacttgcgcgactgaaactgccggtgctgacggcctcaaaatcgctgagacgttcccggaaggccggggcagcccgcatggatgcgggctga

SEQ ID NO: 249966 - DNA, 477 bp, Klebsiella pneumoniae
atggaccaagaaactcttaaatctattcttaagtacgacgccttttctggtttgtttttatgggcagtgaaaaggcagaaggtggttgtaggaagcgttgctggaagcaaaaattctcttggctatgtgcaaataaaaatttctgggaaactttatcatgctcatcgccttgcatggctctacgtgtacggatatatgccagaaaaagagatcgatcacataaacagaataagagacgacaacaggattgccaatcttagagaagcaaccagccaacttaactctcttaacactggtatctataaaaataacacatcaggtagcaagggtatttattacaacaaaagagcaaaaaagtggcaggcacagattctcatcgatggaaaacgggagtatttaggtctctatgatgatttaaaaagagccgatatagcatttagacttgctaatcacttcggacttgcaaaaccgaactga

SEQ ID NO: 249967 - DNA, 630 bp, Klebsiella pneumoniae; identical to SEQ ID NO: 76761

SEQ ID NO: 249968 - DNA, 762 bp, Klebsiella pneumoniae
atgataactggtaataaagttacaccgactagcacagctctgcaggctagagtcattctgtaccaaccaagtcaacgtcccttggcgctgaaggggcagtggatggagactagttttggtcgttgtcgagttaccggaagactaggacaacgtcatgcggatattgtggaaacaatgctctatgtggccgagaaacgtcgagaaatttctgatggaggaatcgagttattagtagatccagcgaaagtacgccgaactctatccgatgcacaatacagttatgatcgaattaaaaaactacttgttgatcttcgtgtggcaactgttgaaatagtaacgccagatttagaaaaaaacggttattgcattctaggcggtttaattgaccatgtcgtaccctcaccaatgactaggcgtaatcctctaactggtggtgaacgtaacctatggagagtacgcttgggtgttgcattggtaatgttgttgaagcgagatttgcattttcatcatgatccaggtcctattgctcgtctccagcatggtattagccaagcagttgcacgtcatatattaacacataagcacgatcctaaaggcggctggcatattgatacattaattttagctgtcagtggtgaaggtactaataatatgacattacgtaactatcggcggagattaaaagaagatagcaaacaatttctagcgattggcattgagatacaaaatactaggataaaacgagctacaacggcccggtag

SEQ ID NO: 249969 - DNA, 1392 bp, Klebsiella pneumoniae
atgaaaatagtaagtaagctcacctttttaggtatcatacttttcttttctataaatgcctatgctggtcaattagatagtagcgggctacttgatactttattagataagtttcaacaagtagccagtacatggacagcagtaattgctgactatgcaaattggctcttctgggggctggtattaataagtatggtttggacatttggtatgatggcgatgcaaggggaagggctgataggggtacttgctgaaatagttcgcttttttgccgtcattggttttttttattatcttttaatcaacggcccatccatatcgcaatccataattaattcaatgagacaacttgcagcaaacgctttaggaataagtactggtatttctccctcaagcatagttgatatggcgtttgcgatattaaccaaggtcagttcagccgcatcaatttggtcgccaatgatatccaccattatgataacagtcgcgataatcattttggtagtgatgtcccttatagcgataaatatgctaatcatgttggtttctgcatgggtgttatgttatgcaggagttatattgcttgggtttggtggttcgaaatggacctctgatatagcaattaattacttacgaactgttttatcgattggcattcaattattcacgatgacattaattattgggattggacaatcatttatagatcaatatttttctcttattaaagatgatgttcctgatcttaatagtcttatagttttgcttctggcgtcaattatcctgttagtattaactaataagctaccaatgttgttatcaggtgttgtaggaggggcttctttacaagggattggtggatttggggcgggtatgattaccggcgcagccgctactgcaatcagcggtgctggagcaatggcaatgggggcatcagctcaagtcagcggcggagcttcagcattaaaggcagcattcgagtctgcgcaagctgccatggccgaagaatctggttcaggcagcggaggcggttccggtggaggatttggcggcggggaagataccggttctgtagatacttctggaggccaaacctcaggcggttacagtggttcgtctgcaggtagcagttcaggtagcgccagcggaggaagtcaggggtttgcttcattctcgcgtgctggccgcatggcaagccatatgggaagcagcatggctaacggagctgctgagtaccagagaatgaagcgaagtagcagttcttctcgtgcccaacaaactattggaggggagttggcgactcagatacgtaagcagacagctactcatcgggataaccgcgaacatgatgattttgccgatgatagcttatcggctaataataaatcttga

SEQ ID NO: 249970 - DNA, 435 bp, Klebsiella pneumoniae
atgtccaggaccccctatacacggttacgcattgagggcttccgcaaagcagaggcttccctgagacttgaaggaatggaccccagtggtacgccactgtacgagtccgttaaagcacgtatcatttcaggtgatctgacgtatgagcaggggcgttctgagatttttgcatactacacaaaagtagataccgccgggcctgtgacagtgggagagatgctggcagaggaatttttaaaaccgctgaacatgtctcatgaggaactggcggaatctatgggtatttgcaggcaggagattgaagatattatctgcggtttacgtcgtcttacggatgacgagactcgcgttcttgctgacatctttgggactgatagggacttttggagcaatctacaagtgctgcaagatcgcagagtaaaacgacgtaagtaa

SEQ ID NO: 249971 - DNA, 915 bp, Klebsiella pneumoniae; identical to SEQ ID NO: 145020

SEQ ID NO: 249972 - DNA, 3630 bp, Klebsiella pneumoniae; identical to SEQ ID NO: 145019

SEQ ID NO: 249973 - DNA, 1038 bp, Klebsiella pneumoniae
gtggaacttaatacattaaaaaaacagctacaagaacacctaggggatgggctagttttaattgtaggttctggattgtcctgtgcagagggcgtgcctggaatggctgcacttggacaccatctagtcacccatattcctgccagcctttccccagatgacactaagctttgggaagatatccacccacttattgaaaaggatggcctagaagcggctttgctgaaatatgcgccatctgcatcccttgaagcggccattgtgcagagcactggggaattcattgccaacgctgaagccaatattatctcagaggtctttaataaatctaggacgcttcggctaactaagttgattccgcatttgttaaagccagatgcgggtataccaattgtgacgacaaactatgatcgtcttgccgagctcgcttgtgaggaagctggtttaggtgtcgacaccatgttttgtggccattttgccgcgcggcttgagccgcaggatagctattggagtttttgccgtagtgtcaaattggtgggtaagaacgtgcgctacaagttcgcaatgaaggcgaatgtcttcaagccacatggcagccttgattggtaccatcgtgagggcaatccggttcgctacgctggggcattaccgctccctcgccttatcattacaccgggattaaataaattccggagcggatatgagagtcctttcgacaaacaccgagaaaaggcaaatgatgctatagacaaggcgcgtcgcttcctcattatcggctatggttttaatgatgaccatttggaaacccatctcacgccccgcattaaatcaggtgtgaaaacggtaattttaactttcgcgctctcccctaaagcacgagatatagctttagagaacaagaacgtgatagctgctgagtttcgcgaagaggctggaacctcaggcgcatgcttcattgtcgatagagcagagatattctaccccggtgttgactactgggacctcgatggatttgtgaagggagttttatcagcatga

SEQ ID NO: 249974 - DNA, 1749 bp, Klebsiella pneumoniae
atgacaagcccggcgctcgtgtttacagacaatgatcaaatcggtcgtgtggctggcgttgacaccagtcgcgtggctatcgacgtcacgaattctgagatgcttacgcgtgtaggtatcggccagcttatcgctatcaagggggcgacccaagctgaatttttaatcggaatgacagaccgcgttactcgttcccttcgtgaagagcttcctgatcccgaaggcggtgaattcgcaacattgacggtttcgcctgctgatcacatgcaggccttcgtcattggcacttatcgaaccgttgatggtgaaaagtctgataccttcaaacgcggcgctgatagctttccacagattgatcgggactgctttgtaatcgagggtggcaacctgcagcgttttatgggaattctgggagcaggattatctgacgaagaacgattgaagcttggaaccttcgttgctgatcgtagtgccgaagcaatcgctagtggggacagattcttccaacgacatgccgctattcttggaagtactgggtctggcaaaagctgggcagtcgccctgattcttgaacgtgcggccaagctgaatttccctaacatcgtcgtgtttgatatgcacggtgaatacgcacctttggctgacaaggacaacggagggtttgcccaacgctttcgcatcgccggtccaggtgatctttccgctccgaaggacgacacactatttctgccttactggctgttaaaccgcgacgagatgctgtcgatgattctagatcgcagcgaccagaacgctcctaaccaagcatctcgtttcactctccacgttcgagctcttaagggggcaactctagatttgtccggcaaggacaaggtcaaggagaccttcacggtggattcgccgatcccatatgctatttctgatttggttgaccatcttaagacggacaataccactaaaggcgtgggtaaagggggggctccagttaaaggagattgggaagacaagctgacacgctttatatcgcgactggaggcgaaactcgatgatcgccgttatggatttatgttctcaccaccgccggaagcgctcgattatggatggctcgctaagcagatcattaaattgctacgagccgattccggcaatggcataaaaataatcgacttctccgaagttccggccgatgtgctccctgtcgtcaccggtacattagctcgtctcctctacgatgtgcagttttggatgagcgcagatgcgcgcactccagtcaccctgctttgcgatgaggcacatctctacttgccggtgaaagatgatgctgatgccgtccagagacaggctctatggtcgttcgagcgcatcgcgaaggaagggagaaagtacggattctccttgctcgttgtgagccagcgaccgtctgacgttagccggacaatcctatcccaatgcaacaatttcttggctctcaggctgacgaacgacagtgaccagaacgttatcaagaggctgatgccggattctctagtcggtttgacggcgatgctaccactccttgatacaggggaggcgcttctgttgggggatgcggtacttcttccaacgcggatcaaacttgatcggcctcgagtgaagcccgacagtgcgacgcgagatttttggagggaatggggttcccttatgcctgatgaaaagttactcgaagctgcggtcgagtgtttgcggagccaatcacgggctagcgggtga

SEQ ID NO: 249975 - DNA, 645 bp, Klebsiella pneumoniae
atgccttatccggcctacgggtcctcccgcaggttcaaacagcgcaggaccgcgcaagcgcagcgccgccgggcgatatacatcagacgccgtacccgcggttatgccggatggcggcatcaatgccttatccggcctacgggtcctcccgcaggctcaaacagcgcaggaccgcacaagcgcagcgccgccgggcgatatacatcagacgccgtacccgcggttatgccggatggcggcatcaatgccttatccggcctacgggtcctcccacaggctcaaacagcgcaggcccgcgcaagcgcagcgccgccgggggatatacatcagacgccgtacccgcggttgtgccggatggcggcatcaatgccttatccggcctacgggtcctcccgcaggctccaacagcgtaggcccgcgcaagcgcagcgccgccgggcgatatacatcagacgccgtacccgcagttgtgccggatggcggcataaatgccttatccggcctacgggtcctcgcgcaggctcaaaaagcgtaggcccgcgcaagcgcagcgccgccgggcaggggatcatagagtggagttcgatgaaaaagtccggatgcagaaaagcaaaaacccgccttttgggcgggttctttaaatag

SEQ ID NO: 249976 - DNA, 795 bp, Klebsiella pneumoniae
atggttgaattgttacgagagcaagatgtaaaaatagctttaattgattggctatataaaaaaggaatgcttagtgatgctactattattaatgaaatggtagttgctaactggagccggagggctgatttagctatcgcaaatggacacttgcaagcttttgaaataaaaagtgattttgactcgctcaaacgtttggatggtcaggttgaaatattcaactctagatttgaaaaagttacaattgtttgtgctccaaaatttacttgtgaggtatctaaaagagtttcatcgaatattggagttgtagaatatcaggctgatagccatggtgtgcgttttaagataattcaaaaaggacgggtttgctctcggttaaataagttgatttacttgaactttcttcttaaatctgaattgaaaagtttacttaatcattatggtgttccattttcttataaacaaagcagagaaagtctcgaatgtttggcgtctaaattatcgttaggtgatattaggggttttgttattgcatctattaaaaatagatatcatgcgacttctaatgagcttttgtccagacttcaggctaatgaatcgctatctaaaaacgacctttctttattgagtaaaactaaaagaaagaataattctttggttaaatttgagtctaacgtttatccaagtgaatcatcaaatgaataccataaagttgacgttgattctatagctagaaagtatggcaatgataattgctacattccggaaagagtacttaaaaggctcgtgagttag

SEQ ID NO: 249977 - DNA, 1071 bp, Klebsiella pneumoniae
atgaaagtatactttgaaaattactcatactatccagcgttgagaacacgcttggcggaaatgatggggctgagtaatttatcacatgaaaacaagcagaaaatattacctttaatttcgttgggtaagtggcctcgctcggaagaaattcaagtatctttagataaaactttagaagttatgaataaccttcctttcattttggatgtaacaaaggagaactctcatcattgtgcttcaagcttcgaactactctcccatgaaaatggctttaaaaactggatagatttttgctcgataaatgacaatatcatcccagtagttcaaatgcctgactctgcaaaacttagagatatctctcttcaaacaagaaccttagaggaaatcaaaggttccattgctttcagaattagaaacctaaatactgacatcaataaaacgctgacatcactagtttcgatgaactcacctgaaaatgctattgtcttcattgacttaggatatataagaggtaacgtatcggctattacagcagcagcaataaatgcaataaaccaaattagaactgagattcctgaagcaataataagtgtcttagcgacaagctttcctagttcagtttcaaatttctgtcgggaaaatgggcaatctggatatattgatgtaattgagagagagttacatcagaatattggtggaagtgatgtcgcaatttatggcgaccatggttcaattcattctgttgtttatgacaatgtcattggacgatacatacctaggattgatatagcgctagatgattcatggtatttcgaacgcagacctggtttgaataaagaagggttcattgaagcggcaaaatcaattcttgctgagtatccacattataaaaaggaagactcttggggcgcaacgatgataagaaatgctgctataggaaatatagttggcatgggaagcccagcaaagtggattgctgttcgagtgaatcttcacttaaacaagcaaatcgagctatctgaagctttaaaatttggttttgatcatgatgatgaggatgaccttatctaa

SEQ ID NO: 249978 - DNA, 549 bp, Klebsiella pneumoniae
atgtccgcgaatattgaaagtcagttccgtgtagtaaaggctgattccgatgtgaaactcactggagttaagcagtttgattgtggcgataaagtgctgaatggatatttacagcaattaaagcgccagtgtggccatgacaacattaacgggctattgcttcttgaaggtgataaagttattggttttgtcacggcctcgttgtatcagttgagtcgagaagacgttcctaaaggaacatttccttactcagtgcctcctgtatttacagtaatgaagatccctatgattgccatcgataagcaataccaaaggcagggctggggtgatgagttattgcgagcgattcttgattattgcattgatagtgcagatttagtgcggggcattaaaggtgtttaccttgatgctaaagttggtgtaaaggatttttacgaaagtttcgattttgaagctattagcgaagagatcactgccaacaatacaatccccatgttcatttctatggacacgttacggcaagctaaagagctggaaaaaagcgcctga

SEQ ID NO: 249979 - DNA, 354 bp, Klebsiella pneumoniae; identical to SEQ ID NO: 86582

SEQ ID NO: 249980 - DNA, 1101 bp, Klebsiella pneumoniae
atgaacctcagacaacagcaacagcaggcgtttgaccgcagcggagaagcccttattgtaggcgacgtcagccactgcccgctgccaccggagaccctcgccgcgctgggccccgattcaccgtatgtggtgcaggtatacggttctggcctgaccggtgaggtttaccggttgcgcatcggctgcgaggagtataatttaaaaaaacgacgcgctgtcgctggcgttgccaaccttaacggccagctgtcgtttttaaatgaagtgcagagccggcaggcattgctgcggctgaaggataaccctgtcaccgccccgagcttcgcccacatcgtcccaacgctgtatgctgattatcgtctcggcattcttctctctccgtggatcgatggcgagctgattcaccaactgaccccgtcgctgatcgcccagctatttactaccctggaagcttgcgaagaacaggggttgatggagtgggatctttgtaatggaaatctgttggtggaccgggaggagcatctgtggctattcgattttggctatatgtatcccttcgatccgctcagggaatccaacagcaacggtctggccgatcccctttttcactttgtcgagcgctttgagacccgcttcttttttaactggctgatgacccaggtccccggcgcggagcagcagctggcgcactatcgcgatttgaagcgactagcggttgaaagctaccggcgtaagctcgcctggctacgcgcccggtgggctgccccgcaggtgcaggctcatttacagcagataacggcacgctgggaatcagcgctggcggactctgccgcgctgagccagttatttttcctggaggccttccgctcccacgtactggatatcgaagatgatctgcatggccagtcttgtaccttgctcaccttgcaacgcattgactgggttataaaccagattgaacaccattatcgctttatcgccgataaaggcggcctgttttacgacaacgaagggaaatcaaagcaagtgctgctcagcaactatgcgcagaagcggcaacaggcgcagcggtacctgctgaacgcctccacggcaggttag

SEQ ID NO: 249981 - DNA, 522 bp, Klebsiella pneumoniae; identical to SEQ ID NO: 187914

SEQ ID NO: 249982 - DNA, 807 bp, Klebsiella pneumoniae
atgaacgaactggtaaaaaaacttatgggttttggctttacaaagacagatgccaatgtatacatcaacttgctaaaaaacggtcgttctagcggctataagatagcaaaagaaatatcattatcacgttctagcgtctactcatcaattgatagtctatataaaaatggcttcatttttatggccgatggcaatactaaagagtatcaagcaaaatctcccgagcttattttcagcaacatagaaaagcaaaccattgaaaacatcaatgtattaaaaaaagaactctcacgtatgatgctacaggaagagaaagagttcatatataacgtctctggttttgataattcactacaaaaagccagagaaatgctcgaactggctcaaatcgaagtttacctgaacactgacttccatcttgaactcattgctcaagaactcattaatgccgttgagcgcggggttcggattatcgtgttctcatttaaccgactcgcgctaccacatgaatctatcgaattgtactctcgatttgaaatagatgaaaagatttatccatcacatcgtttcatgctagtgattgatatgaaaaatgctctaatgctttcccatcgggaagaaacacatggcttatataccaataacaaattactagttaaaatcatggctgaacatattcatagtgatatttatctaactgaatacgaaaaaatggcaccggaaagaaaatgccggatattaaccgttcatgagcttgaaaatgatatggtcaatgatgaactatcgatatcatcaataaaaatgtaa

SEQ ID NO: 249983 - DNA, 906 bp, Klebsiella pneumoniae; identical to SEQ ID NO: 125433

SEQ ID NO: 249984 - DNA, 1797 bp, Klebsiella pneumoniae; identical to SEQ ID NO: 125434

SEQ ID NO: 249985 - DNA, 834 bp, Klebsiella pneumoniae; identical to SEQ ID NO: 125435

SEQ ID NO: 249986 - DNA, 1284 bp, Klebsiella pneumoniae; identical to SEQ ID NO: 125436

SEQ ID NO: 249987 - DNA, 1230 bp, Klebsiella pneumoniae; identical to SEQ ID NO: 125437

SEQ ID NO: 249988 - DNA, 1041 bp, Klebsiella pneumoniae; identical to SEQ ID NO: 187921

SEQ ID NO: 249989 - DNA, 1008 bp, Klebsiella pneumoniae
atgttcagtgttatggaaatcgccactctgttatccgggagctataccggtgatggagcaattcgggttaactttatacggccaattcgcagtcctgatgtcggcggcctggctattgttttcgccaaacaagacttgcaattcttatctggctcacatgctgacgtgctgataggacctgatgaaatactggatagcccagcgaaggcacatattgttatctcacatttggatgttgagcgccttaatctttttcttcgttcttataaagtaaaaaggtttcatctcaatgatcaagggaatacgtcggcactctcagatgtttatattggaaaacattgccaaattggtgatggctgcatttttatgcctggtgtgaagatcatgaatggggttattattggggataatgttgctatccactgcaacactgttattaaagaaggaactatcatcggaaataatgtaactatcgactcaaacaattcgattggtaactacagttttgagtatatggcttcaagaaatggtaagtatcaacgagtagaaagtgtggggcgagtcattatttacgatgatgtagagatcgggagcaacaatacaatagatcgtggaacattaggtaacacgacgattggtcggggaactaaaatagataatcagattcagattggacatgactgtcatattggtgaaaactgcttaatagtatcacaggctgggtttgccggtcatacaactcttggtgaccatgttatcgtacagggacaggttgggacctccggccatatagcgattggtagccattctattatcaaggcaaaatcaggtgtaagtcactccttccctgagaatagcgacttatttggttacccggcaaaagatacccgtgcttattacaaaaacattgccgttcttaacattttaacaaaaaatcatcaatttaaaaaaaatcgatctatatcggacacatggaggaaacgtttttttaattttttaaactcctaa

SEQ ID NO: 249990 - DNA, 480 bp, Klebsiella pneumoniae; identical to SEQ ID NO: 187923

SEQ ID NO: 249991 - DNA, 1131 bp, Klebsiella pneumoniae; identical to SEQ ID NO: 187924

SEQ ID NO: 249992 - DNA, 1968 bp, Klebsiella pneumoniae
atgaaaagaaaccgtttttttaatacctcggctgctattgccatttcgattgcattaaatacttttttttgtagcatgcagacgattgctgctgaaccagaagaaacttatcttgattttcgtaaggagacgatatattttctattccttgatcgtttcagcgatggagatccaagtaataatgcagggtttaattctgcaacctacgatcctaataatttaaaaaaatatactggaggagatctccgggggttgattaataaactaccctatttaaaatcacttggtgttacttcaatctggattactcccccaatcgataatgtgaataatactgatgctgctggcaatactggatatcatggttattggggaagagattattttcgtatagatgaacattttggcaatctcgatgatttcaaagaactgactagtttgatgcatagtcctgattataatatgaaactggttcttgattatgcccctaatcattcgaatgctaatgatgaaaatgaatttggtgcactatatcgtgatggtgtgtttattactgattatcctacagatgttgccgccaatacgggctggtatcatcacaatggtggggtaacgaactggaatgatttcttccaagtgaagaatcataatctattcaatctatcagacctcaatcaatccaatactgatgtctaccagtacttgttggatggttctaaattttggatcgatgctggtgtggatgctatcaggattgatgccatcaagcatatggacaagtcttttatacagaaatggaccagcgatatttatgattacagtaagtctatcggccgggaaggattttttttcttcggtgaatggtttggtgccagtgcgaatactacaacaggtgttgatggtaatgctatcgattacgccaacacttccgggtcagcgttgctggattttggattccgcgatactttagaaagagttttggtaggacgtagcggaaatacaatgaaaacgttaaatagttatctgataaaaagacaaacagtctttaccagtgatgactggcaggttgtttttatggataaccatgatatggcacgcattggtaccgctctgcgttcaaacgccactacttttggtcctggaaacaatgaaaccggtggaagtcagagtgaagcttttgctcagaaacgtatagacctcggtctggttgcgacaatgactgtacgtggtattcctgccatttattatggtactgaacattatgccgctaactttacctctaacagttttggtcaagttggcagtgatccttacaaccgagagaaaatgccaggatttgatacggaaagtgaggctttctccattattaaaacactgggtgacctaaggaaaagtagcccggcaattcaaaatggaacttatactgaactatgggttaatgatgatatattagtatttgagcggcgttctgggaacgatattgttattgttgcacttaatcgtggtgaggctaacacaattaatgttaaaaatatagcggttcctaatggggtatatcagagtttgattgggaataatagtgtttcagtagcaaataaacaggcaacactaacacttatgcaaaatgaagctgttgtcattcgctcacaatcagatgatgcggagaaccctacagtacaaagcataaacttcacatgtaataatggttatacgatttcaggtcaaagtgtttatattattggtaatataccccagttaggtggttgggacttaactaaagcggtaaaaatatcaccgacacaatatccacaatggagtgcgagcttagagcttccttctgacttaaatgttgaatggaagtgtgtgaaacgtaatgaaaccaatccgacggctaatgttgagtggcagtctggtgcaaataaccagttcaatagcaatgacacacaaacaacgaatggctcgttttaa

SEQ ID NO: 249993 - DNA, 639 bp, Klebsiella pneumoniae
atgtggcaacttcttactattacccgccctgccgaagcggctgaaactcgctgggaagaagaagacatggaagcacgaaaatggaaaatccctgcgtcacggatgaaaatgaaccgtgaccatactgttcctttatcagatgaagccatggctgttctggaaatgatgaaaccagtaagcggcaatcgagaatttatctttcccagccgtatcaagcccaaccagccaatgaacagtcagactgttaacgcctcactaaaacgtgcaggttttggcggagtgctcgtctcaaacggtctgcgatctattgccagtacggcccttaatgaacaaaacttcccacctgatgttattgaggctgcattggcccatgtagataagaatgaagtacgtcgagcatacaaccgcactgattatctggagcaacgtcgtccaatgatgcagtggtgggctgattttgttatggctgctgatcgcggaagtatgattgagggaggtatgagaggagtgcgtttagcggggggacggataatagatgacggttcccactttaatattggaccgaatgagactttatatttcaagccgaagttaatagtttcagaaatcaagctaattagcataatatctcttagctga

SEQ ID NO: 249994 - DNA, 504 bp, Klebsiella pneumoniae
atgagcaactccacctcgatcccgttcactggggctattaaatcaccgctgattaatgcccgggttgaaaccgctgccaccagcaggatgttcaaaccgctgtggcagcacgggcgggcgatctgcttcgccgatggctggtttgaatggaaaaaggtcggagacaaaaagcagccctacttcatccagcggaaggatggccagccgatatttatggccgctattggcagcacccccttcgaacgcggggacagcgccgaaggatttttgctggtgaccgctgccgctgatcgcggtcttgtcgatatacatgaccgccggccgctggtcctgacgccggaagccgcccgggaatggatgaggcaggatctcaccggcgcggaagcggcggagattgccagggtcggaagcgtctccgccgacgatttcacctggcacgcggtatcgcgggcggtcggcaatgtgaacaatcaggggccagcgttaattgagccagtagagtga

SEQ ID NO: 249995 - DNA, 759 bp, Klebsiella pneumoniae
atgttaatgaaaaaaattagaaaaaagctactggcatactactctgaattaatgtgctcccttaaaagaaacaataatgttatttggctttctttgggagaaaactgtttgcctgatgacatcttaaaaaggcaccataaaaaaagttatagttcgctttatgcttcaggaagatcaaatattgaatatgccacccagatggaaaataacaactacaatcatttgctagataaagataatttatattttgccaaagttggcaatgatacagttgtcagatcctctctgtataatataagctctcaacactatagcgagttgcatttgaacggctttgagttcacacaccacaaccccatagataatgtagatcacagattatcctttgagcgtcgcattaaaagaatgattgaaggaaaaggaaagcaaaattttgtattcctttatcaccatagaatttgcaacaatacaaaccttgagaatgcaagaaaacacttaaaggaatttcaaaaaaaatatcaagcaggtgaaaaaaaatgctttataattttcttctatcaaacgttgactaaaaacaatgaacaaaggcagcttaagttagttaactcagaagataatatattagaatttcaccttataactcaacatatctgggcaggacatgataaggatattttttgggcaagagttgatgatgatcttatagggcgcatgattacagaatcagataaccatataaacaagctcattaatttatga

SEQ ID NO: 249996 - DNA, 1404 bp, Klebsiella pneumoniae
gtgtcactttcgctttggcagcagtgtcttgcccgattgcaggatgagttaccagccacagaattcagcatgtggatccgcccattgcaggcggaactgagcgataacacgctggcactgtatgcgccaaaccgttttgtgctcgactgggtaagggacaaatacctcaataatatcaatggactcctcaatgatttttgcggtgcggacgccccgcagctgcgttttgaggtgggcgctaagcccgccagctcgctgcagaaaggggcggtaagcccggccgcagcgactatcccggcggcgcaggtgcagaccgcgcgcgtggcgccgacgatcgtgcgccctggctgggataatgtcccggcgccggcggagccgacctaccgttctaacgttaacgtgaaacacacgtttgataacttcgtcgaaggtaaatctaaccagctggcccgcgcggcggcgcgtcaggtggcggataacccgggcggcgcctataaccccctgttcctctacggcggaacgggtctgggtaaaacccacctgctgcacgcggtggggaacggtatcgtggcgcgtaaaccgaacgccaaagtggtctatatgcactcggagcgtttcgttcaggacatggttaaagcgctgcagaacaacgccatcgaagagtttaagcgctactaccgatccgttgacgccctgctgatcgatgacattcagttcttcgctaataaagagcgatcccaggaagagtttttccacaccttcaatgccttgctggaaggtaatcagcagatcattttgacttcggatcgttatcccaaagagatcaacggcgttgaagatcgtctgaaatcccgcttcggctgggggctgacggtggcgatcgagccgccggagctggaaacccgcgtcgcgatcctgatgaaaaaagccgatgagaacgacatccgcctgccgggcgaagtggcgttctttattgccaagcgcctgcgctcaaacgtgcgtgaactggagggggcgctgaaccgcgttatcgccaacgccaatttcaccggccgggcgatcactatcgatttcgtgcgcgaagcgctgcgcgatctgctggcgctgcaggaaaaactggtcaccatcgacaatattcaaaagacggtggcggagtactacaagattaaggtagcggacctgctgtccaaacgccgctcccgttcggtggcgcgtcctcgccagatggcgatggcgctggccaaagagctgaccaaccacagcctgccggaaatcggcgatgcgtttggcggccgcgaccataccaccgtgctgcacgcctgccgcaagattgagcagctgcgtgaagaaagccacgacattaaagaagatttttccaatttaatcagaacattatcctcgtga

SEQ ID NO: 249997 - DNA, 1101 bp, Klebsiella pneumoniae
atgaaatttaccgtagaacgtgaacatttattaaaaccgctgcaacaggtgagcggtccgttaggtggtcgtccgacgctgcccattctcggtaacctgctgcttcaggtcgcggacggcgcgctgtcgctgaccggtaccgatcttgaaatggagatggtggcgcgcgtggcgctggttcagccgcacgaagcgggcgccaccaccgttccggcgcgtaaattctttgatatctgccgcggcctgccggaaggcgcggagatcgcggtgcagctggaaggcgatcgcatgctggtgcgttccggccgcagccgcttctcgctgtcgaccctgcccgctgccgacttcccgaatcttgacgactggcagagcgaggtggaatttaccctgccgcaggcgaccatgaagcgtctgatcgaagcgacgcagttctcgatggcgcaccaggatgttcgttactacttaaacggtatgctgttcgaaaccgaaggcagcgaactgcgcaccgtcgctaccgacggtcaccgtctggcggtctgttcgatgccgctggaagcgtcgctgccgaaccattcggtgatcgtgccgcgtaaaggggtgattgagctgatgcggatgctcgacggcggtgatacgccgctgcgcgtgcagatcggcagcaataatatccgcgcccatgtcggcgattttatcttcacttcgaagctggttgatggccgtttcccggattatcgccgcgtactgccgaaaaatccggataaacacctcgaagcgggctgcgatattctgaagcaggcctttgcccgcgcggcgattctctccaatgagaaattccgcggcgtgcggctgtacgttagcgaaaatcagctgaaaatcaccgccaataacccggagcaggaagaagcggaagagattctggacgtgacctacgccggcacggagatggagattggcttcaacgttagctacgtgctggatgtgctgaacgcgctgaagtgcgagaatgtgcgcattctgctgacggattcggtgtcgagcgtgcagattgaggatgcggcttcacaaagcgcagcctatgttgtcatgcctatgcgcttatag

SEQ ID NO: 249998 - DNA, 897 bp, Klebsiella pneumoniae
atgaatttaactatcaggcaatttcgcgcgtttctggccgtcgcagatttgcgcagttttaccgccgccagcaaatatctgtgcatcacgcagggtgccgttagcggtctaataaacgaaatggaaagccagatggaggtctccctcttcgaccgaacttcacgcgtggtgaaactatcgcctgatggagaaaagtttttaccctccgcaatgcgggttgttgaagagtttcaacgagccgaaaactatgctcgcgacctgaaagagataaaaaaatccctggttcgggtcgtcggcgcgccattaatcgcctgtgcctttttgccgcaaattatccatgcatttaagcggcagcacccgcatacccatgtacagttaatcgataagcctatgtctcaactgcaaaaaagcattatgctgggggaagcggatttcggtatcggcccggagcggccgctggaaccagaaatcgacaaacaaaccctgtttacaacggaaatcgccctgtactgccatccggactatcgtctgcataaaaaagaggtgagttgggaagagattcagagcgaagagctgattgccgtaggcaacgaatctgtccctatgatctccgcaaccgctggtgtacgcattaaacctaaaatgacggtggaacatatggcgaccgccatgtctctggcggcgcaatgtgaaggggtggtaatcgccggaaccttctcccgccattacgccaaaagttataagctagcgacctgctcactcacgccgccgctgcaacgcaatatgaacgtgtattaccatgcgtggcgtgcgcaaacgcccgccactaagcgctttaaagagtttctattcagctatatagatgagcatcatgatgccccggccaaccagcggtag

SEQ ID NO: 249999 - DNA, 1191 bp, Klebsiella pneumoniae
atgaaaataaccagcgttgatattattgatgttgctaacgactttgcttccgcgaccagtaaatggcgcccggtggtggtaaaaattaataccgatgagggtatttccggttttggcgaagtagggttggcctacggcgtcggcgcctccgcaggcatcggcatggcaaaagatttagccgccattatcatcggcatggacccgatgaataacgaagctatctgggaaaagatgctcaaaaaaaccttctgggggcagggcggcggcggcatattttccgctgcgatgagcggtattgatatcgcgctgtgggatatcaaaggtaaagcgtggggcgtaccgctgtataagatgctaggcggtaaaagccgcgacaaaataagaacttacgccagccagttacagtttggctggggggacggcagcgataaagatatgctgaccgagccggaacagtatgcgcaggccgcgctgaccgccgtcagcgaaggttatgacgcgataaaagtggataccgtcgcaatggatcgctacggtaactggaaccagcaaaacctcaacggaccgctcaccgacaaaatcctgcgcctgggctacaaccgtatggccgccattcgtgatgcggtcggaccggacgttgatatcatcgccgaaatgcacgcctttacggatactacatcagcaattcagtttggtcgcatgatagaagaactgggtattttctactacgaagaacccgtcatgccgttaaaccccggacaaatgaaacaagtagctgataaagttaatatcccactggcggctggcgaacgcatttactggcgctggggataccgtcctttcctggaaaacggtagcctgagcgtgatccagcccgatatctgcacctgcggcggcattaccgaagtgaagaaaatctgcgatatggcgcatgtttatgacaaaacggtgcaaatccacgtttgcggcggaccaatttccacggcggtggccctgcatatggaaaccgcaatccctaacttcatcatccacgaactgcaccggtatgcgctactggagccaaatacgcaaacctgtaagtacaactatctaccgaaaaacggcatatacgaagtcccggagcttcccggtatcggccaggagctgaccgaagaaaccatgaaaaaatcaccgaccatcaccgtaaaataa

SEQ ID NO: 250000 - DNA, 1263 bp, Klebsiella pneumoniae
atgtcgatggcccttactgcccccccgaccaggaaaagatttttaatcgttgcctgtttatttattggaatattcattgcctatctcgaccgcgttaacgtttctgtattagcggcgaacgaacctttcttagcctatatgggtattgaaggcatgcctttgcaaattggcatgatgatgacagtttttctggccgcttatggtatcgctaatgttgtattatcaccacttggcgactaccttggtccgagaaaagcgatgatgctgtgtatcctaatctggaccatcgccttaattattggcggggttgcgatatcgtttgcattaattattatttgccgcatattactgggtatcggagaaggtttttattatccgctgcaaagcgtatttattaaaaactggtttccgaagcaggagcgtggccgggcaaacgcagcgtggatcgtcggccagtcagtcgctcccgccattgcaatgccttttttcacctggtggataggcacccacggctggcgttccaacttctttttatgcgccgcgctcgggttaatcccactctggctgctatggcgatatgttactgataaaccagaacaacataaaagtatcagcgaacaggaactggcttatatcaaagccggacaggaaacggaaagcgaaggcaatagcgaaagttttatgctgcgggtaaagcccgttattaccaattactgctactggatgctggtactgtggtacctatgtctgcaatgcctgtactggggcatgatcacctggctaccgacttacctgaaatcagccagaggtttcagttgggcggaaatgggctggctggcgtcgcttccctttgtcctgtcgatattttcaaaagccgccgcggggatcttcgtcgataaaataggacgtagcgcaccaatattaatggtattaatgttctttgccggggttagcatttactttggtacagtaaccgaacataaatatatgtctgcggtactcctttcctttgccgtggctttttgcacgatgggtacccccgttgcctggacgttattacagggaatgataccaggaaaatctatttccgccgccagcggcgtaatgaacggtgtcgccaatggcttgtcatcattatcccccgtatttattggtttatttattgcgattacaggaacctatgccggtggattattatgcctggtcttcatcagcgctatcgccgtattgtctgctttgatcttaacgattaaaaaatattaa

SEQ ID NO: 250001 - DNA, 249 bp, Klebsiella pneumoniae
atggatagtctttcgttaggggctaacattattggtccttctaaaggggcgttcaaggatcttgcaaatgatgggatttgcttcgtttatgacaatttagatgagcttccagatatcaaaaagcgattttctgagattaataaaacagcagttcaattttttgttcataagcattcttgggatgactttgcgagtaatatttctggcctgatcaattcatcaatcgaagagaaattaaaacatgggtaa

SEQ ID NO: 250002 - DNA, 717 bp, Klebsiella pneumoniae
gtggcgcttcgcttacccggcctacaaaaccatctacctatcagaaggttactcaacaccccaggtccggcaagcgccgcgccgccgggcaaggacagcgggcgcggtgccgcttctgtgccgggtggcggctacgccttacccggcctacaacgccatttacctatcagaaggctactcaacaccccagacccggcaagcgccgcgccgccgggcaaagacagcaggcgcggagccgcttgtgtaccgggtggcgcttcgcttacccggcctacaacgccatttatatatcagaaggttactcaacaccccaggcccggcaagcgccgcgccgccgggcaaggacagcgggcgcggtgccgcttgtgtgccgggtggcggctacgcttacccggcctggagttcgtgcgacctgtcgttaatttattcaccagccttgctgaaactgccggtgctggcggcctcaaaatcgctgagacgttcccggaaggccggggcagcccgcatggatgcgggctgagggccgtgttttgcacggacgctgcctcggcccgacccgaagcctgcagggataagtcgaagggaccgcgcagcggcgattttgctggccggagcccgggggtacagggggcggcggcgactggccgccccctgtgcgctccctgcaccgtaagagacataacgcagaaaattaaccgggagcgcaatgtgcgctga

SEQ ID NO: 250003 - DNA, 153 bp, Klebsiella pneumoniae
atgctggcagggcaaggcttttactctgaaatggagaaacacattagcggcttgctgtatgaactgatcaactatttcgctgcggaaatgaaagcgcctcgctggctccgcactgccgatggcgtgaagtttatcgacgaggtggccgcatga

SEQ ID NO: 250004 - DNA, 291 bp, Klebsiella pneumoniae
atggctgctcccccaatccaaacacatccattacttgctgttccctttaatgccgccacggatttcactgtattggccgaccactgcgaaaacttcgccgaaacactgattgaaagcaacgatcccacactgaaaatggcgctatgcggcaagctcaatgcctgtctgacgctgttacaacccacgttgttagaacccgtcccgccccatcttattgaaagcctgaccgttgacaccctccctgcaaatttcccccgtttcgagcctgaatgcacagagctttgtcgctaa

SEQ ID NO: 250005 - DNA, 636 bp, Klebsiella pneumoniae
atgaaacgacgtgacaccatcgtgcgctacacggcgccggaacgcatcaaccactgggtcaccgccttctgcttcatcctggcggcggtaagcgggttaggctttttcttcccgtcctttaactggctgatgcatatcctcggcacgccgcagctggcgcgaattctccacccattcgtcggggtggtgatgttcgcgtcgttcatcatcatgtttttccgttactggcaccacaacctaatcaatcgggatgatatcttttgggcgaagaatattcgtaagatcttcgtcaacgaggaggtgggcgataccgggcgctataacttcggccagaaatgcgtattctgggcggcgattatcttgctggtactgctgctggtgagcggtgtgatcatctggcgtccgtattttgcgccggctttctcaatcccggtgatccgatttgcgctgatgctgcattcatttgccgcagtggcgttaattgtggttatcatggtgcatatctacgccgccctctgggtgaaaggcaccattaccgcgatggtggaaggctgggtcaccagtacgtgggcgaagaaacatcacccgcgctggtaccgagaggtccgccagaaacaggaaaagtcatctgaatga

SEQ ID NO: 250006 - DNA, 1911 bp, Klebsiella pneumoniae
atgcgtgatctgatccttcaactcagcaaaagttcgatttattcaacaaagccgctattttgttgtgagctcatcaaaaaacggctgaaaatcgaaaacggcgagatagttgatgccatgacgattggtatttccggccaatcacagtttggggcagatatttttacgcatcgccagcacggcaatcaggacgtttattcgttatacgaagtaaaacggtgtaaaaaatttacaaaaagtcattatattcccactgtcaagcgttttaatgaacatcgggaaaaatggcaggtgaatatcaatgagttttacattttcctcagtgagaaagcgtcagcaaaattaatagcggaatacaaaaaacaagaagctatctttaaggaactgaatatagtacatcgtctgcttgatacggaattgatccacgactggctgaaaaatctgtattgtccagatctgttgtatcgattttgtcacgagagctgggtatctcttttttatggcgagcgagcactgttaaatatcaaaaactatggcgtgtgggactataacgaatcttctgcctggcgaaattacacacatccatatgaacacattactggtgatacctatacacttcagaacgatcatgtgtttattcaggggtttttacctcatctgaaaggaaatccactatcctgttttattgattttcgtaatggccgctatagccatgttttgctgacgatgagtcagaatgacctgctaaattcggccttcgaaggggtcggtagtccaccggaggcgggagtcagaccgtgggttttaaaagaacctcatggcgaaaattattattgcgatatcggtaactgccgccttgcactaaccctaaatgaaacacgctccctctgtgatgcttttgataaattctggaagtgctataaacagcgcatggaagaaattgaccggatttgtcgcaccgttgatttctcgaacagtacaccactcggtgataatattcatctcattaccattccttattggctatggggtcgcatcagcaccttttgtcaacatcatgactatctggataccaaaggcgagtggtcgatatttaatcctgcacgtgagcgcattatggtctttacccgtcataaagatgaagtaatgaacgaagggcatcacgtcacgctattagccagccgcgatcctaattttaatcgcctcaataatcatcgcgtggcactaatctggcaacctcccagtcgctacgatattgatagtatggaagaggacaccatcgggcctcgtaattactgggatgcactgacaacatatcgctggctgatggagaaattaatccctgcggcagatagctggtactgtgctaattactttccagaacgcaggggctggcaacgactgccatttcgcgcaccacgccatattccctatacatccgatgatatttattcgcactaccagcccgaaattaatatctctgttgaacaggtagacagcaagcagagtctgctggcgttgctgaccgaactccaggatttttatcatctctacactcgtcgggtgtactttaaggcaagtgagtttgagcaactttgcgatgcctttctctttttgttaaacaagacaaccgtcaattactggggctatatccgcagtagcgtcggtgcttcgcaggaggagcgagagtctgtggtaacggcattgcaaaggtatcggagggaaagttcggtttatgaaaagaattcgtcactgtatgactatctgtttcgcggcatgatggcgctatttggtgacggcgactgccatattaacgaagttgaagcgataaaggctgcgacgctgttgcgcccctttgtggataagatgtcggaggggcgttttttgcggcgctgtcagaagagattatga

SEQ ID NO: 250007 - DNA, 6177 bp, Klebsiella pneumoniae
atgagtgaccgaagaccagaaaagcgatttagtaacagccccctaagtgccgcccacaggggttacgtctaccaagatttggtcacggcgtatctattcatctgttgccttgttcgccgagacgagaagataacagttgatcgcaaaaccgttgaagacgatcgttttgatgatatcgaggtcattgcgaatgggtgtaaattacgtagacaacttaaatcaagtgaaaatataactaggccattaactttcgatgattttgataaaaagaattcatctttacggtttgatcgattggtcaacacgtttctctcctcagaagataatactgctacagaagaatatcgcctctgtgcaacatggcagtatcctgattctgacgaccctgttgttgaattacttataccagctgatagtgctggtactttcgatggatactccacggagctatattatttagaccctgataaggtctggccgaaaagttcttccccagtatttaaaccattggtgagtattcctgaaggggaagctgtacctagtcgcaatgatgtaattgctttttgcgagcggtttattattgaaattgcatttcctgctgcttcccttgatcttgaacatcccggtcctctcgaaaatttactattaaaaatgcttgtggatcatgttggtataggtcgctatccaaatgatgaacgccgcgtggaagatgtggcggcactggcagttcatattgcaaatgttgcaaggacaagaggagaatcattatcgccatcccttatagcgcaacgtttatcactccgtaccgactttggtcgtattgctcaagcattccctttagacagagctgttttattcgagcgaaagtcattacagaaacaactctttgaggcagcacaacaacaaggggttcatcttgttcttgctggtccaggggctggtaaatcatggtctttgacgcagttgtcagaagaactggtacaacaggattttattgtagctcgccactattgttttttggaaccaggggatgaactggttgaacgaagaattacaacaaacgttttcttcgctaatttgctggctgaattgcatgaatcctgtcaaaaaaatgcaatccctatacaacaggttttttcttcaggtattcatgagctcgaacagaccttaggtgaaatctctgcctctgaaagacatactgtgatcattgttgatgggttggatcatattgcacgtgttcgtgattcatcattagacctcagtgataatgaaacagatattgttgaacaattggcaacgcttgaactaccagaacgagtaacactaattatcggctcgcaaccaggaaaacatcttgagccattacgggaagtatacaactctaatttaaacgaatacgttgttgaatcttggtcattggaagaggtcagggagctcgcgataaaacttgggttaggtactgcactagcagagattaatctacaagaaaaagaaaataacgtaatacaaatactgttccagcgctcggaaggtaatcctctatatactcgctacctttgttttggtctgatggatggtcttttatctggtgcaattactgaaccgtttgaatggctcataggggtgcccgacctaaatggcgatattaaacattactacgggcacctgtattcgtcggcaggtaaacaagcccaggctattgctgatcttatgggggtgatggatttctcagtaactgaaagtgaattatgtgaaattgtcggtccattacttagaggatatgtttccgcagcactacagatcctacgtcctgtcctaacccaggcaactactcagggcggcatgagggtatttcatgaaagctttcgacgtttcatgattgatgagctggttcgtcagggaagacaagttgctgatattttatatcccgttgcagtatggttggaaacacgaggtttttttgttgatgctaaaagttatcgctttttgctaccaattatgaggagagctggaagagataacgaaattctgacatacgtttcagcatcatttgtacgtgacagtgtcgctcatggctatccttctgaggctattcgaaaaaatattatgcttgcgacggatgtcgctgctcgtactcttaactggcctgcgttggtccgctatgctgaattatccagagcacttaattcttgttttgaggaagggaataatgattggcaagagtattggcggacttactactctatttatggtgctgatgcattagccgagaggttgttgttcgatggtcgtccaacactaactcaaaaagaaggtttactggcctgtcagttagttgattccaagggggttgccgcgccttggcaagaatacttatctattacaacagaaatagaagatagactcgattattcggatactgagtctcatgatgacgttcgttgtaataatgaagaggaagccctcgcaactatttacggtgcgttacggttagggcggtatagacaagttatccgacatatttattggaatctatgtcgttcagggttgcttttttcgccttggttcttgcgtaatttagctcaacaacttgctcagtttacgtccccagccttagtcgaaagaatttgccatagaggggatcctatttataccggacgctacagattaccagacagatctgtctgcctcttatttcttggtctttctgatttctaccggaatataaaagcagtagatgacagtcggcattatgccgaaatggccttatgccaggctgttacgccaatagaagctatgtggtgtgttgatgctggagcttcaggtcaacgtgcacttgatatagtacgtaatgagctgaaagttgaaacaactccagcaaatgagcgttattcacctgaagccaagtttgtacatcaatgggtggcatcagtacgtctgaaagctcgcgatgtggattgtgagaggtttttccagcttcaacgacttagtctggagggagacggctggtatcgctgttggttgaggtttgttcttgctgttgcattggctgaagcggctgcggtgaacaatgaatcatacgatattctagccgcttttgaagaattaactaaggacacaagaccattcgttggtagccccagagcctgcgatctctattcgatacatcccattatcaaagcgagtctcgttcgtgcacttaaactcctcaaaactcgtgaggagtgggaaaaagctctaagtattatttccatggttcgtaatgatacgacaacatatctggatcgagatgaaaatagtccgctttcaggagatgtattgtattcattttttcttgcacacactgtaaagcccgagattgcagatttaatcattaaaaagctagaagatgagcttgaatctatggaagcaaatggcacttattacagtgtacatgcactagaacgaatgaagttggctcaactttatgcgaaaacgtcccccttggaggcaatcaagcactggcaacaggccattgtgtttttattaggctatggttttcgaaaagatattacattgtttgatatcatcgaatgcgttcctgcattaagacttcattcaagagaatcagcgatacgtgcactgattagtctccgcccactactaagtgcagtactttgtcataccgatcatagaacgacaaaacatgcccccaatgcatggtttagttcactgttgcaagttgacgaagttcaggcaatcgaattacttaatcgtactctaatgtatgaacgaggtgttttttcttggacaagtatagaggcgcagaaggagacattacgtcaactggctgaccggggggattcaattttattgaatgcactatggtcaacattattggttgatattgactatgagaatgccggagaagcagtagtaaaagagaggctgtcctctgtccaacgcttacttacacaatatccggcttatgctcaggaacgattcacagtactttgtgcagaagtatttaatgattcttctaactaccaattaagcgcggttgggcctttgcggcaatttgccgaagaacatagtctgcatatgcctgcttacaaactacatgaaacgaataaaaatagagaaactcgtcgaagagaatatatcggagatacatctccgatcacctctatagctttacgcattccagtatttccgccagcaccaaaatttgtcgaactgctaacgatattgcgaaagctttcaaaatcaactctttctcgtgttgaatatcaagagtctgtttcactaccattaagctatataatgacggaaatggtacaaagaggagaagaagatcaggctctgcgtctactctatttttttgttcacgaacgttcttattggtcgctggaaagtattacgccggtaatgtgtctggcagagtgtctggataattctggacatgaaaaattggctgttgttgcctatacgcttgctttcacttcggcaagaggaggacggggatggctcaattttggtgatgacacacaatctgcacctctccgtcgggctctggagatggataaaaagttggcactgcaaacgctggcacaggagacgctccgacggctaaatatggacggctattatgggttatcccgtcacctgattgaaaggatagctgactggggcgatcatgaactggcagtgaatgcctgggaagaggccttcaccattattgaaagccgattaccgctccccggtcaaattcatgtgtttgaaaaacttgaacttcatgctacccctgaatggtctttggatgaatcactttgtgtgcttttactcacgaatacaggtaatgcggtcatctccagacggatagcagccctgtcaggtgttgctcgactggtaaaagagagaacagaactcttttataaacctctaaaatactatctgatgcataccagtagtgtttcctcactacaatccatactacagattcttagcgaaacgctggcagatgtaactgctttggttcaaaggctcaaagagccattaagggattatactcaaagtccttcattaagtttgtcactgttggccaagcttcttttaacgcgtatcaaagaaacatcatttaacgcgaaatcaactatgttattggcaactggcacaccttcaaataaagccatggaattagtttcctttgctgatgaaagctgtttattgaatatttttcaagaagtatggcctgagttacctacccttatggctaccagaatggaatcatatattactgatgatgctttaaatgttttccagcattttatgaagaaacgatacgaactcaagtatgaccgaggaaattacgtaaaaccttcagctcgaactttgctatggcatactgaattatttcttgccatttttgatgacgttttgaccgaatttccggcacaactctggcgtaagggattatgggaagcagatatagaacgtcgcatcctgggacaaattctgccttttatgcctcttcatctggctctggatgccagtcggatccccagaccaaattggccgttatatgaaagtaaacaatataaactggcagaatttacacgggtctctaacgaagacccaacatgggggggatggataagattaggactgtttgaacaatattatttccgggcagatggtaaagattatggccccatggacaggagaacggtgcagtgcgctgcgattgtcaggacaaatcctgatgggatggttcctccgcaagtatcgcctttaggcagtgatgatgccttagtttggtgggaagatattgattggatggaggccatgcaggctcgagcaaagccacaattagttaagctggataaagtcaaagactggttggatgatgtctttgtcctgcttcctcctgcggctctgaaatatgatgcacaattgaaatcatctcattacgcggggccgctatgctggtacgatgagaatgaccaaccggccgttgtattacgaacatggcgggttaagggaaaaggtactggtgacatagatgcccacgtaattatcggcgctgatttaattatgcatcccaaactggaaaaggtattgcatacggcatacagcggacctcttaaagagcttaattctgttcactgcgaaaccatttcgtcgaagtgcggagaataa

SEQ ID NO: 250008 - DNA, 858 bp, Klebsiella pneumoniae
atggagatattaggaagtttccttttacaaacgatcacatccaccgctttcagtctggtatttctgactggtgttggatggctttttagaacttggattagaaaccgaattcatttaagtattaaaaatgaatatgataataaattagagaggcttaaggctgaacttaaaaacgaaggcgatgctcatctaacagatatgaaggcagaattcgatcgacaatcaaacatattaaaaattgctgctgcgtctttctctgaggtacaaaaagcaacaatttcaagaaaaattgatgcagtcgatattctttggaaggggataatcgactttcgcaaaaacttcccgggtgcagcctcttttacggacgttcttactgatgaagaaatgaaaaatttttatactgatacacgattacataaatactcacatgaattggaacaatttgatatgacatatttaatcaatgccagctctgaagaagttaagttggtaaggccacatattggtgaatttgtgtgggcactttattctacttattgcactattttgatgcgctccatttatttattgaaggcaggaaagaatgagccatccaaagtggcatggcattgcgatgataatattgtaaacttaattttagttgcatttggtgaagagtgttcttctgagtttaaaaaactccgttgggggagatatcaatggcttcataaccagtttgattcgtcattatttaaagcaattgatactcttctaactggtaaaagtttcagtgatgcagctttacatgaagcacaattgatggagcgtcaaattagtgccagtagatcaaatgagctcaagatttcacatcctctttaa

SEQ ID NO: 250009 - DNA, 681 bp, Klebsiella pneumoniae
gtgactccgactccgactctgactccgacagcgactcggattcggacagcgactcggactctgacagtgactctgattccgacagcgattcagactctgacagcgatgcggattcagacagcgactccgattctgactccgactcggattctgactctgacagcgactcggattcggacagcgactcggactctgacagcgactcggattccgacagcgattcggattccgactccgactctgacagcgactcggattccgacagtgactctgattccgacagcgattcagactctgacagcgatgcggattcagacagcgactccgattctgactccgactcggattctgactctgacagcgactcggattcggacagcgactcggactctgacagcgactcggattccgacagcgattcggattccgactccgactctgacagcgactcggattccgacagtgactctgattccgacagcgattcagactctgacagcgatgcggattcagacagcgactccgattctgactccgactcggattctgactctgacagcgactccgattctgacagcgactcggattccgacagtgactccgactccgacagcgactccgattcggataccgaaccgcaggcaaatgatgatacccataccgcggctatcgataccgtag

SEQ ID NO: 250010 - DNA, 219 bp, Klebsiella pneumoniae; identical to SEQ ID NO: 201681

SEQ ID NO: 250011 - DNA, 4233 bp, Klebsiella pneumoniae
atgacttcccagcgccaacaagcgacgaaaagcgtttgcccttactgcggggttggctgcggcatcgtgatggccgtggaaaataaccgggtgaccaaggtcagtggcgacaaacaccatcccaccaacttcggccggctctgtaccaaaggttttacctgtggtgaagcaattgccgaatccggacggctggacgcggcctatatccgccaggcgcgcggacgtgatccggtgcgcaccgacatggatacggccatcaacgaggccgcccgccgcttgcgcgccatcctcgacagtcacggccccgatgcgctggcgctgtatgtgtccgggcagatgtccctggaggcccagtatctcgccaacaagctgtgcaaaggcttcatccgcaccaacaacatcgaatcgaattcccggctgtgcatggccagcgccggcagcggctacaagctgtccctgggcgccgatgggccaccgggctcctatcaggattttgatcaggccaacctgttctttgtgatcggcgccaatatggccgactgccacccaatcctgttcctgcgcatgatggatcgggtcaaagccggcgccaaactgatcgtcgtggatccgcgccgcaatgccacggcggaaaaggccagtctgtatttacagatcaggcccggcaccgatctggcgctgctcaatggcctgctgcatctgctggtggcgaatggccacatcgaccaatccttcattgatgaattcaccgaaggctgggatgtcatgccagccttcctggaggactatccgccggagcgagcggccgatattaccggcttgccggagaccgatatccgcaccgcggcgcaactgatcggcgacgccagggactggatgagctgctggaccatgggccttaaccaaagcacccatggcacctggaataccaatgccatctgcaacttgcatctggccaccggtgccatctgccgtcccggtaccgggccgttctccctcaccggtcagcccaacgccatgggtggtcgtgaaatgggttacatggggccgggcctaccggggcaacggtcagtgttggtggaacaggatcgcgtttttgtcgaaaacgcctgggggcttcccgcgggtacgctgcgcacggaggtgggtggcggcaccgtggccatgttcgaagacatgatggcgggcaggatcaaggcctgctggatcatctgcaccaatccggtggccaccgtgcccaatcgccagaacgtgattgccggtttgcaggcggcggaactggtgatcacccaggatgcctttctggacacggaaaccaatcgttacgccgacattctgctgccgggcgcgctgtgggcggaagccgaaggggtgatgatcaattccgaacgcaatatgacgctgatgcaaaaggcggtggagccccccggcgagagcctgcccgattggcaaatcatcgccagagtcgcctgtgccatgggcttcgaggatgcattcagctacgcatccgctgccgaggtattcgaggaaatcaaacaattctggaacccagccacggggtatgacattcgcggcgtcagtcacgctgcactgagagaatccccattgcaatggccttgcgcgccgcaggcggccagtgaccgcaatcccatccgttacctgaacaatggtgtcagtcaaacgctggcggtgcatgaggatggtagccgaccgcgtatcgtgtttgccacgaaaagcggcaagggggtattcctggctcgaccccatggcgatccagcggacatgcctgacagcgattttcctttcgtgctcaacaccgggcgcctgcaacatcaatggcacacgctgaccaaaaccggcaaggttcccaagctcaacaaactcaatccgggaccctttattgaaattcatcccgaggatgcggccgacctgggcatccaggatcagacgtcggtcgaaatccgatcccgccggggccgcgccatcttgcccgctgtggtcaccgaccgggtacgccccggcaactgttttgcaccgtttcattggaacgatgtgttcggtgaggagctggctatcaatgccgtgaccagcgatgcaatcgaccccatttccaagcagccggaattcaaattcagcgcagtggcgttgagccccgtcagcccgccgaaacccactgcaaacatccatgttacacaacagcaacaatccggcacggcgatgaatgccaccgcgccagcgctgtttacccgagaactcgatatgactgtcattcactctctggctcaactattgggccttgcggagccaccctccatagcgttagtccccgatgaaaaactctacctgcaagggtacctacttggtttgcaacaggatgccagtcgcttacagggtggtgtgccgaccttgcccaccacagcgcctatcgcccgtgagcgccgcttgctgatcgatggcctgttgtccggtttgtttgcccgcaccaggttgaatgacagtgaccatcttgcgctgccaacgggttttgatgaggttggcaccacgccggaaaaaccgaaagtgctggtcctctgggcttcccagaccggcaatgccgaggacgttgcaggccaatgccgtgaccgcttgcgggatcagggaatggaagtgcaactgctgggcatggatggagccaatgtggaaatgctggcgaccagccgctgtgtactgctgttggccagcacctttggcgacggcgatccaccggataacggtgctgcattctgggacgcgctggccggtaacccggcacggctggaaagcacagagttcgcggtgctggcctttggcgattccaactacgatcagttctgtggtttcggccgcaagctggacgctcgcctggaggccatgggtgcccggcgactgataccgcgggtggattgcgagcccgatttcgaggacagcgcccggcagtggcttaccagtgtaacaaaggcgcttgcgggtgcggcaacagcggccaaaaccgccgaaacaattccggtgttaacgattggagataacgatcccgatgaggtaccggaattcacccatggaaaagtaccgactgcgaaagtacaggacgccgcccagcagtggagccggaaacaaccctatcccagccaactgttgctcaatcaaccgctgaatggcaaaggttcgggcaaggacacgcggcaatacggcttcgacctgacgggcagcggcctgcagtatgaagcgggcgatgccctcggcgtatggccgcgcaattgtcccgcccagatcggcgcgctttgtcaggcgctgagcctgaatgaacaggagactgtggaggtttcgggcaaaggcgagataacactggccgaggcgctggccagccactacgagatcggcaacatcagcaaagatttcctgcgtttcgtcgctgcccacaacgacaacccccggcttgttgcattgctggaggatgacagcaatgcggctttgaaaaagtggttgtgggggcgtcagctcatcgatgttgtgcgggcctttcccatcagggtgagcgcgcagatatttgtcgacgcactcaaacgcttgcagccccgcttgtattccattgcctccagccccaaagcgcatccggaccaagtgcatctcaccgtgggcacgatacgctatgccttcgagaaccaggcgcgcagcggcgtgtgctcgggctttctcgcggatcgcgccggcgggcaagcggtgccgatttttgtgcagaaatccggacattttcgcctgcccgccgacccggacaggccggtaatcatggtgggacccggcaccggtattgcacccttccggggttttttacaggaacggcagatcaccggcgcgaaaggcaagaactggctgttctttggtgagcagcgtgctgataccgatttctattaccaggatgagttggaagcactccggaaacagcaagtgcttacgcgactggatacggcgttttcccgagatcagcatgaaaaaatttacgtccagcatcgaatgatcgaacagggtgatgccctgtggcaatggttgcaagaaggggcctatttctatatctgcggcgatgccagtcgcatggccagggatgttgacattgcgttgcgggacgtggtgcagtcacacggtaaaatgagtgcggataaagccgaggaatatgtaaaaaacctggtgagagacaagcgttacttgaaggatgtctattga

SEQ ID NO: 250012 - DNA, 468 bp, Klebsiella pneumoniae
atgactaaagacatcaataccggagatttactcccggatgtgcacggcatgctctgcttctctctctactccgcgggacatgcttttacgcagctctatcgtccaatgctcgataagctgggattaacctatccccagtacctggtgatgatcacgttgtggaatcaggatggacgtactgtgaaggaactgagtggaatactcttccttgagtccagcacgctgactcctctactcaagcggctggagacggcgggcttgatcacccggacacgcaatccgaaggatgaacgtgaagtgcttattcatctcacagagaaggggaacagattgaaaattgaggccagcaatatcacgcgctgtattgtggatactcttgagatggatgcggatgtggttgctgacatcaaagcctcagtcgataagatccgtgatcagatacatcgtgcacataaaccggatatctga

SEQ ID NO: 250013 - DNA, 837 bp, Klebsiella pneumoniae
ttgcatacaaacaaatcgcgcacaaacaaattgcgcacgaacatacaaccgttgaagagagaaactattatgtctaaatttgctgcctccctcgccattgccaccgctctgctgtctgccagtgctgtcgccgaaaccgcaaagcccactgttgtcctggtccatggtgcctttgctgactcttctagctggaatggtgtcacccggatcctgcaaaaagacgggtataacgtcgtcgcagcggctaatccattgcgcagtgtttcaactgatgcggcttacgtctcttctgttgtgaacaatattaagggacccgttgtacttgtcgggcattcctatggtggtcaggtaataacgaatgcagcccgggaaacaaaaaatattaagtcactggtttatgtcgccgcatttgctcctgacgcgggtgaagcggccgctgaactggctgggaaattccccggaagcacgcttggcgaagcgcttgccgcaccggttaagctggctgatggaaacgtcgatctgtccattgagcagtcgaagttccatcagcaattcgctcatgacgtgtcagctgaaaatgctgcattgatggcggcaggacaaagacctgtgaccgaagcagcattaactgaaaaatcaggggctcccgcctggaaaacactgccttcttacttcatttacggtgacagcgacaaaaatatccctgtcaaaagtttgcgtttcatggctgaacgcgcgggatcaaaacacaccgttgtgatcaaaggggcatcccatgtcgtgatggtttctcatccgcaggacgtagcgacacttattgaggaagcagcaaaataa

SEQ ID NO: 250014 - DNA, 1008 bp, Klebsiella pneumoniae
atgaatatcaaatcggcattactgtctgccgcgatggcagctgtttcagtcaactgttttgctgatacacctgcaccggatcgccatgtccagcaattcctggatgcattaaacggaggcgggggaaagcccatcgaacaattatctccccaggccgcacgtcaggtgttgattgatgcgcagaaaggcgccacgctaccggcagcggacgtcagcgaaaaaacgatcagtgttgatggcctgaatattacgctgaaaattgtgaagcctcacaacgcacaaggcactctgcctgttttcatgttcttccacggtggtggctggatactgggcgatttccagacacatgagcgtcttattcgtgacctggtcagtcagtccggagcagcagcggtctatgtcaactacgccccgtcaccagaagcgcacttcccggttgctatcaatcaggcatatgctgctacccgctgggtggctgaaaacggcagcgagattggcgtggatggcaaacggttagcccttgtcggtaacagcgtgggaggtaacatggttgccgccgtagcgcttcaggcaaaacagcataagtcacctgccattcgctacaatgtcatgttatggcctgtcactgacgcaaattttgataccggttcttataatcagtaccaaaacggttatttcctgtcacggaacatgatgaagtggttctgggatgcctatacgaccaaagagagcgagcgtaataatattctcgcctcaccactgcgtgcaacgcgtgagcagctgaagggcttaccacccacactgatccagactgccgagtttgacgtgcttcgtgatgagggagaagcgttcggacgtaagctcgacgcagcgggagtggatgtgacggtgacccggtataacggcttgatccatgattttggtttgctgaatgcgctgagtgacgttcctgccgtacgggcagccataggccaggccgccggccagctgaaagaacatctgaaataa

SEQ ID NO: 250015 - DNA, 1149 bp, Klebsiella pneumoniae; identical to SEQ ID NO: 118526

SEQ ID NO: 250016 - DNA, 570 bp, Klebsiella pneumoniae
atgaacatgttcatcaaaggaatggcgtcagcagcggcagtaatgatctttgccccaacagtggcgctggctgctgatggaaaagtgaccttcaatggtgaaattattactaatacctgtactgtcatcagcggtgataaaaataaaattgtcacactacccactgttcaggtgtctgcattgtctgccgcgaatcaaactgcggggacaacacctttcactattggtcttgaaaattgtgcaagtgcttcagatgtttcggtctattttgaaccgaatgaatatgtctcaacggaggggcgactaaaaaataccattcctgctgatgactctaataagggcgcgaataatgttgatatcgagctactgaataataatcatggtgtaattgaccttgcaaaccaaaccattgatccaacgaccggaaaagtcacgggtggtaactcaacggtcgtgacgcctgtcgatggttctgcgacgctgcctttctatgcacgttactttgcgacaaatgccgctgaggctgggaaagtgagttcctacgtgaacttcactatcgtttatccgtaa

SEQ ID NO: 250017 - DNA, 696 bp, Klebsiella pneumoniae
atgactcgttacttttttacgtttcttttattcgtatatatacctttcgcgaatgcaaatattgtcattgatgggaccagagtgatctttccatctgaccggaaagaggtatcagtcagagtcactaattcaggggatatgccgtcactgacgcaagcatgggttgatggtggcacaatacaaaataatacaggcaaagacatggcgccttttgtggttctgccgccgattattcgtgttgaaccaggaaaaggacagacctatcgtctggtttttagcggcgcctcgcttccacaagatcgtgagtcattgtactggtttaacatgttagatataccgccagagcctaaaaacagtcaaggtagcaactatttacagttatcgattcgttcacgtattaagttattttatcgtccgataacattaaagggaaatgtcagcgaggctgccaaatctttaacctgggaatttcacaatgataataacacactctttgtgaataacccatctccatggtacatcaccattgatagcatcacgattaatgggaataaacaacctgctggtatggtggcgccattttcaacgatgagcataaataataaagagcatacactgaaagccatgccaggtaagttcagcttcacaaccatcaatgattatggtgctattgtgactcataattatcctcagtaa

SEQ ID NO: 250018 - DNA, 468 bp, Klebsiella pneumoniae
atgactaaagagataaataccggggatttactcccggatgtgcacggcatgctctgcttctcgctatactccgcgggacatgcgtttacgcagctctatcgcccaatgctcgataagctgggattaacctatccccagtacctggtgatgatcacgttgtggactcaggatggacgcactgtgaaggaactgagtggaatactcttccttgagtccagcacgctgactcctttacttaagcggctggagagtgcggggttgatcacccggacacgcaatccgaaggatgaacgtgaagtgcttattcatctgacagagaagggggatacactgaagattgaggccagcaatatcacgcgctgtattgtggatacccttggaatggatgcggatgcagttgctgacatcaaagcatcagttgataagatccgtgatcggatacaccgtgcacatagaccggacatctga

SEQ ID NO: 250019 - DNA, 822 bp, Klebsiella pneumoniae
atgtccacattcacaacgacagacgggactggcattttctataaagactggggctcaggtcagccagtcctctttgctcacggatggccgttatcgtctgacgcctgggatcagcagatgctcttcttcagccagaatggcttcagggttatcgctcatgaccggcgcagccacgggcgttcggaccagacattccatggcaacaatatggatcaatatgctgacgatctggccgaacttattgaagcgctggatctgaaggacctgattttagtaggccattccacaggggggggcgaagtagcacattatatcggtcgtcatggtacttcgcgtgtagctaaagttgttttggttggcgcagtacctcctcagatgctccggacggatgctaatcccgacggtactccgctggacgtatttgatgccatccgcgaaggaacggctaaaaaccgtgcccagttcttcttcgacctgaccatgccattctatggcttcaatcgcgaccatgtaccaaccaatgacgggctgcgggaaaactttcgcaggatcgggctgcagggggggattaaaggacaatatgactgcatccatgagttctcagaggtcgactacacacgcgatctgcagcagattgatcgtcctaccctgattattcatggtgacgatgaccagattgtgcccattaaggcatcagcacaccgcgccgctgagatcgttgcgaacgcaacactgaagatatatgccggcggttcacatggtctggctgagacagaggccgaccgctttaatgctgacgtactgagctttattcgcggctaa

SEQ ID NO: 250020 - DNA, 768 bp, Klebsiella pneumoniae
atgtctaaatttgctgcctccctcgccattgctaccgctctgctgtctgccagtgctttcgccgaagccacaaagccgactgttgtcctggttcatggtgcctttgctgactcatcaagctggaatgatgtcacccggatcctgcaaaaagacggttataacgttgttgcagcggctaatccgttgcgcagtgtttcgactgatgcggcttacatctcttctgttgtgaacaatattaagggacctgttgtacttgtcgggcattcctatggtggccaggtaataacgaacgcagcccgggaaaaggaaaatgttaaatcactggtttatgtcgcagcatttgctcctgacgcgggtgaagcggccgctgaactggctgggaaattccccggtagcactcttggcgaggcactttccacgccggttaagctgactgatggtaacgtcgatctgtccattgagcagtcgaagttccatcagcaattcgctcatgacgtgtcagctgaaaaagctgcgctgatggcagcaggacaaagacccgtgaccgaagcagcattaactgaaaaatcgggggctcccgcctggaaaacagtgccttcttacttcatttacggtgacggcgacaaaaatatccctgcccaaagtttgcgttttatggctgaacgtgcgggatcaaagcacaccgtggtgatcaaagaggcatcccatgtcgtgatggtttctcaccctcaggacgtagcctcacttattgaggaagcagcgaaataa

SEQ ID NO: 250021 - DNA, 294 bp, Klebsiella pneumoniae
gtggcgcacgtattcggtgaacgcacgctggccacgctggagcgtcttccgggcctgctgtcggcctttgaggtcgtggtatggatgacggatggctggccgctgtatgaaccccgcctgaagggaaagctgcacgttatcagcaagcgttacactcagcgcattgagcggcataacctgaatccttggccgcatctggcaaggctgggacggaagtcactgtcgttctcaaaatcggtggagctgcatgacaaggtcatcgggcattatctgaacataaaacactatcagtaa

SEQ ID NO: 250022 - DNA, 1008 bp, Klebsiella pneumoniae
atgcccgctaaccatcatccctggctggtgcacggtagcctggcgctggtgaccctggcgatcgcggtcgcctcgctctgtttcggccagtacccgttaagcctgagcgccgttggccacaccctggtccatctgccgccaggtgaaggggtgatcgggcagatcgtctggtcggttcgcctgccgcgcgtggtgatggccctgctggccgggggcgcgctggggctgtgcggcgccaccttgcagggcgtgttccaaaacccgctggtggacccgcacatcatcggggtaaccgccggctccgccttcggcggcacgctggcgatcctgttgggcgtcggcagtctgctgatgatggcctcgacctttttcttcggcctcgtcgcgctggggctgatttacgccctcgccgccctgcaggggcgggacagcacgctggggctgattctgtccgggatcattctcagcggcttcttcgccgcgctggtcagcctgatgcagtacctcgccgacagcgaagagacgttaccgaacatcgttttctggctgctcggcagcttcgcgaccgccagctggcataaggtactgcttatgtccctgcccctggcggtggctgccggggcgctgtggaagctgcgctggcgtatcaacctgctggccctggaggaacgcgatgcccgcagtcttggcgttccggtggccgcgctgcgtcgcggcgtgctggtttgctgcgcggtgctggtggcagcccaggtggcggtcagcggcagcatcgcctggatgggtctggtggtcccgcacctcgcccgtctgctggtaggggctgaccatcgtcgcctgctgcccaccgccttctggctcggcgccgcgctgatgctggtggtggacgatctggcgcgtacgctgacccaggcggagatcccgatcgggatcatcactgccctgctcggggcgccgctgtttaccgtgttgctggtgcaatcccgacgccggagtacgacccgatga

SEQ ID NO: 250023 - DNA, 321 bp, Klebsiella pneumoniae
atgagcagtaatgtcacatggggactgcagcgggataacacgccgcgcctgggagcccgtctggtacaggagggcaaccggctgcactatctggctgaccgggcaagcatcactggtaaattaagtgacgccgaatgccggaggctggatgaaacattcccgcactttatcagtcagatggagtcgatgctgaccaccgatgaactgaatccccgccatgcccactgcgtcaccctgtaccacaacggttttacctgcgaagccgaaactcttggcagttgcggctacgtatacatcgccatttaccccactcagcgttaa

SEQ ID NO: 250024 - DNA, 444 bp, Klebsiella pneumoniae
atggatacacacaaccctgagttcgctgagcaggcggcaattactgcctcgatggtcccagacgagttacgtataggcttctggccgcagcactttggctccatcccgcaatggataacccttgaacctcgcattttcgcctggatggatcgcttctgtgacgagtactgcggtggaatctggtccttttacacgctcagtaatggcggtgcgtttatggcccctgatgctgatggtaacgataaatggcatctgttcaacggcatgaacggcaatggtgcggaaataagcggagaggctgccggtattgcgctctgcctgatggcatatagccaccatgcctgtcgcactgaatgcgatggcatgacggatcactattaccgcctgcgggattacgctctgcagcaccctgaatcccacgccattttgcgcattattgattaa

SEQ ID NO: 250025 - DNA, 876 bp, Klebsiella pneumoniae
atgcaaaaatctgatggtcttcaggcctttgagcaacccctggcttcattgccagacccgcttcgcaaacttatccttgtacgtctttgcagtctcactcagtacgagccggtaatcggcatcatgggaaaaaccggatcgggtaagtcgtcgctctgtaatgccctgttccagggagaggtaacacctgtgagcaatgttgaagcctgcactcgcgacgtgctgcgcttccggctccgcaatggcgatcacagcctgatgattgttgatttacctggtgtgggtgaaagcgaacaacgtgatgacgaatacgccgcactgtatcgtcgcatcctgccggaactggatttggtactgtgggttatcaaagtcgatgatcgcgctctgtcggtggatgagcatttttatcgagagatcatgctggcgtatcagcagagagttctgtttgtggtaaatcaggttgacaaggccgagccctgccatcagtggaataccaccagcaatacaccatctcatagccaacagtcgacaattgaggccaagcggagcgctgtacagcggctcttcctgccgcaccatccagtctgtgttgtatcggcccgaactggatgggggctggatgcgatggtagaggcgatgatgcgtagtctgcctgatcgggccgccagcccattgacaacacaactgcatggaaggctctgcaccgagccggtaaaaaagctggcacgtgagcgctttggtcatgccgtagatgaagtgattggcaatgtagagtcatcatcttttctgccagcgcctgtaagggctgtgattcgaaccgtgcgggaagccgtggtgaccgttgcccgtgccgtctgggactggattttcttctga

SEQ ID NO: 250026 - DNA, 3315 bp, Klebsiella pneumoniae
atgagcacagcacgtcgcaatgggaacagagttcggctatttatcggagagcgtatagaacacgcctcggatcgcgatgttttggtcaccgtttgcgatgctttagaaaagggctccgagtgggcctacatattcgccaatttcaacgttaacggccgtcaggttgatgttgcggtcttttccgccacaactacgcttgttattgaagccaagggatatacacaacccatcaaaggcagtgtcaacggccgttggacccaggccggagcgtatggcagtcgacagctacgcaacgggtacactcaagccctaggcgccaagaatgcgttgcgtgacgcgatggccgcgctattcagcgatcttaccggctatcccaatgctttgctggccattacacctgtgattccgtcaggctcctcattgccaccgagtgatttcaaggtagtcactggcggactggatgcgatcaagatttctctcagttcaaggtcaggagccttactaaatgaagtgcaatgccaagcgctcgcagcccatttgagccttgaacgcatatcggaaagagatgcagcaattcatgaaactgtgctcatatcggagcaaacagtgtcgagttataaatccgctttcttggagtatcatgggccaactggtgcacgactggtagaggaccaatacctccttgatgacaaactgatctcggcatctaagattcttgagatggctctgtcgtcgcaatctgcacttctgatcaggggaccgtcaggatgtggaaagtccttgctaagtgcgcgtatcgccacagaatgtatgcaggctggtgtgctgcctatccacatccaaggcaaagacttcgagggtaagcttcagaaaataattgatgccgagcttagactactcggtgcttccgtgcgcgatatattaagagcaagtcgtctccttttaaggcatattgtactgtttctcgacggctataacgaatgcccagagcatttgcgaattactttaacgcgaagccttcaagtattttcactacgctatggtgcaggccttgtgattacctcacaaggcatcatggctaggcaagagcttctgtcagtaaaagaggctcttgtcagcccgccacaatccgcattgaagtcacagctcgcaaaacttagcaaagaagatgaaaacttcacaaactgccagtctctccttgaaatagcactctctgggcttgaagctgaactcattgggcaggcagcagcttcactgcccgctggggcaagtacgttcgttctattcgacacggttactcgcatgcgcctcggcaacttcgcaacggcgggaattcgcgctctttccgggtttgcagaagaactgatctctcaaactgcatttagtgtgtccattcgagagtttgacagattttgcgaagcggcaagtgtgactgacgcggcacggtacgcgatccttgagtcgcggcttgtgtcacagcgtggtgacagacttagcttctctcatgaaatgtttttctatttcttcatggcggaatctgtaatccgggtagcgcgtaaagattctgagcgaatacaagctattctgcgatctccacggtttcatggctctaaggctcttattctcggtgcggtggaggacgattcgacactaaaggatattttggaaaaaaccactgataagggcatcctggagtcttgcgtccgaggagagtgtggagaagccgcaagacgtaccgtcaaagcaaagtttgacgtgctattcgccgaaatggtcgcagagacttctgaactgcgcttcctgatcaatggcgagggatggcatagctgttcgattgaaactgcctatcatcggccaaccctctcgaagtttgaagtttttcttcctgctattggctggcttctaatgcagggggtccatttagaacaaatcatgacggcatgtcgcgtcatggaaggaaaaattgccgaagccaatcgggagctttataaggaagcaagggccaaaaaggtaccacttctgcacgagacatttagccaagcctatgtgttcaatcgtaagatcgcgctttcgcagcttgtgtccttcgtccatagtggtggcctaagttttcgccatagtccagggagcgaatttggtgaagctctgaaaaaatcatggaaggaagcgagcacacatagcgaattctacgtccttctcggaatcaccaagttcacgaagtacgctccgtgggcagcgccatgtgtgctgaatcttcttgagagactgcagagcttgccctaccaccttcagctagacacgctggacttttgtgtacacttgagaaatgtggatgatgccgtaaaagcaaagatgatcgcggcgcttgaggactccatggacaaattgggcgtgtttatgaattccatgatttttgatgcactgaagggtttaggtggattagaaaccgaagaagaaaactacagaacggtggtcttagaggagatcgaaagtgtgtgctccgagacgggaccgcaggccgataccgaagcatggaatatcttctctcgacaatttgatcatccgtatgacggcatttattgggaagagataaataatctcgccagcgctcagaagcggcagttccttttcaaggcactcaaaggggcaagcaccgagtatgtttcgtttgtcgatattctgattcgtcagctcgcagatttcggtgactcatcagtttctgaggctattgaaccttggcttaggctgccagccaaaaagtcggttatgccacaagatacagtcgaggtgtttttcgcagcacacgaagcgatggggattttagacctcccacttcctgccactgtgacatcgactatcgatgttgatgaaactatgcgggcctgcggggaattagcttactgggcttgccggttaagcatttgcgaactcgagtcttcacctcagactctcggtgcacggactacattactggattactcctcttcggcaagtgccggagcactgtggtcttcaacatctcgaatgttgtctacggatggtacaagaattaacgttgcagcgcgctatccgaaaacagccctagctatctgccgcgatgcattgaccaaccatgggtcgcagaagacgtaccacgaacacgggttaatgaacgatcaggcgcgcatagcttccttttccattcaagtgattgggcagtttggtgacgccgatgacctaggacgtttacgcagtctttgcgacgaagaggaactaggtcatgaagcacttaacgcgatccataagattgaagaccgtattcgttatcgaaaataa

SEQ ID NO: 250027 - DNA, 627 bp, Klebsiella pneumoniae
atgaaaacgtataaaggctcacatggggatcacgttctgcagtattgggtcaagattaaccaattactctgtcgcttgactgaccgttaccccagactaacggcggtacgtgtcgatctgcattatccgaagatagtcgataacggagacaatatatgctgtttccctaatcttgaaccaggggtgatatctcgaatgcgtgagtcccttaaagctaaattggaagctgaccgtattcgtaagaagcgtgaaggtaagcgtatttaccgttgccctttatttattatgtgggctaaagagtattccgaatcgggtaaatgccactaccacatttgcctattgttcaacaaagacgcttactaccacctcggggactacgaacgggaagacaacctgagagggatgattacaggtgcatggtacagcgccctagctttgcaacgggatgattgccctgacctggtgacattccctgataactgtcgctacgtactagataacgaagacactggcttcgaggatcattaccaggcgctgctaactcgattggactacctaaccaaagtcgaatctaaagtgtttggtgaaggggatcgtaacttcggttgcagccaaatcgatctgtaa

SEQ ID NO: 250028 - DNA, 1416 bp, Klebsiella pneumoniae
atgctgattggacgtccatttccagtgcaagtactgccattgattatcagaaatgcggtttatgaggtaactcaaaatacacaggcaccatctgctttagttgctgcatctgcccttggtgctatttcccttgcctgccaaaacgggattgatgtttgtaggtttaataatttgcgtagtcccgtatccttgtttttgctgacactggctgattctggggaaaggaaaagcagtgtggataaagcgctgatgaagccgctgtacgatctggaggagcaaagatttatacaatacatgagggattatgcagtttgggaaaatgacatgcaggtgtttaatacccaaaaaaaggcgttaacatcaaagttgaaatcggagatccatcgtaatcaagattcctctgtaactgaagcacaactaaaagcccttatggaaaaccgtccggaagagccggtaaggtacaagctgatgtttaatgatgccactccagctgcaattaaagattttctctgtgggcaatggcgggctattggcataatgtctgatgaagcaggtaccatatttaatggtcatactctaaatgagctacctttcaccaacaaaatgtgggatgactcaacattttcagtggaaaggaaatgtagcccagaaatattcattaaggatgccagacttactctgtctttaatgttgcaacctgtcatttttaaagcgtatcaggagcgtaagggggatatggctaaaggaataggtttttttgcccgctgcctgatctgtcagccggactcaactcaaggttacaggcaaattaccagcccagttacttcaactgaacatcttccagtattccatcaacgattgatggaggtcatcaccgaaaatctggtccgacatgatgaaaataaacgggagtgtctaattttttgtcctgaagcggaacaacgaatgattgagttttataataaagtagaatccgagatggggatgcttggctgtctttcggacttcaaagactatgcttctaaggtcgcagagaatatggcgagaatggctgccttattacactatttcgaggggcgtgggggggatatttcacttattgccgtagaagcagccatacagataatttcatggtacgtggatgagtatttaaggcttttctcacaacaccaggaattaacgcttgtaggctcagaggcaaatgaactttacagctggataaaagaatactgcgttagaaacatgatcccttatctcagaaaaaatacgatattacagtatggccctggtcgctttagaaacagggcaagagtgaacgagttgctcagcacactttactctcagcgtaagatactggctgagaaacggggtaagacgatatttattcaacctgtggagacaactgatttggtttga

SEQ ID NO: 250029 - DNA, 237 bp, Klebsiella pneumoniae; identical to SEQ ID NO: 187383

SEQ ID NO: 250030 - DNA, 999 bp, Klebsiella pneumoniae
atggcaaggcattttcgtcgtttatcggaactgacatccttttctgaggatgaggacgatatgattattcagcaatggatagatggaaagcttcctctgtacgttcaccttgatggtagacatccggtatgtacttttagacgttgcatctccatcgatgaacataaatacgctatcagcgatataatgtatggccgcgatttgtatcaatatccagatagtcccgaaggcaagtggaggctgtttgtgcctgaaacacctttagactcgcaccttaaagtaactcctgaatttcgttatggaggcatggtttacgagtataaatatcgtggaaaggcacatggttattggcatgttaagccatccaattcagccagattctgtcgtggtgattttttgattgcggatgttggattaaaagatctaaaaccagattctctaggggatgttaccattcatgctcatcaagaacgtgattaccttattttttctgaaccaacttatataaatcgaaagtcattatttgttgatgatgcagatattgttaattttgttcaggtgccagaagttagcaaggatttattaataaaacatgcaaggagtgagaagccaggcacgctttacaaagtaccgtcggagcttattgcattatatatattgatgcaggaatgtagtttggataagtccggtgtactgaggccgtctattgtagcaaaacctttgtcgtcattatttggtattgattttgatattgatacagtaaagggatatggtattagacctgagttagaaagggaaaaatcttatcgagttaatgaaaaacaaaggatggctatttcatatcttttgattgaactttgcaagaaaaatggaattgataggtctccaagatcgttatgtgaggaattaaattcactctcgcaattagagcgctattccttgagtttttcatttagcgagtcggagattgagaagtggttggatatttatccagaatga

SEQ ID NO: 250031 - DNA, 933 bp, Klebsiella pneumoniae
atgtcggtaattagcagcatagctacttcgttaaaccagagcgagttagaggtgagagcgtatctatctgatgcatcaggtaagtacaaggtctacaggattcccaaacgcactacgggattccggatcattgcgcaaccagctaaggcgcttaaagagtatcaacgcgccttcctccagctttaccgttttccaattcatgaatgcgcaatggcctatcaaaaaggtaaaagcatccgtgacaacgcactagcgcatgcgcataaccgctatttactcaaaacagacctagaagacttttttaattcaatcaccccagatatcttctggcgatgtgttgagttgtcttctgttgatgttcaactgtttctacccgaagacagacgctatgtagatcaaattctcttctggaagcctacaaaacgcagtacacggttggtgctaagcgttggcgcgccttcttccccaattatctcgaatttttgcctttatgaattcgacaagctcatacacgaaatctgtcggagtttggatattgtctacacacgttatgcggatgatctgacgttttcttgtaacgtccgagatgtacttggctctattccttccatgatcgaaactcttttaaataagcttttcaaaaaaaagttaaggcttaatcgtggaaaaaccattttttcctctatggcacataaccgccatgttacgggcgtcactcttaataacgaaggcaaaatttctttaggccgtgaacgcaagaggttcatcaagcatctcattaaccagtaccgatatggattgatagatgaatctgacaaggcctatcttgttggtctactggcttttgcgaaccatattgagcctgagtttattatcagaatgaacaataaatactcaacagaaacgatggatcgtttaaggaggcatctgtga

SEQ ID NO: 250032 - DNA, 1656 bp, Klebsiella pneumoniae
gtgacaaaacaactggaacgtaaagccaaaggtgggagtttactctccgcctttgaactttatcagcaagagaaaaataataaccttcatgacctaaataataaatctgaccaatggttcgagctctgctggaattacctacaacaaccagcccacgatggtaacctcgatatatatcatcctgaaaatcagttttgcctacgttcaatgtcatttacggatttccgccgatttccacaacttgatatcaactttgaagaagacctgaccattatcatcggtaataatggacagggtaaaaccagtattctttatgctattgccaaaactctaagctggttcacagcaaatatcctcaaagaagatagcagcggacaaaggcttaacgaatactcggatatcaggaacgattcagataacaatttctcggatgtcagttctaatttcttttttggaaaaggccttaagaacatttccattagactttcacgctcaactcttggcgcatctgagcgtagagagagcatcatcaaacctgctaaggaggttgctgatatctggcggattatcaatgagaggagaatggttaatcttcctatttttgcactctactctgttgaacgatcgcatccttttagcaagccagcaaaagagagcattgaaaaacgagaagatcgtttcgatgcatacaatcacgccttgaccggcgctggacgcttcgatcattttgttgaatggttcatctatcttcacaaaagagccgaagctcaaggggcatcggcaatcgaactgcttgaagagcaggttaatcatctgaaacagtcagtggaaaatgggctgacttccatggtaccactcttagaagaaacacaaaaaaaactgcttacggctcagatgagaaaagaatctctccaatcggttaacatgctaactgagacggcccaaatggatattgtgtccagagctattaccactgttgtccccagcataagccgaatctgggttgagaccgcatcaggtgcggacattatcaaagttaccaacgatctccaggatgtcaccattgaacagctatctgatgggcagagggtgtttctggctctggtagctgatctcgcgcggcgcatgattatgcttaatccattgttaaaaaatccacttgaaggcagaggtatcgtcttaattgatgagattgaactgcatcttcatccgaaatggcagcaagaagttatcatcgttttacgcaccgtattccctaatattcagtttgtcatcaccactcatagcccaatagtgttatccactactgagatccgctgtattcgagagttcaagcaaaacagtgaaagtggagaactatttcttgactcacctccaattcagaccaaaggaagtgaaaactcagacattcttgagcaagttatgggagttttgtcgaccccgccgaacattgcagagtcttatcttgtcagtaactttgagaaatcaattattgatgatagtgaggagttgagtgccgaatcacgtcgcctttacaacaaaatcatttctcattttggtcagcatagttctgaactaaaaaaagcagacagcttgatacgccttcaccgcatgaagaacaaaatcaacaaagccaaacgcgagaaggatagttaa

SEQ ID NO: 250033 - DNA, 648 bp, Klebsiella pneumoniae
atgaaatcactcaatcgcaccgcaggcccggcgcatttgcatcagtttagggcaggacgcgatccttggatgtctgttgagcaaagcaatatctggccgcatctgttggaaatgcaaggtgaattttgtgcatattgcgagtgcagtctcaatcgaaagcacattgaacactttaggcccagagggaaattccccgcattaacctttgcatggggcaatttattcggatcttgtggcgacagttcaaaaacaggaggttggcaacgttgcgggattttcaaagataatggtgcagggaattacaatccggatcacctcatcaaacctgatgatgataatcctgacgattatcttttatttctgacaacagggcatgtggttccagccaaagatatctccggcaccaaattattaaaagcacaagaaactatccgtgtttttaatctcaacggagatccttctctgctcggcagtaggaaaaaagcgttaaattacatcatggaagaggtaatacttcttcatgagtcttatgaagatcttggagatgcactatggcatgaaatgcgtgacgcagaaattcaagaaattggtaataaagaattctacacagcactaaaacacgcttggcttcataacagtgaatattaa

SEQ ID NO: 250034 - DNA, 834 bp, Klebsiella pneumoniae
atgactcaggatggtatttctttgaatggtactcagactacatcggaaagaccagatgtggatttgtattcttttgatcctgcagcgcacatactcaaagttcaaggttggcactatgagaattttttatcaattagagctgctcttgagcaagcaaaaaaacagttaactgatattatcgtaaaatctgacagtgatgagggtgagttaactttcactcgactttattcaatgctgatgggtatatggatcgaagctcgtcttcatgttttgttgtatgaaaataatgcattcactgaagaagagcgtgcttttatttataacagtggcactattgaaaaaaaatggtctaccgctctagctgtagccgtaaagaaaagtgctggactatctttctcagatgagataactcgcacgaatgttgggttcagttcttacaatatatactcagaaatagctgactggattgaagaatacttttctagttctataaagagcagaaataaaattgcgcatgggcaatgggttaatccatttacttctaaaactcccggagaatcttgggagaattcaaattatttcaaaattaaccccgatactaaaagatcttttcttcttgttaatgaaaatttattaactatcagcgagaaggctaaacttttattggcaattagtacagccattaacaacctttcggttgaaagagaagattataaagtcaaagattttgatcagcattatcgagaaatttcaggacatattgaaaaacttagcaatatcaattattttgattataaaaatagagctcgccaagcatatcttgctcgaatgtaa

SEQ ID NO: 250035 - DNA, 2163 bp, Klebsiella pneumoniae
atgacatcagtaataaataataaatcatcgtcaccagattctgatgaaatagatttggggcgtataattggtgagttaatcgatcatcgtaaattgattgtagcaattacgactggttttactgtgttggcactactctatgctttattagcgacaccggtttaccaagcaaatgcattgatacaggtggaacaaaagcaaggtaatgcaatcctaaacagtctaagccagatgttgcctgatagtcagccgcagtctgcacctgaaatcgctctattgcagtctcgaatgattttaggaaagacagtcgatgacctaaatttgcaagctagggttgagcaaaacttctttccaatagtcggtagaggcttatctcggattataggggaaaagcctgcaaatattgatgtaacacatatttatcttccaaagatagagggacaagattcaccgagtataaaggttaaaattaaggataagaaccattaccaaattgagtatggcgatacgactcttgatggggtagtgggcgaattgttggaagccaaaggtatttctttattaatcagatcagttgacgctgaacctggcgatagctttactgtaacttatgtatcatcattaaaagcaatcaataatttacaagagtcatttaatgttacagaacaaggtaaagatactggaatgttaaatctcacccttacaggtgatgattcagaacttataacacatattcttgatggaataagccaaaactacttggctcagaacgttgctagacaagcagctcaagatgcaaaaagcttggagttccttagtaagcaactgcctgaggtccgttctgatcttgattcggcagaggataaactgaatgcttatcgcaggcaaaaagattcagtagacttaacgatggaagctaagtccgttttggaccaaattgttaatgcggataatcaattaaatgagcttacatttagagaggcggaaatatcgcaactttatactaaagaacatccgacatataaagctttagtcgaaaaaaggaagacacttcaggaggaaaaggcaaaacttaataaaagagtgagtggtatgccttctactcaacaagaagtgctaagattgagtcgtgacgtagagtctggcagagcagtatatttgcaacttctaaatcgccaacaagaattaaatattgcaaaatctagtgcaattggcaatgtcagaatcattgatacagctgtcactgagccaaaaccagtaaaaccccgaaaagtgctaattgtggttatgggattattactgggtttgtttgtatctattggtcttgtgttgttgagagtatttttgaggcgtggtattgagactccagaagaactggaagatatggggattaatgtatattctagtattcctgtatcagaatggttaacgaaacatctgtcaagtaataagcgaaaaaaacgagagtcggacactctacttgcagtagaaaatcctgcagatctagctgtcgaagctattcgtagcctaaggacaagcttacatttcgcaatgatggaatctaaaaataatatattaatgatttcaggcgctagcccaaatgcaggtaaaacttttgttagtactaacttagccgctattattgctttaactggtaaaaaagtactcttcatagatgctgaccttagaaaaggatatgttcataaaatgtttggacaaaaccaacctaagggattgtcagatattttatcggggcaagaagtaacagaaaatgtagtacagaaagtggtcggaggtgagtttgactatatttctagggggcaaattccgccgaacccagccgaattactaatgcatgagcgtttcgaagccatacttaaatgggcttcgcaacagtacgagatagttattattgataccccaccaattcttgctgttactgatgccgcgattattggaagatatgcagggacaacgttgctggtagcaagatatgaagttaatacccctaaagaaatagcagtgagtattcgtaggtttgaacaaagtggtgtgacaataaaaggttgcattttgaatggcatggtgaaaaaggctagtagttattatggctatggctataaccattatgggtattcttatactgataagagatctgattaa

SEQ ID NO: 250036 - DNA, 924 bp, Klebsiella pneumoniae
atgatatccattctatttggtgcaggagctagttatggttctgaaaggttcggtatagaggttccaccattaggaaataacctttttcacgaactggataggctaggtggatgttttaataaattaagcggagaattaaaaaataactttttagtgcaaggatttgaagcggcaatgcttgaaatacctaatgacagcaaagttttaaaccctttacagaatgaactcgctttatacttgtcaggatttaccccatcagataacagcgcctacgtcagtctattcagtaaaatttcagatatcagcaaaccacagttaattacattgaactatgatttattaatagaaaaatccttggagttgctccaaaaagatattggcaataatataaactcctatccacaactattaaagctacacggctcatcaaattttatgcctgatttccgcaatattaatatcaatgaaatctcagcctttggctatgcttctttcattgaaactgatgatatcaaggtattaaaacatcatgaaataaagccgtgggttgaaaaataccattttgattcaagcccagtaatgtgcatgtatagtaaagacaaaagaatgattacttgtccctcctacttcaatatggcaaaaaaggaattcattaataaggtcagcaaaaccaagttaatgattatcattggaactaaatatacaccacatgacaagcacatatgggatgtgattctgtcaaataaaaaatcaagaattatattgatagacccctacccagataatgatttgaaaaaatttataaacaaaaaaaacagaagagtaaaaaaagatgagataatagaaaaatcattttcagatagcgttgatgatattgtcaaaataatcaatactgaaatcaacaaatacgagaagaaagattga

SEQ ID NO: 250037 - DNA, 219 bp, Klebsiella pneumoniae
atgaagcgaattaacacgcagcggttaaacgtaggtcaacaagtaacaatcaggactcgagatggtcaaaagctcagcggcattctggttgataaatgcgactggtcagttggttgtcctgtagttgaagctaacgggattaaatacggcattggctatcaggcggaaattctaagcgttcctggacaaaaagcgcataatgaactgctgaaaaaataa

SEQ ID NO: 250038 - DNA, 396 bp, Klebsiella pneumoniae
atgagcattaccatcgcgagaaaaataacacaacagaactcagcatcagcgctgggttttcagattgaagagactgaaaagtccgtcaacgtaacctataccgcaaaatcaattgtctttatctctggtgatatagccacggttgagtttgaagtgtcggtggcaggttacgaacagatcggtattcgccatattgattgcccatattcaagtgaaaatccacttgatgaggcggaagcggctctcaaactgaaaattgaagaatccgcaactgccgaggctgaagccgcagcaaatgagcaacttctggcggaacaaattgcattagcagaggaaatggctaaaactattgaggggaacatttatcagaaggttggctttaatgaagcgaattaa

SEQ ID NO: 250039 - DNA, 285 bp, Klebsiella pneumoniae
atgtctgagcttcgttattctgtttgtgcggttttgtttttgttttctttctcagtgttttctacagaacttttagacgagtattcaaataagtacccatggttaaaagattatttgtcagattatgaattaaaaggctatcagttaaatataagtggtgtgtggaaagatgattttccgaaagaggctgaaaaacagagggtggagtgtaataagtcttttgaagactctgattgcgaaatacttatgaatgcatttaggattggatactttggaaagaaataa

SEQ ID NO: 250040 - DNA, 327 bp, Klebsiella pneumoniae
atgacaattaatgccctggatgtggtttcaattgaagaattgcgccagcacattgagtttgactcagatgaccgcgatgctcttattgcccgttacgctcagggggcgctggattactgcctgacatattgcgacgaaccacgctggaaacagcccgacgatctcccttcgcaggttgtcagcgccatgctcttatttttctgtgatgcctttgaacatcgcggagcgcagacagagactcaactttatgccaaccagagggcccatgatctgttatttcaggtaaggaactggagaggcgaaactgatgaagccgagggggcataa

SEQ ID NO: 250041 - DNA, 1167 bp, Klebsiella pneumoniae
atgtccgaactcgctcaaattcagaaagccctggaagaatcacaaagtaagctgcaggggcttttcgacgaacagaaaaaacagatcgagcagaatggcacgatctccaaacagttgcaggatgatatggcgaaggttaatgaggagatgaccaaaaccggtcagcgtctctttgatctcgaacagcggctttcttccggtcctgataatcctggtgaaaagaaatccttctcagaacgtgcagcagaagagctggttaagtcctggaatggcagtaaaggtaactttgaagcgagcacctttaataaatcactgggaagtggctctgcatctgccgggtctctcattcagccgatgcaggttcctggcatcattatgcctggcttacgtcgcctgaccatccgtgatctgctggctcaggggcgtatctccagtaattcactggaatatgtccgtgaaaacgtttttaccaacaatgctgcaagcgtggcggaaaaagcgctcaagccagaatccgacatcacattcaccaagcagactgccaacgttaaaaccattgctcactggattcaggcttcccgtcaggtgatggatgatgcgccgatgcttgaatcttatgttaacaaccgcttgctgtatggtctggctctggaagaagagcgccagttgttaaacggtgatggtagcggtgatgacctggagggtatcaaccatgttgcaacggcgtatgacacggatttgaacgttacaggtgatacgcgtgctgacataatcgctcacgccattttccaggtaactgaatccgaattcagcgcctctggcatcatcctcaacccccgtgactggcacaatatcgccttgttgaaagataacgaagggcgatatctctttggtggaccgcaggcgtttaccagcaacatcatgtgggggcttccggtcgtccctacccgcgctcagactcaggggacctttaccgtcggtggttttgatatggcctctcaggtctgggatcgaatggatgccaccattgaggtgagccgtgaagaccgcgacaacttcgtgaaaaacatgctcactatcctgtgtgaagagcgtctggcgctggcgcattatcgcccgtctgcgcttattaaaggtacctttgcgacagaacctgctggtggttaa

SEQ ID NO: 250042 - DNA, 2022 bp, Klebsiella pneumoniae
atgtcaaagattaccgtcaaagcgggtgctgaccacatcacggatctcgcgagtgccaaacctgtttcagctatcagtgagttgatttggaatggatttgatgcaaaatctcaatgtgtagaaatcataataaataaaaatccaatccttgattcaattgattctataatcgttaaagattatggtgcaggaattgattataataaagtaacaagtttgtttggtaatctaggagagtcttggaaaaaacaagcaagagcaaatggtgatcgttctcttcatggacaatacggacggggtaggttcaaagctttatctctaggggcaaatatcaaatggaagacagtatttaacaaaaataatcagaaatttgaatacgttatatcatctgatgcaaatagcgttaaagattttgaggttggagaagttactaattatttaggcgattacaatggaactgaagttgaaattttcaatgtaagcgaaaatgttaattaccttcttagtgatgatgctgtttcagaattagtgatggaatttgcattgtttttgactgaatatcctaatagaaaactgatttattgtggggctcgtcttaagccagaagatgcgtggtcggataaaacagatttcgatttaggcgatgtagaattacctaatgatgaaaaaacaaaagtatcattatctatcatagaatggagaaagaaaaacattcaacgagaatttcattattgtgactcgcttggattttcttattataaagaaaaattaggtcagctcgttagagctcccggttacgaatttactatttatgccaaatgtgattatttcaaagtgttaagtgaaaggaatgaaatcgcacttggagatatgattcctgaacttaaggctattaaagatgcggttttgcaaaagacaagattgcattttctcgataaagcatttatcaagaaaacgaaaatagttgactcttggaaagagcaagaaatttatccgtatgatgatgaaattacttttgatccaacaaaaatagttgaaagaaaagtttttgatattctagctgttaatgtacaaagctatctaaagaattttgagaagtctgataaaaagacaaaaaaattcacatttatgcttttgtctcaggcaattaaacaaaatccagcatcagttcagaaaataatttctgaggtattaggactgaagaaaaaggagcaagatgaattggcagagttgctagaaagtacgactctttcatcaatcataagtgcttcaaaaatcgtaactgaccgtttgaattttcttaatggccttgacaatttagttcatgataaagagtcaaaaagagcactattagaaagagatcaattgcataaaatactcgagcgtgaagcatggatatttagagaagattttttcttggctggctcagaaaatcggcttgaagaggtattgttaaaacatatcaaacatctggggaaacgtgaagatgatatacctgacgggccagtttatttgccagatggcagacaagggcgtgtcgatttgatgttcgcaaaagctcgtcaaccatatgagggatttacagaatacttggtcgtcgagttgaaaagaccgtcccagaaaattgattatgatgtaattggtcaggtcgagaaatatgctttggctgtaagcgccgatgaacgatttgatcatgccaattcaaagtggactttcatagccgtgtcaaattctatggatgaatatgcttctaaaagggcgcgtcaacgtggatggcctaaaggaaagactcttgatgatgcagataataatgttgaggtctgggttatgacttggtcagaagtgattcatgcagcaagatccaagttaagtttcttcagccagcaacttaagtatgaggcaacaagagaaagctcaacagaatatcttgaacaaaagcatcaagagttccttcctgtaattgttacgaaagaaaaaatgttaagcgattcagatactgacggatgcgttgatgcagtttga

SEQ ID NO: 250043 - DNA, 999 bp, Klebsiella pneumoniae
atgcgaattgcgttactggctataccgggcagcatgagatcggcacttgccggcatagccgacatgttctggctcgccaatcagatcatcgtccaaaatccgcaagtcaacgcggatattgcacggacgtcacggttttttgaggtcatggtggtcacctccgatggtctgccagtcatggacgtacaggggagaaaaatcgttagcgatggctcgttcaatgatgccgaacctgttgatctggttattgccagcggtatgcagcttgacgagcagaagcttcccctcgcgcaagaggccgttaccgctgccgcagaatgggtgaaagacaaatatcttcagggcagctgcattgcaggggcctgcgccggcggatttatcctgggtgaagccgggttactcaacggacgcgcctgtaccacgacctggtggctgtatcataccttgcgatcgcgataccctctggcgaagcccgtctgggggaaagtcatggctgaacaggacaacatcattaccacaggaggcccgttttcgtggattgacctggttatctatattgttcgcaaatatgcgggcaatgagattgccaaactgacggctgatatggccgtttcggatagccagccattatcacagcagctttatgcgcctgcgggatttctcaattcaaggcatcctcttctgatgaaggctgaacagctggtgcgttatcaaaacccgggcataacggtggagcagctggctgaggccttgaacctgacaccccgcaccctaaatcgtaaaatgaccgcgctgatccaggagagtccgaaaaactttatcacgcgggttcgtattgaaacggcggcgcttatgctggaaatccctggcaaaacgatttctcaggtcgccaacgcctgcggatatagtgatgagaccgcattcaggcgggctttcagtcgtatcatgggcatgtctccagggaattacaaagagcggatcaaaaatcaggccctatag

SEQ ID NO: 250044 - DNA, 729 bp, Klebsiella pneumoniae
atgtctttgatgatttcattcgcatcgcctctccgggcagaggtgacggatattaaaaatattgttctggtccacggggcgtttgcggatggctccagctggtctgccgttatcccgttgcttcaggctgacggttatcacgtcaccgccgtgcagaatcccttgacctcattgcaggatgacgtgacggcgacggaacgcgtcctcgagcgtcagaagggcggcgttcttctggtggggcattcatgggctggcgcggttattacccaggcaggtaatgcaccaaacgtgaaaggactggtctacctttctgccctggcgccggactcaggagaatctgtcgccgaggctctgacacggcttaatgcgccgatggaggggatggaggcggataaaaacggcttgatctggctggatgatgcaaatgcttttcatcagatcatggcgaatgacctttctgcatcacaggcacgccttctggcggcgcagcagcagcccatcgccgcgggcgccttcagcgaaaagatagagaccgccgcctggcatagcaggccatcatggtacgtgatcaccgaaaatgaccatgcgctgaatacgtcggtccaggcgcgttttgcccacgagatgggcgcccacatttcgcggattcattccggtcacctgtccatgatttcccatcccgctcaggttgctgaactgattaatcaggcggcgctcagcatagaataa

SEQ ID NO: 250045 - DNA, 309 bp, Klebsiella pneumoniae
atgatgcacgcaataacattgacatacctgagttcggaagaggaaatctcagcccatcttgaggcgcacaagcaatggctggtgagaggaattaaagaaggaaaaattctgtttgccggccctgttgataatcatgccggtgggttcattcttatgcgcggaaacgataagcacgtgattcacgcttttctgcaggaagatccttttatcgagcacaacattgctgatgcggtgctgctcagttttgaacccctgttatgcgctcagggtgtgcctgttgcatgggcagataaggctaaatttatttaa

SEQ ID NO: 250046 - DNA, 1569 bp, Klebsiella pneumoniae
atgtctgtagataccttacgcgaaacatttcatataaaccgcattagcacttctgatttgcaggatttcttgactgcgcaaacctacagaccagaaattacgcaagcaaaaaatcatatccttagcttgaaaaattgctcactgcaggcggtatgcacaaaaccaattcagcaaggaaagtctcctaagtatgcggagaagggcttaaagtgcattaaacctaaaaatactaatgacatgttagtttcgattgatgacattgattggattgactcgtcaacaaaaggtcaaattcaaaaacagaagctcgcatatggtgatattgtcattacacgttcaggttcaggaacaattggtcgggcatcgatttattgctatagcgaagaagcatatacgaatgaccatctttttgttgttcgccctgacaaggctgatagtcactatatttgctcatttttaaatagcttccatggtcaacgcttattggaagcaggggtatccggttctaccgggcaattaaatctttctaatgaacatattaagtctattccgctgtttagacctgatgataaagtccaaagatacatcggggataaagtacgccaagccgagcagttgcgcgcttgggcgaagaggctgaattcagttttacagtcacaaattcactctgtatttaaaggtgatcctaagccagaaaaaagaattggtaagattatatcaattcaacaactatcctccctgaggctagaggctgagtactatggtgatttagagctttgggcggaactcgaaatcaagaactctccttttccgaataaaccactcggggagttatcttcaagaattaaagatggtcctggcggatgggcggtgtctacaagcgactatagaccatcaggcattccagttataagaagtgttaatttaatcgacggtcgctgcgaattagaggactgcgtttttatctctaaggaaaagcataatgatctgagatcgcatcaagtaaagtctggtggtcttttgctttctgttcgaggaacaatcggccgcgctgctgtatttgacagcgtgaaatacagtactgctagtctgaatgcggcggttgtaactattgactgcaagccaactataaacccgtattatttagcagcatttttaaactcagaagttggaagaattcaatcgaaccgaattgcaaacggcgctgttcaattaaatatgaatttaaaagaaacagcatcaaacttaattgttataccgcctattaatttacaagaaactatagcggcaactttcctatccaaaaaccgagctattatcttggctaatttattaactcagtccgccaaaaccctggtcgaagccctcatcgaaggccaactgaccgagcaacaattaatccaggcccaacaagccctggaagatggcgacaacagcttagatcaggcgattataagtaaactaagtgctgaggggtatgccattgaaggcgccacaccgctatttagcgatgtggatgagttatacagtttgctggaagatgcggcacaagctgaggctgaagagtaa

SEQ ID NO: 250047 - DNA, 1518 bp, Klebsiella pneumoniae
atgtcaaaaaataaattaattgttaagaatactatttttttagcgacaagaactgtaatatcaatattaatttctctttataccacaagagttgtattatatcaattaggtactaatgattatggtttatttaatgtaatatatggcgtggttgctcttacggtatttttatcagcagctatgaatgagtcagttcaacgttacatttccctcgatcttggacgtggagatatacaagctgttaggaatacgattaagaatagtttatgcatttatttatttttatctctttcatttacttttgttctcttttctttaaataattatgtcatcacatctttaatcaacattcctcattcgtctataattgttgcaaagaaggtttatggaattgcagtattgtcaatttttatatctataattcagacgccatttaatgcaattgttatcgctcacgaaagaatgtccttttatgcatatatgtcgatttttgacgtcagctcaaaattgttaattgctttttcattgtctattgtaacacacgataaagtgttgttttattctttgtttttactcttttcttctgtgataacattcataatctacactgttttttgtttttttagctttaaagataattttaaaaatggttttctttcgatttcagtaatgaagaacattgcctctttttccttttggaatatttttggtaatttcgcttatgtttgtagaactcaagggataaatattgcaattaatatatttttttcaactgcaacaaatgctgcatatgcaatatctacttctgttttaaatgcaatgacatcacttacgcaatctcttgcacttgcaatcaggcctcagatttttaagtcatatgctaatcagtctgatagtaatagatataagatgttgattttttttggatcaaagtatactttttccttattatttcttatgtcctttccgattattcttcttactgagcaagtgctttcgatttggttagttaatgttcctttctgtgcagtaatatttgtacgaattatactctctgttgcattggttgatagtctttcatccagcataattgcaggaattcaagcgtcgggaagaattaaggtataccaacttgttgttggttttatggttttcatgtccttgccattgacatatttttcctataaattgaactatcctccatacagtgcatttgttattcttttcataatttcgataataaatttaaatcttagaatattttttcttaaaaaagccacaggatttacatttaaagattattattctttagtaatattaccctgtatgtgttctgtcatcttggttatagctactaactacgttttattgattttttttaaatatgattcaattttgaacacgtttgtaagtataacattacactatatcgtgacgttttttgtgttatgtataacagttccctctaaggaggaaagacaatttgtcttaaactatatgttgaggaagtttaagtga

SEQ ID NO: 250048 - DNA, 1341 bp, Klebsiella pneumoniae
gtgactataaaagagattgtacggaatgaactttgtactggatgcggtgtttgtatctcagaagataagagtaattcatcagagatgatatggaattctcagggttttttagtcccgcaattatcaaattcctcggatgagaagtcgatggaaagggtttgcccatttagtttgaatggacaatataatgaagacactcttgcaaaacttttttttaagaatgcaccacaccaagatagtgatattggtttttactcgaacttatattttgggttctctaaggaacatagagctacatcctcttctggaggaatggctacttttttattcgagcagattttattgttaaaccaagcagatcatctttttatagttaaagaaattgatggtaagtatggatatcaacttcatagctcggttgattctataaaagaaatatcaaaaacacgttattatcctgtcacacttgaatcacttttttcagaaattgacaatattaaaggtactatagctatttcaggtgttgcatgttttattaaagcaattaggttaaaacaagtttataatcaggaattgagggataaaattacattcttggttggcatcatttgcggggggctaaaaagcaaatattatacggattttctggcgcaatcctcaggctgcttcgatgattatagtaatgcagagtatcgtgtaaaaaaaccagaaagttatgcacttgattataaatttacgtgcaaagaaaaatatggtgaaagaatacatgttgtagaaatgcggaaaatgggagatatgtgggggactggactgtttaaatcaaacgcctgtgatttttgtgatgatgtcacaacagaactagcagatatatcccttggtgatgcttggatcgaaccttatagctcagatggtatggggaacagtgttgtgatcgcgcgaagtgctcttgctgatgatattgttaaaaaagggatagcggatggtagcttgaatttagttcatgcttctcttgagcaagtcaagtcatctcaacaaggtagttttaatcataggcataaggggcttttgtttaggataaaagatgctgaatcaagaggaaggctttatccgataaaaagggctagatttttatctaagcagtctattttgtttaatgaaattcaacgtttgcggatgaaaactagagaaaatagcttggctctttgggttaatacgcaaaatgttgatgagtttaatgattcttttacgccatacctgaataaattaaaaagagttactaaattccaaaaaatcgtattgaaagttaatagaaaaataaaaaaactacgaggtgttaaataa

SEQ ID NO: 250049 - DNA, 1131 bp, Klebsiella pneumoniae
atgaaaattgcaatactgacattgcctcttcacgtcaattatggtgggaatgtacaaaattttgcattacaacaaactttacttaagttagggcatgatgtggttactatcaattgccaggaagctaagataggtactttgaggtacggcctttctacagcaaagcgcttgtttcagcaacctaagagtagcagacgcttacttttcaccaaaaaagaaaaagaaattatttctcttaaccacaagcgttttatttgtgattatattaaattaaccgaacctgttgatttcaccgagttgagtcttttttttaaaaaaaataaatttgatgctgtatttgttggtagtgatcaagtttggcgacctaagtacacaccttgcattgaatcctatttcttaagttttattcaagataatacagcaatcaagaaaatatcttatgcagcttcatttggctccgataaatgggagtacaatagtcagcagcattccatttgtaagtcactcattgaaaagttcgatgctttatccgtacgagagtctcttggtgctgatatgtgtaaagaatatttttcagtaaatgcacagcatgtgttagatccaacaatgctattgacaaaagaagaatatatagagatttttaagagtgaaaatcttcctaatcataaagggaaattatttaattatacattggacgttgatgaagggaaaaataagttaataagaaatatatcgtcacatgtacataaagatttttttactacatacccagagaaaacacagaaaaaaactttatttattcacgatattaagacctaccagtatccttctgttccagcttggttgaaatctttttttgatgctgactttataattacagattcattccatggcacagttttttctattatttttaataaaccctttattgcactttctaacaaagaacgtggggcagcaagatttatatcgctattgaatatgttcggcttagagtcgcgccttgttactgatgttgataaattcgataaaaatataattgatgataatattgattatgttgaagtcaataaacgacttgagcaatatcgcataatgtctttagatttcataagtaatgcgttgagttaa

SEQ ID NO: 250050 - DNA, 201 bp, Klebsiella pneumoniae
atggccaggtcctccgatccacgacaacgtactgagggtttccgcaaagcggaagcgtcgctgaggcttgaaggcatggaccccgccggaacgccgctgtacgaaaatatcaaggagcgggttatttccggggatatcacttacgaacagggacgggcagaaattctggctcattaccagaagcgtgcgaacggccactga

SEQ ID NO: 250051 - DNA, 576 bp, Klebsiella pneumoniae
atgaacaatactgagtcaatgaagatattgcgcgactgctgtgatgagttaaatgatataagaaaactagtttctgaccttgatgactcaaacaaagctgttggttacataaataaatatgcaataatcagagctacaggcagcatagagtttgcttttaaaaaaataatagcagataaagttgagcacggatgccatgatcaaataaaaaacttcataaaaagaaaaataagagagtccgcacacaatccgagattaggtacaattgaaagcgtccttaccgatttcgatccaaaatggcagaaaaaattcaatgaaaaaattgcgcttgagaataaaattgcactggacgaatcattaacaaaactagtgaccgaaagaaacagctttgcacatggaagagatgcaaacattggaattgatgagataattgaaaattacctcaacgggcaaaaagtaatcgcaatcctagatgaaacagtacacttcttgtacgatgaacctggggcggaagagaaattaacaaccacaaaacggcataaaagaagaagaaaaaaacgtaaaaaaaggaaatga

SEQ ID NO: 250052 - DNA, 1122 bp, Klebsiella pneumoniae
atgtttggccatatcattgacactccattagaagaaaatgacgatgaatatagtgatgacgacctatttaagatatcttcatggggcgccgatttaagctttagagaattaatctcaagatacgacgatgatgaactggtaaagcctgaactacaaagaaattacgtctgggataaaccagaggcatctagatttatagattccatactattaggccttcctatcccaagtatattcctagcaaaaacaaaagatgaaaagctattaatcattgatggttatcagcgttttatgacggtaagggattatgtaaaaggaatatttaccaaagataattccattttcaagttatcaagaactgaaaaaatacatgaaaaatggagaggaaaatccttcttagaacttacagatgatgaaagaaggaaaataagaaacactaccattcacgccataatattcatgcagcaacaacctaaaacaggagatacaagtttattccagatatttgaaagaataaactcaagcggcaggagtctcctcccccaagaaataagaaactgcgtttaccaaggaccaattaactccttactattcgaattgaataataacaataaatggagaaaactatggggctctgaacgtagagatgatcgaatgcgtgatttagagtttatattacgcttctttgcactttcagatcattacatacaacatagcgacaacccgccatctcgcatatccttaaaaaaatacctcaatcaattcatggagttagctaacaacgaatcgaagatatccgattttagacatcgttttaattcaactatagattacatttttgataattttggattatctgcttttcacaactatcaaaaagaacaaggaaaatggattccagctttcagtccaactatatatgacagcataatgatatctacagatgaggcgctacgcagaggaataaaactcccaacgcccgaggatgcaaaagaagcaaagaaattacttcttgaaaatcaagaataccaaaaccttttgtatcaagaaacaatgagaactccaaatataaaagcacgagtttcccttatgtttgaagctgtttttcatgaagactggtaa

SEQ ID NO: 250053 - DNA, 1056 bp, Klebsiella pneumoniae
atgatatatgtaaatgctaggtttttaactcaagaaatgacgggtgtacaacgctttgcagagatgatttcattagaactgaatcggaaaatagataatctatgttttttatctccatcaaatatagttagggcagatatagcttcgcagctaaatgtaaggattattggaaaaaatacaggtcatttatgggagcagttagatcttccatattttttaagcaaacaagaaaaaggcattcttgtgaacttaggaaatactgctccaatattataccggaataagataacagcagtacatgatataacatttttgaaatttcctgagtcattttctaaaaagtttttatatttttataaaatcttaatcccattagtcattaaaacatcgaaacatattgtgactgtaagtgagttttctaaaaatgaaatattaagaaagtataatgtagataaagaaaaaatatctgttgtgtataatgcggtaaataataacctcagtattgaaaatattaaaaattacaatgggaaaccatattttctaatggtttcttctcaaaactatcacaagaattttggcagagctttagaaggattttatcttgcaagaaaagatggctatttagatgagtatggattaaaaattattggggcaaaaaattctgcttttaatactcagtcatatacttctattctcaaagaagatgtcgagtttctgggccgtgtatcagatgcacaattggcggatttgtatgcaaatgctactagttttgttttcccttcattatatgaaggatttgggattccacctctcgaggctcaatattttggatgccctgtaatcgcaagtaatgcagcatctctacctgaagttcttagtgatagtgtattatattttaacccacattcttcttctgaaattaaagatgcaatgattaaagtatcgaatgatcttaatttgcgagagaaattgattgaatgcggatataaaaatctaaagaaatattcatggggtgactctgcttcaaaattgctatcaattattaataagatctaa

SEQ ID NO: 250054 - DNA, 798 bp, Klebsiella pneumoniae
atgctgatttccttccgggcaagcaacgccatcaggtcattctgcgcctgcatctgtaccggtccctggttcgctatcagcctgatcccaagctttcgcacaaacacgctcagcgcactgcccaccccgatgaacagatttttcaccacgctgacgtctgcattctttccggccgtggcaatcaggttatgcccggctgagacctgcaggtgctccccgctggtcagcgctatcccctccggcgcgctgagcagcagtaccgattttttgaggtccgtcagctgctgctccagcagggtaatttgcgcctggagatcggccgggttcgcggtcgccttctgcgcgtcaccggagatggacatcatctgctcccgggcttcagccagattgctgaccgccggctccatatccagcacctgcccccgggcctgcgcctgtccgtccgcgctgataaatatccctttctgtgcccggatagctccccggctgtcggttctcagctcaaagccttcgccgcgcggctgcctgtcactgtccaccaggtgccccaggttcagctggcttttaccgccgtactccgtgctgaccttgatatgttctttcccgcgctcatcgtcgaggcggattttgttgttggccggggtgcgcaggacgttacgtttgtcattgcggatggtgacgtggtcgccgtgcgccgagtcgtgcagcacgcccgcgatatacggccggtcagggttaccatcctcaaagccaatcgccacctccgtccccgccagcagcggcaggtgcaggccgtag

SEQ ID NO: 250055 - DNA, 243 bp, Klebsiella pneumoniae
atgaacaatagcgcaaaaatcgccctggtgacaggtggcagccgcggcctgggacgcgcgaccgtcgaagcgctggcacagcgcggcgtaaatgtagtactgacctacaaaacgcgtcttgccgaggcgaacgaggtggttacacgggttgaagcactgggcgcccgggcgatcgcgttgcctttcagcgccggcgaaacgacacctttgacgcatttgttagcgcttttcagggcgcgctga

SEQ ID NO: 250056 - DNA, 669 bp, Klebsiella pneumoniae
atggcgattcgtgatgagtgtaaccgatggatcagacatggagtaaataatggaggtaaagacgattggaaaacgccattcaagcttttacagagtctggataatgaatttgatttcacgattgacctggcagcagataatattaatcgtgtctgtgaccgttattattccgaacaggatgacgcattattacagagctggaagggggagcgaggattttgtaatccgccattctcaaagaccgaacagtttttagcgaaagcgcgggagtgcgatattgcggcttttatcgtggcggctcgaacgcaggccagttatttccttaaacaggtgtttggtaatccgcattgtcatgagatcagatttctgcatcgcggggtgaagtttctgcacccggacgggattcctgctgtacgtagtccgttgccaatttgcatcctgatctatcgtaatacggtgtgtaatgacaagctgatcggggtgcattgtgctgacactgggatattgctgcaacacgtatccggcagacgcaacgggaagccgctgctacattcgcacggtgtcagggatggcgttatacaggcgtacaggaaaggggcttctgtgcaggatttgatggaacaatacgcagtgagcagagcgaccatctaccgctgggtgaagggatag

SEQ ID NO: 250057 - DNA, 291 bp, Klebsiella pneumoniae
atgatatatgatgagtttcgtatcgaagaccctgacaccggtctcccatatggcttactttatacaaggcttgggcatgatggctgggtttatctaagtgatatcaatagctatggtgaacgtataggcaaggaactacagggggagcattttacgatggtaaaggggcacaattatgccacgaatgataaaaagctctttcctgcaaatgctaaggttgattgggagcgtttaagcgttttttgtaatgaacatgagtaccatttaattccgtggtctccttcatcatag

SEQ ID NO: 250058 - DNA, 123 bp, Klebsiella pneumoniae
atgagggggcgctgtccgataaagatccgtatgcgtgaatgggcacaggagaatgaggaaaatctgttccatactaaagacggggcgcggcgaacagaagctttcccgacgaagttagtgtag

SEQ ID NO: 250059 - DNA, 168 bp, Klebsiella pneumoniae
atgcgccgtttgcgtgattacagcctctgtctgtgcctgctgctgctctggccgctggcggttaatgccgacgacagctggcggcagattcagacggaagcccgcggacagaccgtctggtttaacgcctggggcggcgacccggccgtcaatcgctatctggcgtag

SEQ ID NO: 250060 - DNA, 561 bp, Klebsiella pneumoniae
atgagcttacccccgctggattctgtccccctgatccttcgtccgcaggcgtggctgcaccgccggcattacggccaggtgctgagccccattcgctggtggggtcggatcccgtggctgttttacctggtttcgctgttcgtgggctatattgaacgccgccgctcgccgctggatccggtgctgcgctcgctggtcagcgcccgcatcgcccagctgtgccactgcgaattctgtatcgatatcaccagcatgatcctcgcggcgcggagcggtagccaggacaagctgctggcggtcgccgactggcgcagcagtacgctgttcagcgaaaaagagcgcctggcgctggcctatgccgaagccgccacccagacgccgccggcggtggatgatgccctgcgtagcgcgatggccgcgcattttgacgcccgggcgctcaccgagctgaccgccctgatcggcctgcaaaatttatcagcgcggttcaatgccgcgatggcgatcccggctcaggggttgtgccagatacccacctcttcctcgcagaataaggagtaa

SEQ ID NO: 250061 - DNA, 711 bp, Klebsiella pneumoniae; identical to SEQ ID NO: 212056

SEQ ID NO: 250062 - DNA, 657 bp, Klebsiella pneumoniae; identical to SEQ ID NO: 212055

SEQ ID NO: 250063 - DNA, 807 bp, Klebsiella pneumoniae
atgaaattcgtctcttttaatatcaacggcctgcgtgcccgcccacaccaactggccgccatcgtcgaaaaacaccagccggacgtgattggcctgcaggaaaccaaagttcacgacgacatgttccctctcgaagaggtcgccaggctcggctataacgtcttttatcacgggcagaaaggctattatggcgtcgcgctgctgaccaaagagacgccgattgccgtccgccgcggtttcccggacgatggcgaagaggctcagcgccgcatcattatggcggagatcccgtcgcccttcggcaacgtcacagtgattaacggctatttcccgcagggtgaaagccgcgatcatgaaaccaaattcccggccaaagcggcgttctatcagaatctgcagaactatctggagaccgagctcaacaaagagaatccggtgctgatcatgggcgatatgaacatcagtcctaccgatctggacatcggtatcggtgaagagaaccgcaaacgctggctgcgcaccggcaaatgttccttcctgccggaagaacgggaatggatggaccgcctgctgggctggggcctggtggatacctggcgtcaggctaaccccgacaatcatgagcatttctcgtggtttgattaccgctccaaaggcttcgacgataaccgtgggctgcgcatcgatctgctgctggccagccagcctctggcgcagcgctgcgtggaaaccgggatcgattacgagatccgcgggatggaaaaaccgtccgaccacgcgccggtgtgggccaccttccggccataa

SEQ ID NO: 250064 - DNA, 1221 bp, Klebsiella pneumoniae
atgtctcagtcaattacgcgtaaccactttgatgaatggatgatgccggtctacgcgccagcggcgtttattccggtgcggggcgccgggtcacggctgtgggatcagcagggcaaagagtatatcgattttgccggcggtatcgccgtgaacgcgctggggcatgcccatccgcgtctggtgcaagccctgaccgaccaggccggcaagttctggcataccggcaacggctacaccaatgagccgatcctgcgtctggccaaaatgcttatcgatgctaccttcgccgaccgggtcttcttctgtaattccggcgccgaggccaatgaggcagcgctcaagctggcgcgtaaatatgcccacgatcgctttggcagcgagaaaagtggcatcgtcgcctttcagaacgctttccacgggcggacgctgttcaccgtctcggcgggcggtcagccggcctattcccgggatttcgccccgctgccgccgcagatccagcatgccgtatttaacgatctcgagtcggcaaaggccttaatcaatgaccagacctgcgcggtgatcgtcgagccggtgcagggcgaagggggcgtggtgccggccagcgtcgagtttttacgcggcctgcgtcagctttgcgaccagcacaacgccctgctgattttcgatgaagtgcagaccggggtcgggcgcaccggcgagctgtatgcctatatgcactacggcgtgacgcccgatgtgctgaccaccgccaaagcgctgggcggtggtttccctatcggcgcgctgctggcgacagaggcctgcgccagcgtgatgaccgtcggcacccacggcaccacctacggcggtaacccgctggccggggcggtggccggcgaactgctgtcgatcgtcaacaccccggaagtgctctccggcgtcagacagcgtcatcagtggttttgtgaacgcctgcaggcaattaacgcccgctatggcctgttcaaggagatccgcggcctgggactgctgctcggctgcgtgctaaacgacgcctgggccgggaaggcgaaaaccctcagtaacctggcggcggaagagggggtgatgattctgatcgccggcgccaacgtggtgcgtttcgcgccggcgctgaacgttagtgaagaagaggtgaacagcgggctggatcgcgtcgagcgggcctgcgcgcgtttcgtggcaggagtctcatcatga

SEQ ID NO: 250065 - DNA, 1035 bp, Klebsiella pneumoniae
atgatggttattcgaccggtggagccgggcgatttgcccgggctgctgaagctggcagcggagaccggcggcgggttgacctcgctgccggtggatgaaacgaccctcgcggcgcggatcgcccgctcgcagcagacctggcgcggcgagctaccgaaaagcgagcagggctatgtctttgtgctggaggagagcgaaagcggcgcggtggtgggcatctgcgcgatcgaggtggcggtggggctcaacgatccctggtataactaccgggtcggcacccaggtccatgcctcgaaggagctcaacgtctatcaggcgctgccgacgctgtttctcagcaacgatcataccggcagcagcgagctgtgtaccctgttcctcgacccgcagtggcgcaaagagggcaatggctatctgctgtcgaaatcacgcttcttatttatggccgcctttcgcgagcgcttcaatgagaaggtggtcgccgagatgcgcggggtgattgacgagcagggctactcgccgttctgggagagcctgggcaaacgctttttcgccatggagttttcccgtgccgactacctgtgcggcaccggacagaaggctttcattgccgccctgatgcccaagcatccgctgtatatcgatttcctttcccctgaggcacaggcggtgatcggcaaggttcatccgcagaccgccccggcccggacggtgctggagaaagaggggttccgctacctgaactacatcgatattttcgacggcggcccgactctggagtgcgacatcgaccgggtgcgggcgatccgcaaaagccgtctggtgaccaccgaggccggcgaaaccccgcccggtgactggccgctgtgcctggtggcgaatgaacagtatcaccagttccgcgctctgctggtgcatgccgatccggatggcgacaccctgaccctcagcgcccgcgaactggatatgctgaagtgtcatgccggcgaccaggtgcgcatggtgcgcctgatccctgaggagaaaactgcatga

SEQ ID NO: 250066 - DNA, 1479 bp, Klebsiella pneumoniae
atgagtctgtggattaacggcgagtggcggcccggccgtgggccaggtttcagtaaacaggatccggttaacctgaaggttgtctggcagggagaagcggcggatgccgggctggttgccgaggcggtggcggctgcccgccaggcgttcccgtcctgggcgcggctgccgtttgccgcccgtcaggcgatcgttgaaaagtttgccgctctgctggaagccagtaaggcggagctgacggcggttatcggcgccgagaccggaaagccgcgctgggaggcggccggggaagtgacggcgatgatcaacaaggtggcgatctcggtgaaggcctaccacgtccgcaccggcgaacagcacagcgacctgcccgacggcgccgccacgctgcgtcaccggccgcacggcgtactggcggtgtttggcccctataactttcccggccatctgccgaacgggcacatcgtgccggcgctgctggcgggcaataccgtggtctttaaacccagcgaactcaccccgcgcagcggcgaagcggtggtgaaactatggcagcaggccggcctacccgccggggtgctcaacctggtgcagggcggtcgggaaaccggcgaggcgctcagcggccaggcggatatcgacggactgctgtttaccggcagctcaaccaccggttttcatctgcatcgccagctggccgggcagccgcagaagatcctcgcgctggagatgggcggcaataacccgctgatcgtcgacgatccgcgggacgtggatgccgcggtgcatctgaccatccagtccgcctttattaccgctggccagcgctgcacctgcgcccggcgtctgctggtccgacgcggagaggcgggcgatgccttcctctcccggctggtgacggtgagccaacggctgatcccggcggcgtgggacgccgagccgcagccgtttctcggcgggcttatctctgaacaagccgcgcagaaagtgcatcaggcctggctgcagcgggtcgccgctggcgcggtcaccctgctggagccgcggttattgcaggccgggacgtcgttgctaaccccggggattgtcgacatgagcgacgtggccaatgtcgaggatgaagaggtgtttggcccgctgcttggggtctggcgctacgacacgttcgaggaggcgattgccttagccaacgctacccgcttcggcctctcctgtgggttaatctccccggaacgggagaagttcgatcgactgctgcttgaggcgcgggcagggatagttaactggaacaaaccgctgaccggggcggcgagtaccgcgccgttcggcggcaccggggcgtccggtaaccatcgtccgggggcctggtatgccgccgattattgcgcctggccgatggccagccttgaatcgccgaccctgacgctgcccgccagcctgagcccggggctcgactttctggccggggaggcgtcatga

SEQ ID NO: 250067 - DNA, 966 bp, Klebsiella pneumoniae
gtggaacattttctggcattaaccctggcggggcgattgccccatcactttcacggcgagacggcccatttccgctggcactggctcggggaagggatccttgagctgacgccgcatgcgcgctgcgagcgcgggctggtactttcctgcgccattcatggcaacgaaacggcgccggtggagatagtcgaccaactggtgcagcgactggtccgggaggcgctcccgctgcgctggcggctgctggtgatcgtcggcaacccaccagcgctgcgggcgaataagcgctatctgcacagcgatatgaaccgtatgtttggcgagcgctggcggcagtttccgctcagtgaggagacgcagcgggcgcagcggctggagcaggcggtggcccgcttttatcgcgaccacgatggcccgcgctggcacctcgatctgcataccgcgatccgcgggtcgctacatccgcgcttcggcgtgctcccggcccgcgatacgccgtgggaggaggattttcttcactggctgggcggcgccgggctggaggcgctggtgtttcatcgccagcccggcgggaccttcacccacttcagctgcgaacggttcgcggcgctggcctgcacccttgagctgggcaaagcgctgccgttgggggaaaacgatctgacgcagtttgccgccgtccagcgggcgctctcccggctgctggtgggggatctggccattgccgacgccccggcgccgctgcgctaccgggtggtacagcagctaacccgccatagcgatgatttccgcttgcatatggcggatcagacgctgaacttcacccccttcgaacccggcacgctgctggcagaggagggcgagacgcggtatgtggtggggcctgagacggagtatgttctgtttcctaacccgacggtggcgaaaggactgcgcgccggcctgatgctggagaaattatcctga

SEQ ID NO: 250068 - DNA, 483 bp, Klebsiella pneumoniae
atgaagaaactcactgcactgtttgttgcctctactctggctctgggcgcggctaacctggcacacgccgccgataccaccaccgcgccgagcgacagcaagccgatgatgatgcatcataaaggcggcccgggtcagcatgacatgatgtttaaaggcctgaacctgaccgatgcgcagaagcagcagatccgcgacatcatgaagagccagcgcgaaaatatgaaacgtccgtcccttgaagaacgccgcgcgatgcacgatctgatcgccagcgacaccttcgataaggcgaaggcggaagcgcagatcgataagatggaagcgcagcataaagcgatggcgctttcccgcctggaaacgcagaacaagatctacaacattctgaccccagagcagaaaaaacagttcaatgctaattttgagaagcatctgacagaacgcaacgcgccggcaggtaaaatgcctgcacctgctgaataa

SEQ ID NO: 250069 - DNA, 864 bp, Klebsiella pneumoniae
gtggcaagaaagcaatcagccccgcgtctcgagtttgaggcggcggcgatctatgaatatcccgaacatcttcgcccgtggctggaggcgctgccgaagctgccgggcgtctatcagtttcacggcgacagcgacacgatgccgctctatatcggtaagagcgtcaacctccgcagccgggtgttatcccacctgcgcacccctgaagaggccgcgatgctgcgtcagtcgcggcgtatcacctggcagcgcaccgctggcgagctgggagcgctgctgctggaggcgcggttgattaaagagcagcagccgctgtttaacaagcggctacggcgtaacaagcagctctgcgcctggctacttgcggacgaccggccgcagattgtctatgcccgtgaggttgatttctcgcaccagcagcatctctatggcctgttcgccaaccggcgggcggcgctgcagatgctgcagagcctcgctgacgaacagcgcctctgttatggcctgcttggtctggaaccgctcagccgcggccgcgcctgctttcgctccgcgctgggccgctgcgccggggcctgctgtggaaaggagagcgtggaggcgcacagagaacgcctgctggcgcagatgagcagactgcagctggtgtgctggccgtgggcggggcccgtggcgctggaggagcgcggcccggacatgacgcagtatcacgtcattcataactggctgtggctgggtgccgttgaatcgctcgaccaggcggcggagttgacttgtctgcccgccggatttgaccaggatggttacaagatcctctgtaagcctttgctcagcggagactatccgctgcatccgcttggctga

SEQ ID NO: 250070 - DNA, 828 bp, Klebsiella pneumoniae
atgacgctacaacaagagattattcaggcgctgggcgcaaagccgcagattgatgtcgcaggcgagatccgccgcagcgtcgatttcctgaagtcatacctgcagacctacccgtttattaaatcgctggtgctgggtatcagcggcggtcaggactccaccctgacgggaaaactgtgccagatagcgattaacgaactgcgtgccgaaaccggcgacagtagcctgcagtttatcgccgtccgtttaccctatggcgtgcaggctgatgagcaggactgccaggacgccatcgcatttatccagcctgaccgggtgttgacagtcaatattaaagctgcggtgctggccagcgaacaggcgctgcgcgaagcaggcatcgaactaagcgacttcgttcgcggaaatgaaaaagcccgtgagcgaatgaaggcccagtacagcatcgccggaatgaccaaaggagttgtggtcggtaccgaccatgcggcggaagcgattaccggctttttcaccaaatatggcgacggcggcaccgacatcaacccaattttccgcctgaacaaacgtcagggcaaacagctgctggcccatctcggctgcccggaacatctgtataagaagctgcccaccgccgacctggaagacgatcgcccctccctgccggatgaagtggccctgggtgtcacctacgagaacatcgacgattatctggaaggcaaaacgctggacccgagcatcgccaaaacgatcgagggctggtatctgaaaaccgaacacaagcgtcggccgccgatcaccgtctttgacgatttctggaaaaaatag

SEQ ID NO: 250071 - DNA, 339 bp, Klebsiella pneumoniae; identical to SEQ ID NO: 134948

SEQ ID NO: 250072 - DNA, 321 bp, Klebsiella pneumoniae; identical to SEQ ID NO: 134947

SEQ ID NO: 250073 - DNA, 1359 bp, Klebsiella pneumoniae
atgagtaaagtgatcgattcgcttgaaaaggtactccttccttttgcagtgaaaataggaaagcagccgcatattaatgcaataaaaaatggatttattaaattaatgccgttgaccctcgccggggccatgtttgtgttaattaacaacgtttttctgagcttcggcgaaggctctttcttttattccatgggcattcgcctggatgcctccaccattgaaaccttaaacggctttaaggctatcggcggaaacgtctataacggcaccctcgggattatgtcgctaatggcgccgttctttatcggctccgcgctggcggaagagcgcaaagttgacccgatggcagctggcctgctggcggtggcggccttcatgaccgtgaccccgtatagcgtgggcgaagcctatgcggtgggcgccaactggttgggcgggcagaacatcatctccgggatgattatcggtctggtcgttgcggaactgttcaccttcgtgatccgtcgcaactgggtgattagactgccggacagcgtgccggggtcggtatcacgctctttctcagcgctgatcccgggcttcttgatcctctccatcttcggcattatctcgtgggccctggcgagctatggcagcaacttccaccagatcatcatggactctatctcgacgccgctggcggcgatgggcagcgtggttggctgggcatacgttatctttaactctctgctgtggttcttcggtgtgcacggttctctggcgcttaccgccctggataacggcatcatgacgccgtgggcgctggaaaacatcgcgctgtacaaccagtacggctctgttgatgcggccatcgaagcgggcaaacagttccacttctgggctaagccgatgctcgactcctacatcctgctgggtggctccggggcgacgctgggtctgattatcgccatctttatcgcttctcgccgcgctgaccatcgtcaggttgctaagctggcgctgccgtcaggcatcttccagattaacgaaccgattctgtttggtctgccgatcatcatgaacccggtgatgttcatcccgttcgtgctggttcagccgattctggcggccattacgctggcggcctacagcctggggattatcccaccggtgaccaacctggcgccgtggactatgccgaccggtttgggagcgttctttaacagtaacggcagcgttgccgccctgctggtggccctgttcaaccttggcgtcgctaccctggtctacctgccgtttgtggtgctgtcgaataaagcgcagaccgttatcgagcaggaagagagcgaagaagacatcgctaacgcactgaaattctga

SEQ ID NO: 250074 - DNA, 348 bp, Klebsiella pneumoniae
atgtttgatctggacaacatcgacgcggtagagaccccggaaaatgacctcgaagaggtagtgatggggctgattatcaactccggacaagcccgtagcctggcctatggcgcgctgaagcaggcgaagcagggcgactttgccgcagcgaaagcgatgatggagcagtcgcgccaggcgctgagcgaggcgcatcgcgtgcagacccagcttatcgaaagcgacgagggcgaagggaaaatgaaggtcagcctggtgctggtgcatgcccaggaccatctgatgacctccatgctggctcgtgagctggtggccgaattgattgagctgcacgagaaggtacaatag

SEQ ID NO: 250075 - DNA, 825 bp, Klebsiella pneumoniae
atgatgaccaccgagatcagtaccgccagagaacaacagctgttcaacgggaagaactttcatgtggtcatctataacaaaacggaaagcgtgagcgggcttcaccagcatgattactacgaatttaccgtggtgttaaccgggcgctattaccaggagatcaatggcaaacgggtgctgctggagcgcggggatttcgtctttatcccgatgggctcgcaccaccagagcttttacgagttcggggcgacgcgcatccttaacgtcggcatcagcagacgcttctttgagaaacactacctgccgctgctgccgtttggtctggtggcttcgcaagtctacgccgtgcagagcgcttttctcggctacgttgagtcggtcatcgcctcactcaattttcgcgaaacggaatttgacgaatttatcgagctggtctccttttatgtcattaaccgtttacgccactatcgtgaagagccggttgccgacgtgacgccgcaatggttaaaaaataccgtggaagccatgcatgataagctgaaattcggtgaaggcgctctcgaaaatatggttcgcttatccggaaaaacgcaggaatatttaacccgggcgacccagcgctattatggtaaaacgccgatgcagataattaatgatatccgtatcaactttgccaaaaaacagctggaaattaccaattattcggtgacggatattgcgtatgaatcaggttacagcagcccgagcttgtttattaaaacctttaaaaaactgacgtcgtttacgccgagcagttatcgcaaacatttgaccagtattaattaa

SEQ ID NO: 250076 - DNA, 1347 bp, Klebsiella pneumoniae
atgagccagaaattaaaagtagtcactattggcggcggcagcagctataccccggaattactggaaggatttctgaaacgttatcatgaactgccggtaagcgaactgtggttggtagacgtcgaagagggccaggagaagctcgatattatccacgcgctgtgccagcggatggtggaaaaagccggcgtgccgatgaaagtctataaaacgctggatcgccgcgcagcgctgcagggcgcagatttcgtcaccacccagctgcgcgtgggccagctgaaggcgcgtgaaaaagatgagcgcatcccgctgagtcacggctacctgggccaggagaccaacggggcgggcgggttgtttaaaggactgcgcaccatcccggtgattttcgacatcgtgaaagatgtgcaggaaatttgccccgacgcatggatcatcaacttcaccaacccggcgggcatggtcaccgaggcggtctatcgccacaccaatttcaaacgctttatcggcgtgtgcaacattcctatcggcatgaagatgttcatcaccgacgtgctgcagctgagcccgagcgatgagctgaatatcgacctgtttggtctgaaccacctggtgttcgtccgcgacgtgctggttaacggcgtctcgcgcttcgatgaactgctggacggcgtggcctccggccgtctgaccgcgaactcggtgaaaaacatcttcgacctgccgtttagcgaagggctgatccgctccctgcgcctgatcccatgctcttacctgctctactactttaagccaaaagagatgctggcgattgagatgggcgagtactacaaaggcggtgcgcgcgcccaggtggtgcagaaggtggagaaacagctgttcgagctgtataaaaacccggatcttaacgttaagccgaaggagctggagcagcgcggcggggcctattactctgatgccgcttgcgaagtaatcaatgccatctataacgacaagcagactgagcactatgtgaatatcccgcatcatggtcatgtcgataatatcccggcggactgggcggtagagatgagctgcaccttaggccgcgacggcgcgaagccgacgccgcgcattactcatttcgatgagaaggtgttagggcttatctacaccatcaaggggttcgaagtggcggccagccaggcggcgatcagcggtgagctgaacgatgtcctgttggcgctgaacttaagcccgctgatccattccgatcgtgacgccgaacagctggcgcgggagatgattctggcgcatgaaaaatggctgccgaactttgcggcgacgatcgaaaaactaaaatcgtaa

SEQ ID NO: 250077 - DNA, 759 bp, Klebsiella pneumoniae
atggaacgcgtattgatcgtcaatgccgacgacttcggcctcagtaaagggcagaactacggcattatcgaggcctgtcgcaacggcgtggtgacatcgaccaccgcgctggtcaacggcgcggccattgaccacgccgcccagctgagccgcagtactccggagctggcggtcggtatgcactttgtgctgacgctgggcgagccgctgtcggccatgccgggattaacccgcgatggccggctgggcaaatggatctggcagcaggcggaagaagatagcctgccgctggaagagatcgcccacgagctggcgtgtcagtaccgtcgttttgtcgaactcttcgggcatgagccgacgcatatcgacagccatcaccatgtacatatgttcgcccagatttatcccatcgtcgcggcctttgcccgcgagaagggcattgcgttacgcattgaccgccaggtggcggcgcagagtgggctcgaccagcaggcggcgcgcagcagcgccggcttcagcagcgagttttacggcgaagcggtctctgaggaactgtttctgcagacgctggacgcctccatcgcccgcggggagcgctccctggaggtgatgtgtcatccggcttatgtcgatcggatcattatgggcagcgcctactgctatccgcgactggatgagcttgatgtgctgacatctgcttcactgaaagcggcggtggccgaccggggttatcgtctgggaacctaccgcgacgtgtaa

SEQ ID NO: 250078 - DNA, 2259 bp, Klebsiella pneumoniae
atgtctgataagcacccgaaccctcaccaacagcaggcaccggtccacgacagcgaggaagcgcagccgggtctcgattcgctggcgccggacgatcgggagtggcgccccacgccgaaacctaccgctccgggcgtcgaacccaccgccccaggcagcctgaaagcgcccgatactcataacagcaaactggattccctggaggcgcaacgcaaagggggggaagattttccgctgaccaccaaccagggcgtgcgcattgctgacgatcagaattcgctgcgcgccggtagccgcggcccaacgctgctggaagattttatcctgcgggagaagatcacccactttgaccacgagcgtattccggagcgtatcgttcatgcccgcggctctgccgcccacggctacttccagccctacaaaagcctggctgcgttgactaaagccgattttctttcgtcagccgataaaatcaccccggtgtttgtacgcttttccaccgtgcagggcggcgcggggtcggcggacaccgtccgcgatattcgcggcttcgctaccaagttttacactgacgaagggatttttgacctggtgggcaacaacacaccggtcttcttcatccaggacgcgatgaagttccccgactttgtccacgccgtgaagcctgaaccccactgggccatcccacaggggcagagcgcccacgatactttctgggactatgtttccctgcagccggaaacgctgcacaacgtgatgtgggcgatgtcggatcgcggcatcccgcgcagctatcgcaccatggaaggcttcgggatccataccttccgtctgattaatgccgagggcaaagccaccttcgttcgctttcactggaaaccggtcgccggcaaggcgtcgctggtgtgggatgaagcgcagaagctgaccggccgcgaccccgattttcatcgccgcgatctatgggaggccatcgaagccggggactacccggaatttgagcttggcctgcaattgatccccgaagagaatgaatttgcttttgacttcgacctgctcgatcccaccaagctgatccccgaggcgctggtgccggtgcagcgggttggcagaatggtcctcaaccgcaacccggataacttctttgccgaaaatgaacaggcggccttccatcccggacatatcgtcccgggcattgatttcagcaacgatccgctgctgcaggggcgtctcttctcttacaccgatacgcaaattagccgcctgggtgggccgaacttccatgaaatccccatcaaccgtccgacctgcccgtatcataatttccagcgtgacgggatgcaccggatggacattgacaccaatccggccaactacgagcccaactcgattaacgacaactggccgcgcgagacgccgcctgccgccaaacgcggtggctttgagtccctcgccgagcgcgtcgacggcgaaaaaatccgccagcgcagcccttcgttcggcgaatattacgcccagccgcgtctgttctggctgagccagacgccgattgaacagcagcatattatcgatggtttcagcttcgaactcagcaaagtggtccgcacctggatccgcgagcgggtggtcgatcatctggcccacattgatactaagcttgcggaagcggttggggcgaacttaggcatcgaactgagcgacgatcagcgcaacattaccctgcccgccccggtcaatggcgtggagaaagaccccagcctcagcctctacgccgacgccgaaggagatgtgaaaggtcgcgtggtggcagtcctgctcaacgaacgcacctcagcgcaggatctggttcagctcctgcaggcgctgcaggcccagggcgtgcacagcaagctgctctactcgcgaatgggcgaagtcattgccgacgatggttctccgctgccgatcgccggcaccttcgccggctccccgtcgctgacggtggatgcggtggtggtgcccggcggcgacctcagcgccctgagtcagagcggtgacgcgctctattacctgctggaagcctataaacatctgaagccgatcctgctggcaggggatgcgcggcagctgacgtccgttctgcaagtcccgacccagggtgaagagggggtcatcgtcaccgatgcgctcgacacgccagcggcggacaaactgctcgccctgatgacggcccaccgcgtgtggtcgagaagcccgaaaatcgccgctattccggcgtag

SEQ ID NO: 250079 - DNA, 333 bp, Klebsiella pneumoniae; identical to SEQ ID NO: 134941

SEQ ID NO: 250080 - DNA, 1392 bp, Klebsiella pneumoniae
atgaactttccattaatagcgaacgtagtcgtgttcgccgtattactgtttgcgctggggcaaacacgccataaacagtggagcctggccagaaaagtgctggtcggtctggcgactggcgtggtatttggtctggcgctgcagctgatctacgggtctgacagccaggtgctgaaggattccatccagtggttcaatatcgtcggcaacggttacgtccagctgctgcaaatgattgttatgccgctggtcttcgcctccatccttagcgcggtggcccgcctgcacaatgcctcgcagctggggaaaattagcttcctgagcatcggtactctgttgttcaccaccctgatcgccgccctggttggcgtgctggtgaccaatatgttcggcctcaccgccgagggtctggtccagggcagcgcggagaccgcccgtctgaacgccatccagagcaactatgtggggaaagtagcggatctcagcgtcccgcagctgatcctttccttcgtgccgaagaacccgtttgctgacctgaccggggctaacccaacctccatcatcagcatcgtcattttctcggcgttcctcggcgtcgcagcgcttaagttgctgaaagaggatgtggaaaaaggccagcgcgtgctgaccgcgatcgataccctgcagggctgggtaatgaagctggttcgtctggtcatgcagctgaccccttacggtgtgctggccctgatgaccaaagtggttgccgggtcgaatttgcaggacatcatcaagcttggcggcttcgtggtagcctcgtacattgcgctgggtattatgtttgtcgtccacggcctgctgctggcgattaacggcgtcagcccgctgaagtacttccgtaaagtctggccggtgatcaccttcgcctttaccagccgctccagcgccgcctccattccgctgaacgttgaggcgcaaacccgtcgtctcggcgtaccggagtcgattgccagcttctccgcctcctttggcgccaccatcggccagaacggctgcgctggtatctatccggcaatgttggcggtgatggtcgcgccgaccgtgggcatcaacccgctggatccgatgtggattgccaccctcgtgggcatcgtcaccgtcagctcggcgggcgtcgccggggtgggcggcggcgcgaccttcgccgcgctgatcgtcctgccggcgatgggcctgccggtgaccctggtagccctgctcatctccgtcgaaccgctgatcgatatggggcgtaccgcgctgaacgttaacggctcaatgaccgccgggacgctgaccagccagtggctgcgccagaccgacaagtcgatcttcgatagcgaggaagaagccgaactggcgcatcgctaa

SEQ ID NO: 250081 - DNA, 591 bp, Klebsiella pneumoniae
atgacggcggaaggccatctcttcttttcaatcgcctgcgtagtatttgccaaaaacgcagagttaacgccggtgctggcgcagggcgactggtggcatattgtgccctcggcggtattgacctgcctgctgccggacatcgatcacccaaagtcgtttcttggccaacggctgagctggatctcaaagcccgtggcgcgggccttcggccaccgcggcttcacccacagcctgctggccgtctttggcgcgctgacgctgttctatctgaaagtgcctgacagctggattgtcccggcagacgctctccagggcctggtgctgggctatctcagccacattctcgccgatatgctcacccccgccggtgtgccgctgctgtggccctgtcgctggcgcttccggctgccgatccttgcgccgcgcaagggcaatcagctcgaacgcgccttgtgtatggcactgttcgtctatgccgtctggatgccgcagacgctggcggacaacagcgcgatacgctggtcatccggggtgatcaattccctgcagatcaccttcaatcgctttataagtcaccagagtgggcgataa

SEQ ID NO: 250082 - DNA, 762 bp, Klebsiella pneumoniae
atggtactgaacgccttcgacctgacgggtaaggtcgccatcgtgaccggttgcgataccggcctgggacagggaatgacgctgggcctggcgcaggccgggtgcgatatcgtcggcatcaaccgtaaaattccccatgatacggccgcccaggtgctggcgctgggccgccgctttcacgccattcaggcggatctcagccaagagaatgatatgagcggtctggtcgaccaggcggtggcggcgatgggccgggtcgatattctggtcaacaacgccggaattatccgccgccatgatgccctgaccttcacggaaagcgactgggacgcggtgatcgacctgaatctcaaagcggttttctttctcagccaggcggtcgccaggcagttcattcgccagggggaaggcgggaaaatcattaacatcgcctcgatgctctcgtttcagggcgggatccgcgtcccctcctataccgcttcgaaaagcggcgtgctgggtttgacccgtctgctggccaacgaatgggctggccagggtatcaacgtcaacgccatagcgcccgggtatatggccaccaacaacacccaggcgctgcgcgaagatgaagagcgtaaccaggcgatcctcgagcgcattcccgctggtcgctggggagcgccgaaagacctgcaggggccggtggtgtttctcgcctcatcagcggccgactatattaacggctatacgctggccgtcgatggcggatggctggcgcgctga

SEQ ID NO: 250083 - DNA, 669 bp, Klebsiella pneumoniae
atgtcagcgaagcgccgcattgaggccgcgatatttgatatggacgggttgctgattgactcggagccgctctgggatcaggcggaggtcgaggtcatggagagcctgggggtggatacccgtcgccgcgatgaactgcccgacctgctcggtctgcgaatcgacctggtggtggatctgtggtacgcgcagcagccgtggcacggcgtagaccgggcggaagctaccgcgcgcattattcgtcgcgccattgagctggtggaagcctcacgcccgctgctgccgggcgtacgcgaggcagtggccctgtgtaaagctcagggcttaaaggtgggcctggcctcggcctcgccgctgatgatgctggagaaagtgctcgatatgtttgaactgcgcgaccagtttgatgctctcgcctccgcggagcatttaccctggagcaaaccgcacccgcaggtctacctcaactgcgccgctgccctgggagtcgacccgcagcgctgcgtcgcgctggaggattcggtcaacggcatgatcgccagcaaagccgcgcgcatgcggtctatcgtggtgccggaagcggagaacagccgcgacccgcgctttgcgctggcggacgtcaagcttccgtcactgctggcactcactgctgagaacttgctcggttaa

SEQ ID NO: 250084 - DNA, 537 bp, Klebsiella pneumoniae
atgacgtaccaacaagctggacgcatagcggttatcaaacgcattttaggatgggttatctttattcccgccgtgctgtcgacgctgatttctgtgctcaaatttatgtatgagcacagtgaaaagaaacccggcattgatgcggtaatgatggattttgcgcacgtgatgattgagatgatgcgctttaacacgccgttcctgaactttttctggtacaactcgccgctgccggattttcaccatagcctgaacatcggcttctggatcatcttcattctggtgttcgtcggcatggccctgcaggcttccggcgcgcgaatggcgcggcaggcgaaatttctccgcgaggggattgaggatcagctgatcctcgaacaggccaaaggcgcagatgggttaacccgcgagcagcttgctgaacgcattgtggtaccgcgccatactatcctggtgcagtatttcccactgtacgtgctgccggtgatcgtgattgtcatcggttactttttcttttcgctgctgggctttctgtaa

SEQ ID NO: 250085 - DNA, 366 bp, Klebsiella pneumoniae
atggttttacgcaccctggcaatgccggcggataccaatgccaacggggatatttttggcggctggctgatgtcgcagatggatattggcggcgccattatggccaaagagatcgcccagggtcgcgtggtgaccgtgcgggtggatgggatgacatttttacgtccggtcgccgttggcgacgtggtgtgctgctacgcccgctgcgtgaagcgcggcaacacctcggtgacaatcaatatcgaagtgtgggtgaaaaaagtttcttcagaaccgattggccagcgctacaaggcgacggaagcgctgtttatctacgttgccgttgataatcagggaaaaccacgtcctctgccagcggaataa

SEQ ID NO: 250086 - DNA, 2184 bp, Klebsiella pneumoniae
atgagatcgccgcaatattctgtgcccacgaccctggcgctggtcatatccagtctcctcacccctaacgcctttgctgaagaatcagaacaagataccgaaacgatgattgtgcgcagtacggcggaagaggcgcttaagcaacagcccggggtgtcgattatcacggctgaggatattgctaagcagccgccggtcaacgatctctcagacatcatccgtaaaatgcccggggtgaacttgaccggcaacagcgccagcggcagtcggggcaacaaccgccagattgatatccgcggcatggggccggagaacaccctgatcctgatagatggggtaccggtcacgtcacgtaacgcggttcgctatagctggcgcggcgaacgcgatacccggggcgacagcaactgggtacctgccgaaatggtcgaacggattgaagttctccgcggtccggcagccgcgcgctatggttccggcgcggcgggcggagtggtcaatatcattaccaaacgtccgaccaacacctggcacggttcgctgtctttcttcaccaaccagccggaaaacaacaaagaaggcacgaccaatcgcgctaacttcaatctcagcggcccactggccggcgaggcgctgacgatgcgcctgtatggcaatatcaataaaacggaacccgacgcctgggatattaaccatgcgcaaaacggctcttacgctgcggggcgcgaaggggtccgcaataaagacattaacgcgctactgtcatggaaaatgaccccgcaacagatcctcgatttcagctacgcctatagccgtcaggggaatatctatgctggcgatacccagtacagcaacggcaatcttagcccgaacgggctggtggactccctgtacggccacgaaactaatcgcctctatcgccagtcctggggactcacctacaacggtctatgggattggggccagtccaaagccggtgtttactacgagaaaaccaacaatacccgcctgcaggaaggctctaccggccgcgtcgaaggcatgatcaacagtgaagattatgccaccagccgtctggaatcctggcgtactacctcggaattcaatgtgcctttcttctggctggcggaccagacgctgacgctgggaatggaatggaaccatgatcagcttgacgacccggcatcaatgcaggccactaacagcaacggcgagactatccctgggacctcgggcgaccctacgcaacgcagtaccaaaaacagcgccaccctcaccggtatctatctggaagataatatcgaagccgtgcccggcaccaatctgatccccggcattcgcttcgattatcataatcagtttggcagtaactggagccccagcctcaatctgtcccaggagctcggcgatatgttcacgctgaaggccggtatcgcgcgcgtgtttaaagcgccaaacctctatcaatccagtaaaggctatttgctctccacccgcggcaacggttgtccaaacacgatcgctgaaggcagctgctacctgctgggtaactctgacctcgacccggagatcagtatcaacaaagagatcggtatcgaatttaaccttaatggttacgctgccggagtcacctggtttcgcaacgattacaaaaacaaaatcgtctccggaacagaggtactgggctatacctccagcggcaataatattttgcaatggcagaacggcggcaaagccgtggtcgaggggctggaaggaaatctgctgatcccggtgctgagagatgtcctcagctggcggaccaatgccacctggatgctcaaatctgaaagtaaagagactggcaacccgctgtcggttatcccgaaatataccgttaacacgatgctcgactggcaggtaaacgacgccctgtctgcgaatgtgaactggacgctttatggccgtcagaagccgcgtcagtatgcggagatccgcaacgaaaccgggacccttgcgactaccgaggttggcgcctattccatcgtgggtattggtactcagtatcagctaaaccgggatattcgcctgaatgccggaataagtaatctatttgataaacaactgtatcgcgaaaatgccggcgcctcgacctacaatgagcctggccgcgcgtattacgccggcgttaccctctccttctga

SEQ ID NO: 250087 - DNA, 540 bp, Klebsiella pneumoniae; identical to SEQ ID NO: 134933

SEQ ID NO: 250088 - DNA, 744 bp, Klebsiella pneumoniae; identical to SEQ ID NO: 134932

SEQ ID NO: 250089 - DNA, 414 bp, Klebsiella pneumoniae
atgagtgaaatcaacccgtgcatgacgtgcggtgcctgttgtgcgtattttcgagtctctttctactgggcggaagccgacgacgcgggcggcctggtgccctccgcgctgaccgaaccgctgacccctttcctgcgctgcatgagcggcaccaatcagcgccagagccgctgcgcggccctgtctggcgatatcggcgacgccgttcactgcactatttatgaaaaccggccttcgccgtgtcgcgaattcgccatgtccggggaaaatggcgaggaaaacgatgcctgcaaccgggcgcgggcgcgctacggcctgccaccattgcggcctctttacaaagatatacctgccctgaccggcgcagagagtgctacgacggaacgatttgcggtacaatcgccggctagttaa

SEQ ID NO: 250090 - DNA, 639 bp, Klebsiella pneumoniae
atgaagaagttagcagcggcggcattgattcttggcacgctttctaccggcagcgtctgggcgcatgaggcgggtgagtttttcattcgtgccgggaccgccaccgtccgaccgacggagggctctgacaatgtgttaggcagccttggcagtttcaacgtcagtaacaatacccagctgggtttaacctttacctatatggcgaccgataacattggcgtggagttgcttgccgcgacgccgttccgccataaggtcggcaccgggccaaccgggactatcgccaccgtccatcagctgccgcccaccctgatggcgcagtggtactttggcgatgcgcaaagcaaggtgcgcccgtacgtgggggccggtatcaactacaccaccttctttaatgaagactttaacgataccggcaaggcggccgggctttccgatctgagcctgaaggactcctggggcgtggcggggcaggtcggccttgattatctgattaaccgcgactggctgctgaatatgtcggtgtggtacatggatatcgataccgatgtgaaattcaaagccggcggtgtggaccagaaagtcagcacccgtctggatccgtgggtgtttatgttctccgcaggctatcggttctaa

SEQ ID NO: 250091 - DNA, 678 bp, Klebsiella pneumoniae
atgatgtatcacattcctgacgtgctatcgacagaccaggtggcggaatttacccggcagctggcgcaggccgagtgggtcgacgggcgggttacggtgggtagccagggggcggccgtcaaacagaaccagcagatcgatacccgaacgccgctgtatgcccgcctgcaggccgctgtgctcgatatgctgcgcggccatccgcagtttttttccgccgcgctgccgcggacgatttccgcgccgttgtttaaccgctatgggccaggggagacctatggttttcacgtcgatggcgccgttcgccagaacggcgaggcgggctggatgcgcactgatctgtcagcgacgctgttcctttgcgatccggagagctatgagggtggcgaactggtgattgaagacacctatggccaacatcgggtgaagctcccggccgggcatctggtgctctatcccgccagcagcctgcactgcgtcaccccggtcacccgcggcgtccgccaggcctctttcctgtggatccagtcgatggtccgcgacgataagcagcgtgcgatgctttacgacctggaccgcaccatccagtctctgaaggcccgctttggcgacggagaagaggtcctctccctgctcaacatgtatcacaacctgctgcgccagtggacggaagtgtga

SEQ ID NO: 250092 - DNA, 2286 bp, Klebsiella pneumoniae
atggaaaaaaacgcttctctgcctttcggcagtttcaactcattggcattgtttacaggtctgtgtctgggagcctcgccggcagcaggcatcgcagcggaaaattcggtcaaaaatagtgaagagacgctggtagtggaagccgctccgccttcactctactcccccggcgcttccgccgatcccaagttcaataaaccgctggtcgataccacccgcaccatcaccgtgatcccggaacaggtgattaaagatcagggcgtcaccaacctgactgacgccctcaaaaacgttcccggcgtgggggcgttttatgccggggagaatggcagctcaaccaccggggatgccatctttatgcgcggcgtggatacctctaacagcatctatgtggacggcattcgcgacatcggcagcgtgacgcgcgataccttcaatacccagcaggtggaagtcatcaaagggcccgccggcacggactatggccgcagcgcgccctccggctcgatcaatatgatcagcaagcagccgcgccttgactccgggatcgacggctcggccagcatcggcagcgcctggtcgcgccggggcactctcgacctgaaccaggcgtttagcgacaacgctgcgttccgtctgaacctgatgggggaaaaaacccatgacgctggtcgggaccgcattgaaaacgaacgctatggcatcgcaccgtcgctggccttcggccttgataccccaactcgtctgtatctgaactatctgcacgtccggcagaacaacaccccggatggcgggatccctaccgtcggcctgccgggctattcggcgccttcgccgaagtatgccgcactcaactccgccgggaaggtcgataccagcaatttctatggcaccgactccgattacgataaatctactaccgacagcggtaccctgcgcttcgaacacgatctgacggagaacaccaccgtgcgcaataccacccgctggtcgcgagtgaaacaggagtatcttttgaccgcggtgatgggcggcgcgaacaatatcaccgcccccgatatcaatgacgtcaacacctggagctggtcgcgtctggttaataccaaagatgtcagcaaccgcattctgaccaaccagaccaatatcacctcgactttcaatactggctcgataggccatgacgtcagcgccggcgtggagtttacccgggaaaaccagaccaactatggcgttaacgccaagaccgcgccggcggtgaatctctaccatccggtgagcaacctgtcgattggcgggctggacagaaacggggcgaacgccaacggccagaccgataccttcgggatttatgccttcgatacgctgacgctgaccgagcggattgagatcaacggcgggctgcgtctcgacaattaccataccaaatatgacagcgccaccgcctgcggcggcagcggacgcggggctatcgcctgcccgcccggacagtcgaccggcagcccggtcaccactgtcgataccgctaaatccggcaatctggttaactggaaagccggggcgctgtaccgcttaaccgagcagggcaatgtctacgtcaactacgccatctcacagcagccgccgggaggcagcagcttcgccctggccgccagcggcagcggcaacagcgctaaccgaaccgactttaagccgcagaaggcaaaatccagcgagctgggcaccaagtggcaaatcttcgacaaccgtctgctgctcagcgcggcattattccgcaccgatattgaaaacgaagtggccgccaacgatgacggaacctggtcgcagtacggcaaaaagcgcgtggaggggtatgaactctccgcgaccggaaacctgaccccggactggacgattatcgccggctacactcagcagcatgcgacagtgacggagggacagaacgttgcacaggatggatcttccgccctggcctacaccccgaaacatgcctttacgctgtggacgcagtatcaggccaccagcgatctgtccgtcggcggcggtgtgcgctatgtcggaagcctgcgccggggcagcgatggtgcagttggtaccccggatcacaccgagggctactgggttgccgacgccaaactgggctatcgggtcaacagcaacctcgatctgcagctcaatatgtataacctgtttgataccgattacgtggcctccatcaacaagagcggctatcgctatcatccgggcgaaccccggacctttatgctgacggcgaacgtccatttctga

SEQ ID NO: 250093 - DNA, 708 bp, Klebsiella pneumoniae
atgaaatccgatcagcacaacactatcctcatcgtcggcgcctcgcgcggccttggccatgctatggcggcgacgttcctgcagcacggctgggaggtcatcggcaccgtgcgcgatttatcatcccacacgccgctccacgacctggccaagacgcatcccctgcggctacgcctggcgacgctcgacatccgcgatgaagcccagctggccgcgctgcaggcgacgcttcccccggcaagcctcgatatgctgtttgtcaacgccggtaccaccaatcgtgacccatcgcagaccattggcgacgtctccaccgaggagttttaccaggtgatgctcactaacgccctggcgccgatgcgggttatcgagcgcctgcagcaggcggttaaaccgcaggggctgctcggcgtgatgtcctccggccaggggagtctgaccaagaaccttaccggccagcgggaactctatcgcgggagtaaagctgcgctgaatatgttcatgcgcagcttcgccgctcgcccctcctcggcctcccatccgctggtggtgatggccccgggatggatccgcaccgagctcggcggggcagatgctccgctgaccatcgaagagacgatcccacgcctggtgaacgtcctgctcgacaaacggcaacgtccgggactggagtatctcgattaccagggccgtaccgtgccctggtga

SEQ ID NO: 250094 - DNA, 273 bp, Klebsiella pneumoniae
atgaacgatcccgattttaatttgctggcggccttcgatccgctgccggtcagtaccgaggtgattacggtttcgcaggcgtggcatccgcgtctggagcaggccccggccaccgctggctgcggcagcgggtacgtgaggtgtgtcgcgagtaaaaaaagcccgcacaagtgcgggcaaaaatactggaagcaatgtgagcaatgtcgtactgaatatctgagtgatttactcaactattcagtgatgagaaagataatatttctcatttaa

SEQ ID NO: 250095 - DNA, 948 bp, Klebsiella pneumoniae
atgaaagcagccgtggtttttgatctcgcagaaggcccggtttgggccgattttatcgacccgcagcccgcgaccggccagacgctcattgacgtccgcgccgccgcgataagccatgtggttaaggcccgggcatccggacgccattacagcttcgacggcaatctgccctttgtgcccggtatcgatggcgtcggcaccacacctcagggccagcgcgtctacttcgccttccccaccgcccccttcggcagtatggcgcagcgggcgccggtcgccctgcagaattgtctgccgctgccggatgcgctcgatgatatccaggcggcggcgatggccaaccccggtatgtccgcgtgggcatcgctggtgacacgcgcccagcttcaggccggcgaaacggtgctgattaacggcgccaccggcagcgccggtcagttggcggtgcagattgcccgctatctgggggcgaaaaaaatcattgcaaccgggcgcaatgcgcagtcgctggcggcgctggacgccgatgagtgtattcagttaaccgctgatgataaaaccttgagcgggcaattttcagcggtcagcgccgcgcagatcgatgtggtcatcgattacctgtggggacacagcgcggaattattattgccggcactggcgaaatatacccctgccggcagtccggtgcgctatgtgcaggtgggttccctggctggcgccgatatcgcgttaaatggcgcagtgctgcgttccgccccgctcctgctgatgggcagcgggatcggtagcctgtcggtatcgcagctgctggcggcgaccggcgaaatgctgcaggcggcggtgccggggaaattgaccatcgccaccaccccgcggccgctgcaggagatcgcggcggcctggccgcaggacgacagccagaagcgcacggttttcaccctcggataa

SEQ ID NO: 250096 - DNA, 483 bp, Klebsiella pneumoniae
atgcaagatgcacataatgactacgacattaccgactttcacggcgcgctgctggatatcatcagcgtaatgaaccagccgctgcgcgatgagcagatcctgcaggcagccggcgtccagctggaacagatgctgtttccgctgcttgtggcggtagggcgccatggcccggtgggggtggttgagctggcggatcatttagggcgcgattacaccaccgtcagccgccaggtgaaaaaactggaagcccagggactcgcctgtaagcaaccgaaccgtcatgatcgacggatcagcgaagtgacgcttagcgccagcggacaacagatgatcgacagtattgcggtagcgcggcggcggttaatgaatcaggtgctggcgcagtggccggaagatgaagtgcaggcgctgtttcgcttaacgcgcaaatacgccgacagtttgcagaaatcatcgccgcctggcgcgataccaggcggctga

SEQ ID NO: 250097 - DNA, 810 bp, Klebsiella pneumoniae; identical to SEQ ID NO: 212015

SEQ ID NO: 250098 - DNA, 1194 bp, Klebsiella pneumoniae
atgagcactttactgaacccctacttcggcgaattcggcggcatgtatgtgccgcagatcctgatgcccgccctgcgccagctggaagaagcctttgtcagcgcgcagaaggacccggcctttcaggcggaattcaccgacctgctgaaaaactacgccggtcgtccgacggccctgaccaaatgccggaatctgaccgatggcacccgcaccaccctgtacctgaaacgcgaagatctgctgcacggcggcgcgcacaaaaccaaccaggtgctgggccaggctctgctggccaaacggatgggcaaaaccgaaattatcgccgagaccggcgccggccagcacggcgtcgcctcagcgctggccagcgccctgctcggcctgaaatgccgtatctacatgggggccaaggacgtcgagcgccagtcgccgaacgtcttccgtatgcgcctgatgggcgccgaggtgatcccggtgcacagcggctccgccacgctgaaagatgcctgtaacgaggcgctgcgcgactggtccggcagctacgaaaaggcgcactatatgctgggcaccgccgccggtccgcacccgttcccgacgattgtgcgtgaattccagcgcatgattggcgaagagaccaaagcgcagatccttgaaaaagagggccgcctgccggacgcggtgatcgcctgcgtcggcggcggatcaaacgccatcggcatgttcgctgattttatcgaggaaaccaacgtcggcctgatcggcgtggagcccgccggacacggtatcgagagcggcgagcacggcgcgccgctgaagcatggccgcgttgggatctacttcggtatgaagtcgccgatgatgcagaccgccgacggccagatcgaagagtcttactccatttccgccgggctggacttcccgtccgttgggccgcagcacgcgtttctgaacagcaccggtcgcgctgactatgtgtcgatcaccgacgacgaagcgctggacgcgtttaaagcgctttcccgccacgaagggattatcccggcgctggagtcctctcacgctctggcccacgcgctgaagatgatgcgcgagaacccggaaaaagagcagctgctggtggttaatctctccggccgcggcgacaaagacattttcaccgtacatgacatcctgaaagcgcgaggggaaatctga

SEQ ID NO: 250099 - DNA, 1359 bp, Klebsiella pneumoniae
atgcaaaccgttttagcaaaaatcgttgccgacaaagcgatttgggtggaagcccgcaaacaacaacaaccgttagccagttttcaaaatgagatcgttccgacgcagcgcaatttctatgacgcgctggccggcacccgcaccgcgtttattctcgagtgcaagaaggcctcgccgtcgaaggggttgattcgcgaggatttcgatccggcagcgatcgccagcatctacaagcactacgcctcggcgatctcggtgctgtgtgatgagaaatatttccagggcagcttcgatttcctgccgatcgtcagccaggtcgcgccgcagccgatcctgtgtaaggacttcaccatcgacccttaccagatctacctggcgcgctactatcaggccgacgcctgcctgctgatgctctcggtgctcgacgatgaacagtatcgtcagctctcggcggtggctcacagcctgaatatgggcgtgctgaccgaagtcagcaatgaagaggaactggagcgcgccatcgccctgaaggcgaaggtggtgggcattaacaaccgcgacctgcgcgatatgtcgattgaccttaaccgcacccgtcagctggcggcgcgtctcggcccggatgtcacggtgatcagcgaatccggcatccatacctatgccgaagtgcgcgagctgagccacttcgccaacggcttcctgatcggctccgccctgatggagcaggcggatctggaagcggcggttaaacgcgtgctgctcggcgagaacaaagtgtgcggcctgacgcgcccgcaggatgcccaggtggcctgggagtccggcgccatctacggtgggctgatcttcgtcccgacctcgccgcgagcggtaaatgacgcccaggccaaagcggtgatcgccgctgcgccgctgcagtacgtcggcgtcttccgcaatgcgccgctggaggaggtggccgcccgcgcgcaggctctggggctggccgccgtgcagctgcacggtgatgaagaccaggcctatatcgacgcgctgcgcgacgccctcgcggacaacgtccgcatctggaaagcgctgagcgtcggcgaaaccttcccggcccgtacgctccaccatgtcgacaagtacctgctcgacaacggccagggcggcagcggccagcgctttgactggagcctgctgcagggccaggatctgcgcaacgtcatgctggcgggcggcctcggcgccgataactgtgtggaagcggccaaaagcggctgtgccggactcgatttcaattcaggcgtagagtcgcaacccgggattaaagacgccagcaagctggcctccgtattccagacgctgcgcgcatattaa

SEQ ID NO: 250100 - DNA, 1596 bp, Klebsiella pneumoniae
atggctgacattctgctgctcgataatatcgattcctttacctataacctggcagaccagctgcgcgccaacggccataacgtagtgatttatcgcaactccgttccggcgcaggcgctgattgagcgtctgggcaccatggacaacccggtgctgatgctctccccgggcccgggtacgccgagcgaagccggctgcatgccggagctgctgacccgtatgcgcggcaagctgccgatcatcggcatctgcctcggccaccaggccattgtcgaagcctacggcggctatgtcggccaggcgggggagatccttcatggcaaagcctccagcattgagcacgacggccaggcgatgtttgccggtctggctaacccgctgccggtggcgcgctaccactcgctggtcggcagcaatattcccgccgggctgacgattaacgccaatttcaacggtatggtgatggcggtgcgtcacgatgcggatcgggtgtgcggcttccagttccacccggaatcgatcctcaccacccagggcgcgcgactgctggagcagaccctggcctgggcgctgcagaagctggagcataccaacaccctccagccgatcctcgagaagctgtaccaggcggaaaccctgagccagcaggagagccaccagctgttctccgccgtcgtgcgcggcgaagtgaagcctgagcaactggccgccgcgctggtcagcatgaaagtgcgcggcgagcagccgcaggaaattgccggcgccgctaccgcgctgctggaaaacgccgcgccgttcccgcgcccggactacctgtttgccgacatcgtcggcaccggtggcgacggcagcaacagcatcaatatctccaccgccagcgcctttgtcgctgcggcctgcgggttgaaagtggcgaaacacggcaaccgcagcgtctccagcaaatcaggctcttctgacctgctggcggccttcggcattaatctcgatatgaacgccgataaatcccgcgccgcgcttgatgagctgggcgtctgcttcctgttcgcgccgaagtaccacaccggtttccgccacgcgatgccggtccgtcagcagctgaagacccgcaccctgttcaacgtgctgggcccgctgatcaacccggcgcatccgccgctggcgctgattggcgtctacagcccggaactggtgctgccgatcgccgagaccctgcgcgtgctgggttatcagcgcgcggcggtggtgcacagcggtgggatggatgaagtttcgctgcatgcgcctacggtggtggccgaactgcataacggggaaattaaaagctatcagctgaccgccgacgacttcggcctgacgccttaccatcaggcgcagctggcgggcggcaccccggaagaaaaccgtgacattctgacgcgcttgctacaaggtaaaggtgaagccgctcacgaagccgccgtcgccgccaacgtcgccatgttgatgcgtttacacgggcatgaagatctgaaagctaacgctcagcaggtactggatgtgctgcacagcggcgcggcctatgacagagtgaccgccttagcggcaagagggtaa

SEQ ID NO: 250101 - DNA, 1563 bp, Klebsiella pneumoniae
atgcaaacatccaaaccggcactcgagcttctcaccagcgacgccatctaccgggagaacccgacggcgttattccaccaactgtgcggcgcccgtccggcgacgctgctgctggaatccgctgacatcgacagcaaagatgacttaaaaagcctgctgctggtcgatagcgcgctgcgcattacggcccttggtgacactgtcactattcaggccctctccgccaacggcgcggcgctgctggaactactggacggcgcgctgccctccgggatcaacaatcagcgccagcccaacggccgcatcctgaccttcccggccgtcagcgccctgctcgatgaagacgcccgtctctgctcactgtcggtgttcgacgccttccgtctcctgcaggagctggtgagcgttccggacaacgagcgcgaagcgatgttcttcggcggcctgttcgcctatgacctggtggccggttttgaagatcttccccagttgcaaagcgacaccgcctgcccggactactgcttctatctggcggaaaccctgctggtcatcgaccatcagaccaagcatacccgcattcaggccagcctgttcaccccgctggagagtgaaaaacagcgcctggagcagcgcctgagccagctgcgtcagcagctgaacgagccgccggcgccgctaccggttaccaccgtggccgaaatgcgctgcgacgttgaccagagcgatgaagagtacggcgcggtggtgcgcaaaatgcagcgcgcgatccgcgccggggaaatcttccaggtggttccttcccgccgcttctctctgccctgcccatcgccgctggccgcttatgatgtgctgaagaagagcaaccccagcccgtacatgttctttatgcaggacaatgatttcaccctgttcggcgcctcgccggaaagctcgctgaagtatgatgccgtcagccgtcagattgagatctaccccatcgccggcacccggccacgcggccgccgcgccgacggctcgctggatcgcgacctcgacagccgcatcgagctggaaatgcgcaccgatcataaagagctttccgaacacctgatgctggtggacctggcgcgtaatgacctggcgcgcatctgcaccccgggcagccgctatgtcgctgatttaaccaaggttgaccgctactccttcgtgatgcatctggtctcccgtgtagtaggcgaattgcgtcaggatctcgacgtcctccacgcctatcgcgcctgcatgaatatgggcaccctcagcggcgcgccgaaggtccgcgccatgcagctgattgccgccgccgaaggtaaacgccgcggcagctacggcggcgcggtgggctatttcaccgcccacggcgacctcgacacctgcatcgtcatccgttccgcctacgtgcaggaaggtatcgctaccgtccaggccggagccggcattgtgctcgactcggttccccagtcggaagcggatgagacccgaaataaagcccgcgcggtgctgcgcgccattgcccaggcccatcacgcgaaggagattttctga

SEQ ID NO: 250102 - DNA, 864 bp, Klebsiella pneumoniae
ttgagcgacagccaatacgcagtgatttacgatctgcacagccataccaccgcctctgacgggcgactgactccgcaggaactggtccatcgcgcccatgagatgcgcgtcggcaccctggcgatcaccgaccatgacagcgtggcggcgatcccggcggcccgggaggagatcgcccgcgccggattacccttgaccctggtgaacggcgtcgagatttccaccctttgggagaatcacgagattcatattgtgggtctgaatattgatattgcgcacccaacgatgaccgccctgctggaggagcagaaagcgcggcgccagcagcgcggtcagatgattgccgagcgcctggagaaggcgcggatccccggcgcctgggaaggggcgctgcgactggcggacggtggcgccgtcacccgcggccattttgcccgttttctggtggaggccggccatgcgaaaaacatggcggaagtcttcaaaaaataccttgcccgcgggaaaaccggttacgtgccgccgcagtggtgtacaataaaacaagcgattgatgtgattcatcattctggcggcaaggcggtgattgcccatcccgggcgctacgatctctccgccaagtggttgaagcggctgttggcccactttagcgagcagggcggtgatgccatggaagtggcccagtgtcagcaggcgccccatgaacgcgcccagctggccaccctggccgtgcagtttggtcttctggcgtcgcagggatccgattttcatcagccctgcgcgtggatcgaacttggccgtaagctctggcttcctgccggcgtggaaggcgtctggcacagttgggaagcggccgccgaataa

SEQ ID NO: 250103 - DNA, 621 bp, Klebsiella pneumoniae
atgagccagtttttttatatccatccggataacccgcaggcgcggttgattaaccaggcggtggagattgtgcgtaagggcggggtgatcgtttatcctaccgactccggctacgcgctgggctgcaaaattgaagacaagggggcgatggagcggatctgccgcatccgtcagctgccggacggccacaactttaccctgatgtgccgcgatctgtccgagctgtcaacctacgcttttgtggataatgtggcatttcgcctgatgaaaaacaacacgccgggcaactatacctttatccttaaggggaccaaagaggtgccgcgtcggctgctgcaggagaagcgtaaaaccatcggcatgcgcgtcccgtctaaccccatcgctcaggcgttgctcgagaccttaggcgagccgatgctctccacgtcgctgatgctgcccggcagcgactttactgaatccgacccggaagagatcaaagatcgtctggagaaagtggtggacctcatcattcacggcggtttccttgggcagcagccgaccacggttatcgatctcactgaagacaccccggtggtgctgcgcgaaggcgtcggcgacgtgaggccgtttctctaa

SEQ ID NO: 250104 - DNA, 909 bp, Klebsiella pneumoniae
atgcgtgttatcgactatggccgcctgctgctgctcgccgccctctggggcgccagctttttgtttatgcgcatcaccaccccggccttcggggcgttgaacagcgcttttcttcgcgtactgttcgccgctatcgcgctcgggctgttactcggcgtgcagggtaaatggagcgggtatcagggaaaactcacatccactctgcagctgggggtcattaattcaggccttccttttctcatgtactgccttgccgcgcaatggctgccggcagggtactccgccacgcttaacgccacggcgccgatgatgggggtgctgatcggcgcgttatgctttgcagaaccgttaaccctgcgcaaaggcggcggcgcgatactgggcgccattggcgtggcggtgatcgcgcgcccgacgtctggccttagcgccgccctgctgctgccggggattggcgcctgcctgaccgcgaccgcctgttacggtctggccggctttctgacccgccgctggatccagcagcgaggcggcctcgaggctgaacgcgtcgcgctgggtagccaggtcggcgccacgctgtttctgtttcctttctttctctggtcctgctggcatgggcctgccgtagactggcggcagagtctgccgtggatagcgatagtcatgctgggcgtggtctgcacggcggcagggtatattatctacttccgcttgattgcagatatagggccgctgcgttcgctgtcggtgacctttttgatcccaccttttgcggcgctgtggggctatctctgcctcggagagacagtggagaaaggattgattctcggcgcgctgctggtttgtgtagcgctatggatgattatcgtgccgtcggggcgaaaacgcggggtaccggacggcgcatga

SEQ ID NO: 250105 - DNA, 897 bp, Klebsiella pneumoniae; identical to SEQ ID NO: 212007

SEQ ID NO: 250106 - DNA, 123 bp, Klebsiella pneumoniae; identical to SEQ ID NO: 250058

SEQ ID NO: 250107 - DNA, 1656 bp, Klebsiella pneumoniae
atgggtaacagagtggacaacaaagccccgaaattcactaccaaacgcggcaacacctactacatcaattttcgtctccctgacgggactttctttcgtcgtagtttaggcactgattcactaagagcggttgaagtgaccatgagtcgcctaagcccatacatccctcttgttcaaaatggctcgctgtctgtcgagcaattcaaaatgcatatagatggtttccgtgaggccactcagcgcgattttgatacttatctgttggactggttgagaatgggggttgaggaggctaagcggatgcctgacctggggcgtttccagcgtaaaatagattctgaaactgctatctcacctgctgctacagtcacagaggcaaaaggccgtgccgatatacatttgaatcgtgtctataacggtgatgactctaccgctcgcatgatgcttgcagcccttcaccaaaagaaggttgctttcagtcaaaaggatttagatcaggcctatgaggtggcagggcagatagacatgcatcaagcaatgctgaatcaggcttatgaagccttttattctggcgatattgtccgttaccgctctcttgttgactccatgcaatctcaactagctgaaactgagagacgaaaaaaaccagcagctaaacaggctgtagctactgttgaagctcctgaagctgacaatacgccgttactctctgaggcgtggaaactatttgtagcggagaaggggaaaacctgggccattaccatagctcgggagaataatcgcttctacgaggtgctgatgcacgttttaggggatattcctgtagggagcattaccaaacagcatatacgccaaacactggcagtgattgagaaccttccacgccgtaaccataaaccgtattcagaaatgagcctctcggagtgcatagatttggatgtgccagaggacgatctgatcagtagtgccaacgtcaaaaaacacctcaaaatttattcatcattctttaaagttttccttaaagatgaaaaggatatcttagaaaaatcacctactgaggggatcaagtatgaggtgacagagaataagggcgggcattactcgcggcctgagatgcaacggctcatagaacggttatctacgttcaccgattggcggcgcgattacttcctgactttgatctatacaggtgctcgccggggtgaaatggcggctatccgtaaggaacacatacgcaaggatgaggaaacagggcgctactatatctttgttgaggacggtaaatctgagcacgcacaaagacaaatcccaatcagtaagagtattgaggcgctgttgttagctcggattaagccccttaaagatggtgatcttgtgttttacgacttgccaacttatgaatataccgctattcaatggcataacttaatgaatgagtgcaatatccctaaatacaacgagtttgggcagaagcgcgttatccatgccttgcgccacactttcatttctgaggccatagcgaagacgcagaatgccgcactagttcagtttgtagtagggcatagtaggacacaatcgttaggtataacggcaagatatacgcataggccaccattgcatgatctattacaggttgtagatagtgtgaactggtga

SEQ ID NO: 250108 - DNA, 291 bp, Klebsiella pneumoniae; identical to SEQ ID NO: 250057

SEQ ID NO: 250109 - DNA, 204 bp, Klebsiella pneumoniae
atgaaaccattaatcgtgctgacgctggcgctactgccagccctggcgaatgccggacagataacaatggtcaacccacaggaggagcagacagagaacgggaaaacgctgtgcatctatgagaacagcaattacacatttacgtacatcactaaaggcgcttgcccctatgccaaaacttttgacacagaggctagtgattga

SEQ ID NO: 250110 - DNA, 561 bp, Klebsiella pneumoniae
atggcaacaacaaaaatcatcacccagtcagaggcatttaggctgataagctggcttgagagtcataacaaacagctattcgcagatgtggcgatcactatggcctcgttatgtttgcgtataggggatgcgctctccttaaaattctcagattttgtggagggagacacactaaaaatcacagagagtaagacaggtaaggagaaggagatcgtcgtccctgcaaaggtatgggagatagtgcagaggagaaaagccacttttccacgtgacacctatttattcacctctcattcaaaccgtgcaagtgggctgaagcccgtgagccgtgagcaagtgaaccgggagctaaaacaagcggctgaaaatgtagggattaaaggaacggtagggtgtcactcgtttagaaagtttgccgctacgcaggtatttgaacagagcaacggcaacctggctttagcaatgcgtacccttaaccattcagatcctaaagtcaccatgaactatttgaagatcgacgttaagagcgtgggcgctgcccttgctaacatttgggagtaa

SEQ ID NO: 250111 - DNA, 669 bp, Klebsiella pneumoniae; identical to SEQ ID NO: 250056

SEQ ID NO: 250112 - DNA, 159 bp, Klebsiella pneumoniae
atgagcgatacaaagaaacaaccgcgcacttgcctacacattcctgatgaaatttttcaagccttatttaaggaagcgagaaatcagagagtgacagttacagaatacatcctcaatgttctgcaaaaagaggcaaccaatcttaacaagggcaagtga

SEQ ID NO: 250113 - DNA, 834 bp, Klebsiella pneumoniae
atgacaaaaataaaatacatcaatactgatgtgttccaatacgtgccgattgaggacgcattcaatgaatgtacgcgaattaccaatctgacgacaggtattacagaatctctatcccctgctgataaactcttttacgtaagattgcgtcaccgccaccagttttttgtaaatgagcgaggaggcacctattacgatgatattgatcagcttggtgccagtattggtattagctcatcaacagcaacgcgtattgttgcaaagttgaagaaagttgggttagtggttgccacgctgtcagggcggtctaataaatggacaatactaccgctcacgccggataacttcctctttgaacgtgacattaatgcgatggaaagaggagcagcgccagaatgggtggattgtttaaaacatcccgtatttggtaacgtcaaagaagatgtagcgccagaggtgcaggaagaaaaacagcagcctattccagaaatcgatcctatgtgcgaaatggatgaattgccggaagatgaaacgccagcgccggaaaaagtgaagccagcaccgaagcccgcgaagaaaccagcgccaaagaaagcagcagcctcaccgcaagccgtttccccattcgagtttgggagtccacgtgatgaaacgaaggattggttttatctaaaacattatcagggtgcagaacggttcaccacctttacagattttgatctcccgtatttggcactattcaaggcacagggcgcactcactaatgcttatgcgctggattatctacaacttagaacagatcaaatacaacgacagttatcgaggaatacatga

SEQ ID NO: 250114 - DNA, 285 bp, Klebsiella pneumoniae
atgattcaatacataaaactgaacaacacaaaccaaatccaaatcaatgatgcaggaaaacaggtgtattattccctgttatggttttggaagggacgaaagacgaagattagctatggagaactcgaagataaatcaaatgtctcccattcagggtgtctattctggatgcgagcgttacaaaatctaggtgttattgagatagacgatgaatctagttatttatcattcactctaaaacgtatagaaacagattctgtagagtttatctacaccaactactaa

SEQ ID NO: 250115 - DNA, 405 bp, Klebsiella pneumoniae
atgagcagaaaagaacgaaatgtaatcgcacgtattgaacgacaatccaatactctcccccccgctaaatccctagccagccgtaaagagtttcaggaactttctcgatttgcaatggaatggaacagtgttcccggagaatggcacacagaaataatcgagcatgacagccccccattatcagaggaagagcaggaagcattaaatcacatcctatcctcctgtgatgatgtatatttcaaacctcgtaaacgtaaacaatatattatggatagctctgatttgaggaaatatcaggtgatgggctttgaggattatgtttcatattgtggctatctcagcgttaacgggctaaataaccttgtacgcgattttgacgcagtatattcagataaggaagaataa

SEQ ID NO: 250116 - DNA, 153 bp, Klebsiella pneumoniae
atggagtttattcttgaagatgcatatctgagcgaagaagagaagatagcagcgcttgaggaacttctggataaatgcctaaccatgcaagcgcctctcattttattgggcaataaaatcaaaacaacaataacacaattaaaggataaataa

SEQ ID NO: 250117 - DNA, 339 bp, Klebsiella pneumoniae
atggataattcgacttcatataacaccctacaatctgtattacaaacctaccacgataattacgccgtccctatgctgaggttattaaacgatatgctgcgtgatagaacgcctgagagcctcctggcggcgattaaagcgcaagatttagcacaggcaatgctatctcatattggcgacgtagcgagccgtatagcggctatggaacattcaacactaacacaggatgaggctgatatgatttctgaggaaatctctgaggcactgcttctgctattccagtgcattgaggagacgggcgaaatggcgcttgaactggcgccgaacaacaactactag

SEQ ID NO: 250118 - DNA, 222 bp, Klebsiella pneumoniae
atgcttctaatgaaccagcccgaaaaacataaaatacagaaaatgaatgatgagtttaaaagcctgaatctagagcagaaaacatttattgctaaatcgttagatgtctctctagatgaggtggatatgttaatcaccaagttttctgctgaaacgcccacgaatgataaatcatctaaagggcttcaggaactattaaaacaattagcaaaaggaaaataa

SEQ ID NO: 250119 - DNA, 378 bp, Klebsiella pneumoniae
atgcaatttggaacatttcaaactctgaatggtgataacagccatgcacgatataaagtaatttcgtatgcctcggatgctgtacttcaggataaactcatacgcgtagatgcaggaatccccgattccttaatcgtcggtgatttggtcgatagtaacggcaacctcgcaacctcagttgatgtgattgaatacgtagtggtagagccagtgcttgcaggtaaaaaagctttcgtagtcgctgacccgcatcatgttattctcgctaaagcggggattgaactccgtaatctcgatgaaacagcggttttgattgctcttgcaaacaagggttttacatttgccgattatggcactttagcactacgcacctcttaa

SEQ ID NO: 250120 - DNA, 1038 bp, Klebsiella pneumoniae
atggcatacacagatattttttctggcaatatgtatgattttgccagtccattcacatttagtacccagattaaccaaatcgtttctaatctatccttgtttaagattgaacatcacagtgttaacagcattgctttagataagattaccgatattaaaaatcttgtagcacctgaaaagatgccctacgcacattcagattggaactctgcctcacgtcctgaatatagctccgtattgtaccagcaaaaatatacaaattctctgaacgaggtgagtagtcgagacctagagcaatatcgccagcgtggtgttatggatcagggtgatcagattgcattagctatcaatgatttcagcgatgcacaatacgcgcaggtgagtaacactgtagaggttgacctcgtagaggcactattagggctccgtgtgcagtcacaatatgcaggacagggggatttagatttcctagcaggtggtagcaaaaccacttatacaatggatattagcgccagtgctaacgtattccagcaattaagcgagatcggacgtattcagaacgtgaagctaggctcagggcttgcacaagctaaacagggcgtagtgatccttgcctcgggcaaagctgccgtagcactacgttaccatccatccgtgaaggatttcatggtgtatacgctgcctctggagtctggggataacttctacacccgcactaagggtgccaatccagctttcgaaacctggacgctaaacggtgtaacggttatcgatgtgacaggttatagcctaatcactgacaaaatcggagttgatggcttcgttagcttgcctgttatgtctgaaaactcaaatgcctacgtcctacatagcggtgttggtgttcgccatgcaacgcaagggaaagatgcaaatctatatcatcaatacgttacagttgatcagcgttggggataccccgccgtagcaacggaatgtagctatctcccgattgtgaatattcccgaagcgattatcttcggtagcgttactgaataa

SEQ ID NO: 250121 - DNA, 189 bp, Klebsiella pneumoniae
atgcagttaatactcaaatcgcagaacatccatattctccttgatgccaacagtgctatagacatgataagaataaaagctctggccgagatgctcgacattagctatcccgcactgaaacaacgtattcacagagggcaagacgtagacacagctattagagaattgttagctaaaggaggcgaataa

SEQ ID NO: 250122 - DNA, 1866 bp, Klebsiella pneumoniae
atgtcattagaaataaacgcatctcgcatctctaacgtagttacatttaccgttgataagaatagtcttaaagaggctatgtctacagtagagggactacgaaaagcttttgaaaagctgcaagaccccaagattaatttcaaacgttttaatcaaaacatgaaacaggctcaaaaaacggtagagaaggcctccaaagccgcctctaagccccgtgataatagccaacgtgaagcagagcgagcagcaaaggcgcaagcacgtgtagaggcacaggcagcgaaagaggctgcgagaaacgcagctagaagagaacgggctgaactgaagctattggataccgcttcaagctttaaatcaatgcaacacctcaccaatgttgaactcacacaggccgcattacaggccagcaagataacccgtagttatgctgatggaacgatcagcctacaacgccaaaatagtgagattaaacgtttacagcagagttatcgcaggctcaatgctcaacgtaaacaatcggcttctcctaattacgctaacgtggctggcaatacaccgggtaatgggattattacaggtagtattatggggctgggctctcgtgtattagctggcgctggcgtgggcgctgctgcctatggcgcatataattggggcaaagatgctatttcctctcaggaggaaagaagcgagattgtagctagagcacgcttgggtggggtggattataacgtgttgcaatcattaggtcagtttgcacaggctaatggtatagatagcggaatcggcacccagggagccagaaaaaacctggatgtagcaaaagatgtgtccgaaaagctcgcagatggtgcgctgaatgcgaaacgtaataaacaaggtgaatggacaggagcaccaacaggcattaacactgctttgaacatggggtatacgcctgaacagcttaaagaatgggctaaaaatccgtttggttttgtctcttcatacaccaatacaatgcaatctaggggattgagtgaacaggaaattttgcacaatctcgaagacctcggggatgatctcgggctttacgccaaagcctttatgaacggcgggaaggctctcactgatcaggtggacgtgctcaagcgtaacggtcaatggttgaaccaggagcaacaagatcagctcgtagcatatcgtaagtttaatcaggaaatgagtattctcactgatagccagaagttggccttctttgaaggattcatggaatctatagaccctgaaaccatgcgagagtttaaggaagctatgcaagatgctttgccattcttcaaaggattagggaaagccgctggcgatgttgttgagggattaatgaagctaaccaactggattacaggcaaactaaacctcctgaatggggacaacaccactaaagaggctgttagccagcactacggcactacaagcgcccctgtagctcctggaagcaatcctgtagcgaataactatggggcaactcagcctaaagcagacggcacccatgagcataatgtattcgacacaatgcgtgaatggtggtatggcacaagcgatgccaaggatattaccagctattcgtctaacaaagatggaagctattctcctgtctctatgctgaaacagagtgcaacagctaccgctacgcctacacaagcgcctgtagtggctcctgtggtgctacagaataacttaccggaggggatgattaccctcaatattgctcctgatccaacctttggaaatatgctaaatgctactgtggatcagaaaataacacaggccaatcagcgccttgttttatctatagcaagtggacaatcttcaacagggggctaa

SEQ ID NO: 250123 - DNA, 657 bp, Klebsiella pneumoniae
atgctccctgcatggaatataataataatggcaacaataaacaatacatcaaacacaaacactaccactacagataaagggcagaatggtttttgtattctgtccagcttgtataatacagcttctgatagttacatacagaagtatcaggctctaacatttgatagcactccatctacaggaatacgcagacaagccgatgtgacgagctatcctgtagaaagtggagctaatgtatctgatcatgtgcaaatcagaaataacacatttaaactatcaggaatgatcactgaaacaccaatcagggctgttagagatttattatacagtgctggggtgaatggcactcgtattagtcaagcaataacttatctcgatcaaatcttcgaagcaagacagcctattattttaatcactgagcataaggtgtacgagaacgtaatccttacagggatttcttatgattataaatctgagcacgctatgcaatttgatctggagtttgaacaagtgcgcctggtaagttacgctgaaactaatgttattgctacaaagacgcaaggaaataaaaacgtaggtggaacagttaaacaaaaagggccatcaagcaaggctaaagccagctctgacacggtgacaccatcgtttaataaataa

SEQ ID NO: 250124 - DNA, 903 bp, Klebsiella pneumoniae
atgagcgagaaactgcaaaaagtgctggcccgcgccggccacggctcccgccgtgaaattgaagcgaaaatcgaagctggccgcgtcagcgtcgacggcaaaatcgccaccctcggcgatcgtgtggaaattgtccctggtttaaaaattcgtatcgatggtcatctgatctcggtgaaagagtctgccgagcagatctgccgcgtgctggcttactataagccggaaggcgagctgtgcacccgtaacgatccggaaggacgcccgacggtgtttgatcgtctgcctaaactgcgcggcgcgcgctggattgccgttggtcgtctggacgtgaatacctgcggcctgctgctgttcaccaccgatggcgaactggccaaccgcctgatgcacccgagccgtgaagtcgagcgtgagtacgccgttcgcgttttcggccaggtggatgatgataagctgcgccagctgtcgcgcggcgtacagttagaagatggtccggcagcgtttaaaaccatcaaattcaccggcggcgaagggattaaccagtggtataacgttaccctgaccgaagggcgtaaccgcgaagtgcgtcgcctgtgggaagcggtcggcgtgcaggtcagccgtctgatccgcgtgcgctacggcgatattctgctgccgaaaggcctgccgcgcggcggctataccgagctggacctggcgcagaccaactacctgcgcgagctggtggagctcacgccggaaaccagctctaaggttgccgtcgagaaagaccgtcggcggttgaaagccaatcagatccgtcgggcggtgaagcgtcacagccagaccagcgctaatccgcgccagggtaacaacagcaaccgtcgttccagtactcgcaataagactaacggttaa

SEQ ID NO: 250125 - DNA, 591 bp, Klebsiella pneumoniae
atgagtgatgaacgctaccgcgaacgccagcagcggctgaaagataaagttgacgcccgggtggcggcggcccaggacgagcgcggcattgtgatggtctttaccggcaacggcaaaggcaaaaccaccgccgcctttggcaccgcgacccgcgccgtcggccatggcaaaaaagtcggcgtgatccagtttatcaaggggacctggcctaacggcgagcgtaatctgctggagcctcacggcgtcgaatttcaggtgatggccaccggcttcacctggaacacccaggatcgcgacagcgacaccgccgcctgcctggcggtctgggagcatgcccgccgtatgctcgctgacgaccagctcgatctggtgctgctggacgagctgacctacatggtggcgtatgattacctgccgctggagtcggtgctgagcgccctgcgtgagcgccctgcccatcagtcggtgatcatcaccggccgcggctgtcatcgcgatattattgaactggccgataccgtcagcgaactgcgtccggtcaagcatgcatttgatgccgggattaaagcgcagatggggatagactactga

SEQ ID NO: 250126 - DNA, 801 bp, Klebsiella pneumoniae; identical to SEQ ID NO: 134911

SEQ ID NO: 250127 - DNA, 1083 bp, Klebsiella pneumoniae
gtgcagcaacgtcagtgctttacacaaggtgaaaacgtggaattacttgctcagtacggcttatttttagccaagatcgcgacggttgtcgtcgccatcgcggtgattgccgctattatcgtcaacctcgctcagcgcaagaagcagcgcggcgagctgcgggtgaccaatcttagcgagcattataaagagatgaaggaatcgctggcggtggcgctgctggacggcccgcagcagaagcagtggcataaggcgcagaagaaaaagcaaaaacaagaggcgaaggcggccaaagcgcgggcgaagctgggtaatgccgagccggaaggcaagccgcgcgcctgggtgctggatttcaaaggcagtatggatgcccatgaggtcaatagcctgcgggaagagatcaccgcggtactggcggcggcgaaagcgcgcgatcaggtggtgattcgcctggaaagccccggcggggtggtgcacggctacggtctggccgcctctcagctgcagcgcttgcgcgacaagcagatcccgctgacggtggcggtcgacaaagtggcggccagcggcggctatatgatggcctgcgtggcgaacaaaattgtctcggcgccgttttcgatcctcggctctattggtgtggtggcgcagatcccgaacctgcaccgcttcctgaagaataaagatatcgatatcgaactgcacaccgccgggcagtacaaacgaacgctcaccatgctgggcgaaaataccgaggaagggcggcgcaagttccgcgaggatctcaatgagacacatcatttgttcaaggatttcgtccaccggatgcgtccgggacttgatattgagcaggtggccaccggcgaacactggtacggggtgcaggcgctggaaaaaggtctggtggatgcggttgaaaccagcgatgagctgctgctggggctgatggagagccacgaggtgatcggggtgcgttatcaacagcgtaagaagatgctcgaccgctttaccggtagcgcggcggagagcgccgatcggcttctgctgcgctggtggcagcgcggtcagaaaccgctgatgtaa

SEQ ID NO: 250128 - DNA, 252 bp, Klebsiella pneumoniae; identical to SEQ ID NO: 134909

SEQ ID NO: 250129 - DNA, 2598 bp, Klebsiella pneumoniae
atgggtaaagctctcgttatcgttgagtccccggcaaaagccaaaacgatcaataagtatctgggtaatgactacgtggtgaaatccagcgtcggtcatatccgcgatttgccgaccagtggatcagcttccaaaaagagcgccgactctaccgccaccaaaggggctaaaaagcctaaaaaggacgaacgtagtgctctggttaaccgtatgggcgtggacccatggcatgactggaatgcgcactatgaagtacttccgggtaaagaaaaggtagtttcagaactcaaacagttggcggaaaaagctgaccacatctatctcgcaaccgaccttgaccgcgaaggggaagccattgcctggcacctgcgggaagtcatcggcggcgatgaacagcgttacagccgcgtggtgttcaatgagatcaccaaaaacgctattcgtcaggcctttgaaaagccgggcgaactgaatatcgatcgggttaacgcccagcaggcgcgtcgttttatggaccgcgtggtgggctatatggtttcgccgctgctgtggaaaaaaatcgcccgtggtctttctgccgggcgcgtgcagtccgtcgcggtccgcctggtggtggagcgtgaacgtgaaattaaagcgttcgtcccggaagagtactgggaagtcgacgccagcaccaccacgccgggcggtgacgccctgccgctgcaggtgacccataaggacgataagccgttccgtccggtcagccgcgatgagaccatggcggcggtatcgctgctggaaaaagccagctacagcgtactggagcgtgaagataagccgaccagcagcaagccgggcgcgccgttcatcacctccaccctgcagcaggcggccagcacccgtctgggcttcggcgtgaaaaagaccatgatgatggctcagcgactctatgaggcagggcacatcacctatatgcgtaccgactccaccaacctgagtcaggacgcgctgaacatggttcgcggctacatcagcgacaaatttggcaaaaaatatctgccggatagcgcgaaccagtacgccagcaaagaaaactcgcaggaagcgcacgaagcgattcgtccgtctgatgtgaacgtgctggcggaaacgctgaaagatatggaagcggatgcgcagaagctttatcagctgatctggcgccagtttgtcgcctgtcagatgacgccggcgcagtacgactccaccacgctgaccgtggctgcgggtgatttcaaactgaaagcgcgcggtcgcactttacgtttcgacggctggacaaaagtcatgccggcgctgcgcaagggcgatgaagaccgaacgctgccgctggtcaaacagggcgaccgcctgagcctggtggagctgacgcctgcgcagcactttaccaagccgccggcgcgtttcagcgaggcctcgctggtgaaagagctggaaaaacgcgggattggccgtccatcgacctacgcgtcgatcatttcgaccattcaggatcgcggctacgtgcgggtggaaaaccgtcgtttttacgccgaaaaaatgggcgagatcgttaccgaccggctggaagaaaacttccgcgatctgatgaactacgattttaccgcgcagatggaggatcgcctcgaccaggttgcgaaccaccaggccgagtggaaagaggtgctgaaccacttcttcggcgattttaccacccagctggcgacggcagagaaagatccggaagagggcggcatgcagccgaacccgatggtgcttaccagcatcgactgcccgacctgcggccgtaaaatggggatccgtaccgccagcaccggcgttttcctcggctgttcgggctatgccttgccgccgaaagagcggtgcaaaaccaccatcaacctggtgccggagaacgaagtcctcaacgtgctggaaggcgatgacgcggaaaccaacgcgctgcgcgccaaacgtcgctgccagaagtgtgggacggcgatggacagctaccttatcgatcctaagcgtaagctgcacgtctgtggtaataacccgacctgcgacggctacgagattgaagagggcgaattccgcatcaagggctatgacggcccggtggtggagtgcgagaagtgcgggtctgaaatgcacctgaaaatggggcgtttcggtaagtacatggcctgtaccaacgacgagtgtaagaacacgcgtaagatcctgcgcaatggcgaagtggctccaccgaaggaagatccggtgccgctgccggagctgccgtgtgagaagtctgacgcctactttgtgctgcgcgacggggcggcgggcgtcttcctggcggccaacaccttcccgaaatcacgggaaacgcgtgcgccgctggtggaggagctgtaccgcttccgcgatcgtctgccggaaaaactgcgttatctcgccgatgcgccgcagcaggatccggaaggcaataaaacgctggtacgctttagccgtaaaaccaagcagcagtacgtggcgtctgaaaaagagggcaaagcgaccggctggtcagctttctttatcgacggtaagtggacggaagccaaaaagtaa

SEQ ID NO: 250130 - DNA, 975 bp, Klebsiella pneumoniae
atgaaactacaacagcttcgctacatcgttgaggtggttaaccataacctgaatgtttcatccaccgccgaagggctctatacctcccagccgggtatcagtaagcaggtccgcatgctggaggatgagctgggcattcagatctttgcccgcagcggtaaacacttaacccaggtgacgccggccgggcaggagatcatccgcatcgcccgcgaagtgctgtcgaaagtcgatgccatcaaatctgtcgccggagagcatacctggcctgacaaagggtctctttacgtcgccaccacccatacccaggcgcgctatgcgttaccgggagtgatcaaggggtttattgaacgctacccgcgggtgtcgctgcatatgcatcagggctcgccgactcagattgcggaggctgtgtcgaaaggcaatgccgatttcgccatcgccaccgaggcgctacatctgtatgacgatctggtgatgctgccatgctatcactggaaccggtcgattgtagtgacccccgagcatcctctggccaccaagggctcggtgtccatagaggaactggcccagtatccattggtaacctatacctttggttttaccggccgctccgaactggataccgcgtttaaccgtgcgggcctgacgccgcgcattgtttttaccgccaccgatgccgacgtcatcaaaacctatgttcgcctggggctgggggtaggggtaatcgccagcatggcggtggatccggtctctgacccggatctggtgaagctggatgcgaacggtattttcagccacagcaccactaagataggtttccgccgtagcaccttcttacgaagctacatgtatgattttattcaacgttttgctccccatttgaccagggacgtggtagataccgcggtggctttacgctcgaatgaagatattgaagcgatgttcaaagatataaaacttccggaaaaataa

SEQ ID NO: 250131 - DNA, 168 bp, Klebsiella pneumoniae; identical to SEQ ID NO: 134906

SEQ ID NO: 250132 - DNA, 2673 bp, Klebsiella pneumoniae
atgtcgtcaaccctacgagaagccagtaaggacacgctgcaggtcaacgagaaaacctggcattactacagcctgccgttggcggagaagcagctgggcgagatcagtcgactgcccaagtcgctgaaggtgctgatggagaacctgctgcgctggcaggacggtgactcggtaactgaagaagatattcgcgccctggccggctggctgcaacaggcccatgccgaccgggaaatcgcctaccgtccggcacgcgtcctgatgcaggactttaccggcgtgccggcggtagtggatctggccgccatgcgcgaggcggtgaaacgccttggcggcgatacggcgaaggttaatccgctatcgccggttgacctggtgatcgaccactcggtgaccgttgaccgcttcggcgacgacgaggccttcgaagacaacgtccgcctggaaatggagcggaaccacgaacgctacgcttttctgcgctgggggcagcaggccttcagccgcttcagcgtggtgccgccgggcaccggtatttgccatcaggtgaacctggaataccttggccgggcggtctggagcgaggaggtgaacggccagtggatggcgtggccggatacgctggtgggcaccgactcccataccaccatgattaatggtcttggcgtgctgggctggggagtgggcgggattgaagcggaagccgctatgctgggccagccggtgtcaatgctgatccccgatgttgtgggctttaagctcagcggcaaactgcgcgaaggcatcaccgccactgacctggtactgacggttacccaaatgctgcgtcagcatggcgtcgtcggcaagtttgttgaattctacggtgacggcctggataccttaccccttgccgacagggcgaccatcgccaatatggcgccggagtatggcgccacctgtggctttttccctatcgatgacgtaacgctcagctatatgcgtctcagcggccgtagcgaagaacaggtcgcgctggtggaagcctacgctaaagcccagggcatgtggcgccagcctggcgatgagccggtctttaccagtaccctggcgctggatatgagcagcgtcgaagcgagtctcgccgggccgaagcgaccgcaggatcgcgtggcgctgggcgatgttccgaaagccttcgccgccagcggcgagctggaggttaaccaccttcagcgtcagcgtcagccggttgactatacgctgaacgggcatcactattcgctaccggatggcgcggtggctattgcagcgattacctcctgcaccaatacctctaaccccagcgtgttgatggccgccggcctgctggcgaaaaaagccgtcgaacgcggcctgcagccgcagccgtgggtgaaagcttccctggccccaggctcgaaagtggtgtcggattatctggcccatgccggcctgacgccttacctcgaccagctcggcttcaatctggtgggatatggttgcaccacctgtatcggtaactccggtccattgcctgaacctatcgaagaagcgatcaaaaaaggcgatctgaccgtcggggcagtgctctccggtaaccgtaacttcgaagggcgtattcatccgctggtgaaaaccaactggctggcctcgccgccgttggtggtcgcctatgcgctggcggggaacatgaatatcgacctcacccgcgagccgttgggacagggcaagaatggcgagccggtctatctgaaagatatctggccgagcggggaggagattgcccgcgcggtggaacaggtctccaccgagatgttccgcaaagagtacgcggaagtgttttccggcactgaggagtggaaggcgatcaaggtggaggcgtcagatacctacgactggcaggaggactcgacctatattcgcttgtcgccgttctttgacgagatgggcgtcgagccgctgccggtagaggatattcgcggcgcgcggatcctcgccatgctgggcgactcagtcaccacggaccacatttcgccggcggggagcatcaaagccgatagtccggcaggccgctatctgcaggagcatggggttgcccggcgcgactttaactcctatggttcccgtcgcggtaaccatgaggtgatgatgcgtggcaccttcgccaatatccgcatccgtaacgaaatggtcccaggggtggaagggggtatgacccgccatctgccggatcctgaaccgatggcgatttacgatgcggcgatgctgtacaaggctgagggtacaccgctggcggtgattgccggtaaggagtatggctcaggttccagccgtgactgggcggcgaaggggccgcgcctgctggggattcgggtagtgatcgccgagtccttcgagcgtatccatcgttccaacctgatcggaatgggcattttgccgctggagttcccgcagggcgtcacccgcaaaacgctacggttgacaggggaagagcggattgatatcagtgatctgcagtcgcttcagcctggcgctacggtgccggtgaccctgactcgcgctgacggctcgcaggaagcgatcccttgtcggtgccgtatcgacacggcgacagaactcacctactaccgcaacgacggcatcctgcactacgttattcgtaatatgctgtga

SEQ ID NO: 250133 - DNA, 603 bp, Klebsiella pneumoniae
atgcagcttaaacgtgtggcagaagccaaactgccaaccccctggggcgatttcctgatggtgggttttgaagaactggcaaccggacaggatcatgtcgcgctggtgtatggcgatatatcagggcagtcgccggtcctcgcccgcgtacattcagagtgtttgacgggcgatgccctgtttagcctgcgctgtgattgcggctttcagctggaagcggccctgtcgcatatcgctgaagaaggtcgggggatcctgctctatcaccgccaggaaggacgcaacattggtttattgaataagatccgcgcctacgcgctgcaggatcagggctacgacactgtcgaagcgaaccatcagcttggcttcgccgccgatgagcgcgatttcaccttgtgcgccgacatgttcaaattgctcaacgttgagcaggtgcggttattaaccaataacccgaaaaaagtggaaattcttaccgaagccgggatcaacattgtggagcgggtgccgctgatcgtcgggcgtaacccgaaaaacgctcactatctggacaccaaagccgccaagatgggccatctgctgaacagcaagccgacggaataa

SEQ ID NO: 250134 - DNA, 768 bp, Klebsiella pneumoniae
atgctgttgatagcccgacgaactgctctcgcggcggcgctgctgctggttatgcccctcacggtctggctttccgggtggctgtggcagcctggactgccggttgccatgttgaaaagcctgtggtgggtgacggaaacggtgacccagccgtggggaattatcactcatgtcgtgctttgcggctggttcctctggtgtctgcgctttcgcctgcgcgcggcgttgatcctgttccttatccttgccgccgctatcctggcgggacagggggcgaaatcctgggtcaaggcgcgggtccaggagccgagaccgttcgtcatctggctggaaaacacaaggcaggtgccggtgacgcaattctacgagttaaagcgtaaagaacgcgctaaactggtgcatgaacagctggcgcaggcgcaggacattccgtcatttttacgcaaacactggcagaaggagacggggtttgctttcccgtcaggtcacaccatgtttgccgccagctgggcgttactcgctgcggggctgctgtggccgcgtcgccgctggggcacaatcgcggtgctgctggtgtgggcgacggcggtgatgggcagtcgcctggcgctgggcatgcactggccgctggatctcatcgtcgccacgctgatctcctggctgctggtcacggtggcctgctggctgacgcagcgcctttgtgggccgctctcgccgcccggagaagaggcgcaggatattaaaaaacggatgcctgaagcggaataa

SEQ ID NO: 250135 - DNA, 309 bp, Klebsiella pneumoniae; identical to SEQ ID NO: 211995

SEQ ID NO: 250136 - DNA, 1170 bp, Klebsiella pneumoniae; identical to SEQ ID NO: 138135

SEQ ID NO: 250137 - DNA, 738 bp, Klebsiella pneumoniae
atgacgtctacagctatcccatcttcccgcgctgtcacatcctctcccgttgtggttgcgctcgactatgataatcgcgataaagcgctggcatttgtcgaccgcatcgacccgcgcgactgccgcctgaaggtgggcaaagagatgttcaccctgctgggcccgcagtttgtccgcgatctgcatcagcgtgggtttgaggtgttcctggaccttaagtttcacgatattcccaacaccaccgcccgcgcggtggccgcagcggctgagctgggcgtatggatggtgaatgtccatgcttctggcggcgcgcgaatgatgaccgccgcgcgcgaagcgctgctgccgtttggcaaagatgcgccgctgctgatcgctgtcacggtgctcaccagcatggagtccagcgatctacaggatctgggcattaccttatctccggctgactacgcggcgaagctggcggcgctgacccaacgctgcggccttgatggggtggtgtgttcagcccaggaggcggtgcgctttaagcatgagctggggcaggcgtttaagctggtgaccccggggattcgtccgcagggcagcgacgctggcgatcagcggcgaattatgactcctgagcaggctcaggaagctggggtagactatatggtgattggtcgcccggttactcagtcggcggatccagccgcgacgctgcgggcgatcaacgattctctgcgcaagggggcataa

SEQ ID NO: 250138 - DNA, 327 bp, Klebsiella pneumoniae
atgagcgattccaacagccgtctggtctactccaccgaaaccgggcgtatcgacgaggcgaaaccggcgccggtgcgcccgaaaggcgacggcattgtgcggatccagcgccagaccagcggccgcaagggcaaaggcgtctgtctgattagcgggattgatgccgatgatgctgcgctaaccgctctggcggcagagttgaaaaagaagtgcggctgcggcggcgcggtgaaagatggcgtgatcgagatccagggcgataagcgggatttactcaagtcgctgcttgaggcgaaagggatgaaggtcaagttagccggtggctga

SEQ ID NO: 250139 - DNA, 222 bp, Klebsiella pneumoniae
atgatgacttcaacgagcaaaaaaatggctgctgtcgttctggctgtcactgtagcaatgtctctgagcgcttgctctaacatgtctaaacgcgatcgtaacacggctatcggcgctggcgccggcgctatcggtggtgcggtgttaactgacggtagcgcgctcggtaccctgggtggcgcagcagtcggtggtattattggtcaccaggtcggaaaataa

SEQ ID NO: 250140 - DNA, 750 bp, Klebsiella pneumoniae
atgaacgcccgacaacaaagtattttgcaagtggtcatcgataaaggccgcatgagcgtcgccgatctggcgaagatgaccggtgtctctgaggttactattcgtcaggatttgaatttgctggaaaagcagagctatttgcgccgtactcatggctatgccgtaccgctggacagcgaagatgtcgaaacccgcatgatgacccatttcgccattaagcgtgagctggccagccgggctgcggcgctagtgaataccggtgaaacggtatttatcgaaaacggcagcagcaatgccctgctggcgcgtacgctggccgagcgcggcgatatcaccatcattaccgtcagcagctatatcgcccatctgctgaaagagaccccaggagaggtgatcctgctgggcggaatttatcagaaacgcagtgagagtatggtcggtccgctaacccgtcagttcatccagcaggtgcatttcagcaaagccttcatcgggatcgacggttggcaggcggaaaccggctttaccggccgcgatatgatgcgtgcggacgtggtgaacgccgtgctggagaagcattgtgaggcaattattcttagcgacagttcaaaattcagcgcggtacatccctatccgctcggtcccgccggccgctttaaccgcgttattaccgacgatcgcttaccggacgcctgtcgcgaacaattgctccgcagcggcctgaccgtcgatatcgtgccctacatctga

SEQ ID NO: 250141 - DNA, 180 bp, Klebsiella pneumoniae; identical to SEQ ID NO: 138130

SEQ ID NO: 250142 - DNA, 1935 bp, Klebsiella pneumoniae
atgtttcaggataacccgctgctagcgcagcttaaacagcaactgcattcccagacgccgcgcgcggaaggggtcgttaagggcacggaaaagggctttggcttcctcgaagtggacgctcagaagagctacttcattccgccgccgcagatgaaaaaagtgatgcatggcgaccgtatcgtcgcggtgatccattctgaaaaagaacgcgaaagcgccgagccggaatcgctggttgagcccttcctgactcgttttgtcggtaaagtccagaagaaagacgatcgcctcgctatcgttcctgaccatccgctgctgaaagacgccattccctgccgcgccgcccgcggcgttgagcacgattttaaacagggtgactgggccgtcgccgagatgcgccgtcatccattaaaaggcgaccgcggattttacgcggagttgacccagttcatcacttttagcgacgaccacttcgtcccatggtgggtaaccctggcgcgccataatcttgagaaagaggcaccggacggcgtcgccaccgagatgctcgacgaggggctgacgcgccgcgacctaaccgccctcgacttcgtcaccattgacagcgccagcaccgaagatatggacgatgcgttgtatgccgagtccactgctgatggcaaactgctgctgacggtcgccattgccgacccgaccgcctggattgccgaaggcagcaagctggataacgccgcaaaagtgcgcgcctttaccaactatctgccgggcttcaacattccaatgctgccgcgcgagctgtcggacgacctctgctccctgcgcgctaacgaagtgcgcccggtgctggcctgccggatgactctggcggccgatggcaccatcgaagacaatatcgagttctttgccgccaccatcgaatcgaaagccaagctggcctatgacgacgtctctgactggctggaaggccgcggcagctggcagccggacagcgaggcgatcgcgcagcaaattacgctgctgaaggacgtgtgccagcgtcgtagcgaatggcgtcagacccatgcgctggtgttcaaagaccgtccggactaccgtttcgttctcggcgaaaaaggcgaagtgctggatatcgtcgcggaaccgcgtcgcattgccaaccgcattgtcgaagagtcgatgatcgccgccaacatctgtgccgcccgcgttctgcgcgacaagctcggcttcggcgtttataacgttcataccggtttcgacccggcgaacaccgagcagttggccgccctgctgaaaacccatgatgtgcacgtcgacccgacggaagtgctcaccctggaagggttctgcaagctgcgccgggaactggacgctcagccgaccggtttcctcgacagccgcattcgccgcttccagtcgtttgcggaaatcagcaccgagccgggcccgcactttggtcttgggcttgaagcctatgccacctggacctcgccgatccgtaagtatggcgacatgatcaaccaccgtctgctgaaagccatcattaaaggcgagaccattgcgcgtccccaggatgaagccaccgtgcagatggcggagcgccgtcgtctcaaccggatggccgagcgcgacgtcgccgactggctgtacgcccgtttcctcaacgataaagccgggaccgatacccgcttcgcggcggagatcatcgacgtcagccgcggcgggatgcgcgtgcgtctggtggacaatggcgcggtcgcctttattccggccccgttcctccacgccgtgcgcgacgaactggtgtgcagtcaggagaacggtaccgtgcagatcaaaggtgaagtagtctataaagtgactgacgttatcgatgtcactatcgctgaagttcgcatggaaacccgcagcattattgcgcgtccggcggtctga

SEQ ID NO: 250143 - DNA, 1158 bp, Klebsiella pneumoniae
atggagccacgccgcgtgaatggcaaaaatcactggtatcacgaaacccagtcaacaatctgcccggtggatgtcctgccgctcgtccctgaagccgcccatgttgaagaccgctttttgctggacctgacgctgccggccgcctggctacgtgcccacgctgactggctacaccccgcacgccagctggccgaactgctgtttcccgaccaggtggcggtgagtcgcctgcagacctttaccgcttacgatcgactcagcaccgcgctcaccgtcgcccaggtctacggcgtccagcggctgtgtaaccactacgccgcccgccttgctcccctgccaggccccgattcctcgcgcgagagcaaccgtcgtctggcgcaaatcacgcaatatgctcgtcagcttgccggttcgccctcggttattaacgctctctcccgtagccagctggacgaagtgggcttaaccagtcgggacattattctgttcaaccagattatcggattcgtcggcttccaggcgcgggcgattgccgtccttcaggcggcccagggctttccggtgcgctggatccccggtatgccccagcaagaggaggcacccgcggaactgttcgccccgccgccgggagcatggcaggcagacattgcggatcccgacctgcagtatgccgatgatgagcgtcagcggcgcatcgccggctggcagtcgctgcccggtctgggcgagctggcgccgctgctggcctgcgacccacagttattcgcgcctctggagaccttgatccgccagctcagcacggatgatacctttggcccgcaggtcgccttactcacggcgcgcaccaatggcagccccacctgttttgacgcctggctcccccactggcagggtgaagaggagttcgccagccatctgcgggagggcgaccaggccctccatcactggctccagcagcatcctcaggcccggtctctcgtgaccgcggtgcagctgttaacccgctcgcctgaccggtttagcgccgcccagttaacgcccctcgcggaatatcgactctctgagcaacaagcaatcgatctgttgatctggagcgggctgtgcggatggatgaatcgtctgaaaatcgccctcggcaatgtgcgtcagcagacgtaa

SEQ ID NO: 250144 - DNA, 789 bp, Klebsiella pneumoniae; identical to SEQ ID NO: 139601

SEQ ID NO: 250145 - DNA, 543 bp, Klebsiella pneumoniae
atgatggtcccttttcaactttcgacgctccccgtcacgccgtggaaaaacggcggcggagagacgcgcgaaatcatctgcgtacccgctccagatgccccttttctctggcgagcgagtattgccaccctgcaggcggatggccctttctccccctttcctggcgtcgaccgggtcattactctgctggcggggcagccgctacggctgtgtggcgagaatatcgaccaaccgctggcgctctggcagccgtgggctttccccggcgaatgggcgctgtccagcgtcgggatcgttgcgccagggctggacttcaatatcatgactcagcgcgggcgcgcgtcggcgacagttcaggtcgttagcgacctgcaatgccctgccagcgagggggttgcttatgttctacaaggcgagtgggatctggccgggcggcgctgcgcggccggcagcggcctctgctggcgcggtggatccccgcggaatctgcgtcccgtgggcagcaatggacgcctgctgctggcggagatcgcgctcaaataa

SEQ ID NO: 250146 - DNA, 1431 bp, Klebsiella pneumoniae
atgtcttcgttttcgtctacagacgggcagtcaaagagcaattatgctggaatgagtgaaaggcggtcgattgattacatcccggaaagcgaacggcatggacacccttttagccagttcaccctttggtttggcggcaatctgcaaattacggcgattgtcactggcgctttagccgttgtgctgggcggcgatgtagtgtggtctctggtcgggcttctggtcggtcagatgctgggggcggcggtgatgtctctgcatgcgctgcagggaccgcgactgggacttccgcaaatgatccttagccgcgcccagtttggggtttttggcgcggtggtgccgctggtgctggtttgcgtcatgtatatcggtttttctgccagcggcaccgtattggccgggcaggcaatggccaaactactgaatatcagccacgtagccgggatgctgatattcagtgcgattattatcgttatcgccgtcctcggttataaggtgatccacaagctgggcaaactggcgagtatcgtcggaattctcgccttcgtttatatgttcatcacgctgctactttcggccgatctcagtgcgctcgcgcacaataaccatttttctctgccgacgtttttattagccgtatcgctctcctcatcgtggcagatcgctttttgcccctatgtatccgactattcgcgctacctgccacgcgatgtttccgccacgaaaacgtggtgttcagtgtttttcggcaccgtattgggtacccaaacgtcgatgacgctcggggttctgacagcggccattgccggcagcgcgttccctggtcacgaggtgagctatctggtgggattaggtaagagtcaggcgatggccatggttatctatttcgccatctgttttggtaaaattaccttcactaccctcaatgcctacggcagctttatgtcgctgaccaccattgtttccgccttccgccggcaaaccgtgctgtcgcaaaagtgtcgcattgcattcgtggtgctgatggtgacggcttcctgcattatcgcgttgcttagcgaacccgctttcttaaagcatttcacgcattttcttctgtttctgctggcgttcttcgtgccgtggagcgccatctgtctgacggattattatcttatctcgaagggcgccatcgatattccggcgctaagcgacccgcagcaacgctacgggttctggaacctgtacgcgatcaccctgtatatcgtcggtgtgcttatccagttgccgttcattgagaacccgttgttccatggttcgctcacgtggatcttcgccggtaacgatgtctcatggataataggctggtttggcaccggggttctttactacgcgctgcgccgctttgaccgccggtcgctgccggcgcagagtcttttcccttctacctga

SEQ ID NO: 250147 - DNA, 810 bp, Klebsiella pneumoniae
atggtcgaaacattgctggaagttcgccaactcagtaagacctttcgctaccgcaccggctggtttcaccgtcagacggttgaggcggttaaaccgctgagttttaccctgcgcgaacggcagacgctggcgattatcggcgagaacggctccgggaaatcgaccctcgcgaagatgctggcgggcatggtggaacccaccagcggcgaactgctgattgacgatcatccgctgacttttggggattactcctaccgcagccagaagattcgcatgatctttcaggatccgtcgacctcgctgaacccgcgtcagcgcatctcgcagatcctcgattttccgctgcgactgaataccgatctcgacgccgaggcgcggcagaagcagataatcgacaccctgcgcatggtcggtctgctgccggaccacgtcagctactacccccatatgctggcgcccggtcagaagcagcgtctcggcctcgccagggcgctgatcctgcgcccgaaggttatcgtctgcgatgaggcgctggcctcgctggatatgtcgatgcgctcccagcttatcaacctgatgctggagctgcaggagaaacagggcatctcctatatctatgtcactcagcacctgggaatgatgaaacacatcagcgatcaggtgctggtgatgcataacggcgaagtggtcgagcgcggcagcactgccgatgtgctggcctcgccgctgcacgacctgacccggcgcctgatcgccggccacttcggggaagccctcaccgccgacgcctggcgcaaagacgggaaatag

SEQ ID NO: 250148 - DNA, 993 bp, Klebsiella pneumoniae
atgccgttactcgatattcgtcacttaaccattgaatttaaaaccagcgaaggctgggtaaaagcagtcgatcgcgtcagcctgacgctgaccgaaggcgaaatccgcggcctggtgggggaatccggctccgggaaaagccttattgccaaagctatctgcggcgtgaccaaagacaactggcgggtcacggccgaccgcatgcgcttcgatgacattgacctgctgcgactgtcgaaccgcgagcgccggaagctgatcggccataacgtgtcgatgatttttcaggagccccagtcgtgcctcgatccctctgagcgcatcggccagcagctgattcagagtatccccggctggacctacaagggccgctggtggcaacgtctgggctggcgcaagcgccgggccatcgagctgttgcaccgcgtcggcattaaagatcacaaagatgccatgcgcagcttcccctatcagctgaccgagggcgagtgccagaaggtgatgatcgccatcgccctggccaaccagccgcgtctgctgattgccgacgagccgaccaacgccatggagccgaccacccaggcgcagattattcgcctgctgacgcggctcaaccagaacaacaacaccaccatcttgctgatcagccatgacctgcaaatgctcagcaaatgggcggataaaatcaacgtcatgtactgcgggcagacggtggagagcgggcccagcgaagagctgatcaccctcccacatcacccctacacccaggcgttaatccgcgcgatcccggatttcggtagcgccatgccgcataaaagtcgcctcaacaccctgcctggagcgatcccgctgctggagcagttgcctatcggctgtcggctggggccgcgctgcccgtacgcccagcgcgagtgtatcgaaacgccgcgtcttaccggggcgcgcaaccatctgtacgcctgtcatttcccgttgaacatggagaaagagtga

SEQ ID NO: 250149 - DNA, 891 bp, Klebsiella pneumoniae; identical to SEQ ID NO: 138081

SEQ ID NO: 250150 - DNA, 966 bp, Klebsiella pneumoniae
atgattatttttaccctgcgccgtctgctgctgctgctgatcaccctcttttttctgacctttgtcggtttcagcttgagctatttcacccctcatgccccactgcagggcgcttccctgtggaatgcgtggctgttctggtttgaaggggtgctgcactgggatttcggcgtctccagcattaacggccagctgatttctgagcagttgcgcgaggtgttcccggcgaccatggagctgtgcatcctcgccttcggctttgccctgctgataggcattccggtggggatgatcgccggcgtaatgcgcaataaatggcccgataccctgatcagcgccgtcgcgctggtcggtttctcgatcccggtcttctggctggccctgctcctgaccctcttcttttccctgaccctcggctggcttccggtctccggtcgcttcgatctgctgtatgaggtgaaaaacgtcaccggtttcgcgctgatcgacgcctggctttcggactcgccgtggcgccatgagatgatcgtcagcgccgcccggcatatggtgctgccggtattgaccctggcggtcgcccccaccactgaagtgatccgcctgatgcgcattagcaccagcgaggtgtatgacactaactatgtaaaagcggccgccacccgcggcgtgtcgcgacgcaaaattctactgcgccatgtgctgcacaacgccctgccgccggtgatcccgcgtctcggcctgcagttttccaccatgctcaccctggcgatgatcactgagatggtgttcagctggcctggactgggccgctggctgatcaacgccattcgccagcaggactacgcggcgatctccgccggagtgatggtgattggcgcgctggtgattattgtcaacgtaatttccgatattctcggtgccatggctaacccactgaaacataaggaatggtatgccctacgatag

SEQ ID NO: 250151 - DNA, 1644 bp, Klebsiella pneumoniae
atgcgcctgaaattgtcatctctcctggcagccgtttccctgctgtgtgggccagcttttgccgcccctgcgctccccgaccgcgccgatatccgcgatagcggtttcgtctattgcgtcagcggccaggttaatacctttaacccgcagaaagtcagcagcggcctgattgtcgatacgctggccgctcagatctacgatcgtctgcttgacgtcgatccctatacctaccggctggtccccgagctggcggagagctgggaagttctcgataacggcgccacctaccgctttcacctgcgccgccacgtcccgtttcaacgcacggcgtggtttaccccgacgcgggactttaatgccgatgacgtcatttttacctttggccgtatttttaaccgcgaccatccgtggcacaacgtcaacggcagcagcttcccctacttcgacagtctgcagtttgctgacagcgtggagagcgtccgcaagctggataatcagaccgtggagtttcgcctcaagcggccggacgcctcgttcctctggcatctggccacccactatgcgtcaattacctctgccgaatatgccgcccgcttaacgcaggacgaccgccaggagcaactggatcgccagccggttggcaccggcccgttccagctatccgattaccgctccggacaatatgttcgcctgcagcgccaccccggctactggcgcggcaaaccgttgatgccccaggtggtggtcgaccttggctccggcggcaccggccgcctgtcgaaactgctgaccggagaatgcgacgtgctggcctggccagccgccagccagttgacgatcctgcgtgacgacccgcgcctgcgcctgacgctgcgcccgggaatgaacatcgcctggctggccttcaacaccgccaagccgccgctggataaccctgaggtgcgccatgccctggcgctggcgatcaacaaccagcgcctgatgcagtctatctactatggcaccgcggagacggcggcgtccatgctgccgcgggcctcgtgggcctacgataatgacgctaaaattaccgaatataatccgcaggaggcccgcgcccgcctgaaagccctggggctggaaaacctgaccctcaagctgtgggtgcccaccagctcgcaggcgtggaatcccagcccgctgaaaacggcggagcttatccaggcggatatggcgcagattggcgttaaggtgattattgtgccggtagagggacgtttccaggaggcgcgcctgatggatatgagccacgacctgacgctctccggctgggcgacggacagtaacgatccggacagtttcttccgaccgctgctgagctgcgcggccatcgcctcgcaaaccaactttgcccactggtgtaaccgggagtttgacgacgtgctgcaaaaagcgctgctctcgcagcagctctcctcgcggatggacgcttacaaagaggcgcagcggatcctcgcccgcgaactgccggtcctgccgctggcctcgtcgctgcggctgcaggcctaccgctatgatatgaaaggcctggtgctcagccctttcggtaacgcttcgttcgctggcgtatcgagggaaaataccgaagaggtgaaaaagccatga

SEQ ID NO: 250152 - DNA, 906 bp, Klebsiella pneumoniae
atgcgtatatttcttaccggcgcgagcggatttatcggctcacgtattcttccggcgctgcaggcgtcgggccatcaggttatcggcctcgcgcgcagcgaaagcaccgcacaggccctgaaggcggccggcgccgaggtgcatcgcggcacgctggatgccccggagtcgctgctggctggcgtcgggaacgccgacgcggtgatccataccgccttcgaccacgacttcagccgctttgccgctaactgcgagaaagaccgccaggcgatcctggccctgggccaggcgctgcgaggcagcacgcggccgctggtgatcacctccggcacgctgatgggcgacgacgggagcggcgccccggcccgggagtcgttcttcaactcagggcaccccagcccgcgcaccgcctcagagctcgccggccagcagttgctggaggcgggagtggatgtcagggtggtccgcttaccgcaggtgcatgacaccgtgcgtcagggactgctgacctgctacatcgaacgcgcggtcgccaacggggcggtagccctgcgcggcgagggaagcaaccgctggtcagccgcccatgtcgatgacgtcgcacgtctgtatgtcagcgcgctgcttcagggcgcggccggcgagcgctatcatgcggtggccgaagaggggatcgcattacgcgatattgccgcggtaattgcccacggattaaacctgccgctgacccacctggatgagtcgcaggtcgacgcctggttcggctggtttgcgccgtttaccgcccttgacctgcgcgccagctcggcatggacccgcgagcgcttgcagtggcagccggttggccccgggctgctggaggacctgcagaatatggactatcataaagtgacactgtcacaataa

SEQ ID NO: 250153 - DNA, 843 bp, Klebsiella pneumoniae
atgaacacttctgacaaccatgctttaggcgattttctccgcgcccgccgccagcgtctcgatccggcaacgtttggcttcccggcgggacgccggcgcaccccggggctgcgccgcgaagaggtcgcgcagctcgccagcatcagcccgacctggtatacctggcttgaacaggggcgcggcggggcgccttcccgcgaggtgctggagcggatcgcccgcggtctgcggctgaccaccccggagcgcgagcatctgtttattctcgcctttggccatccgccgcagacgcgtctgacggtgacggatgatatgacgccgcggctgcagcgggtgcttgacgctttcaccattccggcgattatccgcaccgccagctgggacgtcatcgcctggaacgcgccggcggccagggtgctgaccgactacagccaactgccgctggcggagcgcaacgtgctgcgccgcctgtttacccggccggaggcccgctgcactctggaggactggcagagggtggggcagcttatcgtcaacgccttccgcgccgacgtcacgcggatgggcgccacgaaagaaactgaccagttgatcgcggagctcagccagcagagcgtcgagttcgcccgtttctggcaaagccatgacgtcgccggtcatggagaaggctataagcgcattaaccacccgcagatgggtccgctcgacctggaatttacctcctttgccgtggagggccgtcccgatctttccctgctggtctttaatccggcaacgacggagagccagcggaaaattcacggtttacttcagggggcgggatccgcgccggaggagagctga

SEQ ID NO: 250154 - DNA, 2322 bp, Klebsiella pneumoniae
gtggagcaccatgcaggcgactttagcgtcaccgtacgcgatgtgcgtcagctgacccagccggaaagcgatctgctgacgctgctgtgggtactggagggaagcgtaaatctggcggtggcggaaggtgcgtcgcagccgctcgccgccgacgggctggcgatcgttaaccgcaaccgtcgctggagcctgcgcagcgccggggccaacgccgtgatgatcctcaccctctccgccagctggctggcccgcctcgataatgccttttttgccgtcgattaccagataacgccgcgcacccgggatgccgatgacggcctgcgccgcctgatgcgccagctgctggtgagcggcctggtcaatcatcctggccattaccgactggaggccaaccgctggctgagtgagatagcgctgctgctggccacgcgctttagccagcccatcgcctccacgccccggcgcgataccgaaaaatggagccggagaatagccagcgtggtggcgcggatcgacgctaactatcagcgtcgcctctcgttgcaggaggtggcggccgcggaatttgtctccgaggcctggctgtcacgcttatttcgcaaagaggtcggggtaagttttgtccagtacctcaccgcgctgcgcctgcgccacgccgccgaccagctattaaccacccgcaaaaccgtccagcaaatcgcccgcgaacagggattcgccagtacgcgaatgatgagcgatttgtttaagcgccagcacggcgtgacgccgcgccagtatcgtgaacagcatcctctggagcttgcccgaccgcgcccgccgcaggccgatcgctggcagccggtggcggccgaccggctgtatgcgcggctcaatgagccggaaccacgcgaccgggaaagtccccccctgccgatcaacccaccgcagacccgggagatcaatctgcgcgatcgtccagcgcgccccgtagcgctgcgccatacccggatggtggtgaccgtgcgcgaactggacgatctgctgcgcgaagatgtgcgccgggaactcgaacagctgcaccacgccctaccggtgtatgccatcgatatcaacgatccctttctcagcagtcggctgttcggcaccggctgggacgatccgcagatggccggctacgcctgctggtacaacctgcagcagatttttagctggctggcggagatgggctggcaggtgatcctgcacaccggcgtcaccacccgcagtgacctgctgcagcgcttcctgcagctcgccgccaaccattttccgccagccacgctcaacagctggcgctttgtctggcactggtcgccgcaggccagcgaagctgcgcgccaggccgcctggcggcagcagcgcggggtccttcatcgcctgctgccgcagccgcagctggggatctggcaccgctttgctcccagcgatcccgggaacgatccgctgttccactcgccgctgctggcagaggcggattttctcgcctgccaggcagatgccaacgaacagctggatctggcccaggcagacagcagccgcctggcctccagcgaacattacccgctgcacaagctgcggcagatccacagcgccctgcgccagcgtcagctcaacctgccgctgtggctgctctcctggaatacgctgaccggcgatacgcgggataccaacggccgcttttttcgcggcgcgctgctgatggataatctgctgggggtggcggaccaggtctggctggcgggcttctggttaaattcaggcctccagggcgaagctcgcgccaacggcaagctcgatacctccagcctggcgctgcactatctgcacggcctgccgcgcccggtttactgggtactctggctctggcggcggctgcgcggcgagatcctggttcacgataaaaacctgctgctgctccaccaccagggtcactatcagctgctgctgcgcaatacggtggtctacaatccctggctctccagcgaagcggcctttatccagcgcttcagccagctctacagcgtgcggctgcagggcctggatggcagctggcgcatcaaacagcacctgttcgatcagcaccacggcgcgttgttcccgctggtggacgcctttcgcagccgcagcggccctgacgccgaggattatcagtggctgatgcatcaggcccgtccggcgctcagcgtggatgaagccaggctcgatggctattggctgcggatcgactcgctgcagagcaatgcgctggtgctgtatgaatttacccctcagctctcctccggcgcggatcccgccccctga

SEQ ID NO: 250155 - DNA, 1392 bp, Klebsiella pneumoniae
atgagcactgtcaccgtaagcgacaccccctttgtcggcagcgatcgtctgctggtagggattgtgctgagcgttttaaccttctggctgtttgcccagtcggtgataaacgtcgtgccggcgatgaaaagcagtcttgatatttcccttgagaccctaaccctggccgtcagcctcagcgcgctgttcagcggctgtttcgtggtggccagcggcggtctggcggacaagtttggccggatgcggatgaccaccctcgggctggggctgagtatcgtcggcagcgccatgctggtggtcgctcagggaccggggctgttcctggccggccgggtgctgcaggggctgtcggcagcctgcattatgccggcgacgctggcgctgattaagacctggtatgaggggcgtgcgcggcagcgggcggtcagcttctgggtcatcggctcgtggggcggcagcggtctctgttccttcgtcggcggggctatcgccacagggctcggctggcgctggatcttcgtcttctcgatcgccgttgccctgctggcgctgtttttgctgcgcggcacgccggagagccgcagcgccagcgccagccagcataagctggacgtcggcggtctgctgagcctgattgttgcgctggtgctggtgaatctgtttatcagcaagggccacggctggggctggagcagcccgctgtcgttgaccatgctggccggggcgctggcggcggggacgatatttatccgcaacggcatgcgcaaaggcgaggcggcgctgattgattttgcgctgttccgcaatcgggcctacggtgcggcagtgctgtcgaactttctgctcaatggggcgattggcaccatgatgatcgccagcatctggctgcagcaagggcaccacctgacgccgctggagagcgggatgatgaccctcggctatctggtgaccgtcctggcgatgatccgggtcggcgagaagctgctgcagcgctatggcgcccggctgccgatgatggccggtccggtgttgaccgctatcgccatcgcgctgatatcctgcacctttctcgaaaaggcgctgtatatcggggtggtgttcgccagcaacgtgctgtttggcctcggactgggctgctacgccacgccatcgacggataccgcggtggccaatgccccggagaacaaaatcggcgtcgcctcggggatctataagatgggcagctcgctgggcggggcgatgggtatcgccgtgacagcgtcacttttcgcgctgtttttaccgctgggcatggcccatgccgcccagtatgccctgtggtttaacgccgtcttatgtctgggggcgatggcggtgagcgcgctgctgctgccgcgcgcctctcacagctga

SEQ ID NO: 250156 - DNA, 975 bp, Klebsiella pneumoniae
atggcgcagtacaaggataatctgctgggcgaggccaacagctttctcgaggtgctggaacaggtttcccggctggccccgctggataaaccggtgctggtcatcggcgagcgcggcaccgggaaagagcttatcgctaaccgtctccactacctctccagccgctggcaggggccgtttatctcgttgaactgcgcggcgctgaacgataatctgctcgactcggagctgttcggccacgaagccggggctttcaccggggccagcaagcgccatcccgggcgcttcgagcgcgccgacggcgggacgctgtttctcgatgagctggcgacagccccaatgctggtgcaggagaagctgttaagagtgattgaatatggcgagctggagcgcgtgggcggcagccagccgctgcaggttaacgtccggctggtgtgcgccaccaacgctgacctgccgcagatggtcgaggaaggtcattttcgcgccgacctgctcgaccgcctggccttcgacgtggtacagctccccccgctgcgcgaccggcagagcgacatcatgctgctcgccaaccagtttgccatccagatgtgccgcgaactcggtctgccgctgtttcccggctttagcgaacgagcgaccgcgacgctgctcggctaccgctggccggggaatattcgcgaactgaagaacgtggttgagcgctcggtgtatcgccacggcgacagcgaacatgagctggacgcgattattattaatccttttcgtcagtcccccggctctccgccggaagccgcgcccggcgatgagctgcccgcgctaccgctggatctgcgcgatttccagctccagcaggaaaaacgcctgctgcagcggagtctggagcaggcgaagtatcatcagaagcaggcggcggagctgctgggattaacctatcaccagctccgcgcgctgctgaaaaagcatcagctgtga

SEQ ID NO: 250157 - DNA, 669 bp, Klebsiella pneumoniae
atgggtattttttctcgttttgccgacatcgtgaacgccaacatcaactccctgctggagaaagcggaggacccgcaaaagctggtgcgtctgatgatccaggagatggaagacacgctggttgaggtgcgttcgacgtcggcccgcgcgctggcggaaaagaaacagctgtcacgtcgtattgagcaggcggtcgcccagcaggcggaatggcaggaaaaagccgagctggccctgcgcaaagagaaagaagatctggcccgggcggcgctgatcgaaaaacaaaagctgaccgaccttatcgctcagctggatcatgaagtgcagctggtggatgaaaccctggcgcggatgaaaaaagagattggcgagctggagaacaaactcagcgaaacccgcgcccgtcagcaggcgctggcgctgcgccatcaggcggcgagttcgtcccgcgatgtgcgtcgccagctggacagcggtaaactggatgaggcgatggcgcgctttgaatcctttgagcgtcgcatcgatcagatggaagcggaagcggagagccaccgctttggcaagcagcagacgctggatcagcagtttgccgaactgaaagcggacgatgaaatcagcgagcagctggcggcgttgaaagccaaaatgaatcagtccaaccagtaa

SEQ ID NO: 250158 - DNA, 225 bp, Klebsiella pneumoniae; identical to SEQ ID NO: 137409

SEQ ID NO: 250159 - DNA, 360 bp, Klebsiella pneumoniae; identical to SEQ ID NO: 137408

SEQ ID NO: 250160 - DNA, 219 bp, Klebsiella pneumoniae; identical to SEQ ID NO: 137407

SEQ ID NO: 250161 - DNA, 1398 bp, Klebsiella pneumoniae; identical to SEQ ID NO: 211968

SEQ ID NO: 250162 - DNA, 1062 bp, Klebsiella pneumoniae
atgagcgaaccgttaaaaccgcggattgattttgatgggccgctgcaagcggagaaaattccgccgctgaaaggcgctcgcgccttcgacaccctggaggcggacaacttcgcgccagcgcggctggtgaccggcgaagaggaagagggggcggcggaagcggtggtggagtcggtcctgcgacccaaacgcagcctgtggcggcggatggtcagcgccggactggcgatcttcggcgtcagcgtcgtggcgcaaggcgtgcaatggacggctaacgcctggcagacccaggactggattgcgctgggcggctgcgtcgccggggcgctgatcgtcggggccggcgtcggatctgtggccaccgagtggcgccgtctgtggcgactgcgccagcgcgcccacgaacgcgatgaagcgcgcgatatgctgcacagtcacgcggtcggtaaagcgaaagcgttttgtgagaagctggcgcagcaggccgggctggatcagtcgcatccggcgctgcagcgctggtatgccgcgatccacgaaacgcaaagcgatcgcgaagtggtgagcctttatgcgcagctggtgcagccggtgctcgatgcccaggcgcggcgggaaatcagccgttcggcggcggagtcgacgctgatgattgccgtcagtccgctggcgctggtggatatggcgtttatcgcctggcggaacctgcggctgatcaaccgaatcgccacgttgtacggcattgagctcgggtattacagccgtctgcgactgtttcgcctggtgttgcttaatatcgctttcgctggcgccagcgaactggtgcgcgaggtggggatggactggatgtcgcaggatctggcggcccggctgtcggcgcgcgccgcgcagggcattggcgccggcctgctgaccgcccgtctcgggatcaaggcgatggagctgtgccgcccgctgccgtggatcgccgatgataaaccgcgactcggcgattttcggcgcgagctgattgggcagttgaaagagaccctgcagaaaagcaaaacccacccggagaagtaa

SEQ ID NO: 250163 - DNA, 900 bp, Klebsiella pneumoniae
gtgcttgagcaacaaagcatccttgcgctgctgcagacctttgaggtgaccgcccgccacctgagctttacccttgccgcgcatgaaatgaaccttacccagggagcggtcagccatcggatccgcaggctggagatgcacatcgggtttcgcctgtttatccgcatgacgcgtaaactggcgctgacagaggaaggtaagcggctgctggcgacgttaagccattcgctgcgggcgattaacgatgaaattgaggatattcgcgatcaggatctgcgcggcacgctgcatattggtattgcgccgacgctggcccatctgtggctgatgccgcgtctgccgcgctttcagacgcaatggccgggactgaatctgcagtttcgcgtgcgcgccggggtgatggattttaacgaggagcgggtggatctggcaatttactacggcgccacgcgctatcccgatctttatcaacagcggctgatggcggaaagtttgctcccggtctgctccccgcgttatcgccagcagtatcgtccgctgagcggcggcgacccggcggcgctcgtctggatccatgcgtgcgaatccaccgacgtacaggatcaatttgcggaatggcgcctgtggtgccagcacagcggacaggcgttaccttttgacggccggtattacgcggtgaataaccactcgctggccatcgagatggcgctcaatggactcggcgtggtgatggggcgtaaaacgctgatccagccgctgctcgacgccggcaggctggtggccttgtctgaaaatgaagcgccctcgccctttggctatgacctgatttgtccgcaggagaaccgttcccgcccgcgctttcgcgccttcagcgagtggctggcggcggaatgcgcctaa

SEQ ID NO: 250164 - DNA, 1314 bp, Klebsiella pneumoniae
atgtcaggactcaaaattgtggtgattggcggtggctccagctacaccccggaactgattgaaggtttgctcaaccgctatcacgaaatgccggtcgcttcgctatggctggtggacattgaagagggcaaagagaaagtcgagattatcgccggactggcgcggcgaatgatcgccaaagccgggctgactattgaagtggtggccacccttgaccgggaaagcgcgctgcacgatgccgatttcgtctgctcgcagtttcgcgccggctgccttgacgcccggatcagcgatgaacgtatctccctcaagtatggcttgatcggccaggagaccaatggcctcggcggcttcgccaacgcctgtcgcaccattcccatcgccctggagatcgctgccgatatggagcgactgtgtcccgacgcctggctgctgaactttaccaacccgtcggggatggtgaccgaagcgatcctgcgccacagccgcatcaacgccgtcggcctgtgtaacgtgccggtgattatgcaaaaagggataaccactctgctgcaatgcgctgacgaaaaagaggtggtgatgcaggtcgccggcctgaaccactttatcttcgtgcgccagatcctgcacaaaggtaaagaatggctgccggaggtgatagccgagatcaacgccggtcgggatccgctggtgccgcgcaacattccgccgttccgttggccgtcgcatctgctgcagggcttaggcatgatcccctgcgcctatctgcgttattactacatgaaagacgatctgctgcgccaggagctggcggaggcgggcggcgaaggaacccgcggagaagtggttaagcagctggaaaaaatcttgtttgaccagtaccgcgacccgcacctggcagtcaaaccgaaggcgctggaagggcgcggcggccagtactattccgaggcggcctgcgagctgatgaatgccatctacaacgacaagcggattatcatgcacgtcaatacgcgtaataacggcgccatcaatggcctgccggatgactgcgcggtagaggtcagctcgctgattaccgcttctggtccgctacctctcaatgtggcgccgttcccggaagataccctgcgtttgctgcagctgatgaaatcatttgaacggctgactatcgaggccgcgctcaccggcaaccgccacaccgcatggcgtgctctgatgctgaatccgctgatcgtcagcggcgagaagctcgaactggcgttggatgaggtgatcgctgagaaccgtcagtggctgcctgctttccacgcctga

SEQ ID NO: 250165 - DNA, 1542 bp, Klebsiella pneumoniae
atgcgtcttgaagtcttttgtgaagaccgtctcggtctgactcgtgaattgctcgatttgctggtgctgcgtggtattgacctgcgcggtatcgatattgaccctattggccgaatttacctcaatttcgccgaactggaattcgccacgttcagcagcctgatggctgagatccgccgtatcgccggcgtgacggacgtgcgcaccgtgccgtggatgccgtctgaacgtgaacacctggcgctcagcgcgctgctggtagcgatgccggagccggtgctgtcgctggataccaaaggtcgggtggaactggcgaaccccgccagctgcctgctgtttggccaaagccaggcgaagctgcgtaaccacccggtggcccagctgatcgccgattttaacgttcagcgctggctggagagcagcccgcaggagacgcatgcggagcatgtggtggtgaatgggcagaactacctgctggaagtgactccggtctatctggaaggcgagcataacgagcgagtgctgaccggcgccgtggcaatgttgcgctcaaccgtgcgcatgggacgccagctgcagaccatgaccagccaggataccagcgccttcagtcagatcctcgcggtggggccgaaaatgcgccacgtggtggagcaagcgcgcaagctggcgatgctcagcgcgccgctgctgattgtcggcgacaccggcaccggtaaagatctgctggcccatgcctgccatctggccagtccgcgggcgggcaaaccctatctggcgctcaactgtggctccattcccgaggacgcggtcgagagcgagctgtttggcgacgcgctgcagggcaagaagggcttctttgagcaggccaacggcggctcggtgctgctggatgaaattggcgagatgtcgccgcgcatgcagaccaagctgctgcgctttctcaacgacggcaccttccgccgcgttggcgaggatcatgaagtgcacgtcgatgtgcgggtgatctgcgcgacgcagaaaaacctgatcgagctggtgcagaaagggcttttccgcgaagatctctactatcgcctcaacgtcctgacgctgtatctgccgccgctgcgcgattgtccgcaggacatcatgccgctgacggagctgttcgtggcccgctttgccgacgagcaggggatcccgcggccgaagctctctgccgatctcagtacggtgcttacccgctacagctggcccggcaacgtccgccagctgaagaatgccgtctatcgcgcactgacccagctggaaggatttgagctgcgtccacaggacattctgctgccggaccatgacgtcgcctcgctgccggtgggcgaggaggccatggaagggtcgctggacgacatcacccgccgctttgagcgctcggtgctgacccagctctatcgcagctaccccagcacccgtaagctggcgaagcggctgggggtgtcgcataccgccatcgccaataagctgcgtgaatatggtctgagtcagaaaaagggcgacgaataa

SEQ ID NO: 250166 - DNA, 1053 bp, Klebsiella pneumoniae
ttggcgtcgcgtcgcgcgatcgggcactggctgatattgctgctgctctctgttctcttttcctcgctgctgttacgaatacacctgccggcagcgctgctgctggggccgctgatcgccggtctcattttgagcctgcgcggggtgaagctgagcatccctcgcccctgttatctggcggcgcaggccattgtcggctgcatgatcgcccgggcgattaatccctctgtttttggcgtgctgttcaacaactgggcgctggtgctggcgatcctgttgaccaccctggcgataagcggccttaccggctggctgctggtccgctacagcgcgctgccgggcgccactggcgcctggggaagctctcccggcggcgcgtcggcaatggtggtgatggcccaggagtacggggccgatgtgcggctggtggcgctgatgcagtatctgcgggtgctgtttgtcgtcggcgcggcggcgctggtggtgcgctatgccctgggcaatgaagcacaggaaatgactcaggatattgtctggtttccatcgttgaccctgaatttccctttcacgctgctgctgacggcggtggcctgttggctgggcatgcggctgcgcatcccctccggggccatgctgctgccgatgctgcttggcgccctggcccagggcggcggctggctgatgctggagctgccggagtggctgctggcgatggcctatgcggtgctgggctggacggtggggctccagtttaataaagccatttctctgctggccctcaagacgctgccgcagattatcgcctccatcatcggactgatcctgatgtgcgccctgatggcccttgccctgacccacattctgcagatggactttatgaccgcctatctggccaccagccccggcggcctggacacggtggcgattatcgccgccggcacccgggcggacatgtcgtttattatggcgctacagacgctgcggctgtttaccattttgctgaccggcccggcgatggcgcgggctatctcccgctatgcgcagcggcaataa

SEQ ID NO: 250167 - DNA, 507 bp, Klebsiella pneumoniae; identical to SEQ ID NO: 137400

SEQ ID NO: 250168 - DNA, 966 bp, Klebsiella pneumoniae
atgcgtaacgtgcgagtgtatgaggaagcctggccgctccataccccttttgtgatcgcccgcggtagccgcagcgaggcaaaagtggtggtagtggaactggaagaggacggcgtgaaaggggtaggcgaatgcacaccctatccccgctatggcgagagcatcgcctcggtcatggcccaggtgatggcgatcggcgagcaactggaggcggggctcacccgcgaacagctgcagcggctgctgccggcaggcgccgcccgcaatgccattgactgcgcgctatgggatctgcaggcccggcgcgaaggcaaaaccttggcccagctgttgggcgtggcgttgcctaaccgggtgattaccgcccagacggtggtcattggcacgccggatcagatggcggccagcgccgcggcgctgtggcaggcaggggcccagctgttgaaggtgaagctcgacgatcgactgatcagcgagcggctaatcgctatccgccaggcggcgccggaggctacgctgattgttgacgccaatgagtcctggcacagcgaggggctggcggcgcgctgtcagctgctggcggacctcggtgtggcgatgcttgagcagccgctccccgccgacgacgactcggcgctggaaaacttcgttcatccgctgccgatttgcgccgacgagagctgccacacccgggagagcctgccgcggctgcgcgggcgctatgagatggtcaatatcaaactggataaaacgggcggcctgaccgaagcgctggctctggccggggaggcggaacggcagggatttgaacggatgctgggctgtatgctctgcacctcgcgcgggatcgccgccgcgctccctctggcgccgctggcgcgcttcgctgacctcgacggcccgacatggctggcggtggacgttgagccggcgctgcggttcagcaccggcgtgcttcatctttaa

SEQ ID NO: 250169 - DNA, 708 bp, Klebsiella pneumoniae
atgtctatttcacgtcctcgcccgcagcgcggcgactttccgccgggaacccggcagtatggcagctcggaactgggcgcgccgctgctgtggtttcctgcgccgcaggccgacagccgtagcgggctgattattgccggtacccacggtgatgagaattcgtcgattgtgaccctctcctgcgccctgcgcaccctgaaacccgagctgcgccgccaccacgtggtgctgacggtcaatcctgacggctgtcagctcgggctgcgcgccaatgcccgcggcgttgacctcaaccgtaactttccggcagccaactggaagcaaggggaaacggtttaccgctggaatagcgcggcggcggagcgcgacgtggtgctgttgaccggcgagcagccgggttcggaacgggagaccgaggccctgtgtcagttgatccatcagattcatccggcgtgggtggtctcctttcacgatccgctggcctgcatcgaagatccgggccacagcccgctgggtcgctggctggccgacgccttctccctgccgctggtgggcagcgtgggctacgacacgccgggctcctttggcagctggtgcgccgatatcggactcccctgcatcaccgccgagtttccgccggtctccgcagacgaggcaacggagcgttacctgccggcgatgaccgatctgctgcgctggcaggcttaa

SEQ ID NO: 250170 - DNA, 1617 bp, Klebsiella pneumoniae
atgaagtatcctgtcgctttgacatgcggcgcgctgtggttagccagcgtatcttctctggcctgggcggctgacgtaccgccgggcacggtactggcggaaaaacagctgttagtgcgccatatcaaagatgaacccgcctcgttagatcccgccaaagcggtgggcctgccggaaatccaggtgatccgcgatctgtttgaaggtttagtcaatcaggatgcgaaaggcaacctggttccaggcgtagcgacccgctggcagagcaacgataaccgcgtctggacctttaccctgcgtgataatgcccgctggtccgacggcacgccggttactgccgaagatttcgtctatagctggcagcgtctggtggatccgaaaaccacttcgccgttcgcctggttcgcggcgctggcggggatcgctaacgcgcagaacattattgacggcaaagccgcgccggagaccctgggagtcaccgccgtcgacgcccacaccctgcgggtgcagctggataaaccactgccgtggttcagcaacctgaccgccagctttgccttctatccggtgcaaaaggcgaatgtcgacagcggggcgaactggacgcggcccggcagcctggtgggcaacggcgcctatgttctgaaagaccgcgtggtcaatgagaagctggtggtggtgccgaacacgcactactgggataacgccaaaacggtgatccagcaggtcacctttgtgccgattaaccaggagtccgtcgccaccaagcgctatcttgcaggggatatcgatatcaccgagtctttcccgaaaaatatgtaccagaaactgctgaaggatattccggggcaggtgtataccccgccgcagctgggtacctactattacgctttcaatacccaaaaggggccgacggcggatgagcgggtacgcctggcgctgagcatgaccatcgatcgccgggtgatggcggagaaagtattggggaccggggaaaaaccggcctggcgcttcacgccggacgtgacggcgggcttcaccccccagccgtcacagtttgagagcatgagtcaggctgagcttaatgcccaggcgaaagccctgctggctgccgcgggctatggcccgaatcgtccgctgaagctgacgctgctgtataacacctctgagaaccaccagaagattgccatcgcggtggcgtcgatgtggaagaaaaacctcggcgtggaagtgaagctgcagaaccaggagtggaaaacctatatcgacagccgtaacaccggcaatttcgacgtgatccgcgcttcgtgggtgggggactacaacgagccgtccaccttcctgtcgctgctgacctccacccacagcggaaatatttcgcgctttaacgatccggcgtacgacaaaatcctcgcccaggcggcggtagagaattcggccaaagcgcgtaacgacgattacaacgcggcggaaaagatcattatggtcaaagcgccgatcgcgccgatctaccagtacactaacggccggttgattaagccgtggctgaaaggttacccgatcaccaacccggaagatgtggcctacagccgtaccatgtatatcgtgaagcactaa

SEQ ID NO: 250171 - DNA, 387 bp, Klebsiella pneumoniae
atgaaagtccttaatatcctgatccgtcgatgcgtgctgattgcccgctttgaagaaaccgtttcgttttatgaacatctcatttcgcaaaaggcaaggttacgttttgactatcccgaatacgatctcaaactggcgcaggtgggttccgtgcttttaattggcggaaccgagcaaagcctggctccgtttcgcgccaccgaggccactttcctggtaaacgacattaccgcctgggagaaacatctgccttccaccggggcaacgattatcaacccggtgaaggccgtgcccaccggctggaacatgctggttcggcatccggatggcatgattgccgaatacgttgagcatcatgataaaaacccggcggatgagatcttctga

SEQ ID NO: 250172 - DNA, 834 bp, Klebsiella pneumoniae
atggaaagtttaatttcttcgatatggaattttgatggactgataaatagcgcgttaatttttgttacttttggtttattaggagtgtttatctggaaacgggcaggatccgcatattctttattgaaccggctatgggagttctgcctgggagggaaaacgtttcacgacggtaaaataaatgcatatttcaatgagagaaatgatgttgaacgttttaatgttttatttaatgtcggcgcaagaaataaagaagagatcaagtcactgattaactggacgaaaaagaaaaatatagatattcgtcatgttacagccgcgaaaggatggtttgaaatatcaacgcttaaggcaataaaaccattatttatcgctaatgttggtgtatttgtctcttgtgtgttaactatgctgctattatcaaattttatgttgctggcattgaagccatccgcactagtacgattaggcgacgacaagtcatgggtttggattaatgatcatattgctgagagttcgatctggaccaataattaccttcccctgaactggactgagtggaagctcgataaaaaacagtgtgaaagtgaagatttcgataaaacggttttctcagaaaaagcggggataagtgtgcgctcggttgacaggatttgtgagaacttttcaagtggttcgttgagtgatactataaataatattattaaaaatcaaaaactggcatgggttttggctatttaccccttcatctttacgattatttgcttttttagcttgttacgcagaggtgctgcttctaaactttataatgaagtacataactcacaaaattaa

SEQ ID NO: 250173 - DNA, 885 bp, Klebsiella pneumoniae; identical to SEQ ID NO: 211956

SEQ ID NO: 250174 - DNA, 1203 bp, Klebsiella pneumoniae
atgtctgcattaggtcacacccgggcacactggagcggcgtcctggcgatgacgctctgcgtatttgtgctcattgcctcagaatttatgccggtcagtctgttgacacccatcgcgggtgatttacacattaccgagggattagccggtcagggcattgcgctctctggcgcgctggcggtactgaccagcctgacgatatcccgtcttaccggatcgctggaccgtaaatggctgctgctggggctcacggcgttgatggcagcctctggggtgattattgccctggcgtccagtttcccggtttatatgctgggcagagcgctcattgggatcgtcatcggcggcttctggtcgatgtcggcggcaacggccattcggctggtgccgcaacgccaggtcccccgcgcactggccatctttaacggcggcaacgcgctggccaccgttgtggcagcgccgctgggcagctacctgggggccaccgtcggctggcgcggcgcctttttatgtcttgtcccgctggcggtgctggccttcgtctggcaatgcattagcctgccgtcgatgaaaagtccgcgcgcaccacagcggcagggatcggtgctgcgtctgttccgtctttctacgctatccctgggattgctggcctgcggactgttctttatgggacagtttaccttatttacctatgtgcgaccgtttctggagacggtgacccaggtcagtccttctggtctgtccctgatattgctgacaatgggtatcgccggttttatcggcacgctgcttattacgaccgttctgaatgcccgattttatccgacgctggtggctatcccgttgttaatggccgcaattgccggaacgcttctgctggccggacaccacacgggatcggtcgccgtactgttaagcctgtggggcctgctggcgacggcggcgcccaccggctggtggacatggattgcgcggacgctgcccgaggatgcggagacgggcggcgggctgatggtcgccgtgatccagctatcgatagccctcgggtcaacggtaggcggcctggtgtttgatagtctgggatggcacagcacttttgcactgagcggtctgttactgctgggcgcggcaggggtgacttttctgctctctgtcaaaatcagatcatctcagcgcactgcgattaatgaattgaatgcataa

SEQ ID NO: 250175 - DNA, 870 bp, Klebsiella pneumoniae
gtggaatattcagtattaagtaacgctcgcaaaatgccgatgctgggtttcggcgttttcaaggtgaccgataaagcggagtgtaagcaggcggtgttgaacgccattcgcaccggttatcgcctcatcgataccgctgccgtctacgataatgaagatgcggtgggtgaggccgtgcgcgaagccatcgccgaaggtctgtgtacccgcgaggcgctgtttattacctccaaactgtgggtccaggacatggccaacaccgggatggcgaaagccgggattgccgcgtcattaaaaaaatcgggcctggaatactttgatctttatttgctacatcaggcgatgggcgattatttcagcgcctggcgtgcgctggaagaggcctatgaggccggtaccctgaaagcgatcggcgtctccaatttttacccccatgtgttagctaacttctgcgaaactgtcagaattaaaccaatggtgaaccaggttgaactgcatccttatttcgcgcagcccgcggcgctggaagccatgaagcattatcacgttcagccagaagcgtgggcgccgttaggcggtggcagacataatccgtatcaagatgcattgcttcgggggatcgccgatgcgcaccagaaaaccattgcgcaggttgttctgcgctggaacatgcagcgtggcgtcacggtgatccctaaatccacccgccaggagcgcattgaagaaaattttgctatctgggatttcgtattaacagataacgaaatggcgcaaatcagcgccctggatttaggctatgttggcgaagcggtaaaacacttcaaccctgagttcgttcgcggatgtctgggggtgaaaatccacgactga

SEQ ID NO: 250176 - DNA, 291 bp, Klebsiella pneumoniae
gtggcctttaaagcggcagtcacccgggaaattttcgctaccaatgaccgcgtgacgctgcgctttatcgatgcgggagagatctttcctgccgaacgcctggcgctggcgcgtaacgatgagcactttgatgtcgatccgttagcggaaggcggcagaggcttgcggcttattctgcgtgcggtggactattttaatgtggaaactggcgccggggagaatgtgactaccctgatagaagcgttgcctgatacccgcctaagccatgccaccgacgatcgctgcgggtga

SEQ ID NO: 250177 - DNA, 189 bp, Klebsiella pneumoniae
atgatcgaacatatccattttagatgcccatgctgccatggctcccagtacagaacgtcccagtttgacgtcactgaaaaaaacccttttggtgcgaaatgcattttctgcaaatcagccatgatgacattagataccatccgtcctcatcaccttggcgtgcactccgctgcccaggcacagcaataa

SEQ ID NO: 250178 - DNA, 915 bp, Klebsiella pneumoniae
atggataaactggatactctgaccttgtttgtgcgcatcgtcgaacggggctcattcagtgccgccgccgcggatctgggggtttcccggccagtagcgaccgcggctattaaagcgttggaggtcagtctcggggcgcggctgctacatcgtaccacccggcacgtacggccgacggcagaaggctcgctgtattatcagcgctgcgtgtccattctggcggcccttgaggaggccaaccgcagcgccggggggagcatctccggcaccattcgggtagacgtggcgggcaacctggcacggaccctgcttctgcccgcgctgccgcagtttctcgcccgctacccggacattacgctgcagatcggcgaaagcgagcgtgacgtcgatctggttcgcgagggagtcgactgcgtcattcgcggcggccatctccccgacagcgagatgatctgccggccgctcgccgggttgcaggagatcacctgcgccagcccgacctatctcgcccggtacggcaccccgcatacgattgaaggactgacgggccacgtgatgatcgggtttgtttcatcgcgcacgcaacgtaccttgccgctgagctttacccaggatggccgtcagagcgaggtcagtttgccctgtcggctgctgacttccgatgccgacgtcggcgccgaagcggcaaggcttggctttggcctgtatcaggcgcccttgcccagccttgaggccgatctggcgtcgggcgcgttaacggaagtgctggtcgattttcgtcctgcgccgttgccgctctccctgctctatcccagtaatcggcagctctctgcccgggtacaggtatttatcgactgggtgacggcgctgatgaagcctcccctggcgcagcaggcatccggaaggctaaaataa

SEQ ID NO: 250179 - DNA, 243 bp, Klebsiella pneumoniae; identical to SEQ ID NO: 250055

SEQ ID NO: 250180 - DNA, 459 bp, Klebsiella pneumoniae
atgggatttcttaacgccacggaagcggaattcgatgcgctgtatcgcatccacgtgaagagcgtttttttcctcagccaaaaactattgccgctgctggccaatggcgggcgaatagtgaatgtttcgtctggcctcacccgcatcgtgatggcgaaccgggcgccctatgcgatcatgaaatccgcggtggaaaccctgactcgctatatggcgtttgagctgggcagtcgcgggatcacggtgaactgcgtggcgcccggcgccatcgccaccgatttcagcggcggggtggtgcgggataacccgcaggtcgctcaggcggtggcgaatatgacggcgctgggccgacctggcctgccagaggatatcgggccgatgatcgcctcgctgttatccgatgatcatcgctgggtgaatgcccagcgaattgaagtgtccggtggaatgcgcatctga

SEQ ID NO: 250181 - DNA, 1533 bp, Klebsiella pneumoniae
atggattttgaaaatgaattgaccagtaagatccttgatcccattcacggcactattcgtttgacgacactcgagattgcctttatcaatcaccccctgttccagcgcttacgcaacattaaacagaactcttttttatataaggtgtttccctctgcggtgcacagccgcttcgaacactctctcggggtgctgcatttatcaagtgaaatactcaataatttacgcctgaatgcgatacggtatcaaaagaaatatgatgatggccatgtgtttggtcatatcgatcagataccaaaacacaacattcaggagttgagactcgctgccctgatgcatgacatcgggcacgggccggtatcccaccagtttgagagttttatgcctggtaagcacgaattctccgatgttctccccacggcctaccattcaatcattgatgtattaagcaagccagaacagaaagttgaacatgaacagctttcgctgttgttcagcctgatgatttatcatgatctgagaaaacaaggtaaggtcgatgacgaaataaatatcgaaaatgtgttaaaaattatcgaaaaaagatacggtgaccaacagatcattgaggaaattaatggaaaggcaacagatatcctgccgttaatgacctcgatcatctcttcctgtccgatcgatgccgaccggatggattacttgctcagagatggctatttctccggcgtcaagtgtggcatctacgattacaatcgcttgtttatgtcaattgtcccggtcgaggaacagggaaaattgtaccttgcttacaaagagagtgggattgattcgatcgctgagtttattggggcgcgctccagccttttctcgcaggtgtattaccataaaacaaaccgcgcctttgcgacgatgttgagcacattatgtgagattatgcaaagcaaggatccacaaaatgtcattatcgctgacgttaccgaccgtatcgttgaccatagcgatgaaagcttcatcgacgcgctgaaggagttttatttggcgtgcagtgatgattattttttgaatgacaaggttggtgaatggatagatatcagcgataccgaggcggttaataaaaaaatacttgatgacattattaaccgacacccatggtcgaaggtctatgaggccaaacactctgtgtataaagctaacatcgctgacaaggaaaataaggcgtggaagagtcaactcaccgggttattgacttctgtattacagcctcatttcaaaccacatgaatttgccgttgatattgtctccgactgcgcctttaaagacctggataaaaccgaagttaagcttttggtgaaagatcttaagaaccgctacgaaataaaaccgttaattgaatgtggtgataagttaaatcagtatcaaatcatcaaatattgcattcgggtatttgttgaccgcgatatcaaagaacgcgtaactcctgaaataatctataaaatcaatgaaatagtggtcaagcagatcgcgttgctgaattga

SEQ ID NO: 250182 - DNA, 567 bp, Klebsiella pneumoniae
atgagcaagaaaatcctaatgctggtcggcgattatgccgaagattacgaaacgatggttccttttcaggcactgcagatgatcggacaccaggtcgatgccgtctgcccggataaagccgctggcgactatgtcatgaccgcaatccatgactttgacggcgcccagacttatagcgaaaagccgggccatcgcttcacgctgaacgctgacttcgccgcagttaaggccgagaactacgatgcgctagtgatccccggcggccgggcgccggagtatctgcgcctgaacgaggaggttattaaactggtacaggcattcgacgccgcgcgtaaacctatcgccgccgtctgccacggcccgcagctgctggccgccgccggtattctgcagggacggacctgcagcgcctatcccgcctgcgctccggaagtgcgcctgagcggtgggcactatgcggatattggtatcgaccaggcgcatgtggacggtaacctggttaccgcccccgcctggcctgctcatccacagtggctggcgaaattcgccgccctgctggcggaataa

SEQ ID NO: 250183 - DNA, 492 bp, Klebsiella pneumoniae
atggctgatacgttccagaatgaagtccccagggcgcgcattaatctcaaattatctcttcataccggcggcgcgcaaaagaaggtcgaactgccgctcaaactgcttaccattggcgattttagtcatggtaaggaaaaccggcctttatcggaaagagaaaaaatcaacgtcaataaaaataattttaacagcgtactttcggaatttagcccggaagttaacctctcggtgccgaatacgctggccggcaatggcgaagaggagaacgtcagactgcgttttaccgacatcaaagattttgaaccggagcaggttgcccggcaaattccgcaactccgcgccatgctggcgatgcgtaatttattacgcgatctcaaatccaatctgctcgataacgccactttcagaaaagagcttgaggcaatcctgaaagatccggcgctgtcccaggaattacgcgacgaaatgagtgcgcttgccccgaaataa

SEQ ID NO: 250184 - DNA, 1551 bp, Klebsiella pneumoniae
atgtctgttaccacagaaaacgcccctgttcaggggcaaaccacgctgcaggaaaacagggcgggcgagggcgtttacgcctcgctgtttgaaaaaattaatctcgccccggcgtctcgcctcggggatatcaacgactttctggacgatgccgcgctctccgagacgccggcggcggagcgtctcaccgcggcgatgcaggtgtttatggaacgcatccgtcagtccggccagcgggtggaaaagctcgacaaaacgctgatcgaccaccatatcgccgagctggatttccagataagccgtcagctggacgcggtgatgcaccatcaggagtttcagcaggtcgaatccctgtggcgcggcctcaaacagctggtggacaacaccgactatcggcagaacgtcaaaacggagatcctcgacgtcgccaaagacgatctgcgtcaggactttgaggacgcgccggagcttatccagagcggcctgtactggcacacctataccgcggagtatgacactcccggcggcgagccaatcggctcggtgatctcggcctatgagttcgacgccagcccgcaggatgtggcgctgctgcgcaatatctcccgggtttctgcggccgcccatatgccgtttatcggcgccgtcggcccggccttcttcctgaaagagaccatggaagaggtggctgctattaaggatatcggcaactacttcgatcgcgcggaatatattcgctggaaatcgtttcgtgaaaccgacgatgcccgctacatcggcctggtgatgccgcgcgtgctgggccgtctgccgtacggcccggacaccgtgccggtgcgcagcttcaactatgtcgagcaggtgaagggcccggaccacgaaaagtatctctggaccagcgcggcgttttccttcgcttccaatatggtgaagagctttgttaacaacggctggtgtgtgcaaattcgcggtccgcaggccggtggcgcggtgaaagatctgcccatccacctgtacgatctgggcaccggcaaccaggtgaagatcccttccgaggtgatgatcccggaaacgcgggagtttgagttcgccagcctgggctttatcccgctgtcgtactacaaaaatcgcgattacgcctgcttcttctcggccaactccgcgcagaaaccggcgctgtacgataccgccgacgccaccgccaacagccgcatcaacgcgcgtctgccttacatcttcctgctgtcgcgcatcgcgcactacctgaagatgatccagcgcgagaatatcggcaccaccaaggaccggcgtctgctggagctggagctggagctgaacacctgggtgcggagcctggtgaccgaaatgaccgaccccggcgacgagctgcaggcctcccatccgctgcgcgatgccagcgtggtggtggaagatatcgaggataacccgggcttcttccgcgtgaagctgtacgcggtgccgcacttccaggtcgaggggatggacgtcaatctgtcgctggttagccagatgccaaaggcgaaggcgtag

SEQ ID NO: 250185 - DNA, 528 bp, Klebsiella pneumoniae
atgaaatctgcattaatcagcccgctgctggcggggctgctgctgttaaccggctgcgcacagcctgccgcacagtccggaggcggcggtggcaccattgacgccatcaaccacacaaaatgggcaattaaccacttcagtgtcaatggccagtcggggatcgacattataggcccgtttcaggggggcggaggcggctgctgcttcagcgtgcccgcccgctggacgccgggtatgacggtgcgtgttgaatgggaaaccgggcagggttcatccgcgggtttcccggggtttgctgatgaggcgaaataccttgcctggaaaaaagggattgatgcccaaaagaggcagcacagtaagaccgtcctgctgcccgactataacggccaggatgtatgcggcattacggtgcactttttaccctgcgatgacgtgaaggtgaccaccagctgctggtcaccgagaaatgcgaactatccgataaaagagcccgtcaggatgaaggagccggccgtctgtccggagtag

SEQ ID NO: 250186 - DNA, 177 bp, Klebsiella pneumoniae
atgatcagtgaataccgcgtcttcagcggcaatccctttgacctccttaccaggcgcttcgtaccacatccattcccggggtcgtttcgctatcaggacaagtgggcgctgagcgactatatcaacgattcttttgccagctgtcagcagcgctatccggttcgtcggggaacatga

SEQ ID NO: 250187 - DNA, 2241 bp, Klebsiella pneumoniae
atgacaaacatcaatgaaagtatgcgctgggatgatgcgatccccatgattatgcgtggtgataaggttgaaggcggacgcgcagcaaaaccaaatttgcaggcaggtgtattagcgaaccgtacacaatacttgcgcagcgagcttgaaaaatattcgggaacactgcaagcgggggagcagccatattctgatgctgaggcagcgcagcaggcgattaatgacggaaaaatattgccgggtgctaaattttcagtccgctcccggcagtcagatgcatgggtcgatgagtatgaaaatgataacggcattgccacgccgtcaggaaagaaactgccatcactggaggctgtgaacgccttgcaggaaatggtatctgagcagtcatcagaactcatgatgtttctgttttcggatatggatgattttcatgttgcagatatctcttttgacgaagaaaccggaaaacacgtatttaatttaggtcggatggcattaaaacgcagtgccggggcgaccttcgaagtgaccgacccggacggcttcagaatgtcagttgatgaccttattgatcgccttcgcaaacttgagtcaggcgagtatttttataacggaatgaaaatcacacgtagtgaacaaaatatactggaagtgaccgacgctgacggcttctcactttccattgatgatattttgtcacgcctggtgagtgttgagaaaggttcgtttgattacagcgggcaaagtttacagcgaagccctgaccatatttttgaaattaaagaccctgacggttttacattgacggcggagcgactgattgagcgcatcaccgcgctggaaaacgccgctgacgatgatactgatacatcgcgcagtggtgagacggttgcttatctggagggtgtagccagcgctgcgcgggctgctgcgtcagaatgggttagcccgccagtagcccccctgcgaaaaggactgaacctgttttttatttacgggcagtcactggctatcggtgatgaagcgttttcagtggtgactcgtcagccatcgcagctcggaaacctgatgctgggaaaagccgtgcgtggcacgtattacggaagaacgaacgatgctgatttcggtgtgatcggtggggagaatatctattacccgctgacggagcaccggcaggatggcgcgaatattataactgacccaggcaggaatactcgtcttggtgagacggttgcatctggttttatggaaacgctgaagatgctgcataaccgcgctaaaggggtaaaaaatgatgaggaaacgatcctggcatgctctgtaacaggatgctctggtactaacctcgcgaccctgttaaagggcgctgccacgccatactatgaacgtctgatgtcggcattacgcgggcatatggaagctgcggcggcaatgggcattaccgatattcaggtatgcggaatgttgtttctccagggggaaaacgactacggtaatacaacccgcgagagcttcctgaaaatgctcaatcagctgattgatgactttaatactgatgccagatccatcacaggccagacggataatcccggtttttatctgtaccagactggcggacagtatgtcagccagtcgcagggtaatacactgccgattgatatggcgcaactggatattacgtcacgcgctgatgcgtttatggctgccccgatgttcccgtatccgcaggcgtcaaacagtcgcacccataaggccgcaaacagctatcgatggtggggatgcgcagcagcgaatacggtttttcgcgtgctgaacaatgaaaacaggatgccatttcgcatggtgaaggcggtttatgatggtgatgatatttatgtctcatttatgacgccatgcccgccgctggctgttcagccatattaccgggttgcgacgccggtcatgaatagcgacatgggatttactgtcattgatggcatcgggaatctggccgggtcatcactgatgactaaaattgtctctccgtgcgtgattaagatatcgccgtccagaaaactgacgggaaatatccgaatcaatctgggcgaccagattcacggtggcggacataacatcgccgattcaagtccgcagcagtcaatttttaactggcaatattacggcgatgataatcagtcagtgaatgaaaatattaacgcactaaacgataagccatatccggtgatgctgccaacttactga

SEQ ID NO: 250188 - DNA, 603 bp, Klebsiella pneumoniae
atgaatagcacgttactgccgccgtcctccactgcatggatgcgcagcacagaggctgccacggcgaggctttccgggataaccgtcgcgatacgtacgctatggacgccgaccgcctgcccggtggatttgctgccgtatctggcatgggcgctgtctgtcgatcgatgggataaggactggccggcggagcgaaaaatagctgttatacagcgttcgtactggctgcaccgccgtaaaggcacccgcgcagcggtgcggcgcgtgatcgaggacatggggttctctgccacgttcgccgagtggttcgacgtcggagaccagccgggaaccttccggcttgaggtggatgttaacgagattggactgacgccaaaaacgctggatgaattaaaccgcctgattggtgacgcaaaaccggtcagccgccatctggcgcaaatgacgattgccgtaagctccagaggggaagcctggatcggggtggccgcttgcgacggggaagttataacggtttatccgccggggtataaaccggacgacagtatttattacgacggcatgacttattttgacgctaattatcgatatacggaaaaataa

SEQ ID NO: 250189 - DNA, 966 bp, Klebsiella pneumoniae
atgaatgtgaccagtgaaataaaaaataaagaaaaaacgctcgccgagttaatggtaaaaatcctcaaggaacctctcgatcccattaagggttcggtaaaaaaactccatgaagaggttctggacactaaagataaggttgaagaaatcaatgatgccattaatgcggtaggcgcaaacaccgaagaaatcatcaatccgctgaaaagatcgttacgtgagctgcgagatgacgatcttcctgggattataagtaagctgcgggagtttatttcgactcaggtagaagaaaaaaaacaggatatttgcaccgcgcttagcgaacaatcggtgcactatgatagccagttgaaagccgcgaccggtaaggtctgtgaaaaactgtcagatgttcttggacagcaaaatgagagtgtccaaacggtaatacagcagtatcaacaaacgggtatcgacagcgctgaggctttgttgcagcaacttttggctgctaaccgctccctggaggcgaatgcaagcgagcaacggtcgacgcgagaacgtgaccagcggttggctgaacggctggaaagtgtcatgcaggtccagcagcaaataaagcattctataagcgaacttgaccagcagttcaagggcgtgagtcaaggtgtgcaaacggcgcgcaccacgctcgcggaacggcaggaaagcgatcggagggaagtgttaaaaggccttgaaacgctgtccaccgacgtccaggcagcactggtgcagcatctgatcccgccaacccaagctattgagtctctgcaaaccagccagcaggcgttgaccgaggcggtgagccagcaaaagagcaatctggaggcgcaaattgccgcaagtcagggtagactccgctacgttgtcatcatttttgccctgtttgctacctcaacgctggcgtatatcggctatgacatctggaaaaatttagctccctga

SEQ ID NO: 250190 - DNA, 192 bp, Klebsiella pneumoniae; identical to SEQ ID NO: 192041

SEQ ID NO: 250191 - DNA, 675 bp, Klebsiella pneumoniae
atggaaaataataaccctcaaaatgttgatcagaaaataaaatctactgtcgtgggtgcgaacaacacgacaattatcgcgcaagtcattgttaatgctaatagtcctaacattgatacaaatgcaatacaaaaaactctgattaatgagataagaagctctttaaaagaagagtttgtatccacggaatataacatattactttgttaccctaacaaagtaattcatgacaaagtaactttaaaaatcatagaggaaataaaacaagaattatataaaatgggtgctaaagtttatgagggcggaggtaaaacagccctacctaaaacccaaataacatatccacaccttgcagaattagagtttataaaaaccgtcaaatgtgacacggtgataatttttgcattagatgaagtcacactatcacaactaacattaataagttactttaaagtatctaaaaaaattgataatacagatatgataataatatctagcgacactttaaaaaatagcgatatttttttatctaatggcgcattccaatactgtgatgataataactgcaagttatattctttgaactcactagatgatgctgggttaaaatctgtgatttccaggatagaaaataaaaaaataattcagcgaaaaggcggcttattaggagattaa

SEQ ID NO: 250192 - DNA, 1500 bp, Klebsiella pneumoniae; identical to SEQ ID NO: 192043

SEQ ID NO: 250193 - DNA, 1143 bp, Klebsiella pneumoniae
atgaataaataccgggcaatactgactgaggcgggattaaataaactggcagcagcagcgctgacgggggagccggcaggcttctccagtatgggcgttggtgatggcggcggaacgttataccagccccgccccgggcagaccggcctgattaatgagctgtaccgcgccccgcttaacaggctggttatcgccgaccagggggcaaatattatccgggccgagatggtgatgtttccgcaggtcggtggtttctggctgcgcgaagctgcgctctatgacgatgagggcgtgtgtcttgcggtggctaatttgccggaatcctataagccacttctggccgaggggtcaggccgcctgcaatcggtaaatctgtggatagccgtcagtaatacggcagatgtagagctgaaagccgatccttcggtaattatggcgaccgtggaggaggtcactcgcgcaaaaaacgaggcgaaggattacgcggatgaactgatcgaaggtctggaaaaagacattggtcaggacatggaagccgcgaaggactataccgataaggctgtaagcgagctggataagaacaccaaaaaggccatcgccgatgctgtgaaaaaagcggtaggtgacgcatgggagcaggataaccctgtcggcacaacccgatttttcattcagaacctcaaccccaacgagcgctggccgtggtcgcaatgggtttacacgggcgagaataaaacgatccgcgtcggtaaggctgacggttcgaacgtcgggcagaccggcggtagcgataatgtcacgctgcagcgggctaatctgccagtcgttaagattgatgtgagcggcgaaaccagcgagttacctgcacatgagctgacaaccaggggggctggcaggcacaaacatcaggggggaatggcggcaccgggtgaggcatgggacgggaattatattgtcggctccgataatgacagccaccgcacccgtaattacaccagtgaagatggcgatcatacccatgttattgacgccccgccccataaacacagcaccagtggcaaaaccgataatctcggcgagggtaaatcgtttagcgtaattgaagcccacaccctgctgatgtgctggtcgcgggtggcgtga

SEQ ID NO: 250194 - DNA, 801 bp, Klebsiella pneumoniae
atgattaatacccgctcaggcacccgcattgccgttagtgatacatccatccaggacggagttgatcggttttatcctccggtgctggatggtctggaacaggcgttattttttaccgccggtggtgacgggaaaaactatgcgccagagggtactgttttgccaaaaattaccggcgcaccgtcacaaaatacattcagtaagtcgttcccgacatttactgactgcattgataccggtctgctggataattctgattacacggtattgatagttaataaaccgacagccctgccagcagggaaggtttacagtccatttttcgggaactggaacgcagccattgctgaaacaggtaaaggggctggcctggggagtgcgcttgttcaggggcaaaacaacgcaatgaccctcgtcatgtcttctgtacctgtggcagatgcatcaaatccggctgcggcaaccagtatcagagaaaacacggatattcctggtctggcatattcaggcggtacatggcgttttacggcattcaggattacaggcagtgggttctattttaaagatttcacaaagagcgtggaaaaggcatcaacgttccgtgaaggatacgttaaggataatcgccggacaacgccgctgcgtgtatgtggtcagtttaatgcgaatgaatcaacctgtgcgccggggccagaaaccgcactggttctgttttaccgtcgggggttaagcaccgacgaaatggaaaccatgtacgcctgggcaaaaaaatactgcgcacgtcgtgggatgattatctaa

SEQ ID NO: 250195 - DNA, 570 bp, Klebsiella pneumoniae
atgactgtctttctggctgagttcttttgccagacgagaaatacacataccgaccgtcagcttgccggcatcacagaagctgatcagcactggccagatagcatccagcagacgttgcttttccggccggaagccataccggcggccagcgcgacggcgttccctgacgtacagcggatgaagcgatacgtgcatacgcagtcgcacctcaccagtggtgcgatctttttgaacaagacggttataggcgtgtcccagctggccacccagttttttgtaatgctccggtcgaaaccaggtcgggttttcacatttgggttttgtggagtgctcgccgcgccggcgacgggtagatttcttctccggggaaaccagaaaagatgccacatggccgtcctctaccccctgccagaaacggatctgttcttccgtatccagctgactccagtgttgcggattgtgcgcattactcatctgcactctccctgcagctgtttttggcggccagacacttcagtctggcttcgctcagagagagtggaaatacgccaagaaattcgaacagcttag

SEQ ID NO: 250196 - DNA, 759 bp, Klebsiella pneumoniae; identical to SEQ ID NO: 192231

SEQ ID NO: 250197 - DNA, 399 bp, Klebsiella pneumoniae
atgactatcacactacaggcagtaaacgagctcatcgcctccctggagagcgcaggcgagctgtcaatcagagagcagaagttcctgaagctggctaaagcttaccagcagctggctgcggagaatgtgacgatgcgcgaaaccattgaagctgttcgcggtgttgcagataactcaagtggaattgctggctggcacctgaatggtgaaatagctcaatggtcagaaatccttccagaaattgacgatatcgaaacccccgccaccgattgcatcgtagccgggattaaggctgatggggtggaggaatgggtatccagcagaggcgggcgctggaatggcacgaccgaagaagcgctgaagtttgccaagcaactgcgcgagggggccgacaaatga

SEQ ID NO: 250198 - DNA, 333 bp, Klebsiella pneumoniae
atggatatacaggcgccttattatcggcaggttgctctgctaatgcaggttttaccctatgttgctgtcgaacgggaatttgcgctgaaaggtggcactgccatcaatctctttatccgcgatttccctcgattatcggtggatatcgacctcgcctgggtgcccctggaaagcagagccatcgctttacctcatatacgggatgcgcttgcacgtattgccgccaatctgcaacaacaggcaggtatgagcgctgtattacaagctaatcgttcagatgagatgcgtgtcattgttactaccgatagcgcgcaaataaagatagaggtttga

SEQ ID NO: 250199 - DNA, 540 bp, Klebsiella pneumoniae
atgacagcagatcaaattatcgagggcatcctcggaaaggaagcgggttatgtcgatcatccctctgataaaggcgggccgacccgctggggaatcacgcaaaccaccgcccgtgcacatggatacaccggtgatatgcggaacctacccagggaaacagcaaagcaaatcctgctgagcgattactggactggcccccggttcgaccaggtggcgagtttgtctacgttactggcagatgagctttgcgacactggggtgaacatggggccatcggttgccagtaagtttttccagcgctggctgacggcaatgaatatgcgcgggaagctttatcccgatcttatcccggatggagccattggcccccgaaccatcaccgcgcttaagggatatctttcagcccgcgggaaagagggtgaacaagttcttttgcgcgcgctgaactgcagccagggtgcccgatatctcgaactggcggagggacgcgaagccaacgaggattttctctacggctgggttaaggagcgtgtcctgtga

SEQ ID NO: 250200 - DNA, 276 bp, Klebsiella pneumoniae
atgagctttgaaattattgctgggctggtggtcgtcatcttgggcgctatcgctggcgcgttcggcatcggccacgctcgcgggaccagtaaagctgaatcaaaggccgagcagcagcgcagcgaagagaacgccgccgccatcgtcgccacggcagaacgtaaggcggaagttgtgaaaggggccagtgatgtacaggaagacgttaagcgtatgggcgatgacgatgttgatcgcgagctgcgcgaaagatttacccgccccggtagtcgttga

SEQ ID NO: 250201 - DNA, 672 bp, Klebsiella pneumoniae
atggttgaagatatcttatttttgagaaagatacgagtattagtcgatttgggaattctttctctttctgatgttattatatattccgatagtattgattatttcgatgaaatcattggttcagaaagtaaatctgctattaacatcaatgatattagttctggtcagaagtgcctattgttaagcgtattgagtatagcagccagcattactgatgactccctcgttttgattgatgaaccagagataagtcttcatccagaatggcaagagacatatattcaattgcttacaaaatcatttaattcctataagggatgtcattttatcattgcaacgcactcacctcaggtaatatctaacttacctaaaacaaattgtttcgtaagcgatatggaaactgagagtgtaatttcatcatccgagcaatatcataaatctgcggattttcagttggcgactttatttaatgcacctgggaatgaaaatgagtatttaaagcgcctagctataaatatactaacattgatctcagttaataaatttgatgcggagaaacatagttttgacttatcaatactgaaacagagtaagacgaagttagataatgatgattcagtaaaaaaactcatcgagttgatagagacttatgagggcatggtaaatgattaa

SEQ ID NO: 250202 - DNA, 642 bp, Klebsiella pneumoniae
atgattaacgcaattgattatgatgaagatagcgttgaattaataaaaagaaaattatcacagccagattttaaaggcgataattggtctgatgaggacattatagaccttaaaggtcatattaaaaaattttatattgctgaacaacagcatagatgtgctttctgcaggcagataattaggagcactaatgggcggcattgggatattgagcacataatccctagggatacatgtgcttattttatgtttgcatcacaaaatttatgcgtgagttgcattgactgcaactctaataaaggagtgaagaaagtaaccagcagtaaagctaaaaaacagcttccaaataaatctgaaaaatatttaatttatcatcctcattttgataactatgatgatcacttagtagttataaaagagggggttttttatcaagcacgatccgcaaaaggcgagcaaactatgtatgtctgcgggttaagtcgtttctatgattttgctggctacgataaaacgctatcatcagatgcaagaatcttactattagcaaaaatgttaggtgagacagatgatgaggaaataaaaaatggtctttataaagagatcgctgcgttaaccctcgttaatttagtaaataaatag

SEQ ID NO: 250203 - DNA, 456 bp, Klebsiella pneumoniae
gtgctggccggggatgaccgtataccgggcagaatgcagaaattacgcgacattatcgatgtcaaaaaatgggagataaatcagaccgccgggcgctatatccgcgcccatgaagcggtacagcgcatcagtatccgcaaccggctgaatgactttatgcaggcgcacgggacagagctcgccgccacgctcgccccggagctgatgggactcagccagcagcccgcactcctgaccggccatgcgctcgaccgttcggcgcattacctgcgcgaagcgctgtccgtgtggctgagtaccggtgaagaaattaattatgtcgcagaagacagcgatattttaacggccatcggattcaggcctgacgcggcttcgcgggtggataatcaggaaaaatacacccccgcacagagcctgatttattcccgccgacgcacggaactggccagtaagtag

SEQ ID NO: 250204 - DNA, 354 bp, Klebsiella pneumoniae
atgcaacttactctcgatacgttaaaagaaaccggtgcttttaccgggcgtcccgtggaaaaagaaattaagtggaaaggccgtgacgggaaagagcatatcgcaaccgtctatgtgcgcccgatgggctaccacaccactaaagctgaactgctggcgtacaacgggaaatcggacccgattgctgagcgcattgcggcgcatatttgcgatcaggacggcgccccagtgtttaccgcggctgacattcttggaactgctaccccagagcgtggggcgctggacggtccgatcgttatggccctcctggctgcaattcatgatgtaaacgaactgggaaagactacgagctaa

SEQ ID NO: 250205 - DNA, 750 bp, Klebsiella pneumoniae
gtgcatatcccggcagggaaacgcctgatagagccattcgttggtggtgggtcggtattcctgaacagcgaaaagcacgcagattacctgctggcggacgttaacccggacctgattaatctgtatcagatgttagcggtggtgccggatgaagtggcattaaaggcccgctggatgtttgagcacatgcggtcaccagatggctatgaactgatccgttccgagttcaacgctcagtcgctggatgctactgaacgcgcagctgcattcctgtatctcaaccggcattgcttcaatggcctgatgcgctacaaccaggcgaacaagttcaatgtgggctggggaggctacaaggccccgtattacccgatggatgagatgaaagccttcgcggctatggcgcaaaactgcgtattcatgaccgctgactaccgccgaactatcagcctggccgggaaaggggatgtggtttactgcgatccgccttacgaaccgatgccgggaacaaccggattcaccgcctacgccgctggtggttttagctgggagaaccaggtagacctggcgaagcaatgtgtatctgcctttcaccgtggggctcgggtagtgatttccaactcatctgcaccgaaggttctcgacctgtaccgggagcatggttttaacctgcaattcatcaacgcgcgccgttcgatctcctgcaaaagcagtacgcgggaagtcgcaaaagacgttgtagcgatcctttaa

SEQ ID NO: 250206 - DNA, 738 bp, Klebsiella pneumoniae
atgaccgacaacacctttatccctgattacctgaaaccggcgctggagcggctggccgcagccagagaggcccatcttgaacaggcccgccggatggaggacaccctgacggccatcacccgcgcggaggagcataaagcagagctggaacaggacaacggcagcgacacccgcacctggcgcgccgctttccgcgccgggggcgccatgctgaccgatgagctgagaagcggccatatcgaacgcgtggcccgccgggagctggcgcaggaatgtggcaacctgaccgacgtgctggcctttgaacgtgaccagctgaaagccacctgcaacagcaccgcacgggcattccgccaggcgcatcatgctgtgctgagtaaatatgctgaggaagagcttaaccgcgcgctgaatgacaccctcgggccactggtccgggcgatggtgctgaaagcagaggtgatggaaaatccgctggccaacaccaccggccatcaggggtacaccgagccggagaaggaggttatgcagcaggtggtcaccttcctgaccgggaaagtgagcgccttctctgtcacgccagccgatgagccagtgctctccctgaccggcttcccggtcgttgcgcttccgcatatggaccatgacgccgccagcacacccggcgagcgtaaagtctggcaggagaaaatgcgtcagcgcgaggctgacctgaaagcgcgggggctgctgccatga

SEQ ID NO: 250207 - DNA, 531 bp, Klebsiella pneumoniae
atgaaatctgcattaatcagcccgctgctggcgggtctgctgctgttaaccggctgcgcgcagcctgccgcacaggccggaggcggcggtggcggaacaataaaagccatcaaccacaccaaatgggcgatcaaccacttcagtgtcaacggccagtcggggatcgacattataggcccgtttcagggcggcggaggcggctgctgcttcagcgtgcccgcccgctggacgccgggtatgacggtgcgcgttgactgggaaaccggggtgggggatatggaaggatttcctggctttggcaatgatgaaaagtaccttgcctgggctaagaaaatgaaggcccagaaccggcagcacagcaaaaccgttccgctgcccgactataacggccaggatgtgtgcggcattacggtgcactttttaccctgcgatgacgtgaaagtgaccaccagctgctggtcaccgagaaatgcgaactatccgataaaagagcccgtcaggatgaaggagcccgccgtctgtccgaagtag

SEQ ID NO: 250208 - DNA, 1359 bp, Klebsiella pneumoniae
atgtatatagccaaagtaatgagctataaaaatgcttgggaaagaataaatgaaaaatacaccccagaattaaacgaaattctaaccgggctaaatgatctattccctaaaaatactccatcaccaaatatgccagataggataaccccaagggaagtatgggatggaataatgtatgcaaaagactggcaattatcatctaatgttgtttactctccagaaggaacacgaataaacattaacagactcggcccaataaaaaatggtgttagtgttacaaatccttttggggtcttcgacactttcagtagatggcttttccagcaaagtactgtcgcaataaaatatggccttattgaaatcccagtaatgataatccctattcgtgaattttcaagacaggcagatattatgtggttacgcagggaaacttttgaaaccaatttagctcaactcgaaatgttaacaccactgagccacccacacccatttttaataatcggatattctaataagaagcctaaaaatggaccggaaataattgaactattacacgactcttatgtcaaggatgataaaccagttattgatagatgtattgaattccccccagaataccatcaagcaggtttagatatccttaactatttcggcacgtatcttagagaacaatatcctgatgaaaatgcttccgtaaaaattgagcaaaaaggactaaatgtaagattaataattgaaacatcagatggaaaatccgaagtaattgagaaagcattacatgaatatgaattaatcattacaggagctgaaccgcctgaaaaattctctaaaaacgacaaactagtccttgaattaagaaatgaactccgcatagctaaattccgtatagaatctcaacaagacatgattggcattcagaatcataggatcgaacaacttttctctctcattggaaaaagcatatcgcaaaagaacaatgtaatggttgattttaaacctacagttactgtctcaaataatatcagcattaatcaaatcgttgccgaagcattagggagtgtcaatgagttgatcgaagaaataccagaatccaatgaagcatattttgtgctaaaagagcttgaaggatcattaataacaatcgagactaataacgatcaagaatctgtacgaagatctccagccatgagcaagttcagaagattaatcgataaagtaactgaagctggaagcaatctcaaccaagcaatcgaaaaagctgataaaggatgggaaatattttccgatttagcaagccggtataataaattagccgaatggtgtggactacctgtagttccatccattctaatcaaataa

SEQ ID NO: 250209 - DNA, 1182 bp, Klebsiella pneumoniae; identical to SEQ ID NO: 105110

SEQ ID NO: 250210 - DNA, 498 bp, Klebsiella pneumoniae
atgacgggatcatactttttattaccgatggcaatgggggccgtgcttggttgggtcagttacaatctagtcgctcacgttacgtcgaaacggcaaattaacacgctacgtgctatatcatggggcgttcttgcaactctcaccatgatgcttggcgtaagcgctttttccgctataggagcggaacagacgttaactaagcagaacgtccaatgttcaaataacagccctgaatgttatgcgaaagcgcactataaccccgtaagaaagtgcaagcaggcaattgatgaaaaagcagaatttcaccatatatggctgaaaaacgcatctcaacagatttttgaaaaatatctttggcacgaccagaccaaacgaaccatacaaatcttcggtcaacaggctaaagcgataaacagtttaggaatattaacgccactccaatacttttgtattttcaacgctaacaccggagaaattatcgctgcgtcatttgagtga

SEQ ID NO: 250211 - DNA, 1710 bp, Klebsiella pneumoniae
gtgatggatacatttttcccttttaatacctcgccaaaatataagatagaaaacaataaagaattagctgcactaatcggtattactactgctaagttaacttattacgcctattatttaagtgatgatgataagtatcactcattcaaaattcgcaagcgaattaacggagaaagattaattgaagctccaaatagagggcttaaagatatccaaaaaacaatttctcattttctggagagaaactatacacctcgttcttgcgtatttgcgtatgttaaagaaagaggcatagttgaacatgcctcaattcacgttgggcaacgatggctactacgcttggatttaaaggatttcttccattcaataagttcagctcgagtttcgggagtgttaagacgcgctccattttgctttgctaaatccccggcaaatactgtagcgcgtctttgcacaaaagatgggcgtttaccacaaggttcaccagctagtccagtgattagtaacatcatttgcaaaggattagattataaacttaagcaactagcttcctcaaacaagtgttactacactcgttatgccgatgatatatttatctctaataatggaagtgtattcccttcggcaatagcaataagaggcgacgatggtaatgtagaactaagtgaagcaataaaaaatatcataataaattctggttttgaagtgaatgctggtaagacgactcttcgtaaaaaatccgagaggcaacttgttacaggggttgtagttaacaaaaaaaccaatataccgaaggagtatataaagtctatccgtgcaggactttatgcgtgggagaagtttggcttggatgctgctgaggaatattggaagaaagaagtagaaagatctaataaattcgatgatcaaccgccacaaatgagattggtaatacgcggtaaaataatccatgttggtcatgtaaaaggatataccgatgcaactttcctaacgcttgttaagcgattacaaacacttgatagcgaatttaaaattgatgagcagaaatttcggcgagagataaccgacgaaattcatatttatactgaaggtgtgacagatacaaaacatttccaagcggcgctgaatgcatttcaaaatcgtggtgaattccttgacttaaaaataatattcaaaaactcaagcaagcctggaagcgcaaatcttaaaacgctgtgtgaaaacctgcgagaaacatcacaaaaacatctcactttatgcatctttgatagagatgaaagaaatatagtaaatgaaatgagtggttctccgggtaattacagagatcacggtaataacgtatttagtctaattatccctattcctgaatttagaaaggggaatgactcaatatgtattgagcatctgtatcaagactcgttactttttacttgtgatagcgagggaagacgtttgtattttaaggatgagttcgataaccttaattgtcataaaactgatcctaacctcttctgccggattaacaagagttctcttgtgtatgatgataatgtgattaatatctcagagaggaaaaatgtagcattgcctaaaaacaaatttgcagattatgtttgcagcggtcaaccaccttttaataatgtcgattatagtggttttcatgaggttttcatacaaatacttgaaatagcctctacgtataataagtag

SEQ ID NO: 250212 - DNA, 666 bp, Klebsiella pneumoniae; identical to SEQ ID NO: 82020

SEQ ID NO: 250213 - DNA, 483 bp, Klebsiella pneumoniae; identical to SEQ ID NO: 105104

SEQ ID NO: 250214 - DNA, 927 bp, Klebsiella pneumoniae
atgaacaactatcaacaaacagcggattcagccttgaagcaattcagggctaccgccgtcatcgactggctcgacgttgagatacgcaccgaacacccaacacaacaccaacacatccgcaaagcgctgaaagagataacgggcgttaatcgctggtgggttgaggcaattgatattcagtccggtgatgttactgacacattccgcattcgctttcatgacaagctggcaaacaactatcagcagctccgtgctgcgctccatgcgttagccagacggttcacgtttgcagccgaaccggctattgccgggatagaggttagttgcgacttctggcacagacaaagctcggttgaagcaacacgcgctctcacataccgattgcaaacaagcctgttcgcaccgggcaccaatcatcgccaatacaatggcaacaacagaagtaaccaatttcttgataagcccggcaatcgtataaacccggagtataacctgcggattggcaatgaagatgacgccatttcatggcagtgctatcacaaacgcaccgacaagaagcaaccgctgccgcttcgccagcaacgtgctcgcatagaggtgacattgcagggtgacgcgctacagcaacacggcttcggtcttctctccgggctgcaacacttcccgtttgaaacgctcgccagcctattcacgttccgccgtccgatagctacggcacagatggcaaagggggatctgttccgactcatttcaatcaactggatacgctcatacagagatgcaacggcagaacgcggcattcactcgttcagcactgtaggacaacgcgacaagaaaggcagaacgcgggcagagagtagccacctaacagcagacaaagaactgagtaacagggttagagcagcgttgcgaaacctacacccgtga

SEQ ID NO: 250215 - DNA, 1842 bp, Klebsiella pneumoniae
atgaaaacaaggtctttttctatttttttgctaaaagcaggctacaacgcacagaactcccttaagccagatcatcaacttctcgatgactttcaggctcaaaatctcccacagggtgcaagtttatttgtttcagacagatttaaaacaacgccttggtgggtgaattatttctctattgacggggatttagaacaagaaagtaagggagcgttaatttttcttccagtaagagatcgatatttcgctctaacttttggccacatttatcacaatctactcgacgtttcctatgagtatgattttggtcttaaagtaacattaaacagccttgaacctaaagagttaaaaagcgctgacatagtagatcccggtgcttcaagaaggaaaagaatgcaagtcccagttatgtctgacttaacctatttagattttgatagtaatagcgagattttaaaaagcctgaccggaaaagttaaaccgcaatatgtcgacctatttaaaaatgcgaccggttccacaagcttaaaagtagggttgaaaattgaagctgatgagctaatagtattgtgcgagcaacttttagatttatactccagtgatgaatacttgcagtccttccctaatatacaaaaaatagtgcctgagaaagaccctctaaaaattgagcgactagatgattcgcttttagatgcgtttattaataaaggccctgatttatctttatcaatcccggagatcgtagattacagcgataacatttactgcacctttaaaggaagaaaaggggtatcccccatatatactgatattagccttcacgagttttatgactatttaggagaaattgacttaaacacgttcaatatagacaagattaaaagcttctcgcttaatctctgcaatgaagaaggcgttataaccaaggcgtataatatctacagaagctttatctatgatattcactttgacaatgaggatattgtttatcatctctgcgatggtgaatggtataaggttgatcaagattacttacagagtttaaaggattatatagatgcaaggtgcgaagatactctacttccaccatataatcatgacaacattaaggataacataagaaattatagtgaagaaaattataacgaagatgttgcaaacatctcacgaaaccatatctgtttagatcagaaagatatcagtcctgatggacacacacaaatagaaccgtgtgatataattagttaccatgataataagtgtatctttcaccatataaagatatcatccagatcatcacaactcagtcatcttttcaatcaaggagtcaattcaatagaattgttgattttggaaagcaggagcaaagaaaaactcaaggaactaatcgaagaaaatattcaagataaagatctggatagttttaaccgtgtgattgataatggcaattataaagttgagtttggtataattacaaaaaaaccagcgagattgaagtctgagaatcttcctctattttctaaaataagtttaatgcgaagcttaagaactcttgctctttatcgcacggaaggtgcggtaagttttatagaggatattagcccttctaaagaaagttatagtaaatacccacgtattacagttattgtttctcttggtgcaaatggtaaaaatgaagtccttgttgatcacaatcaaccttttcctcagggaaaaaaagtcgcgagatgctctcaagaaattactaatagtcctgtcggctcaagatatatgattcatgtcaaagctagtgaaaacggagatctcagcacaagccatgcctgggaaagcgaacgtatataa

SEQ ID NO: 250216 - DNA, 501 bp, Klebsiella pneumoniae
atggataagagagtgatatttgcggttgccggctcgggcaagaccacgctgctgatacgacggttgagtgaggacaggaggacgctgctcctgaccttcaccgtgaataatgaagcgcatctgcgggcacagattatcagacgttttggctttatcccggaagggatcagggtgatgacctggtttgagtttctgcacggtttttgcttccggcctttcctgcaggagcagctggcatcgcgtggcctgagcttcgaccagcccccacccagaataccgcgcacgaatgcccggcattatcaggatcccgccggacggctgtatcaccggaggctcgcacatttactgacagcccgggggttgctgccggatatccgtatccggcttgcccgttactatgatgaactgcttgtcgatgaagtccaggactttgccggacatgactttaattttctgctggagctctgccgcgcggaaatcactgtgctctgttgcggctga

SEQ ID NO: 250217 - DNA, 1464 bp, Klebsiella pneumoniae
atgcctaaattaagaatatacttctctgatttttttaatgttacaccgaaaaaaataaaagattatggtgcctttaacatttcgttaattaatgaccttccattgtttatagatccatttttattatttaataatgagaagtataaaggattgcatcaaagtataataaagtatgtttcttttttacgagaccgatcccaacacggtgagttgaatagcggcttgattaaaagttggtttttatttccggaagtaaagcaaaattggttaggttatagtattgttggtaatggtggtagtggccttggtattgattttgcaaaatcattaaacaattcattttctaatatacttcaaaattttggaagggaggaaataacggagggtagtcaccttgagaagttgtgtttaattaaggaaggtgttgggaaggacagcgtgagtgattttaccaccaacttaattaaatcttttctattaaagtacactgaggatttcgctaaagataatatagatgagaaatatctctcagagcacatagtggctaaggttgactttaattatgaaacccggagttggtcgtcaaagaaattcatactgccaacttatgatggcgattatgttctattgacaccaagggatatacttacaaaagatgaaacttggattaacagaaatgaaatgatagaagattttagagatatatgtgatagtatctctaatgatcaattacgtggtcagttatccgattactttaatagatgtttgcctgatgaggcaaagaaaaaagaaagagagctagctgcagatttaactataaagaactatcctagttttatagactattatatccgttataaagaacagaatccaaatggggctaatcgcgagagcgatgaaaaagtcagtgaaactgagcgtagatatgttgaagctgtacagcttttagttaatatgatttttgaaaggaatgaggacttctttcactcaaaggatgatacattcgaagaaacttataaacgggttagttatcttaaacaagttatcgaaaataacaacggatataaagttttctacttgaatggtgtgcctgttaaacgagaagctgatttacagttaatgtttcgattgacatggtttgctagtatttcggatgtaaacagcgaagttgataatggtagagggccagtggattacaaaatatcacgaggctccaaagacaaaaccttggtcgagttcaaattagccagtaattcaaagctaaagcagaatctagcaaatcaggtaaaagtctacgagtcagcaaatgaaactaaaaaatctataaaggtaattttgtattttaatgacacagaactatctaagctaattaaagtgtttaaagagctaggtgttaaggaaagtaaggagttggttataattgatgcgaggcctaataaagtctctgcttcaaatgtaaaataa

SEQ ID NO: 250218 - DNA, 873 bp, Klebsiella pneumoniae
atgcaattgtatttccatgaagttggtataaaaggagcagagagtgcgttccccaaaacagtttataaaaaaattaaggtgaagaacattgccagtttcactagcaatcaagaacatacccagaaagtcttaaatgaggaattcagtgatggattttgcaacgtatggggtgtacccaaaggagctgcaagcataattaaaaaaattcgaattggtgatattgtcttgcttgtcaggacaagagcgaaggacggagatataccaatattatgtaaaataaaatttatcttaaatgaatcatcccctgagctgtcaaaatcattatggggtgacgagcgattccctttaatattcttatttgactctgaagtaattagctacacatggaaagagttagtgaatgacttaggatacagccataaatttcgcccaaacggtagcatttatagaataaccgaagacaggttaaccattcataatggcgcagacggatatatacgtaaattaagaaaatcaagctgtggcgataattcaaaaagtgagtctttattttcagaagggttacaacaaagaaaggagatttcttttttctctagaaacccacgtcttgtatcgatagcaaaagaattacacggatatcgctgccatgtttgtgacttcaattttgaagagcattacggcgacataggaaaagaattcatagaatgtcaccatttgaatccactatctaaaagcgattcagaggatattattcatactcacctaaaagatgtaattaccgtttgctcaaattgtcataaaatgattcataaaagaacccctccttttagcattgaagaattaaaatgcaaaatcaaaaaaataaccccgtaa

SEQ ID NO: 250219 - DNA, 126 bp, Klebsiella pneumoniae
atgcaaaacggcgcggtctggcgtattcagctgggtccctttgctgataaagcacaggccagcgccgtgcagcagcgcctgcaaagcgaagcgcagctgcagtcctttattactcgcgccaactaa

SEQ ID NO: 250220 - DNA, 1020 bp, Klebsiella pneumoniae
atggccggattcgatgtcaaagctgctgtagagctggatacgcatgcagccgctacctttcaagcaaatcatcatgatacaaagctttttgttcaagatattagatttgttaaaggtgacgacatcctagagcttgttcctgagaagcatttggatcttttatctgcatgcccaccttgtcagggctttaccagcctcaccgctaagtacaaacgagaagacccacgcaatttgttaattaacgaaatgttgcggcttgtcgaagaaaccaccccatccgcaatcatgatggaaaatgttcctggcttggcttcgcgtggtaatcatctcctctcacctgtgattgagaggttaaaagagctagggtattcagttaactatggtgttttgcaagttgccgattttggcgtgccgcagttcaggaagaggttcgttttgctggctggtaaaggtttttctattccgttgcctgaaggatcacattgtagagacggtaagggaaagccaaaatgggtgactgtaaaggaggctattggtgggatgccaaagcctttgactctctctcaggccaaaaaaagaggaaagtttccgttatctagctggcatgtagtaagagacctttctgatctgaatattaagcgtttgcaagcggcgattcccggcatgtcttgggaatgtatcccggaggaactccgtcctgattgccataaaggcgactacaagggattcagtaatgtatatggtcgtatggcttgggatgatgtttcgccaacaattacaggaggttgtacaaccctcagccgtggacgttatgggcatcctgaagataacaggacgatctctgttcgagaagctgctaggttacagaccttccctgatgattatgtattcgacactgcttttatggaaaaggtatgtgtcatcattgggaatgcacttccatgtaaatttgcagagtatttggccaatcactgtaagaattacatccaagaagcaagggaacatggattaattccgtaa

SEQ ID NO: 250221 - DNA, 2112 bp, Klebsiella pneumoniae
atggcgcgtcaatatgaaatgcagatatcaaggatgacagtggacaagttgggggtgaaactttatgacagagcatatgctgttatagccgaattagtttctaacagttacgatgctgacgcgacgagcgttactataaaagccccaatgggacaatacttggctgttaagcaagatggtattgttacatcaaaaaacgtcactattgaagtggaagataatggcgtagggatggctcctgaagaactacagaatttttacttggttgtcggtaaagaaagacggaaagatcctaaaagaggtgagacttcaaaattatttaagcgtaaggttatggggcgaaaaggtgttggaaaattagctccatttggtgtttgcaaaagagttgaaattattagcgctggtggggatgaaattgagcgcgatggcaaaaaagggtatgagattgctcatattcttttagataaagaaaaaataatggatgatacgtctatttcttataatccagaaactggtgatttagacggcacattgagtgagtccacttttactaggataattttaagtgatttcgaatatagaaagattagtgaaataaaagatttatcgaggcaactctcacaacggtttggtgttaagagtcgcaattggaacgttaagttaatagatacatctaagacaagatccaatccagactatgaagtagaagttggtgagtttactgttcctgtcatgccaaactcgaaaatagagtttcgttcagtaagtggaagtgttgcgacagattcttgtaatgatttaagtgactatgtggcaataaatcccgatggaactcgctctattaatgtttcggctgggttcgaacatgaaggtaaagcatacccgattctcggttggattgcctatgcaaaagaaccatacaaagatgaattaatggcaggtgtacgcatttattgtcgaggtaaatttgcggctcaaaccactgtttttaatagaaaagctggttttacaggtgagcattccattcgttcatacttagttggagaattacacgcggactggctagacgaaaaagaggatctcattcaaacagatcgaagagatattctatggtctgatgatttgggtactcattttcaagagtggggacaagaagttattctgctagtaggtaaaataacacgagaccctctaagaacaaatatgatgaatcaatttttcgagttagctcaggtgcaggataaagtagaaaaggcttatccagggactggccagaaagatatgcgatcacaggctaccaaaatcgctaagcttttgggtaagtcattgcgtggtgatgagttacatgatcctgatgctctagaaaatctagttcagctaagtattatgttggcaccattacaatcgttagatgaaaaattaattgaggcatccagcaaagcagatacaccgcttaacgtactcaatgatattttagctaccgctcaattagccgaaacagtaagctttggtcagaaggtaaaaaaaagacttcaaattattgaaaggcttgagtcattaaaagatgcgacagatacagctgaggacgaattacaggatttaatttcctctgctccgtggttggttaatccgcaatgggttcctgtgactgccaataaggcactgtcaacattgaaaagagagtttcaaaaatattataaaaagaaaactggagaggatatatatcttatagattttgatcgaagcaaaaaaagacctgattttgttttgtttagccaagacggtaagctacagataattgaaattaaaaaaccccatcattatattacaaatgatgaaatggatcgtatcataaattattttgaaatatttgaggagtttttacatgatgaaagacatagcgattttaaatctatagctactgatttccacgtcacacttgtcagtgacggggagcgcttgagtggtgcacgtcgtaaagcttatactgcgtacattgaagaaaaacgcctaacccctgttgattgggctgggttcttgttgaggacaactcaaactcatcaagagtttttagatgaggcagaacagttgaagtcgggaattaatgagtga

SEQ ID NO: 250222 - DNA, 192 bp, Klebsiella pneumoniae
atgacaatcgtaaaaacccataccggcaccgtgatcaccaaagacggtccgaaggtaaaaaaactgcaccagacagagcggatgtgggtcgtcggcaaaacgagttttaccacaaagaaacagggcgccgtcactttgcagaaaatacgcgccgccggctgctgctcgacaccatcaagcctatcgaggtga

SEQ ID NO: 250223 - DNA, 267 bp, Klebsiella pneumoniae
atgttcgttttccaactcttcaaacacacaggtgagatcgccgccgtctttcgcttccattacagtttcagcaacagccggcacctgcacgatcgtctcatcgttaagatctgccagcaggtcgtctatttcgtctcctacaacggcctccgaagccagtttttcaggctcatcgagcagttgcagcatggcggtcagctcatccagatcatcttttttgactgtattgttgaggttgctcatgtctctctcctttacgttgtgtga

SEQ ID NO: 250224 - DNA, 981 bp, Klebsiella pneumoniae
atgagtgaaacaaagcatatatctgaaatggcggaaaaagtagcagacaatttgttctcagtattcaaatgggaaaggaaggttgtttctgatcacagttgggattgtgatagtccagaggaacatggagggaaaaaagatcatccttcagattgtgttttttattacagagacccttatgatggtgaagttaaatatataaatactgatcttaaaagttatgcgaagggtacgataactaaagagcaaataaataaagcaattcattcgctttcttatgcaactaattgcgcggcgtacaatgaaaattggaggaaactatttaagccgataggtggtttctcagttataggtatgctatttgtatataatcattgtggtggatacaacggtaatttttctgaaatagttgcggagattgggagtgatgataaccatttagatagcgataaaatgatttgtattttttctccctatcaaataaataccttgaatagtattgcaagtgacattagagtaatgatgggtaaggatgagttgcctaggatggataaattcagctactatcatccaaatgaaatgttaatcaaaaatcattttaatcaagattatacagagcccgccactattaatgttttatcttctccttggataataataaaacattcagaatgtgcaaaagagaaagctgggtatttaatctattatacaaaagatggatcagaggatgaagagtttgattattttattgatgcgctcagttattatcaaataatagataacacaaataatgtcaggattaaattgactcaaaaaaatgatcatgctgttcataatttgctaactgctatctgtaagtattataagtttttaggccgtgacgaagaagcgtcaagagcgttagccaacaaaatggttaaaggaactattgatcaagttataccacagttttcggcgattgaattgggggtgttgtcgtga

SEQ ID NO: 250225 - DNA, 1110 bp, Klebsiella pneumoniae
gtgagcgatgtagagaaaaaatacgggcatagtatttattatatgaatgatcaaaatattagggatggtcttttagctcaaaaaataaaaccccttcatttgattaaacttttgaaagagcgaaacattatcgtttctccttttgcgtctaaagaagaattgcttaacatactaaaatatattagatttgattattacgaatatgtttatttatcttcattacttgctaatcaagataaaaaggaaagtaaatcgagtattgatattgataagaaggttacaacaacgcaaattgtgcaaacctttgacgctattaaaggtgcgttagaagaacatcaaataactgctaatgttaccaagcttgggcgcaaaaaagtagttataaattatgaatatgttgaatttgatcactcgaaaccacctatgcgccaaaagtcatttcgcaaaggaattgtagaatgtgacataaatgataagggggctatgttaaattacccagccaataaagttggttccattattaaggatcatttgattagtcagctttcagcaaaactacaaacagaattaaaacctattgaatttgattttgaattttcaagcataacgacaagaaataagttttttctggaagtaataaatacagttaaaaattatgatgtttatgatgttgtcactgttgctgttaaaaaagttgatgataagaaagagcaagaaagtactttgtctgatgatcttgatagtgaaagtgtagacgaagctttcaccggagaagttaggaatgctgtgttaagggggaggcaaattttaacctccaaaatatacaatagtctaaatgtcgataattattacatttataaaataacttggaagattcgtgagattattccaaaagttggttctgataaatccgattgctacaccgttgagattgagtttaatgataaagacaaggctaaaggcttaaaatactgcgtcaaaacagttcagaaatattcgtcaagagataaacttaatgtcactacagaaaatcctcttaagagtgatcaggaaaagataggtaagttaatatatcaaacagctcttaatgtatactcttcactaccctaa

SEQ ID NO: 250226 - DNA, 669 bp, Klebsiella pneumoniae
atggaaaaaagaatagttttctatgattttgaatcttatttaaattatgagcaaatcgtaagccgatttcttgagcatcgttttacaaaggatgccagttctggttttaatataaataaaagcaatgataatgggattcattttcgacacattaaaaagaatatcaatatagataaggttataactccgttcggagatgagtatgaaaatactaccattgattacgctattaatgaggttaagattaaaaataatacactgcatataataaacccgacgagatcacttataccatttagaactgatttattgaaatgtcttggttttcaatgcgttatttctaataaggttattaatttaaatagtgttttatcattgctaagtgaacataaaaatgatgttaatttaactgacattgaacttacgacatacgaattattcaaagactcgcgtgtgaaaatggttgtttcttctaatgttgatctcatcagtaaaatgaaaaactaccttggagacattgattctaaattgactaaaatagggtttaatataaaaacacataatgaggagtattatattgaaattggctgcaaaggaagtgttaaaataaaggggaagttagtggatgatcttgttgagaattatgttattcagcattttctaccctga

SEQ ID NO: 250227 - DNA, 522 bp, Klebsiella pneumoniae
atgctattcagcttaaaaacagcgcggggaggtaaagcaatggcaggaaatttcagaatttattttcttgtgggtgacaaagaatatacagttgagaagtggttgaacactgatgagcctacatcaaggaaccctgaagttttagaggctgtaatggctgctacgccaccaggtagggctcccagtatattacgtattgttgatctgggatctgatgggaagccgatgctttatgatgaatttcgaatcattgactcgaaaggtattgtttacggcctcgtttttcagaaagtgggccatgatggctggcattatctacataactacacagattttgaaagacggccagggcagcctataactaatgattcgtttacaattcatggggccgctggctatgcattgactaataaaaatgattttcctgccactgcgacaataaattgggacagacttagcgttcagtgcaatggcgatgaattttatttagtaccgtggtctcctttaccgacatatagttag

SEQ ID NO: 250228 - DNA, 1290 bp, Klebsiella pneumoniae; identical to SEQ ID NO: 180184

SEQ ID NO: 250229 - DNA, 531 bp, Klebsiella pneumoniae
atggctggtgatacggcggtggttatggacgcaaacatcaatacttttgcattcatctatcagctgccaggtggggcgcttccggctacgccacaggacagagcggttatcgcaacccaggaaacaacccctcatggcgtcggcattcgtacaacgtcagcaggttcattcccgatttttctgaatggagggatcgaggccgatctggcatttactcctaacaatatggggcaatctttattctgcgctgtagttatgtgctctaacaaggctgctggatcctatgcaattgcataccagcggtcagatcagtctgccgtgaccagccgacaagtgacgggctatacaatcccagcgtatagcccgtctcaaaaaatgagtattggcggagcaggcaatggttcagtgtctccgttaacatccgttttgtcagaatgtttggttttccccggcaaatatgcatatgggaccggcacactggatgtcatcctggcatatctgatggagaggattggaaaaatcacggcctag

SEQ ID NO: 250230 - DNA, 1173 bp, Klebsiella pneumoniae
atgctgagcagagaggactttttcatgataaagcaaatgcgccgtcagggcgcctacattgtcgatatcgccacccaaatcggctgttccgagcgcaccgtcagacgatatctgcgttatccgtcaccaccggcgcgtaaggctcggctgcgaatggaaaaactccgtccttttatggagtacatcgatatgcggctgactgaaaacgtctggaatgccgaagtgatattccacgaaatcagaaaaatgggctatccaggcggtcgcaccacgcttcgggcttacatccagcccaaacgcaaaatgcggccgggtaaaaagaccgtgcgcttcgaaacccagccaggttaccagttgcagcatgactggggagaaatcgaagcggaggtggccggtgaacgctgcaaaatcaacttcgccgtgaacacgctgggttactcgcgtcgcctccacgtctttgcggcgccgagccaggatgcggagcacacctacgagtccctggtgcgggccttccgttacttcggtggcggcgtgaaaaccgtgctggtcgataaccagaaagcggccgtgctgaaaaatcacaacggcaatgtgatgttcaacgccggcttcctgcaaatggcgcagcactatgacttccagccccgggcttgtcgcccccgccgcgcgcgaaccaagggaaaggttgaacgcatggtcgaatacctgaaatacaacttcttcgtccgttacacgcagttcgacagcttcgcacacgttaaccagttgctggagcaatggcttgctgaggtcgcggaccagcgtgagctgcgccagttccggcaaacgccggcgacccgcttcgaggaagaaaaagcgcacctgcaggtgttgccggcaacggacttcgataccagctacttcgacatccgtcatgtagcctgggacggctatatcgaggtgcggggtaatcgttactccgtgccggaggcctggtgcggccgcccggtctccatccggatcacgctggatgatgagctgaggatctacggcgatgagcagcttgtggccactcatcgcctgaacaaccgtggaaccgggtggcagaccgttccggagcaccatgcaccactgtggcaacaggtgagcatggtagaacaccgaccgctgagtgcttatgaggagctgttgtaa

SEQ ID NO: 250231 - DNA, 732 bp, Klebsiella pneumoniae
atgactgagcgaggaatgatttttaacggtgagatggtgcacgccattctcggcagccggaagacgcagacccggcggattgttaaagggactgacggcgccgtgaagttctgcaaggaatgggacatcaacggagaagaaattttcgttgtgctaggggaaaaagaccacacaggaatgaatcctgtattgggtgctatttcttgcccgtttggcgcagtcggcgaccgcatctgggtgcgtgaaacttggggcgttgtcagtcacgcctttagtgacgatggcttgatgattgactgggttcctgatcgccccacgactgccattcacgaaatgccgtttggcaatggctattactctggctacgccatttatgcagctgatggtgattttacctggggtgatgacgatggttatgaagatggccgttcgtgctggaaaccttccattcatatgccgagagcagccagccgcattcttctggaaatcaccaacgtgcgggtggagcggctgaacgctatcagcgaagaggatgcgcgagcagaaggcattattgacggtggctgtcttaattgcggggaacctgagccatgcggatgcgccaacccagagcctgacgctaccgatgcttttgcctacctgtggcaatcgatttacgggcaggaaaactggaatgctaatccctgggtttgggttatcgagttcaagcgcgtcgaaggcggtgcagcatga

SEQ ID NO: 250232 - DNA, 345 bp, Klebsiella pneumoniae
atgagcaagtcattaaacgcgcgttgcattcgtcgctgggaagttgaatttaaaggccgcagcgattcgaaatatagcccgtactggcgtaaacgcgacctgcgtgggtatatccgggaggccgcgcttactactgctgactgcatggttgagcgcttagctgaagataacgccatggtggcttttcacggatattcatatggctggccccctgaattctcagcctggtacgccgaccgccgcgaggcatatctgaccgcagcacgccgcgacctcaataagagcgctaccaatgaagaaatcgacgacgaaatacagaacgagttggaggcctggaatgactga

SEQ ID NO: 250233 - DNA, 969 bp, Klebsiella pneumoniae
atgagcgaaataatggatttaaccgtcattgaaataaaaccagaacaggcaccgaccttgtaccgggctggcggtcttgatgcttacctggagcagattcgccaggccgtgaacgaggttccggacctgaccaccaagaaaggtcgtgatcgtgtcgcttctctggcggcgcaggtatcacgcagcaagacggcaatcgaaaaaccggggcgcgagtacctgaaacgtcttaaagatgctgtgcgccctgctgaggcggaaattaagcggttcgttgacgcatgtgacgagctgcgcgatgcgacacgtaagccgttgaccgaatgggaagccgaacaggaacggattaaggacgaagaagccatgctcgcccttcacgtcgaagcactggccatgaatgaagacttcgatcggcagctggcagctcgtattgagtctgaccacgaaatggccctgctgatgaatgacgctttcgaccgagagcaggctgagaagaaagcagaagccgaacgtcagcgcattgcccgcgaagaagagattaagcgcctggcagaagagaaagcgaagcgtgaagcggcagaacaggcgcagcgtgaaattgacgccgcagccgccagggagcgagaagcgattttggccaaggagcgagccgaacgtgaacagagagaagcagctgagcgtgcggagcgcgaaaagcaggccgctgtggaagctgaacgccgcaaagcacaggaagaagccgaccgcatccgtcgcgaggcagagcagcgcgaacagtcccgcctggctgaggagaaacgcaaggccgaagaagaatcgcgccgcgccgctgatgttgaacatcgccgcggaataaatacagcagcggtacaggctcttatcaatcagggcatccctcatgaatgggctaaagcctgcatcattgctgtagctctcgggaaagtccctgcgacaaccatcaaatactga

SEQ ID NO: 250234 - DNA, 837 bp, Klebsiella pneumoniae
atggagcaagaacaacaaaaaatagattcactatatgactttctttacgtcgacagagttcgcgccagctctttaactgcacaactttatggccctggtgtagccactgctatcaaaatgataacttcagatatcgataaatcaacaaaaggtgtcggatttgacataaaggttctcaaggctaacacttccgttgaagaagccattaaccacacgcaagaaaagcagtttgacgccacctggtcccttcctataaatcttttagatcagcttaatcaggcagggatgattcgtaatggactgaatggcgagcagttaggaaataccgtagcagttcagggcaatatgcggatttttgacatatcgatgcttcaaaaaagcataccttttatgatcaaactttatggtaatcagcaacaaaaatcgccacaaaaaaatcaaaaaaaatcaaacgaccctgacaatatcgaggttgcacccggcattacacttggaatggttagtgagctattgaatattgtgccaaatacacttcaagttgattttattgataaaaacggcaataccatttggatgacaataaacagagaatatctaacaatcaatcctgatgatatgttcttaaagtatggagggagaattcctggagattggtttgttgtaggcttgattgatgcgttgcctgaagcgcaccagaacaatcaccctttgcattttcctgttcatccagtaaaagacggaatagcacagatgcttaatgcaattaaggcattagcaggtcgcggcgaagactcatatggaataactccactggttattttcagaaaaatgaactaa

SEQ ID NO: 250235 - DNA, 240 bp, Klebsiella pneumoniae
atgcatcgacagtcagacatcaatcaggcattccgcgagtcggtattgcgcaactccaaaggttttcagtacctgcacacaaaggattttgtgtcagcgctgcgccgccgtgggctgcactttaccgactcagaggctaatgcgtggatatctagagagcagacttactttgtcgacaaaaccatcgaccatagcgaaaaccgcctgtggatgctggccaatatggggagggttctgtag

SEQ ID NO: 250236 - DNA, 261 bp, Klebsiella pneumoniae
atgcaatcctccttaacagagtggattaaacaaggctttcttgatcatggttttaaagcttttgaagacaaagttattgagttatctgaaatccatatcactcttaaaagtgaaaatagcaagttgatatcaaaagcagcaagttaccaaaatcttggcatttcgctgattcactggaaggatatacctccgattagtcgtcatgtttttcataaaattctcaaaggaaaggtgaagaatctcgtggaattccccatatag

SEQ ID NO: 250237 - DNA, 1347 bp, Klebsiella pneumoniae
atgataactttcgatcaaattttacctttatctgcccaagttttgtgttcacatagcaactttgttcaaagtctggattggttagttttgaatcgcgacttgaatggaagagttcgtctagttgcgcctgaaaaaatcaaagaaagtccccaggagattgagcgtttacatgcccttgaaaatgatttatcgactcatttagaaggtcattatcataatgttgcgacattgtatgagaatgatatagaattcgttaagaatggtgcgcaagtaagcagaatcgatggtttttcaaacgttttccttgcagatcgatatgccaatgagtcttcttggggaaacgtgtcacaactaacaaaaaacgccccaagagtggtttttttctctataaagggtggcgttgggcgatcaacatcattagctgcggtatcgtggcaactcgcacagcaaggaaaaacagttttagttttagaccttgatcttgagtccccaggtttgtccaccgctcttttaccgattgatcgtcaaccaaagtttggcataacagattggctcattgaagacttagttgacaatggcgatcatataattgaatccatggtttcaaccagcttactttcccacgatggtgaaatttttgtggttccggctcatggtgctgaagctggtgaatatgtatccaaactaggcagagtgtggatgcccaaaatagatcaacatggtcgaaaagaaaaatggtctcaaagactaaatcgccttatagatcagcttgaaaaaaacatttcaccagatgtaattttgattgattcacgttctggaattgatgagatagcatcatgctgtgttacagatatgggagctaatctaatattattattcgctctggatggacttcaaacttggaatggctataaaatattattcgagcactggcttaaaaatgaggttgcacaagacattagagaaagattacaaattgttgccgcaatggtacctgaaacagataaaatagattatctcatgtctcttcgtgagaattcatataatcttttcgcagataatttatacgatgagattgaagcagccccaagcgatacagtcggcccgacaactaatggaataattaaatggaaagttaattcattggtcgagggatggaatttcgatagttctgatgaaggtgcgcctcataacccgtgggcaattcagtggcatcgtagctttacaggttctttaacgctccatggcagactagcaataatagatgaaaactctatcaaatcaattttcggacctttgatagaaggtattgagagtattttcatcccggagaaatctgatgattga

SEQ ID NO: 250238 - DNA, 1422 bp, Klebsiella pneumoniae
atgattgatgttcaaaaaattaggcaggcgatatccctcgcgtctctagaatccagtagctttggaaatgaacctgatgctggcgatttatatgtccctttatctcatattaaagcattgaaacttgcttctcatatagttgttggtggaaggggtgttggtaagtctttttggacagcagttcttaaatcacatcatctccgagcgacaatgcaggaatatgttcctgaactgcagaacctcgaaatatttgttggtttctctaatgttgatgatgtcaacagctatcctaacgaagatacttttcaacttttgcttaaagataattatgaaccttatgatatttggagaacagttatcattcgctgggttgcctctaaatccagtatcgcgatcccaaacgctacatggaaagaaacaatcgattggttcaaatcggagcctgaaaaagctgcgagactaatgacctctgcgcgcagttgggatgggttaattatttttgatgcattggacagaacaagcaacgattggcaaaaaatggatgaaattgtacgcggacttttgcgaactgttttatggttaaaatcatatacaggtttaactgcaaaagttttcttacgagaagatcaagctgctagaacagtattcaatttccctgatgcatctaaaatattagcgactaaagcagagttgacatggagtaggcatgatcttcatggtctgctttggcaaagattaatcaatgtaattgatggacaaggtaacgttttaagggaaatctgtcaaaacgtaacttctaagcaactaatctctgccaatagttcttttcagttaccagaagaaatgaaaagagaaaccgatgcgcaaagaaaagcattcgaaaaattagctggcccatggatggggaaagataaaagacgcggtgttccttacacttggtccgtaaaccatttatcagatggccgcggccaaacctcgccaagatcctttttagcagcaattagtcaagcggctcaagactctacttctcgctatcctaatcatgaatttgctttacattatgaaagccttaagcgaggtatccaacaagcatccgagattcgtgttaccgaggttgcagaagattatccttgggtacctgatatattatctaccttaaaaggacttaatgttccttgtgatagtgattcagttgaacaaagatggacagctcagtttccattaggtccacagcaggttaataccaatcgtttacctgctcaacatgcagaacgaggttggtcaggtattcgagaagaccttgaaaatctaggtttgattgaaaccaaaaaagatggccgagtcgatatgcctgatttatatagagttggatttggattgggcagaaagggtggcgttaagcctaaaagtagtagaaattaa

SEQ ID NO: 250239 - DNA, 435 bp, Klebsiella pneumoniae
atggagcagattgacgcgggcatgcgcatggttcgccgtcaggagcgtccatttctgccgtcgcctggccagttcatcaagtggtgcagggaagggcgatgtgtgctggggatcaccaccgctgaggtgatggccgaatactggaaatggcgtaagctggtatttcgatatccgagcagcgaacagtatccgtcgctgaagcccgttttttaccatatttgcctcgaactgcggcgccgtggaacagattgccagttgagccacaaagagcttgagcgtgaagcttgcgatatcttggatatgtgggaaaaacgtgtgcgggaaggtgagcctatcccaccggtacggcgcgcgttggtagctctagtgacgccaaaagggcctacacctgctgagttgcttaaggaaaatgtatgcacgttcaaaagctgttga

SEQ ID NO: 250240 - DNA, 360 bp, Klebsiella pneumoniae
atgcaaaaaatggtactggcgctggcaagcatcgccgttcttttttccggtacagcggcagcacgtgagttaacggcgtcggaaaaaaaggtcatcgaagagtctgcgaaacagaagctgaaagatccggatagcgccaaaatttattggcaaccggatatgggtggggatgcttattgcgctcaaattaacgccaaaaattcctatggtggttatgcaggcaaggcgctgttaactgcggcagtaacaagaagtggagaggggaaaatcattcgggcaggtgtcattatttatagcgacgatatgatagaggtgatgatgccgttttgcaccgatgccggctaccactttccccgttaa

SEQ ID NO: 250241 - DNA, 204 bp, Klebsiella pneumoniae; identical to SEQ ID NO: 106605

SEQ ID NO: 250242 - DNA, 786 bp, Klebsiella pneumoniae
atgaaatgctggtacaccatcaaagcagccagcgatgccactagcgccaatatcagtatttacgaggagatcggcggctggggcatcactgctcagcagttctctgaggatctggaagccctgggcgatatttcccatatcagccttcacgtccactcacccggcggtgacgtattcgacggcatcgctatctacaacctcctgaataaacacccggcaaaaatcacggtgtatatcgatgggctggcagcttctatggcatccgttattgcaatggcgggtgatcgtatcgtcatgccggaaaatgccctcatgatgattcacaagccgtggggcatttccggtggaaatgccaatgacatgcgtgactattccaagttgctggacaaggtggaaaacgtcctgatccccgcctacgcacgtaaaacaggtaagtctgctgaggtgctggcgtctctgctggaggaggagacctggatggatggtagagaatgtgtggcgcagggatttgcggatgagttactgccggccgtcagtgcgatggctcgcatcgaatcaaaacgaattgaggattttgaacatatgcccgaaaacatcaaagggatgatcacccagcctaaaggctctactggttcagttgtgccggaacagaaccgtatcaacggtattaaagatttgtttgccatgtttggcggcaagcatgatgcgctgaaaatgcaatgcctggaagatgccgactgtacaccggataaagcaaaagacctgctgctggctgaaatagggtga

SEQ ID NO: 250243 - DNA, 1071 bp, Klebsiella pneumoniae
atgacttgttgggactcaaattcaggaaaatggcaacatcctgataccatgtggaacataaacgaaacctttccagatgattttcccgattgttggttaagtagacctggtggtagccattttctggggatgtcattccatttttccccatatactttcgccatcgatggtgagggagattttgggaatgacattcactattacccctcagatttctatctgaatcgttcacatgatccttataatagttggggtgtatcggccattaaaaaggaaaaatccaagactgatgtcatgacattctgggatcatttacctggagttattgtttatgataaaacagcattattcacattaccagatgaacgacttagtagctttgctggaaccgaagcaacagataacgatttcaggatattccatggtctatttgataacgaattcagagataagctagtatcaaaatatctagaagccattaattcaattactggtcctcgctttgcgggttggccttttggtaataatcaattaattaattcagtttttgtatggataaactcggctaatcataacattgatgcaatgttgcaagtacgctcaattcagcatggcgagcgatatacatggcttgatgataaactttataatccgggagatcatcttggttcatgggatatagctccagccacatgggaatgtagaaatgttatcaaagccatctataaatcaaaattacttttagaagatggttttcatgaaatagcgttgacatctgccatttctgctgtcgagcgtactttttttgaaatagttctattcaaggaacatggaaatatatcgacagcacaaaataaaatcaagtcagaaacatttatgaatagagcgaaactattattaccatcttacggatatattcttccaaccccaatgataaacgatcttaaatctgcttattctgacagaaacgcaatagcacatacaattgcaccacaaccatatgagaaaacagcagagcatatttccaaactcgtaaaaatcatagagtggtattatacaaatgtgatataa

SEQ ID NO: 250244 - DNA, 894 bp, Klebsiella pneumoniae
atgaaaaagtgtccccagtgcgaaaaacttagtagactagatgatcatctttatgaattatctattgcgtgtgaatactttacttcaaggagatacaacaatttctccaatatatctgagtggcttaaactgtcatcctttctggatgaagtcagaattaaacctgaaaaatatgccggttctgatttgatatggtgcagacctgctgctgatgcctatgaggctgagcgaatacattatagtaaatactctacagcgctaactcgttttctatatgtatctaatgcactagaagaaacataccgattcgtcagcacttattacaaaccatcatcaaaagagataaaaaacaaaagagaatttgctgaaagcaagaaaagcgttcttttatttgaaaaaatagatgataataatctacctgaaggcttccatcattattgtgaaaatctattcataaaatttgatagatacatacaagaatacaatcctaaaataagtactataaaagattacccaaaaaatcataagtgtcatggccttcatattgttcggaatctcaggaatttcatcgctcatggaactattcctataaatctcatacctgagtactacggttcagccgagatgtggcatgttttatatagtcttttgttctccgctacaagagtaactgctctctatatacaagcctttcttttagaatttgctgaagaatttgatttttataattacctccagaggatggattatgattattatctagaacgacaagaagatatgttaaatgataaccctagccacattacactgaaaacgcctaaaaacatacaacatctccttactcaacttcatttcagtgatggctttggttatataaaaattgctaatttttaa

SEQ ID NO: 250245 - DNA, 573 bp, Klebsiella pneumoniae
atgatagaagccaattttaataacgaggcgttactaaataggatttgcgaggtttatgggtttacacagaaaatccaactcgctaatcacttcaagatcgcagcaagttccctacagaaccgctatacgcgcggcaacatgtcgtacgattttgcggtgcattgcgcactagaaactggtgtaagccttaaatggctaatgactggagagggagacaaaaacctctcagttgatgcccccgcgtcctcaatcgagctttcactattcgaattaagtgaaggagaactagtaaatattggaactcttttgttcgaccatcagtttttcgctaagcagcccaaaagaggctgctgtgtgaaaagtgataacagcacttatgtcatcgagcaggaatcttctttgtctgacggcctttggttagtcgatattgaaggcgcaattagcctcagagaactaacggtactacccggtaaaagattgcatgtcgcaggcggcaaggttcctttcgaatgcggcattgatgatattaaagtgctggggcgagtggtgggtgtatacagcgaggttaactaa

SEQ ID NO: 250246 - DNA, 1293 bp, Klebsiella pneumoniae
atgagccagtcagcgcacgtcatcgcagtatctgatatttcggcaaaggtcagagagatagaaaccgcatatcgcaattatctggatatcttccacattccggaggatcaccgaatcgtcgtgaattactcagccgggaaagacagtactgcgactctcgctgtagcgaatgcgctgtttggcagccgcgcgcaggcagtgatggccgataccgacaatgagcatgagctgacgattgacttcgcgcggaccatccatgagcagattgaatgcctgccggtccaggtcgtgaagcgtatttacagtgaggcggacttttcccgccgccgtgcctacatgaaaaagaactggtcgaagaagcaggccattcgcatgggtgcttatcgtggtgtcatcatgccttcactggcccgggcagatacagcatttggccgggtatggcagaaagcggctaagcgctggggcattgattttgaaaccgcgttagatgcggcactctcggtgatgcacccgagtggaaacagcttccttgatgccgctttgctccacggtaaattcccgatgctgcgcgaccggttctgcaccgacgagctcaaaatccagattgcctacgatgcggcaatccgcccgatgctggatgagggcgaagttgtggttcagtggtcaggcgttcgtggcgatgagtcatccaaacgtgccggttatgaccgtttcgctgtagatatgcgcgatgagggttttctctataacttccttcccattcatcagtggacggcggctgatgtttttgccctgcataaatatatgggcatcaggccgaatccgctttatctgcagggtgcctcccgcgttggctgcatgaattgcgtgctctgtaacaaagaggaaatctcagagaccgctgcacgctggccggagcatatcgagaaacatcgccagtgggagctgaaggttcgtctggcctcccgctgggtgcactggatgagcaccggcacggtgagtcaggcatgggtcaactcgataatcggtttccgcgagttgacagacaaacgtggcgaaacagtgaaagccagacgcctgctgggagatgtgccgcagctttacggtctcgatacggccattcagcacctcgactggtccgggttttatgggccacgcggcggtatgggggctccatcagtacccgaagtggttgaatgggccaaaacaggtcggggtggtaaggtctatgacctggtcaaggcaagcctcaataccgccacctgctcatcacgttatggcctgtgtgaatga

SEQ ID NO: 250247 - DNA, 2727 bp, Klebsiella pneumoniae
atgtctgaatatcttgatacgaaaactagtatgatagtttatgccttagaaaaagcattggcggcgtatgttgttagtgaggatgcaggaggtaaaagtaggttaagcgaacatttcgaacctcgttctaaactagaactggaacgtgggagaggacccgttttcaatacgcaaactcttatccaggcaagttatatcggtgaaattttcaattatgccctgcaattagctaagggtacatctgactatgataaactgtcagaactgaaagagttctgtacagctgttgatttatttttcattagaaatcaaattagtcatccaacccgaccattccatgagcattactggcattgcgctgcagctatagcctcacatccatatatagaagtacttggtttaaaaagtgtgaaggatgcttattattccgcatctactggtcaattaaaagcacctccagaagaatggttttctactattagctgggaaattaataacaacctgccagataaatttgatcacgatattaccagccttataggccgtaagggtgaaaagaaagagttattatcagcaataaataacgatcgaactccattcattgctgttgtagccccaggaggcgtaggaaaaactgctttaattttagatttcttaaaagaattgagcatatcaccaaaagccaatgagaaattcaaaaacatttgctatttaacattaaagaaacatcatctcactgctgatggtattgctgagttaaaaaacattgacaccattgctgaaataaaaaaagaaatagtggatttttttaatcctgatgaagagatagataactatgatgatctatattcagaaattataaacgaccaagatatagaaagcactctcttatgtatcgataacctcgaaactttattaagagatggtcctgatgagttcattcgtttccaatatactcttccttcgaattttaaagtggtagtcactagtcgaataatggttgatggagcttacccaatttcacttaaggaattgcaatctggagtggccttccatctagccaagtcatattcagataaacgagggataataaacttaaccccagaagaactcacaagaattactgaagtgactcacttcaaccccttagcaataaggcttacaatagattccatttataatggaatggcattacctgactcaatagaaaaatcaaaaaaagatatcgctgcattttcatttaataatctattagatgttttaagtaacgatgcaatatctattcttgaatgtttgtttgtcaccggatcatcatcaagatcatttttaactcacttcttagattcagatcccgactcaatagcaaaagcgattaaagaaatattgaatacatctttagtatcccggaaaacatctaatacgggagaagaagagttttctttaagtgaatcaatcaaagaactattaatcacatcacccagaaatagtaccgtcagaaatattattgctgaaaaagcaagaaaacaacgaactgaaatactacacttacaaaagttccaacaagataaagaaatagatcggtttgattatcgattcatccctaataatagccctgactctttgcaaatagctgttaacagagcaaataaaattttaggctacaaaagcgttaacaaagataaattaaatgttatttatgaggattttaaaacactcgctcaaatatatcaaaaaaaccctctatttatgcgaacatatgccagaatactccataaacagggtgataatttaggagctatttcttgtataaagtcagcaataggcatagagtctgaaaatccactaaacaacttaaccctgatgtatatctataaagatattggtgattttatagaggctcaaaaggtatcacaggaattgattgattctggattcgataaagttgaaaattcaggcgaagtactatcttctataataatgcgtgagtatttaggtgttcatctttatggaaaagaatacccagacattcttgaatatactgaaaagtggaaagattcacattcaccacaagagcaagcttactttagagtcgctgcattgaaacgttcttgtgaaaataactccgacattaaccctgagtctgtagaaaaaaacatatctgaagttatcgatatattggaatttatatttgaaaaagaaaacatcagcgatcggctttctgacgaagctattaaatctttaaaccttgtttgtgacacgatcaaaaacaacattgataaattatctcaacaatttattataaaagtaattgattttgctgaaagcaatcttgccgatattacaaagttctctaaagactttaagatatcaagtaaagatgtagttaatatcatttcaacaatgagagcaacaaaaataccaaacaacccattcatctcacccaaatggagtgcttttagctcatctaaaacaattgctgaattcgaacaaattacatggaaaaataatggatactctatagcagaaatatattcagatcttacattaggaaaaggctttgtttttgccagaaactctgatggaaaagaaatattaattcacagggacagttgccttggtgaagaaaaatataactggtctaattacaccagaggaaaaacacttgccatcaagtttgttaggacaaaaaagggccactctgcaactgagtcccacctaatcaactaa

SEQ ID NO: 250248 - DNA, 219 bp, Klebsiella pneumoniae
atgtttcactgcccgttctgcaaaaccagtgcgcacgcccgcaccagtcgctatctgtctgagaacgtcaaacagcgctatcaccagtgcgtgaacgtcgagtgctcggcgaccttccgtacgcttgaatccgttgacgggattatccgttcaccggttactgagccggttatccctgtacccgcaccggcggccaccgttaaccgtgccggtgcgtga

SEQ ID NO: 250249 - DNA, 744 bp, Klebsiella pneumoniae
atgaaacccgaaacagtcattaccgccctgcagaatgtagccgctcaacagtcagcagagagcagccagcgcatcaccgacaagctgggcgcattcactgcggccagagacacgcacgcggccagcatgcaggaactgaaagagattgatacgtccattgaacgctgtaagcaggagcggcagaccgccctcagtgagagtgcagaggcggagcaggactggcgcagtcgcttccgcaccctgcgcggcaatctcacccctgaaatgaaagctgagcacagcaagcgtatcgccagtcgcgagctggccgacgagttcaccggcctgattgcggagctggaaactgaccggacacgcgccatgctgaatgcctgctcgaccgccagtaaatacctgtcagcgcatgatgatgcctttaccacttatgccggtgcggaatgggctcaggcggtcaacacgctccccgccgcgctcattcgtgctttcctgctgcgcattcgcgccctcgaaatgcagggtgacagtgcaccccagtccgttgccgtcggcgagctgcgcgatgcgctgagccgtcagggcagcctgtatcacttcgatatgaagcaggagccggtattgtccgtgacgggcatgcaccggccgcagattaacggtgtggatatggagctgttacgcagcccggcgaagagaatgatgctcgccagaaaactggctgataatggcgagacaaaagcggaggtataa

SEQ ID NO: 250250 - DNA, 228 bp, Klebsiella pneumoniae
atgaaacagacccttatcacccctcatgatatcgagtgccttgagcatatgcgtaatctcggccagctcgttgacgagctgatgaaggtgcaggactcaacctccgtttgtcgcgacccggcgcagcagttgcaactcacctccgtgatttacctcatgaccgcccagctcgacggcgtggtcgagcgctgcaaaaagcgctggctgaccggggaggataacgtatga

SEQ ID NO: 250251 - DNA, 729 bp, Klebsiella pneumoniae
gtgattccgactctgacagcgactcggattctgacagtgactcggattctgacagcgactcggattctgacagcgactcggactctgacagtgactcggattctgacagcgactcggattctgacagcgattcggactctgacagcgattcggattccgacagtgactccgactccgacagcgactccgattcggacagtgactccgattctgactccgactctgattccgacagcgattcggattccgacagcgattcggattccgacagtgactccgactccgacagcgacagtgattcggattctgacagcgactcagactccgacagcgactccgattcggacagcgactctgactccgacagcgactccgactctgacagcgactcggattctgacagcgactcggattccgacagcgactcggactccgacagcgactccgactctgacagtgactcggattctgacagcgattcggattccgacagtgactcggactccgacagcgattcggactccgacagcgattcggattccgacagcgattcggattccgacagcgactcggattctgacagcgattcggattctgacagtgattcggactcggacagcgactcggatgctgacagcgactccgactcggacagcgactccgactccgattcggataccgaaccgcaggcaaataatgatacccatacggcggctatcgatatcgtag

SEQ ID NO: 250252 - DNA, 225 bp, Klebsiella pneumoniae
atgttaaatgttgaaataaatggtatgataatcaatatgttacgtcgctatcagtcacttccccatttcagtaaccagtcatggaagtttaaggaacagagtccgctcatgagtttgcgatgccgtaaatccatggtgagtatagaagcctttagcttcttcagtaagcgcgtgaaccattatcgcacggacgccaatattctcagctacgcgataacagcgtag

SEQ ID NO: 250253 - DNA, 210 bp, Klebsiella pneumoniae
atgagtcagtttgaatcgatcaaaaagcgcatcattgatgtggcctgttctaattcgccctcttgggtttgttttgattacaaagatgactttcctgagtatgatgattcatttgtttttgattgcgtctcggctttgaggtcaatgagcataaaaaatattgaaataaggaataatgctgactcagtatttatggttcgttgtttatag

SEQ ID NO: 250254 - DNA, 1740 bp, Klebsiella pneumoniae
atggaactgcaagcaaatgccagaacactaacaaacgtactttccgttaataaaaaatatattgttcctagatttcaaagagaatactcgtggggaaaggagcaagtgagcgaactgtggaatgatatagttaccaatatccattggcagcaggatggtcagtaccattatgaagagtattttattggcgctctggtattggtaggtcaagagacaagttcggagttaatgattgtagatggtcagcagcgtcttactactcttacgattttattatctgcgttatgtgataaatttaaacagataaatgaactggctgttgctcaatcaatctataataattacatttctggcatcgatgatgacggcaagtcattttttaaactggttaacgaaactcctaaaccctattttcaaaacaatattcaacacattgataagagaggtgatggacctgagtcggtagaggaaaaaaacttacaatcagcctataatgatctaactgaatatctttcagaagataatctctctaaatcattaggattagatgaagaaacttttatttatttagaagcactgaaggcggtccgagatcaggtgttaagatttcttaaggtgatttatataacagtaaacgatgaggatgaagcgtacacaatatttgaaactcttaatgcaagagggctaaatttaagttatgctgatctaattaagaataagttatttaagaaacttaatagtacacatccagatgacgacgcaaaaactaaatggaataaaataagaaaaataataggtagtcgcaatggtgttggttcggttgaaacatttatcaggcattggtgggtatcaaaatattcttatgtaagtagcgatactctttataaggcttttttggataaatggaataaaggagttattgatgctgaagagtttattgatgaattactctcagatgctgaaatctatgtaaaaatatcatcccctactgagcaggactttcctgaggttgaaatgaggcctattttaaaaggcctgcaggctttacgcctttttaatatatcccaaaacaaaccatttctattgtctttatttaaggcaagatctaagggtacattaaagcttgctgatatgaatcgggccgttttatctattgaacgttttcattttatgtttaatgctgtttgttcgttgcgtccttcgggtatcgaaagtgcttatgcaaaggctgcaagggctttggtcgatgaggccgcaactaaagctagtaatcgtcaggttataaaagctttactggatatgttggtgaaaagaaaacctgaatttagtgttttccttgagaagtttggaatgttaaagttttccaatcaagaattaaagaataaaagattaattcaatatattttcaatagattagaattgcattacataaaaacaggcgagtatatgccagactctttgacattagaacatatatacccacaaagtagtggtaggcatgaggtatatagtatgataggcaaccttttacctttgtctaaggagttaaatgaaaaggcaggtaataagagcgtaaaagataaaattaacatctataaagagtcaaagtatgctttggtacagatttttgtggaccagtttgaaaatagatttgaggagagatgggagtctgatttaatcctcttgagaactactgaattgtgtgatctttcttacaattctgtttggaagttggggtga

SEQ ID NO: 250255 - DNA, 522 bp, Klebsiella pneumoniae; identical to SEQ ID NO: 244763

SEQ ID NO: 250256 - DNA, 471 bp, Klebsiella pneumoniae; identical to SEQ ID NO: 244752

SEQ ID NO: 250257 - DNA, 198 bp, Klebsiella pneumoniae
atgaaaaagacccgttatatcgaagaacagatcgcgtttgcgctgaaacaggccgaaactggcacgcgtgtagggaaaacatgcataaatatgagggggcctttttatagttatgggctacctactttttgcaagttctgtgttttaagtccaatggccgattgttattcccccatcaagcagcaacaccggatttga

SEQ ID NO: 250258 - DNA, 1011 bp, Klebsiella pneumoniae
atgaagatatattatttcaaggatccggttggtaattttggcgatgatttaaactcatggctttgggataccttgattccaggctattttgattctgacgatacagtcagactttctggtattggcacaattatcaatacatcgatgcctatggcacggaaatggtttgtattttcaagtggcgttggttatggctatcccccagttaactttggtgacgataactggaatattctttgtgtgcggggaccattatcggctaaaatattaggacttgataagaacaaagctattactgatggtgccgcgttactaaatactctggatgaatttaaaccgctccctgaaaacgaaagaaagggtattatctttataccccatcatcatgcattactatcgggacaatgggagttggcttgcaaactatctaatattgaatttgtaaatcctcaatgggattcaaaaattgttatacaaaaaataagacatgccaaaatggtaattgcagacgctatgcacgcagcaattatagctgatgctatgcgtgttccttgggttcctgttataacttctccacaaattaatacattcaaatggctggattggacacaaacaataaatttatcatatgaacctaaggtattaggtgctagtagttttagagaggcatatcgaagtagaacattatctttgtatggtgaaaaatattacattgatactttgtctgttgatgatgcggtagaggatttttatagaaaaagaaatttgaaatcaaagaaatggtggcgttcttataaaaccactacagagaagatggttttttcggggccgaataaattgctttccaatttgggttttgacaaacattttgatgaaccgtatcaagctaatgttgtaaagaatcttatgggattaaaggaaagtagtggttttttgagcgaagataaatatttttatagaaatatagaacgtttacttgaatgtaaagagtctttgttaaagttaaaataa

SEQ ID NO: 250259 - DNA, 420 bp, Klebsiella pneumoniae
atgttgccgcgcatggtgctgcctttctgcacctcaagcgtgccggtggtcagcttgttggtacacacaacctcgggggtatcgagggtgatgcgggtctccgctttcaccagcacgaccggcacggtcgcagtgatggaatccgatgccgtcacgtcagccgttttgatgccgctgaccgtcagcgcgccggtctctggctcatattcaatcaccgcgccatcagggaaagtcacgtgccacgcatccgccgatgcagacggggcggggttatcatcggagaaaatacccggcagcacgaaagcggtatcgagctcgccgccaatggccagcagcagcacctgctcacccaccgagggcgcccaccacgtgcgcgaacgaccggcgcgggtggtcagccagttcagccatgttgtttga

SEQ ID NO: 250260 - DNA, 1077 bp, Klebsiella pneumoniae
atgggtaacttaagacgtaatgctttcaaaatagtagttacgctggataataattcagccaccatcccatctgaatgtcacaatctaaagtacaagttctcaaggagttacttcgatacattagagataaatgaaaataccatcaccatatctggcgacaggtcggacaaacctaatttcgatgaaatattcatcaacaaccagagtgagatttattttcaaatagtaaaatcatacatttattattgcatttcaaatgatagcatttgtgacattttagagattagatgctacaataaaaacaatatcttagaaaaaaaatacacccgcagtggaatacgtaacctccgagcgaggcataacacttccagccttaaaatgataaataaagctaaggctgccgtcatttttgacgcaacaacagatagcactaaatatttttacgccatgacaaccttagttcgttccatttgcagtgacgataataacgatatatttgaaaagttatggaagtcttacaattcaatatatagaagccttagcacaaagaagcaagagtggcagtgccttgaagatatggggaggttaatggttacaacccccacacaatttcctttagctatagatgtcgtcagaaatcttacaagcgctgatatttcagactccattcgctggagaaaaatgttagaaaacaagttcatcacgagaggcgggcaaaataatcgtgagagcaatttttctgcattcctaactaaatacaatgattttagattgaacgaactagcacttaacagcatagatattgagaaaaacttctgggtagatcaaaacctgaaaactgcgacttccaccgccatacaaaataaaatcgccgctaacgccacccaccacgctgaacttgtggatgttttatgcaacaattatgcatatttcttgagaaataaaacactgcatggagaacaagccgatcactcatttcgatttattcccgacaacaaggaagaaaagtcgttaaaattcacttccaaaatactctttgcagtggtgtgcgacttaataaacagtcatacactttga

SEQ ID NO: 250261 - DNA, 738 bp, Klebsiella pneumoniae
gtgacggtctaccgtgagttgcgtcgtctcgctgacaccgagatcgcacatggtctgagcgttgagtttgcagccgtccatgatgccgctgatgcaggtgactgggctggttatgttaatgcgcagggtgggccgtttgtccgtcgcgatgatttgcaggtgcgcacactgtatgaaccacgcgccgagtttaatcagtatggcgaggaaaccgtctgcatccgtggtgtttacgactctgttgtcggcgctggcactccgattttaacccggttaactcagtggaaaattgtgccgaagcgtgccgttgatttggccgttgacgttaagggcgctcctgcgccctctcggagttctgtcaataactgtacggggagcgaaagcgaaccaccggtactggatttaacaaaaccattgagtcggcgtgaaaaacgagatctaaccaaccgactcaggaagaaaaagccagcaacacggcgaaaattcatccacggaacggatgagcaaaacgcagctatagcgaaaaccatcgacgagatacatctgacaaccggcaacacaatcagccggggcgaagccctgcacctgatggcgggtggtaaaagctgttttgagggcaaatggctacgcgggacagcaagaggagaaatattttccgcagcgccctcacatgaggccaaagccaggaaaatccttaatcgttttgcggctgtagctgaactggcaacgaaaaggtaa

SEQ ID NO: 250262 - DNA, 588 bp, Klebsiella pneumoniae
atggaaatcgattcaggaatcagtaacgaacatgtcttagataggatttgcgatgtctacggtttcgctcagaaaatccagctcgcaaggcatttcaacattgctgcaagttccctgcaaaaccgctatacgcgaggcagtatttcttatgacttcattgtccattgtgcccttgaaacaggtgcaaatattggatggttgctaacaggtaagggggaaaagttcaccaatgaacaaaattcaacttcatccgtttctgaggaactaaccattcaatcattcacattaagtgaaggaaaactggttgatgagagcgagttgaggatttcgaaatcgctatttagtcgtgttccaaataacccgcaatgcctccgctcagaaaatgttactcactttctggagcttgacgcctcgctatctgacgggttatggctagtagatatagagggagcaaaaagtatccgcgagttaactgtcttgcctggcaaaaagctacatgtggcagggggaaaagtgccattcgagtgcgggattgatgagataaaaacgatcggtcgtgttgtgggtgtttacagcgaggttaattga

SEQ ID NO: 250263 - DNA, 138 bp, Klebsiella pneumoniae; identical to SEQ ID NO: 247338

SEQ ID NO: 250264 - DNA, 288 bp, Klebsiella pneumoniae; identical to SEQ ID NO: 182627

SEQ ID NO: 250265 - DNA, 309 bp, Klebsiella pneumoniae
ttgagtacagtaaaatcggccaagaaaatcgaagatatcaaaaaggttaatgaaaaaaatattgaaattctttcattgtataaaagtaatctaaacttagaaaagaaaatgaatattttaattctctgtaaagaacttatgttatatgggcaaaaaggtataactgcctattactttaaagaacataaaaaacaaacgattaaaatatttccattagtcagttggatggaggttttgtttatgatgccttttaatctatatatctacaaaactatgaaaataataaatcgattattaacacgttcatag

SEQ ID NO: 250266 - DNA, 291 bp, Klebsiella pneumoniae
atgttaaaccaaattgaagtacttctttatggcgataaggaatttacccaagaagttgctaaggttcgtattgaaaacactgaatataaaagtttgtctgatgtgatcaaagtcatctacaacgcatatctaccagatgaagctgaaccgaaggatcttaaccaagataatctgattgaaaagggcgtcgtcgggttccgggcaataggtttacctataacaatcaaagatgaaaaggatttacacgctttgatatttgctatgaatgttaagcattacctcaatcaataa

SEQ ID NO: 250267 - DNA, 270 bp, Klebsiella pneumoniae
atgtgggatgtagaaacgacggatacgtttgatgcctggttcgaattacaaagtagagctttaaaagaggatatgttggccacgatgctcatcctgtctgagtttgctccgcagcttgggcgcccgtatgttgatacggtgaaagattcaacgtttcagaatatgaaaaactgcgggttcagcatcatgggctccccatccgcgccttttttgcttttgatcctctgcggaaagctatcgttttatgtgcgggcaataaggatggcatga

SEQ ID NO: 250268 - DNA, 222 bp, Klebsiella pneumoniae
atgcttaccggacctgggataagcggtttcccccgcggcgcgatctccctccaggcccgcgcaagcgcagcgccgccgggcgggatagtcggcgccgtagtagccctggcgggcggcggtcaggcgctttccgcccgggagggggccgtgcccagcgcggacttcatccggctggcgcagaatatcgccaggagcgaaaccgccaccgtaatgcccagataa

SEQ ID NO: 250269 - DNA, 636 bp, Klebsiella pneumoniae
gtgtataagagacagggcctgagtttcccgccagtcgtcgagggtatagagcgtggcgcccgcggcggccatctccataaacgcctggctgctgtcctgcggctgcagatttacgccgcgacagccgtcggtgatgacgttgaccgcgtagcccagcgccagggcatccagcacggtgaacttaacgcagtaatcggtggcgaggccgagaacggtcagctccacgatcccctgaccacgcagccagccgtccagttcggttttctgccggtgaccgttgtcaaagaaagcgctatagctgtcgatgatccggttttgccctttgtggaacacagcggcgatcgcctgctgcttgagcagcggatgcagcgccgcgccttcgctgtgctgcacgcagtgatccggccagaaagtttgcgccaggccgtccagctcgccctcggtgtagggttccacctggtgctggctggcgaaactgccgtgatccgccggatgccagtcctggctggcgacgatgggctcgccgcgcgccaggctccagtcgataagcgcattggctacctcgacggtactgtcgccttcaggaaccgccagcgcgccgccggcacaaaagtcgttctgcaaatcaaccagtaa

SEQ ID NO: 250270 - DNA, 549 bp, Klebsiella pneumoniae
atgacttctggcgttaattttaaggataatactggacctgtacatataattaaccagccgcgagtgttaagagccagtgttattggtaagctgattgagattatttccaatccagttggtggcgagcaaagtttaaacagaaaagcatcaaatattgatgttaaaatctcattcaatgatcttaaaagaaacagatgggtagccgaactttataaagaagatgctctgttagttgatgaatctataaaaacacttgatactataattttaaatggtagtgtcaaattaaaaagacagtttagaggctattataatactgcattggggttatatggtctttatgagaagccatttaacattgaagtcatcaggaaaaactcagataatattatcgataatgttattagatctgctcaagaaacggttagttcgtgctctaatttagacgcagagtttttacaagaagacattgattatggcattcgtatgattgtgagctattcaattatcgaatgcatagtgctggagaatccaaatgattacaattga

SEQ ID NO: 250271 - DNA, 264 bp, Klebsiella pneumoniae
atgcaggtgcatgaacggcctcaggccgcaccggtactggtgttgcgtgggataaaaaatacggggatttgcatgcaaaaccatgcaccttatggatgcatggcttttttcgggaaaaatagcggaattttcggggatttttgcgtgctaccgtgcggccagttctgcacgtcggcgggtgtaaatcaggttctgtgccggggtgaatttctggcgattatcatcccgcgaagccgcatcaggcctgaatccgatggccgttaa

SEQ ID NO: 250272 - DNA, 384 bp, Klebsiella pneumoniae
atgcttggcgcatgctcctccggtacggcttacatcagcgcccatgaaaaagcgttcactacctacgccaacagcgagtggaagaaggcgttagccggtatcagccccgcactgttacgtgcctttctgttgcgtattcggtcgctggaaatgagcggagaagcctcgccgtgtgcgaccgtgacccgtgagctgggtgatgccctgaatatgcagtcagccctgtatcattttgatatggagcaggagccggttctgtccgtaacgggcatgaatcgcccggtcataaccggggttgatatggcgctgttaagaagcccggccagacggatgaagcttgccgctgaactggcagcaaaagaccacgaacaggcagagggctga

SEQ ID NO: 250273 - DNA, 516 bp, Klebsiella pneumoniae
atggccttaccacgcaagttaaaacacctgaatatttttaacgccggtaacaactggatgggcattgctgaatccgtcaccctgccgaaattcacccgcaagctggaaaactaccgcggcggcggcatgcccggttcagtcggtattgatctggggctagatgatggcgcgctggatacggaaatgaccatcggcggtacggaggcgcttctgtttaaacagatgggcaaagccacggtggacggcgtacagctgcgctttaccgggtctattcagcgcgacgacaccggcgaagtgcaggccgttgagctggtcgtccgtgggcgccacaaagaggtggattccggcgagtggaaaaccggcgagagcaattccaccaaagtcagcagcgtgaactgttacgcgaagctgaccattaacggtgaagtgctctatgaggtcgatgcgatcaacatgattgaaattgttgatggtgttgacctgatggaagaacaccgtaacgccatcggtctgtaa

SEQ ID NO: 250274 - DNA, 996 bp, Klebsiella pneumoniae
atgaccaaaattgaaaccacagctattgatctcactaaagggaaaataaagttctttttaacttcattaacaactgatgaattaatgagtacatgtaaaatttcacgtgtcaatgaaaagactgaacaaggattccaaagggcacttgacactgcgcgagcaagtaaaatagcaaaatatcttaatgatggaaaggtcatccctggagctttaatcctatcctgtcaaaaagatagcgacatcaaatatgatgataatactcaaaagctaactataaagggttctgatgggttgttcatggttattgatggacaacacagattgtatggtagttacattgcttatggtgcaggtaacaaaacaagaattcctgtgtgtattctatcggggttaaatcgacaagaggaaattgaatattttattgacattaactccaatcaaaaaggtgtgcctaaaacactgagaattgaattaacgaagtatcttgtcgaagaaggttcacttgaaggcatccgacttaagttgtttgaagatttgagtgataattttgactccccgcttttgggtcgattgagcgcctcacaaaaaggcaggggatatattacccacgttccttttcaggcagctttggatagagtgttgcagatttcacctctaaaagatctaccatatgaagataaactcatcctcattaaaaattatctatttggtgtgaaggaaaatcttgttgaaattggatatcaagacaagttgtttcaggcgaccttttttcaatccatatttagagtatttgaacaagcatgttcggtagcaatgacagttggttctaattataaaaaagaaaccttcgtagctttgttcaatgttcttcaaaagatcaactatgaattgcattccggtactaacgaacaagcaattgcggctttagaaaaagatatttctgctctgttagatattgaagtgaaacttaaaatatcgaatagggatcttttctaa

SEQ ID NO: 250275 - DNA, 903 bp, Klebsiella pneumoniae
atggggagggtgtcttctattattgctagtgagattgaatctcgtttggtatttcttctaaacaaagccgatgtagacgggattaatattgaaaggccatcaataaatgatggcttgaaaatgactctcgttagagatcaggcccttgaagtaaatataagttctgagaaattatattttaatgacactacagggagttcaatatatgaggcattactatatgattatgccatggggcattataggcgtactaagcagaatgaaaatctccttcagctaattaataacaatccaaactgcaatccggtttggccacttgttaccgcatattattgtgcttttttttgtgcaattgatatcggtagaatatttaataaaatcaatataaattttgataaagaacaaattgaagaactgaatagacgttcccgaagtaatgataagacaatttcatctcagcgtggatttcttggtgagattgatgagacaaataatgttatctccttaagttctaaccaagagaaaccacatgcctatgcttggtttcaacttgaaagtacgatcttaaatttagtaaataaaaatagaaaatgggacgaactgaagactatgaggtcgataataaaaggctcaaaatataataatagtggtaatagatggttgaatttaagtgatacaagaaataaatggaattataccgatccattgctttttcatgaaaaaggggacaatttgggaggtgatttcatgaaaatcattaagaacgaaataaatgcagaagagtggttggtagcagcaaagactaagaccgatgatatgagcaatgctacatctgtggcatgcttctacaagattctttatgaggcgacaaccaaagcctataacaatattctaacaggatga

SEQ ID NO: 250276 - DNA, 507 bp, Klebsiella pneumoniae
gtgataattaaagttattatcagtgttatcatggttgtggttatttttgggggcggctttggtgttgctgaaaatgttaagtactcatacattattgatttgatgggggttttgcaaaacacgtcagcaatgatttttgctattgctggtatttggctagcttatttgtatccaaatgcaattgctgggctaatgaaatctgaaaaagtggatttcttagcaagcaaaaatgaagcgaaacgtattgagggaatgatacttataatcattatgtctgctttggtattgatcctcatcatagcattctacgcatttaacgcaatttttcgtggcactgaattatatattgtcaataaatatataatcaaaggtttaggttgttcttatgttgccgggatattgttcctacagctatattgcgtaattatgcttattagtagaaatattgcattcataaatagactgtatttagtaataaatgaaaaagagctagaagaaaaattataa

SEQ ID NO: 250277 - DNA, 732 bp, Klebsiella pneumoniae; identical to SEQ ID NO: 106603

SEQ ID NO: 250278 - DNA, 207 bp, Klebsiella pneumoniae
atggttgaaaacgaagaaatcatctatgatgcattggaacatcatcataacaatggtgcaatatttattagcccttactatttagaaatcaaatcagaaagttttggcgtcgataaagaacacaaaaaattcagtatcaatgaaaataacacaaattattattcatcaagtttctatcatgccctaagcagaatcatgaaagaatag

SEQ ID NO: 250279 - DNA, 318 bp, Klebsiella pneumoniae
atgaaaactttatatatcaaggaattctccagatatcctggccctcgctacgagtcgcttggagagaatagtggcgaaaaattccgcgaattttatttagttcctgcaatactggaaaatgatgaaatttgtgttgactttgacggggttttcgggtatggatcctcatttttggaggaggcctttggtggactggtgcgaaagggaatcagcaaagataagattaacaacctaaagaaaaatcttaaaagtaaggatccggcattagttgccgaggttgttacttatatcaatgatgctctgagggatgccaaataa

SEQ ID NO: 250280 - DNA, 1101 bp, Klebsiella pneumoniae
atgaaaaaaatagaacagctctatacttcagtgttaaaaagaataaggagaaaaaggtttctccgtgcaaacgcaagcaaaaagtcaaccgaacacaaaagatacaaacgtaatggtaacatacgaaaatcaaattctgaaaaaatagttgcgcctactattcttgatatctataactctaattaccatgacaacgtaataagttttattgaaaatattgaaaaaaaagccaagcaagagcaatttaaaactcaaaaaatatatgtttgcttcagaaatacgatttacatatcggccgctgcaggattatatttactagcaaaactggagagtttaaaaagtaactatccagatataagatacactgtaactcgccctccattcaaaactacacagaaaggcgaacatcatgtagttgatagcgtacttaaccgtattggtatatattctgcatttggggtaaaaggtcgagagatgaaagagaacccatctgttaagtgctgggaggttattagaggtgaactggttgattctacaattgctgggaaactattagaagcagtaactgagaaaatgggaacggattacactaatttatacagacctctaattgaggcgatgtccaactcggtagagcacgcatatagagatgatctatacgacaagcaaaagaacaacattaaaaataaatggtggtgttttgcagcaataatgaataataaattgattttatccatatgcgatttaggagttggaattcccaaaactttgaaattaactcaaggagaaagagttttatcaaaacttattgaaattataggcaagcctattgaattagattcagagcatataaaagcatcattgcaggttaaacgcacaagaacaaaacttggttacagagggaaaggcggcacggatttacaatcaattatagataattttacacatgcccaactcagaatcatatcaaacaaggggaactacagatatactaaaaggaagaaagcaaggcccgaattgatgtgggatgctcataaatccatcaatggtacaattgttgagtggagtgtgccactaccaactgaaggagaagcggcatga

SEQ ID NO: 250281 - DNA, 312 bp, Klebsiella pneumoniae
atggcaaagcatatgcaagacaaagaaagcatggccggaatcacctggctggctctgctgatcattgctggctggggcggccttgtccgattcctgatggatgttaagcagggcaaagcgaaatggagttggataaatgcttttgcgcagattgtggtttcggcgtttaccggggtcattggtgggctcatcagcattgaaggtggcctgagtatttacatgatactggccacggccggtatcagtggcgctatgggttccgtagcgctcacgtatttctgggaacgaattaccggagtgaaagcacaatga

SEQ ID NO: 250282 - DNA, 210 bp, Klebsiella pneumoniae
atgcaagacctgaagattgaataccgagatggcaggctggtggaactgagcattgatggtgtgagctttctttctgcatccgccatctccttcagtcatacagcaaacgagacgctgccaacgatcatcctgacaatgtctgtcggtgtcggtgagcacctggagccccccagtcatcctcgtgaaaacctgcggatcatcgagaaatga

SEQ ID NO: 250283 - DNA, 1104 bp, Klebsiella pneumoniae
atgctaattaaccgcattcgtttagaaaattttaaatgttttactgattcaaaaattgaaataaatcagttaactttttttgtcggaattaacagtgttgggaaaagcagtgttattcaatcatttttaatgccaatgcaatcacagcatgaaagtgatattgaattaaatggtccgctcattaatttaggtgagtataatgatatattaaatatcgaagcgagtgatgatagtatcagaatcaccgtcgaggttgataataaatcctgcacttggggttttgagcaaggttatataagcgataatcgccaagaagtaaacctacctttcttatccggcgataattcatggttgaaagaagctaaattaggttttcaatatatctcagcagaaagatggggaccacgagataacgtcccagtagttcgtagccatcgtcccggttggctaggaaaaaatggtgaacacttaattgattatctgtattccttagcaaacgaaacgtcaatgaagagtttatcaacgctacatgaaaacgatccaagaatacatagtgatgctacaagtacaactatattgtcatcaattgaagcatggttaggagaaatatctcctggtgtatcatttgatatagacgtttaccgtgaagctaatataggctggggcttatttagctacggtggtgattccaataaatatcgtgctggtaatatagggtttggtattagttattcgcttagtataattgcagcgattgtaggtgcgaaaaaaggagatattctgctaatagaaaaccctgaagctcatattcatcctcgtggtcaaagtaaattaggtcaacttatagcacatgcagcaagtgctggaatacaaattttagttgaaacccacagtgaacatgttattaatggggcgcgtatcgctgttcgtcaaagtaaacttccacatgataaaatattcatttattactttgaaaagccgctaaatactatatccccaataataaaacaaataaaatcggataaaagagctaacttagatacttggcctgaaggtttctttgatcagacaatcatcgatatggaaaagatcattaaaggatga

SEQ ID NO: 250284 - DNA, 1929 bp, Klebsiella pneumoniae
atgaatttaaaagaattacttaacgatatttcaaaattaacagggctaattttacaaccagtgaatgccaattctgataaattgtctttgattgaattggatcaaaatactggaaaatactttgttaagccagctacaggtaaaaaggtatctcgaaatatctatgaatttgaacatattcttaaagaccttttagaattcggttacgccaacgttgaatcttcgttaggtggaagtggtagcagtcgacaacatccagaaacgattatatctaatcttccttatattgagttttttaaatataaaaataaaaaacatattcttttagttgacaagccttcccatgaattaggcactttaaaagaggcatcagggaacgatcttaaaaaagcgagggcagccttagctgctcgtgaaaagttgagcttttatgagatacatgagaatttaaaattcgttaacggactcattaataattctcttcaagaaattcgcacaaaatatccaggagaattaaagcaagaaggtatttctcaatgtataaatgtactcaactcgttggagtatgagttctcacaaatatttttcaaatctcataatattttgaagaatgggaaatcagaataccttccttccatttatgataataaagagtcagatacttcctcgttaaaagatgaggatgactcagataatgattcagaagatgtttttgaaaatgagtcagttaattttgatcgtaaaaatctgaagatcaggcagatagtaatgagctttagcttaatctatgaccgaattcaatataaggaaatagagctgcaacccgattttcagcgtaaagagagagtatggagtccaaaagaaaaaagtctattaattgaatctattttgttaggtttacctattcccatgttttactttgcagaaagggaagatggtacatggctgatagttgacggacttcaaagaacaacaaccatctttgattatatgcgtggtgaatttgtcttaacagatcttaaatatttcaaagatcctgaagattccgtatatagaaaatcgttccaagatttacctcgtcaatatcagcgtaaaattagagaatatcaaatcaatggacatttaatttctgtagagaaaaatgattttgagatggttcgtgagctattccaaagaattaacacgtatggtcgagcattaagtcctcaagaaattagatgtgcattgaatccaggaagctcaataccattcattcgctatctagcagaaaccccagaatttgtaaatgccacctttggtaaggttaatgataagcgaatgaaagacatggaatatgtccttggaatcatctctcatattcttttcggatataaaaattataatttcaaccgagaagatgaattcctcgtaaatacaatgcaatacctaaacaaatacaactttaagctgaatgggaagttttctgacgaaaagcctaaagtacttccagaatggaacacttcagaatgtgatcatttattttatattttatttgataaattcaagaatggtctatatgtttcggctgaaatttttgattcgttacgattcaaaaagaaaaattcggattctctgaataaacaattagtaataatgcttgtttcggtatttgcattactaccgagtgaaatatcagatagaataatcttagaaaaagaagaattcattaatgaatttgaaaaattagtcagtggagaaactccagcattcgttccttggatttcagaaagttataacgatcagaaagataaagattttgagtattcaattagtcagtcaactggtaaaaaagcaacgatcttatacagatttagcaactttgttgaactaattaaaaaatttactggtcaagatatcatcattgaagggattacaaaagatgctaattaa

SEQ ID NO: 250285 - DNA, 1149 bp, Klebsiella pneumoniae
ttgactaaatcggttctatctttttttactggtgtcgggttgcttgatatgggcttccgatcagccgattttgatatcgtctggcataatgaaattaatactgatttcattaccggttttaaacacgggcacagtaaactatacggtgttaaccctaatgagatcaatttgtttgaaggttccattgaaactataaataaatctcttgttagtgatagtatttcatccggtttaattgacaatagtgattttgggatcattggtggtccgccatgccctgatttttctaacgccggtaaaaacttaggtaaagatggtgaaaatgggaaactaacgggaatctttgtagatatcattagtgattttaaaccgaaatttttcaccttagagaacgtcaaaggtttaattcagaaaagtactcatcgcaagtatttagctgacttattatacaaactatcaaaagattattgctttgatatcagagtattaaatgccttggactacggaatcccacaagaccgtgagcggttatttgtaattggtttcaaaaaaagttttatttttgataagcttgggtatgcaagtttaattgatattgaaaaaataaatttgcaactgattattgagttaaaaaaaatcaaaatcacaaatttagatagttttaactggtatgattggccagttaacccactctatgcgaatgcaagggaaagatttaactggccccaaagaacgccttatggtcagaatcctaccaagccaaactctataccgtctaatttgcttgtgcaaagtagcgtattcactccatctattgacgatcttgcaaaccagaacgatgtatttaaagcttatagcgataagttcaatataattgatgaaggtgatatttcaggcaaaagctttaagcgattacatagatggcgctttagccctacagcggcttatggtaacaatgaagtccatttgcacccttacaaacctagacgcctttctgtcagagaggttatgagaatacaatcagttcctgataaattcgagctgcctaacagcatgacactttcaagcaaatttaaaaccataagtaatggtgttccggttgttttggcaaaagagatagctcagagcatctcaaatttcattgagtaa

SEQ ID NO: 250286 - DNA, 1206 bp, Klebsiella pneumoniae
atgtcatatcaaataaaaaaatttgtgatgagcaatggcgaacgaggatgtttggttctcgataaagaaacacagttgcctgtttattatcaaaatctctatcttacaaccaatgtcaggaatagaagtgcgaccgcatcaacgatggagatagttgcaacaaacttactaatactaagcaatttcctcaaaagcaggaaaataaatataattgataggattgaaattaaggagttcctaagtatagcagaagtggatgacctgatccgttatgcaaggcagagatttgataagcaaaagattacaaatgtaagattaataaaagggtatcagattgcaagaagaactttcggctatagaattcatgttttttcgagctatcttaattggctgtgcggtttacttcattctattaagggaattcatgctagatatgaagtcgagagtttcatagaaagtattagagcacatctcccgctaaataaatctcttagcatgaatgacagaaaagataaatcactgagcaaagaagagataaaaaaactgtttgagttattagaaattgaaggaagccaaaatccttttcagaaggatgttcaagtgagaaacagactcatttttaccttactattgaattgtggtttaagagcaggagagctattaaatctaaaagttaatgatttaaatcctagggattacacactaagtattttcagaagacatgattgcattgaagatcgaaggctgaatcaacctttagtcaaaactggtgaaagggaaattccattgtcggacgagttagcattggagattttggattacataaataactatagaaataaatacaccaaaaagaagaagcatgacttcctgtttgttacacacagttcatgtaaaacagttggagaacctttgtctgtttcagcatatgaaaagataatttcgactattaaaaaatcaagcccggaattaaagaatttatcaggtcataaattgagacactcctggaactatttctattcaagtgaaattgatgattcgaatttagatatcagccgaaaatcaggtttaaggtgctatctcatggggtggtcaaaagattcaaagatgtcggaaaattataacttcaaacacatatcaatgaaagaaaaggaagttattggaagagtttatgactctttgaggaaaataactaaaggggaatga

SEQ ID NO: 250287 - DNA, 1314 bp, Klebsiella pneumoniae
atgaaaacaagcactttaaaaaaagagaatgtagtttttgcaatgatgaaggggtatgggttcaggatttcagataataaatggcaattagatataaataattgtgtttgcccacataaggttgccgataaaatgccagagtcgatgcgtgttggttatcttaataccttggcatatttttcgtctgaatatagtgcaggctacataaagaatataaatcacatctttagccaatggctaagattgatggatcttgaaatgattaattccaaagcggtttatcaatttaatgttagcttaggccctgagaaaaactataagctaaattcaataaagaattttcttagtaaatggaaaaaactcggttatgaaggagtagataactcagctctaagaatgctggaaaaaataaccattaaacctaatttaacaggggaagccgttaaacgaagagatccgaatagtggaccactaacggaagaagagctgaaaatcatacttgaaagtatcaggaaattgttgaaagaagataaaatccctctgtttatgtattgctacgttattctattagcaacaacgggaaggaggccatcacagctaacttcgttgaaagcgaaagatctcatcagaacggaagagggttgttttctaaatataccgaaagtaaaacaaaggaagaacttcagaagtgagttcagcatgatgagaatcgacgatagcctgtatgaggaacttataaccttgattgacctgaaccagaaacatatcgaagatagggtcaagaggaatattagtcatttaaaaaatgaattacctatactcatggacattaaacaatatgtattaattgatactggacaaagtttagataccatcatgacaactgattttttacatatgaagaattcttttatctcaaacagactaaataatttgactactaaattcaacattggctcatcaagtaataacggccctatacggattaatgcaagacgatttaggtataccctgggaactcgtttagcaaaggaaggtgcatcagttgaagtaatagctaaagcattagaccataaatctataaactcatcagggatatacgtaaaaaattgtccagacaatgttcatgatatagacaagatgcttaatcctttttttgaaccgctatcaaagatatttcttggagaagaacagtcaaaaaacaagaagctctttactgaatatattttaaattcgttcggattttttaatgataaaaatgaccaaattgaatgtttcacttgtaaaaactttagagcctggagttcccaatga

SEQ ID NO: 250288 - DNA, 123 bp, Klebsiella pneumoniae
atgttaagaaaaattaaatgttcttttaataaggaactgaaaaataaattgcttatcgcttttttgtggttggtagcgttagggtattctatatattttatttatctaatcatttatctataa

SEQ ID NO: 250289 - DNA, 384 bp, Klebsiella pneumoniae
atgaaagaaactataggattaccattctgtaagaaaaacaacaaagtcccagctaaatcattgcgcactcattgtgtcagcgcccgattcaaccatgaagaactacagcttctcaacacgaaacgtggtgataaaagcaagggagagtggcttcgcttagcgtccctggataagcttcctttgtccgttcctgccatcaacatagaagcctggaaatctctgagcgaaatttcacagaagctgaacaagcttgtcgctcatctggataacaaaagccagggtagctctctgacgcaaacagaactattcgcagtgaagcgccagatctctgagcttcgcataaatcttgtcggtgcagatctatggggagaaagaaatgaatga

SEQ ID NO: 250290 - DNA, 1338 bp, Klebsiella pneumoniae
atgaaagggatgcaaaaaatcaaaagaggaaaaacctttaatgggctaatttcttatttattaaaacctgcttcgcaccacaagtcagatccgtatgtagtcggtggcaatgtcatagaaagcttcgcagaagcactaagtgcagagttcaacgctacgaagttcctacgctccgatgtcagtaaacctgtttggcacaattctctgcgtctgcctgctggtgagagtctacctatacaacgatggaagctgttagccgatgactatatgaagcgtatgggcttctctgagacgcatttacgcgcttatgtcctgcatgatgataaagatggccaacatatccatatagttgcaggtcgcatagattcaacttcggggaagctctacctcggcaggaatgagaacctggcaagcacgagaataattcagcaacttgaaagagattacaatctgacaagaaccaaaggatcgaaagcatctccagtagcaccctcacctaaaccgaagctcaaaaaatcccgtaatgaactgatgatggagaaaaggactggtgagctatgcccgaaaaccatcatccaaaacgctctggaagtactccttgccgataaaccgtcaaccactgagtttgtgcatcagcttgtcgcacaaaacatcagagcaatcccgaacatcgcttctaccggacgcatgaacggcttctcattcgaatacgatgggattgctttcaaagcatctcagcttggcaaaggctattcctggacggctttacagggcaaactcgattatcagccggaacgcgataatgctttcctgtttaaactgaaatcctctgtcagagaaacatctgttagtgcaactcatgatatggccataactacagatgctcctgaaatcatgacagaatacgttaaccgccccatagaagcacttatcctcgataaccgagctgcttgtcaggacgaattcactaacgcttcagtcaaacagcttcactcagaaccaggcgctggttctcaaggagcgtttgcaaccaaagcggtaaaagaagcctctaagcgaagctatatggtttcaatgttcagatggttagaaaccatcccctatctcaataccattattaccatcttcaaaaacctcaaaatcccaacccttaaacgccctctaaaatacaaaaccatcactgacgtgagagtgatagagataacgcctctccccaaaaaaatcttattgtatcagcacctcaatccagaagagcttcgctttcaatgtagggctggcaagccttttttgatagatacaggccaatcaatcgatcgtttataccgatcgatatcctag

SEQ ID NO: 250291 - DNA, 405 bp, Klebsiella pneumoniae; identical to SEQ ID NO: 134329

SEQ ID NO: 250292 - DNA, 1170 bp, Klebsiella pneumoniae
atgacgacttcatcatactttttctgggtaaatccgttaagacataaaataactcagagctggaaaggttatgaaccttcactcgaaggacactcaaaactaccagacataaaatccgtaatagctattgctgagattttctcaaaagatgaaagccaattgtctacaagggacattttcactacttctgttcttgcactactcatgtgtgctccaggaagaatttcagaaattttaagtcttccagcggattgtgagattactgaaaaagatgacaaaggcattgaacgatatggtttaagatttttttcagcaaagggttatgctggggatatcaaatggattcctacagtaatggtccctatagctcaaaaggcgatagcccgattaaaaaaactgtccagtaatgcaaggtttgcctcaaggacaatggaaggccaaggcactgatccatccaaatttgcactcgttaccacaaagcctcagaattttccttggtatgatgaagaaaaaagaattaaatattcaaatgctttatgtcttttatttgacaggcaactgtgtcagaagacaagaaaagattttacatcttttttcaaacccacggctgagttttttagaatggatattaatgcttttgcaagtattaaaggcacaacaaacctgttcaaaagacacggctatatcaatgaggatggtattccatattctattagaactcatcaattaaggcatctgctgaatactttttctcaaattaatggcatggatgagttcagcatcgctcgatggtctggaagaaagttggtctcacaaaatgtttcctatgatcaccgatcacacttacaaatgactaagctcataagagaaaaaacgacaatcgaggcaagtaataggcatagaaaaaaagaaatagctatcatggatataactgatttcgattcattgaataatggagctgtgctcgttactaagcacggttactgcaagcactcatatgcttttgacatatgtggttattatccaatacaagactctggaaaggatgatgaccgactattggtaattcataataaaattattgaaaaaacgtattatgataaaaatgatgggaatgtcaatgctgaaaaatggtatgagtttcaaaataaaattataaaaggagagtaa

SEQ ID NO: 250293 - DNA, 234 bp, Klebsiella pneumoniae
gtgacttcctcccacaataatttctgggatttcatccagatgattaaacggcttgaaagcggggagcccgttttattccagaagccctatccgccagaaggaaacccacaggcgttttaccttggtcaactaacgaaacgtggcctcttgtcacgcaactccttcccggcacatacggaataccgccttcgcaaagggcagaaattgactaaagcaattcgaggcaaagcatga

SEQ ID NO: 250294 - DNA, 1167 bp, Klebsiella pneumoniae
atggatttttggaatgatgaatatcaaaacgaattgaattcaataaaccagtggattggtgataaccttacccatagacaaaacatacctcatgatataaacaatattgatgacgaaatgtttattgacgccgtcataatttatacttgggattacttcgttgaccagtttaataattccaggaatttattcaatgcttatactcaattcaatcaacattatttaaaagaacgagccatcccaagattagatgaacttaaatcgaataaacttcactttttaagtaacttagttagagtggtttacgagtattatttttggactcaaaaatcatctatgccgccactctttgtaaacacaaaaattcttgaaagattagataaattatcaccttactctgatcctaacgcccaatttatctggattgaacgctcaatgcctgccgcactaacgatgagcatgctatcatcagataaatttgaaacattaagagcaattgctaataatgttagcgattatgaagaaaagttctcccaacagataaataatggcactcagaaagctaatgataaaattcaacaaatctcagaaaacctggcgggcttaatatctcaagccagtaactcacaaaaagatataagcaattatgttcaaaaattgagtgactataaaagcgaatataacttcgttttgttaagtaaggcattttcacgcctattaaccaaaaaaaggaaagaatatataattaataacttagtagttgtcttttttactactttattggtttttattccgctgatggctttaataaatcatattacagtttggtatccagtagagttcaacctgagcgcatttgcttactatttaccaatagtatcactagaattattaatgttttacttcatgcgcctttattatatcgaaggaaaatccattaaagcacagatacttcaaatagaccaacgccttagtctgtgtgaatttatacatgattatgttgagactaaaaagaactctggagctgaaaaggaatcttggtcgctgtttgagaagttgattttcagcccaatacaggttacttctgaaaacataccgtctctactggatggtgcatcatctattgcggagttagctggaaaagtattgtccaaagattctaaataa

SEQ ID NO: 250295 - DNA, 966 bp, Klebsiella pneumoniae
atgtcagaagataaattcctttcggactacagcccccgtgatgtagtttgggatacccagcgcacgcttaccgattctgtcgggggtatctaccagactgctgctgaattcgagcgctatgcactccgtatggcctcctgtagcggtttgttacgttttggttggtctaccatcatggaaaccggagaaacgcgcctacggcttcgtagtgcgcaattttgccgtgtccgtcattgccctgtctgccagtggagaagaaccctcatgtggcaagcccgtttttatcaggctctaccgaaaatcgttgtggattacccgtcttcccgatggttgtttctgacgttaactgtcaggaactgcgagataggtgaacttggaacagtccttacagcaatgaatgcggcgtttaagcgaatggaaaagcgaaaggagctatcacctgttcaggggtggatcagggctacggaggtgacgcgaggtaaggatggcagcgcacatccgcattttcactgtctgctgatggtgcaaccttcttggtttaaagggaagaactacgttaagcacgaacgttgggtagaactctggcgcgattgcttgcgggtgaactatgagccgaatatcgatattcgggcagtaaaaactaagacaggtgaggttgtggccaacgttgccgagcaactgcaaagcgcggttgctgaaacgctgaaatactccgttaaaccggaagatatggcaaacgatcctgagtggtttcttgagctgacgcggcagcttcacaagcgccgttttatctcgaccggtggggcgctaaaaaacgtcctccagttggatcgagaaaccaatgaggatcttgtcattgccgacgatgtaggggatggcactgatgacgggaagcggacggcgtttgtctgggattcaggtaaacggcgttacaaacgcgcccctgagaaggataaatcggattaa

SEQ ID NO: 250296 - DNA, 267 bp, Klebsiella pneumoniae; identical to SEQ ID NO: 7253

SEQ ID NO: 250297 - DNA, 1077 bp, Klebsiella pneumoniae
atgtcagaggataggaattacacttcactcaacttagatcgtagctgtatcgctgaaactacaaatcaattttgtgaagcaaattcattacaagtcagagagatatcagacaggccaggaggaccgggcaatagaattctcataggcagggctggtattgaagacgccaccctcgatatctatttcaatactgatggaacttcgacgctaacctggaagctagggaggaaccgcctcttagggcaacagttagcagacatgctgtatgaaacgataaatcctgctgaatttcagtctgttaatatgacgttgataggaattgcacgggaagatattcaaacaattattgacttactcgaaaacgatgaaagcagagcatttaatgtagtatcagatgaacgcgcgtccagtatcacatggcggcttcagtgtcctgagcacaatgattctcttgtggtaactcatcacacttccagaaggctgcaaatccagggtcgtccgcttacatgttacagaaagcttgtttacctattgacagacatccttgatttagctgggttagagctggttttaagccgttcagaacaaaattcctcagtagttgtcagacgggaagtagcggcagaatttcttaaaaaaatgctcccaaactcctttgagaacttgcctggttttactcgcgacttgttagtttctgggcaatgtgtcaaactttcctgcccatctttgcctgagtattcgatgttactgtttcctgaattacgttcgctcgaaggggcattgaaggcgaagctaggcgattttggttttgattcggatggtaacgattttggttacttttttgatttcgacccccaatcaagaaattatgcacttaaagcatcttttcacggtcatataactaacgttcaactaagatctgttttgagcgaagcttacatgttcttccagaagcatcgacactctcttttccacatgaacagtgcagaagaaagcagtcgaaaaattactggcattcaacagcttttgactctttctgaatcggcctatgaacacatagacaatctatacaaataa

SEQ ID NO: 250298 - DNA, 1614 bp, Klebsiella pneumoniae
atggaaaacattgacgttattctgggaacagatcatttagaagatatcgcatcagcaaaaccaatccctgcactgaaagaggtgatatggaatgcctttgattctaaatcattgatagtgaaggtcgattttcttcgtaacccaattactgatactattgaaaaaataattgttaaagatgaaggtaatgggattcctttcaataaagtaagcgagctttttgggagccttggggaatcatggaaaaaagaagctaagaaaaaaggtgaccactctttgcacggacaatatggcagagggagatttaaaaccttttcattaggtgaggttgtcgtatggtcaacaacttcagatactccaaatgggaaagtaaaatattcgataaaagggaatgtaaatactattaaaagatttgaaataagtgatgccgaacctttaattgataaaaataaaggaacgatggttgaggtttttaacctagctaaaggtgtggacgcactcgctaatgaatcatctaaacaggcaattaccaaagaatatgcactttatctgactgagtaccctgataaaaaattattttatgataatgatttaattagtccttctgatgtttggcttgataagcgtgattataatttaggtgacattgaaatcgagggtaagcccgagtgcgttgtcgtctcgataatagagtggaattttaaaacaactcgagaaattcattattgtgatgaaaatggattctcttttttcagcgaaccacctggtaatgctttccgtgcctacggagttgattacacggtttacgtaaaatcttcatatataaagaggaagtatgaagaaggtattctttcaattggcgatatgaatactggcattagggaattgaaagaagtaattattgatttatgtaggaagcattttgtaaataaagagtttatacaaaaatcaaaaattgttgaggaatggaagagtcaaaatatttacccatatgatacagtacctcaaccgggttcagttgaagaggcagaacaaaaagtttttgatatccttgctgtaaatgttgagagctatttatctccttttagtaaggcaaacactaaagttaagagatttacctttaaactattatctcaagctttaaaggataacccacattcagtaagaaaaattctctcagaagttttagttttgagttctgacgatcaagatgcaatggcagaattgctggaacgaacaacgcttcctaacattattaaagcatcacaagtagtatctgacaggctgaattttctgaccggattagagcaattgcttcacgatgatgtcacgcgtaaaaaactccttgaaagagaccagttgcacaaaattctagaaagtgaagcatggatttttagggaggattttaacttatcaaggagtgaaaatacgcttaatcaagtgttgagttatcattcatcattattgggtgtagacaatgattcagatttgcctgtattgcgtgtagatggtactaccgggcgcatagatatgctgttgagtaaagcaagaaaaccccgagcgagtgaattggagcacttagttgtagaattaaaaaggcctacaaaaaaatag

SEQ ID NO: 250299 - DNA, 213 bp, Klebsiella pneumoniae
atgccctacgccgtgcgcatgagcaacacccaccagcggctgatcatgaggattttgaccagacgccgccgtttgatgatgggttctgacatccgagccagatggtcagaagtgatttacctgtgctcaggtgaaaaagagcgcgcaggcaatactttactgtcacgccagaaggatactgggcgctgctttctggctaagtggagcggatga

SEQ ID NO: 250300 - DNA, 189 bp, Klebsiella pneumoniae
atgaaaatactaactttatttgcaagtaaagtgtacgggtatcttgatttaaatatttcatttaatgaggatataacattccttatcggtggtaatggctcgggaaaaacaactgttcttaggttgttacaagcaattataaacccgaatattaaagacattataacgttgccatttgaaaaaaattag

SEQ ID NO: 250301 - DNA, 1011 bp, Klebsiella pneumoniae
atgctaaacagcaaggatgatgaagatgaaatataccaaaaaatagagagggataatttctcaaatgaaatttacctgagactaaaaaaactagacaaaccaatctttcttggtctggatagaaaaactgattatcatgaaaataatgaatacatacctccaaatgaaatattttatcgtcgcagggtcaattcaccgaaacgaagagtttatgggacacttggtgaagcgttgattagcactgaaatgttaattcaagatacctatagaagaattagagattttgaagaaaatcaagggttttatctcagagataaaattctgaaatcttcttttaaatttactgattttaatcttgaaacatttgataattccagcatgaactggagagaaagacaaaatataataaaaaggaaagaggagattaaagcagccatacataaaataggaaaggtagacgattcattaattaaagagatggattcttttttcaaaagaatagaaactctttttgaagaacttaaagaatctgatggtaaaggttttaatataaactggcttgtaaacaaagcacaaatagatcgtgttgctgatattttagatgtaatagatagttctaatagcagggttagcaaactttacggcccaatcataacattccaaactatcgtaaataaatttttatccgaaactaataaacacattgaaataaatacagttggtcgagtagaagtaataaggcctgatggtaaaagatgcttaatagatagcctatcgtctggtgaacgacaattaataatcatgacagccaatgtattattcaataaaaaaactgggcgttccagtataataattattgatgagcctgaattatctctccatatgaaatggcaagaaatgttttcagaagaaatattaggcattagcccaagaacacaatttataatggcaactcactccccagaaattgttggcgatctagaagataaagggataagggtaggtcgataa

SEQ ID NO: 250302 - DNA, 846 bp, Klebsiella pneumoniae
atgttgagaagaagcgctaaggcaaaaaaagctaaatctatcttctttgaagattataatgatattgacatttatactgaagatacagcaaatggatataagaaattatattcaaaattattaaaccgatattttgaagatgattatagaatagaaaatattttccctttaggtggaagagatgctgttattgaagcctgtaagagagacgaaaacaaacgttcaagaccacgtgtttatattgtagacggcgatctttatctgttaagaaactgcaatcctgacttaccaggacttttcatcctacgtgagtattgcattgaaaatacattagtttgtgagaatgcctccatcgattttttagtagatgaagaaccgactaaagaatatgaagacataaaggtcgaactagaatttcaagaatggataaatcataatgaagcagtactaattgatctttttatatgttacgccatttccatggagatgacacccgaactgccaactgtaagtttaaaagtcaatgattatttgaatgacgacactggttttgtagatgctagtaaagtttattctaaactatccatgagaagggcggaaataatatccagggtgggtaaggatgtatatgaaaaccggttaaatgaattaagccaattcattagtaaaagtgagaaaaaacacccctttatttctggaaaagactatttacttcctcttctccaaatgaggatgagaaaagtcataaaatatactgcgtcagcgatgtcatttaggcacagactctcaaaaacttgtaggctagaaatattcgatggcttaaaagaaaaagtgctgaatgattaa

SEQ ID NO: 250303 - DNA, 504 bp, Klebsiella pneumoniae
atgattattgttgctgttatcgcagtgctggttctttatgcgtactggtatgcctgccgcgcatctgctttggatgaaaaagagaagctttctaaagtcacgatagattattttaacgatgatcgagctccaagcaaaatgaaggatatggcttatttttcatatctgtgtgctggtaggtggtggtttttctcttctgtatgcatactcgttccgtttgttttgttgttcacaaaagataaccaggttgaaagcgctaataagtcgatcgacaaaggtgaaaacgttaactttcaagatgttatgaatttaatcgtatctgtaaatatgaaacgccatcctttaacatccatttttttcgctgccattgctcttcttcttgcaacggctgcaattttcataaggatgatttttggtggaattaaaaaaataccccgctttagttccagcatcctttacgctattgtcttcatgcatacgattcgaaaaaaagcgcacaactaa

SEQ ID NO: 250304 - DNA, 246 bp, Klebsiella pneumoniae
atgagcaattcactgcaaattctatgtatcaaagatacagaggggtactggactgagggtgaaatgtatccggcccgcgtagttgctggtggatttgtccaggtaggcgacgatgacgatcccagtggcgaaggctggagcgctatgcctatcgaataccgggatgacggctcgatcgtttatgaattggggggtattgaaggtgtggttcagtttgaggaaagtgcagcatgcgcaaatcattaa

SEQ ID NO: 250305 - DNA, 624 bp, Klebsiella pneumoniae
gtggcaatactccaccagtcgatcgaagaacaatttgaagtttctgcgccaggtcgtttcagtaacgcccagcgctttgaatacctccgtgtctttcaatcgcgggtatccacgcccgctgcaacgaggacattgcttaaaaacgggaagcccctgcagctcagattttttcttatccagaacctcgccacgtccacggcagcggcattcgttctttatgttccccttcccattgcacgctttgcagattacccttacctgctcacgaacaactttcacctcttcccagtccgatggcgatatcccctttgtgaccttgacccactttgggggctttccgtccggataggtcaccttgttggtaaatacctcagtgttaatgaacccggatcctccgcaactactgcatgtcaccttgctggccgcgctcagcgagtaatcacggaaaacgtattctgccagaacacgcaaaaacgctcgccgtttctcttcttccatagcctgaagaggcctgtttcgtctggcccgcttcgtggccagttcggtgatgaaggcgatgatattatcaggcgacagaacgccggctttcgccaggtagagttcaatacctatcgccgattttga

SEQ ID NO: 250306 - DNA, 213 bp, Klebsiella pneumoniae
atgttcagccgcctccctagcatcggggccacctccaattgcatcataaacaacattgatagaaagctcatacggtataccttcatcaaggtcgttaaatctttcttcacccaaatcaaaaaaaactccaatcaaatgctctgcgtttttggcgataatgtccgcaacttctttttcgaaaataaattttttattatcatcgtaagcccgtaa

SEQ ID NO: 250307 - DNA, 810 bp, Klebsiella pneumoniae
atgagcaagccatttctgaaatgggctggtggaaagtatacccagctggctgacctgttcgtgcatatcccggcagggaaacgcctgatagagccattcgttggtggtggggcggtattcctgaacagcgataagcacgcagattacctgctggcggacattaacccggacctgattaatctgtatcagatgttagcggtggtgccggatgaagtggaattaaaggcccgctggatgtttgagcacatgcggtcaccagatggctatgagctgatccgttccgagttcaacgctcagacgctggatgctacagaacgcgcagctgcattcctgtatctcaaccggcattgtttcaatggcctgatgcgctacaaccaggcgaacaagttcaatgtgggctggggaggctacaaggcaccgtattacccgatggatgagatgaaagccttcgcggctatggcgcataactgcgtcttcatgactgctgactatcgccgaactatcagcctggccgggaaaggggatgtggtttactgcgatccgccttacgaaccgatgccgggaacaaccggattcaccgcctacgccgctggtggttttagctgggagaaccaggtagacctggcgacgcaatgcgtatcagcctttcaccgtggggctcgggtagtgatttctaactcatctgcaccgaaggttctcgacctgtaccgtgagcatggttttaacctgcaattcatcaaagcgcgccgttcgatttcctgcaaaagcagtacgcgggaagtcgcaaaagatgtcgtggctatcctgtga

SEQ ID NO: 250308 - DNA, 513 bp, Klebsiella pneumoniae
gtgaatatgaccgatataaagccagtcattgccattgtagttttggctggctcctttatcgctggttcagtctggagcgatcaggcatgggaaaagaaatgggcggagcgagacagtgcagaggtgactcaggaagtgaacgcgcagaccgcagcccggatgattgaacaggggcgtattatcgcccgcgatgaggccgtaaaaaatgctcaagcccaaattactgcagcgcgcactgctgccgctaatctctctggcactgttaaccaactgcgtcagcaggcaaaaaaacttgccacccgcctggacgccgcaagccacaccgcaagtcttgcctctaccgtcagaagcaaaacaaccgacgccaccgccggagtgctcgccgacatgcttggaagccttgcagaagaagctcgacggtatgctgcaatcgctgacgaacgctacatagcaggaatgacctgtgagcggatttacgaatcggtgcgaacgcctatcccctctaagggataa

SEQ ID NO: 250309 - DNA, 204 bp, Klebsiella pneumoniae
atgaaatacagtttagattccgttggcagtattaagagagcagcacatgatcatgaacttcatgtctttttggtcggagatgacggctcacagcacaactttattattaaagtgaaaggccgagagataagcagtcttacactcaaggacattgaagcaatggcaatagagcacgcgcgtcaaagctttgctaattgcaattaa

SEQ ID NO: 250310 - DNA, 819 bp, Klebsiella pneumoniae
atgtctggcgaaacaatgactgtcaccgcatctgtccctcctgttggcaacctgtcatatggtgggggcatgtttagtccaaccatttctggtccatctgaagggcaaatttttctacaagttactcttccttattatcagtctgaaaaattttgtgcggatcagttgaactggcttgttcaatatattaaaaaacatggagcctcagaccccatgacgattcaggtcgcggctaataatattcgttacctctgtaatgctgataccaatctggtaaaaaacccgaaaactcttgtttatgacgcttttcatagtcgctctccagctccagctaattatgattatcgttcgatgaaccttaagcaaatgagtggtagtgtggtaacgccgggagcagcgtttgcacattatctttggggtaatggtgaaacccgatttgttaatttacctgatgtaggtttaaaagttacaccacaacaaattcctgagctaatgaaactggtaaacagtggtgtcactggcgcgatccctgtttctgttaaattcagtagggatacatcaacggatagcattaccgctggtgcttaccttgggcatattacacttcagacagaaggtaccctgaatgtcacgggtaatggtgcatggacttacaatggtgtgatcagagcgtatgacgacacatatgacttcaatcttggaaacttccgcggaccgatagctgagtctttgactttcttgggcagtacattctctggtaagccataccagatttcactgcccggtcagattaacatttctggttcaggaaaacgctaa

SEQ ID NO: 250311 - DNA, 507 bp, Klebsiella pneumoniae
atgttgcgatctttaacttttagctttttgtgtttctgctgtatcagtgaagcatcagcaaatgttaacgttttaattgctcctaagtctacgtcgtatgaaacaaacacatcaactgagattaaaaaataccttagtgaactagaacatggaaagataaataatctcaactcaaacccagaagacgtaaatcatgctattaattcttaccttaataaggttcaaaaaaaagcatctttattttttaaccatgatgaacttgaaagatacaatgggacagtttgtaaaatatcaatcactactggaaacacaccatcatcgtcacctattataactcaagtatttaccatcgaccagttagctgacaatgataaagaaccctgtcggaaaataaataaaaacctaagttcaattgtcactcacgataatcaattccaatatccaagaatagtaaaagactatggtgatctgtctattgacatgatatttaacatcaacaacaaataa

SEQ ID NO: 250312 - DNA, 753 bp, Klebsiella pneumoniae
atgagcattgaagattcaaaccaaggtccaggatggcatgaccatgatactccttatggtaccatccatagttatgatggcgatgaccatacttataatgaaggagggagcggtggtgcagcaggaaatcaacacactgggttaacagctaatacatgggtcgacatctcttccactaaagattataacggtagatatatgtcaatgtgtgttaacaacctgaaggatcacgaaggctccatcaatacaatgtatcgtgacagtgaaggtaacattaccgttggcattgggcattttttaggttcagctgcaatggctcaagctttaccattcaataaaacaaaagttgtccgtttgcacggcgatgatatggaaagtgaaatcgctgtatcaaaagctgatatagcttctgcatttaattattttaaagaaaaccccaaagcaattcctagtattcatctttcaaatgctgatgtcattggtttgtgtatcaaagatgttcaaacaactgaaacagggttgcgtggactttaccctaattatgatagtttctccgacccacggaaaactgcactggtagatatgggttttaaccttggagtacctaaactgaaatcgaaatttcccaagtttaatgctgccgtaaaccgtggcgactgggagactgctgcggttgagtctcatcgagatttgaagcaaaggggtgatagtcgaaacaaagatacagctaaccagttgcgatacaatcgttag

SEQ ID NO: 250313 - DNA, 858 bp, Klebsiella pneumoniae
atgaaaaaatacaaaagcaccggagtaacaggaagagcaggtgagctatattttgcttattggatagttcgctattttaattggccttgccgattgcttgatattgatgttggcatagatgctcaagttgaaatttttgaagatgaaatatcaactggggacttttttgcggttcaaattaaatcaacggttggaaacacccctgatatacagatcgatctatctgactttatgtactggcaacagttggaaactcaagttgttttggtctccatcgtaatggcggatagccataatgatcctgagatgttctggaagccattttcaaaacaatgtctggatgaaatagttcaagaaataacctcaaaaggataccagtccaaaaaagtcaccttcacagattcagataaattatgtgttgaatccaaaaattcctggaggatggcaatgctttcagaatccgacaaagatctgataaggctcgccaaatcattattagatgatttagaacaacatgacttagatgattttgtagaggaagactattacctccaagatgaacacaaggactatataacttttaatagcgaaattgacatattcaaccatcatttcatcgattatgaaaagctgaaagatgctgtatctcatgatagaaggctggtgctaagagctccccttatagaagaagctatcgattactttgagaataacgaggcgatattactttatatgttcaatcatgcttttaattggattaagggcgaccgaactccaaatgaaatattgccccaaacattgagtcgtgaaattagacggcagacaaaagattgggtttatcacatgacgggttattaa

SEQ ID NO: 250314 - DNA, 1083 bp, Klebsiella pneumoniae
atgagcagaaattatagatacactatcctgataaggatttcctctagtacaaataaccaagttggagattttaacgtagagtatccatatgctaacaactcaaacttaaaagatgagattttaataaaagagaaattaatcaagattgtagcgcacaggagtaaaaagacttcaatagcggatattattcacaatgccaatacggcaatgaaccatcagatattaaaatctctggcattttactatgcgtccgtaggtgaaccaaataaaatcaccagcataaaaatcagtaggcatttgagtggtaaaatacaagaatctgaaaccatttcaaaatcagatgttcgccaaattgccacatcagacaatggatttaattatttaaaacaaattaatgaaatagagttaaaaactatttttgaagagtcagataaagggcgctctttgctatatgcagtaactcaccttattagttcatgctcatcacctgaaccattccaacagtttgaagccctatggaaatgcttcaattcaatttataagcttaaagaaaattctaccaaagattcggaatgtcttcgaagtttgcgtgttcacatgttagcaaacgtttctaactatcctttatctactggatatgttaactcaatgacccatgatgatatattctccattgttaattggcgaaatatgatactaaatgactttaagattgagtctcagagtggatttttatgtggcttcattggtcgtatttctgatgctaggttaattaaaaaaattgaagattcactaccaattcgccgagatttcctaagcaatacagggcacttacaaactgtacttaatcacattcagcagatgaaaaatataaactcaaataatgatattgaagtggttgcatttatgtgtctcaaatatctttattatgcaagaaataaactcattcatgcagaacgtgtacatcctagttttcattgggtaagagaactctctgatgaagagataaaaattagtaggtgcaatataattttgaagttattaattatcgacattttaaactttaatacaagtttccaataa

SEQ ID NO: 250315 - DNA, 2034 bp, Klebsiella pneumoniae
atggctgagattttcctgtttaagccaaaggctacgctgacagcagcagaaaaccttgaagcattcatatcccagtgccgagatcaattgactgtattcggctctgatctcacttgggaagatcctgtttggccaaacataactgtatttgccaagttgggcattattacgagaaaacccatactggaagagacgcaagaccctgctttcattgattttgccaaagcctatttccgttaccagcaggggcatagcctctctagggcaaagaatgaaagtaaagccctccgtgcggttgaggcggctttgcttcaagtaaacggaaacgcaaatattgatggcctgtcgatttctgtgctggatgaagcagctgaattggcaaagcattactactccgatggcgccgcatatcattgtggccgtgagattgagcggctggctaagtttgtagctgaaaaccagcttgtatcaagtgctgtacaaaattgggtcaatccaattaaacgtgcagaggataagaacaaaacgagcagaaaggcgaagaaaaatagggaagataaacttccgagtgatattgctcttaatgcgttggcggaaatttttgccaacgacccaattcatgtgcgggacatatttacaacatcggtttttgccatgttgatgtcggcaccttcacgtattactgaggtgttagcactgcctgtggattgcgaggtttttgaaacggatcgtgaagggatagaacgatatggttggcgtttttttgcggggaaaggctatgagggtgatatcaaatggatacccaccgtgatggtcggtatagctaagacagccgtagctagagctagagtgctctctgaaaatgcacgacaactggccaagtggatcgagaaacacccgaataagttttaccgccatgctaactgtcccagtgtagccgatgatgagccattgacgatgaagcaggcttgtatggcgctcggttttgcacattactctaaaaagacgtgcaggtcgtgtcttggtaatcgaggtttagctaaagaggatggtgtacatactctaaatagcctgtggcagcacacaatggcgcgtttaccggatggctttccgtggtttgataaagacaagggaattaggtacagcaatgccttgtttgtactgaacgtaaatcagttccacgggaacagaggatgcataccagttgagttacataagccaaccaataatttcttcaacagtgatctgacgcctcgtctgtccttgaaaggaaaacatgccagtatctttgatcgccatggttaccatgctgtaaacggagagccggtgaaattaacctcacatcaggctcgacacctgctcaacaccattatccagcgcggtggcctgtcaaacttggaaattgccaagtggtcagggcgagcagatgtgaaacagaatcgaacttacaaccacatgactgaatacgaactggttggcattgctgaacgccttgatcccacaacagcgctatttgggcctgctggcgaggtggcaaagcatctgcccgtgactatgcaggagttcaataccttagagcatgccgcagtccatgtgacggagtatggctactgtgtgcatgattacaccatgagtccttgtgagaaattccgagattgtgtcaattgtaccgaacaggtttgcattaaaggcgatgatgctgaaaagttggatcgcattaagatacgtctggagaagttagagcgactgttttttcttgctgacgcagcagtggaaagtggtgagataggaactgatcgctggtatcagtaccacaagaaaactgttacccggcttcgtgaactagtggctattttagagaatccagacattgaaaatggtgtccagattaagctccggggcaatgatttcagccagcttcgccgtgttgtcgcaaagacgtctattgtggccatcgagcaaaaaggcaaagaaagtgaagaagctatgatgttagatgatttgacaactttgttaggaggtggccttggctaa

SEQ ID NO: 250316 - DNA, 1533 bp, Klebsiella pneumoniae
atgaataacctcttacttgggttagtaccagaacgaatccgtgccagggccaatggctactcttttctgttgtatgacagatcgtggacattggatagaaatatcactattaatcttgctgatattcaccattacttgtcagatgggacgctagatggctgcctgcgtacactggcgttttatgcatccaatcgttcttcttctcatacaaaaaatattcttgaacggtttcagcacatgctgcgtgagactgacgcgagagaaattactgatacggtattgattaattatcggtcgatgctgtcgcctgcaacagaatggtatctagcaaccatccgtggctttcttcgatcctggcacgaactgggctatcccggcatcagtaaggaggtgaaccgcttgctagatggctggacgctaaagggtaatcgtaagggggatgcggttaagcgcatggatcctcaagaggggccactgacggataatgagctgacagcgtttaacgagggggctgttcgggcttatgaaaagaacttaattactatagccgagttggctatggcacttggcaccagtcatacaggacgtcgtcccattcagatctcgctgcttcgtgtggtcgatgtcctttgtggtaaaaatgaaaagggagagcccttctatgtgttgaatgtgccgcgagccaagcagcgcagcagctctttccgaataaacttcaaaccatttgcaatatcactggaactatgggcaatcctgagtgctcaggcaagaaatgcgattgcgcaggttgaaaatcgtttggggtttgaattgcaggaagatgaccggcagcaaatccctctttttcctgatcttgatgtgttagatgccgtccaatctccttatgaattccgccaactgcttgctaccgacaaactccacattcccgccgcagagataaccgacaccctccaatacatcgtagaaaagtccgacatccggtcggaacgtaccggtgagctattacatatcaatgctcgtcgttttcgttataccacaggcacacgagctgcccgggaaggctttggcgagctggtgattgcggaactgcttgaccacgcggacacccaaaacgcaggcgtttacatcaagaatatccccgagcatgtgaaaaagcttgatgaggcggttggcttccaattagcaccatacgctcaggcctttgtcggggcacttgtcgattcagagagagacgcgcatcgaggtaacgaccctaccagtcgtattcggaccgaaatgggtcagggtgttggtacttgtggagaacatggcttttgtggtgccaatgttcctattccttgctacacctgcatgcatttccagccttggctggacggcccacatgaagatgtctatcaaggactgctcaacgaacgtgaacgggtgaaagagataactggcgacatccagattgctgccgtacttgatcgcagtattatcgcgctggcagatgtgatcatgcgttgtgcaaaacgtcgtgaagagcttagttaa

SEQ ID NO: 250317 - DNA, 1248 bp, Klebsiella pneumoniae
atggaaaagaactacagagttacaacatttgtcatggatagtggcgagcgctattgcatggtagtggatcgtgcttctgggcttcccatgtattaccccactctgtttctaacaactcaaatccgcaatagagaggatgctttttcaacgatgttggcggcggctaacaacctggttatgttgttacgctttgtagagagtcgcgacattgaccttgagcagcggtttttgaccaaagacttcttcaagccacatgagctggatgatctgcgagattttgctcagtgcaaacaaagaaaggggccattaactgtgtcctctacctcttggttggcagatgcgatgaccgatatcgttgataacgggacacagcattcccggctaacaacgtttgccaactatttacactggtatgcgatgcatatcttaaagacgacagaactggaagttgtcgaaaagatcaatgctatggcggcgcagataaagacgcgccgaccatctaaaaagcgcagaaaccacgacttacaagacaggtcattgagtgatgttcaattggacgcgctatttgaagtcatccagcctagatcagagttaaaccctttctcaatagatgtgcagcgccgcaatcggctgatgatcttgcttctgttttatcttggcatccgaggtggtgaattattaaatataagaatacaggacatagattttagcgctaacaggatccgtatcgttaggagagcagatgaacaagctgactctagaaccaatgagcctaatgctaaaactagagaacggctcttaccgttggctgaatccttagctcaagaactgcatagttatattcttcaagatcgccggaaagtcagaaatgcgaagaaaaatgactatctgtttgtaacttacaagagtggaccaactctgggaaatcctatctccaaagggggatatcataaaattttttccgtagtcaggtctatatcaccgcaattgtatgcagcgacaggacattcgctccgccacacttggaatcgcaagttttcagaaagaatggatgccatgaatgagcaagtcagcgaggaacgccaagagcaacttcgttcgtacttaatgggctggagagatggctcgggaaccgcagcgacttacaacaagcgtttcattcggcaaaaaggttttgaggccgctttggcattacaagcaggtaacggcactagcttgccagaggatttcaaggatgaccatgaataa

SEQ ID NO: 250318 - DNA, 546 bp, Klebsiella pneumoniae
atggccgtatttatacggacctatgcctgggtcgcctcatgccaccagccgcccaactcccgcgaccgctcggttgacctttcatcaagcagcctcgtctatacggcaacctccccgttccccgaaccgtttcggtatacagccgttcccgtttcccgaccgaaggctgtacctggccgttccccgttttgccgcggccaaaggcaaccgagcaacgtttcgcaccgtagggagtttgcgcggcgccaacgtttttgcagggctgggaaattacagcttgaatttctacgaaaacggaagcgcgacttttttttcataccctacttacacaaacgcctaaacgcccaaacctcttccccctataacgccttaatcccaataccccagaactctcttaacgctaccttcccaaactgtccctttcctgttcccaaactgttctgggtatcttcccaaatttcttctgaccttctctatcgttcctatggtgagtgtgtatccgggagtgttcttctctacgggatttccttctatcgcttcctgtga

SEQ ID NO: 250319 - DNA, 258 bp, Klebsiella pneumoniae
atgaataaatcgtggatcgacaaaaacctgattgccgtaccgattgaggaagtctccacacccaaaaccggccgcgtggctcgcgtcgattactggtggctagtgaaagatggccaagtcttcaaaacgaagtacagcaatgccttccagtgcaacaaagaccgtcgagtcgtcgacaagatttatgaggaagcaatccgcgaccacggcttttcagcggtcaatatctcaattgcttacatcgagcagaggttttga

SEQ ID NO: 250320 - DNA, 840 bp, Klebsiella pneumoniae
atggcgagatttttacaatcagatgaatcgcccctggctggcggcggcaactattttgaaaacgatgaaattatcattcgtccagccacgctgggcctgctcgatttcagcaatgatgtttgttattccggcggcacaccgattccggcttattcgaacctgctgaatctggtgtatggcgggaccaacgccaccaacggccctaacgcccggacactcgaaaccggcatgctgaagttcgacggcactgaacccaacatcaatgattatgtgctgttgccaacagatgagttttcattacctgccggctgtaagcgtgcgctggtcagcgttgcgttaaaacttcccgcatcgggttatggaacgccggcggctacacgttacccgatgttctttggccggatgaataacacggctgcggcaaacgttaatttcggagtgtgggggattgtcagtactgacggtgtgctcacgtctgtgcagggcgctgcgctgggtagtgttgctatctcagctaccgcgcagctggcattgctcacgaacggaaacgtacatgttgtttccgtatatgctgatggtgaaacgacccctggtacgctgatcaccaaaatttacgtggataatattttggtagctactgcgacaaacaatgcatgggatggtgtggtgccccagccgaccaacctaccgcgcatcggtagctatccggcaaccattcacagtccgtggggcgggatgaaagtaggtcgccctatgctggtaaatctcaccgggacaacaactgttgcaactgatttgatctcccaggcggtaacgttagctaacgagtatctcgtttaa

SEQ ID NO: 250321 - DNA, 756 bp, Klebsiella pneumoniae
atgggtcagagacaaattattaaaggtgtggacggttctgctattgccatcggattttcgccggcggtaccaacagggggccagtttattaatttttatggtggcagcgtcccacaaggtcgtaatctggcaccgggaggcggagctgcacgtgttgtgggtagtccggtagtgggtagtatggcggaaggcctgctttgtcagtcgcacaccgattatattcagagcccggcggcactgtcttccaaaatgaccgtaataggggtgttttgcccgaccacggacagcagggcatatgcgatctctaatgccagcaccttacgtcctatcgggttttcggtatattcggaaccttcagctacaacgggagtacaaaacctgcgggtgcagatgggcgggaaacaaagcagcgatggagcaaatgctgtcgcaacagcagccgtagcagcagcgatcacaaataatgttccaatggcctttgctgctactgtagattattcgaaccttgccgaaacaaaggtcatggtcatgagtcttaaggcggggacaaagaataacgctgtatcgtcattcacccaggctggttccggactgccaaacctgttaataggctctgaaatggatgctgttacttatgcaggtactcgcgtactggcgatgggggtatggaatcgtattttgactgacaatgaaatagcctcccaatacgaacaatttaaatcctattatcatgacattcatggagtacagatttaa

SEQ ID NO: 250322 - DNA, 2175 bp, Klebsiella pneumoniae
atggcctttgatccgcctcttgggagcacgtcgcccgcggtgctgctcgataacgccactcgcctggataatttgctgaatagtctggcgctggtcttccctgaccgctccggggctgatctggatacctggcgaggtatcatgtcgcgggtttcgaatacactggaggatatccggcaaaatctgatccctctcagccggcagtacatgaccctggcagcagcccaggcggatatcgcgaacattccggtgggctcgaccacgtattaccgcagcccggacgataacgctctcgctatcgaggtcataaataacgccggaacgctggagccaaccgggcgaaaaatgccttcacaggaggcaataaacgaactacaaaaatacgtttctgaattaatcagcaatgatccgtccatcagcgcattcgttcagtgggaggcaattggagggtttattctggggcaactctcaaaagattcgctgaaaactgcaggtttcgaagtcggtgccaaacgtctttcaatggatagcatggaaacgcttgccatagatgagcctgaattggttttacaggatcagcatgggtttgttattcaacgacaaacatccgagtatctggaaaatagcgcgggtaaattcatcccggcagataataacgattacgttattgaagatgagcatggattccatattttttcagcaatgcaatcttgctctccgacctctacggaagacaagactgccgcgcgtgatgcatatattgcaaaaatggataatctggcgcttgcggtcagttctgcggtgaacaacacgctggttaccggcattcagaggcccgtatttgatttcaacctggttattacatacggacagtcgttatcgaccgggacggaaggatgggcggcgctgtcaaatgaagcatttgaggctgaaaacgttctgatgtttggtgacgccgttcgccccacaacagaccgggacacaggcgggagtgtttggagtcccgtaggtggtgcagcacttaaacccctccgggctgttacacaggcgattggcggcggcagtattctgactgctgcagaagaagcagtactcactcccggcgccacaaacgaaggcgaaacatttgacgtgggggctgtgaatttctggcgcagattacagaacgattttcgtgggttaagcgttaaccctgaacggaaaatcattgtccttaactgtggtgttcaggggcggactgttgagcaattatcgaaagggaatccattaaatcattacaaccgtgttattcaagccgtaacaaaggtaaaagcctatatcgcaagtcagtatccgactgcaagtgttggcattaccgcgtttctttacgctcaaggggaatggaattactgggcagccagttcagggacgcatgatcgagcgactttcctcgaactgacaaaacaacttcgcaccgatctgattactgattgcgcctatggtatttgtgggcaaaccctaccgcccgcctgggtgacttatcagaccggggccggatataccgtagacacacaagatttagccattgggatggctcaaattgatatgatagatacggtccctggttgcttcatggctacaccagtttatcagtttactgataaaaacggtcatcttgacccgaatggttatcgatgggccgggatgcagtttggaaaagtgctgcaccgtattctcgaccggggtatagactggaaaccgatgaagccgatcaaagccgttcgttattcagacgatgaggttcttctcagttttttaactccgtctccacccgctcagtttaaagaaacctacgtggtcaatacggccacaatctatcccaataaaggttttcttgcgaaagatgatcttggagttgtggacctcttatccgtagcaatagtaggccagtgctgcctgtccataaaacttagccgacagacttccggcgatgtgtatatctggtatgcgccagggacaacttatcgcgggaacggaaacctgtgtgacagtgatacaactgtttcgccatataactatgaatatcgcgcaggtagtggtcagtatccatcggcaaatattgctgcattggttgataaaccctatccactgaataactggtgctgtgcgttcagaattaaagttgaggaaaaatag

SEQ ID NO: 250323 - DNA, 732 bp, Klebsiella pneumoniae
atgccagtctcaatcctagagacagcggaagagatattagttaaaagctctgatttaacttttgtcacctctcctactttattggaaagcagaaaaaaatggagtgataacgtttactatcattctaacgtagcagatttcgaacatttttcaaaagcttgcagtcaagatttaattgtacctgatgatatattatgtttacgtaagcctgtattagggtttatcggtgctatcagtagttataaggtagattttgaattattaaattatattgctaaatcctgccctaatttatcgatagctttaattggtgatataggcgaaggagatccttcgactaatacgagtttgataaatcaagtagaaaatatacatatattaggtgcaaggccttacgagttattacctaattatctaaaaggtatggatattgctctacttcctaataacataaatgaatatacagcatcgatgtttccaatgaagttctttgagtatctcgcagcagggaaaaacgtggttagtgtcgatttggcttcaattcaagagttttccgattatttaaaaattgcacactcaaaagaggactttgtcaataagattcaagaaattcttgctggcgatggtttctctgtacaacatttgcacaaattagcaagcgaatacacgtataaatcacgaacagataagatgtttgaattaattaatactcatttaaaaaagacaaattaa

SEQ ID NO: 250324 - DNA, 198 bp, Klebsiella pneumoniae
gtggagtatttcaataccaaacttgagaacgtcaaggtggtgaaagtgaatcccctgatgcacgacatcaaaaaccccgcctacgagaagcacaaccatctggaacagatagagctgcgctacgagaagatcacctggacctataaagacggcaacatcattcactccgatagctggaacgaacgcgccaccgcgtaa

SEQ ID NO: 250325 - DNA, 1035 bp, Klebsiella pneumoniae; identical to SEQ ID NO: 104125

SEQ ID NO: 250326 - DNA, 990 bp, Klebsiella pneumoniae
atgatgattaaatatgtaatggatgctccatctagggaaccgactcgaaacaaaaaagggtcagtgaaagttaagagaaatacgagatatatagataaacttttggcaatccaggagtgtagtgctctggaagccaatgaaattggttttattgctcggttcttaattcaagcaaccctaccacacagcaatccaggattgaatgagtggtgccgtaaaaatggtaatttaaccatgcatatgatggcaccatcagcagtaggtttgcctttcggttgctatgctcgattgctattagtttgggttagttctcaagcagttagaaataagtcaaaactggataaaggatttattacagaacaggaagcacgtaagcttgaattgggtcgctcccaacggcgtttcatggaagacttaggtcttcgctcaaccggtggaaaaaatggttctataaatccatttcgagaacagatgcggcgattatttaaaactacggtcagtgttacgtttgcagagttaaatgaggacagtggatatgtttgtgaggatgaaatgggagccagagtagcggatgtatcccatattttgtggagtgcaaaacaaccagagaaagattttctatgggagtcttgggttgagttgtcacctaaattttttcaactgataacagataaacctgtcccattggatatgagagtattgcgtttgattaagcgctctccgatggccttggatatatattgctgggcgacgtatcgtgtgagttatttaaagcgaggcacaattatcccttggctaggtttgatggagcaaatgggttcaaattattccgatgtcagagactttaggagacggtttaacgatgggcttgaaaaggtacagcgggcatggccagggctagacgctacaccgaccgacaaaggacttcttataaaaccaggtgctcctcaagtacctcgaaggaaaaaatacagaactgagggatattga

SEQ ID NO: 250327 - DNA, 423 bp, Klebsiella pneumoniae
atgtccaagacttccgattcacggttacgcaatgagggctttcgtaaagcagaggcttccctgagacttgaaggaagggaccccagtggtacgccactgtacgagtccattaaggcacgtattatttcaggtgagctgacgtatgagcaggggcgttcagagattcttgcatactacacaaaagcagataccgccgggccagtgacagtgggagaaattctgacagaagaatttttgaaaccgctgaacatgtctaatgatgaactggcggaagctatgggtatttgccgacaggatattgaagatatcatctacggtcggcgtcgtcttagggatgatgaggctcgcgttcttgctgctatatttggtactgatgaagacttctggagcaatcttgagacgttacaagattgtcaggaataa

SEQ ID NO: 250328 - DNA, 576 bp, Klebsiella pneumoniae
gtgccgacgtcgggcgttgtgctgtttgggattgcgctggtgtttaccttcaatgcgctagtgtccattatgcagtttgtcgccgatgaagatactttgcagggcctggtgttctggacgatgggcagcctggctcgcgcatcatgggagaaactggcggtgctggcggcggcgatggcgattgttttaccctggtcgctgcgtcgtgcctggcagcttaccgcgctacgcctcggcgaagagcgggcgatgagttttggcattgatgttcgccgtttgcgcctgggttccctgctgcgcatcagcctgctggcggccctttcggttgcgtttgtggggccaattggctttattggcctggttgcaccgcatatttcccgcctgttgctgggagaagatcatcgcttttatttgcccggaagcatccttatcggtgggctggtgctatcgctggcgtcggtagcgtcgaagaacatcattcccggtgtcattttaccggtaggaattgttacctcgctggtaggcgttccgttctttctgagcattgtaatgcgtcatcgaggtagtatgtcatga

SEQ ID NO: 250329 - DNA, 768 bp, Klebsiella pneumoniae
atgagcgggcttacgattaatgcgctgtgcgccggttacggcaaacggcggattattgagcatctgtcgatttctacgctgccgcgtggcgaagtcaccgtactgctggggcctaatggctgcggtaaatcaacgctgctgcgcgccctggccgggctaaatcgcgccagtggcgaagcctggctgaatgaagagaatctcttatcgctgccgtttgctcgtcgggctgaaaaagttgtgttcctgccgcagtccctgccgcagggcgtgcatttacaggtgctggagtcggtggttgtcgcccagcgcgcctccggcgccgggcaaaatcaggcgcaggctatagcgctgctcgaagagctaggcatcgcacatctggcaatgaactacctcgatagcctgtccggcggtcagaagcagctggtggggcttgcacagtcgcttattcgccgccccgcattattattgctggatgaaccactgagcgcgctggatctcaattatcagttccatgtgatggatgttgtatcgcgcgaaacgcgaagacgcaatatggttacgctggtcgtcttacacgatatcaatatcgcactgcggcatgccgcccaggtcatcatgctgaaaggggggaaacttatcgacagcggcgacccgcaaacggtgatccatgcagagagccttgcgcaggtatacggcgtacgcgggagagttgaacgttgtgctcagggaagatcgatggtgatagtggatggtgcaatcgaaaaatag

SEQ ID NO: 250330 - DNA, 159 bp, Klebsiella pneumoniae
atgttgcctagaacggtgacaagctgtccggtgcgaaatcattccggcagcgacaggctcatgtgtcagcccgacgcccagaccgtcaacgagcatgtggatctgcgaggcgttatcgttcgcagcgatgttaaaacgaacaatctgctcatcttctaa

SEQ ID NO: 250331 - DNA, 186 bp, Klebsiella pneumoniae
atgtcaaaccaattaaccgttatagacgggtatgcggaaagagaggcgactaacgataacaatgccgaaaatctcaacatttcttatatatgtggcaatgtagtggatttttttgtaaactttcaagaaaaagaaacaataaattcatttgataaaatactaaagaaagaaataatacttgattag

SEQ ID NO: 250332 - DNA, 900 bp, Klebsiella pneumoniae
ttgaataacgcagtactcgaacttttcaacgaccgcttaccgcacaagccgtacttctcggatgatttacactttggtgtacgcattgcagggaaagaacgcgccattctggcgaaatacatccagttcaaccagccgcacgccatgttctggctgggattcgacgtcgatcgcaccggtgcggccatcgactggagcgaccggaacgcgcctgcgcccacgctgaccatcaccaacccggaaaacggacacgcgcacctgctgtacgcgctggaaaccccggtacgcaccgctcctgatggaaaaatgaagccgctgcgctacgccgccgccgtggagaacgcgctacgcaaaaaattagaggctgacacggggtattcggggttaatctgcaaaaatccgaaccacggccactggaaaattgccgtatggcagccggaactctacacgctggactggctggctgactttctcgacctgaacgcggcgaacgacaaagaaatcgttgccgactacggcttaggccgtaactgcaccctgttcgacaaaacccgcaagtgggcataccgtgccatccgtcagggctggcctgagtatgaacagtggctgcaagcctgctatgaacgtgccagcgcctataacctgcaattcgcatcgcctctggatgaaaatgaggttataggcatagcaaagagtatttcaaaatggacgagccgaaatttatctaaaacgagttttgaggaatttgtagaaaaaactcatactccaaaaatacagtctaaaagagggatgaaaagtaaaggaggtggacgaccatcgttgggtgagccatggaaggatttaggtattagcagaaggaagtatttctatttaaaaaagaagggggacaccccttcttag

SEQ ID NO: 250333 - DNA, 510 bp, Klebsiella pneumoniae
atgaccaaacgtaaatacacctttgaacaacgccttgaagtggttatgcactatttcgctaccgatgatggttatcggatcacatctgcccgctttaatgtacccagaacccaggtaagaatgtgggttgcagcctatgatgcttacggggaagaaggactaagacccagagataaaggcgtttcaattgatccggagatcagaattgaagcagttaatgcggtgctttcagggcaaatatcccggtgtcaggcggcaaccaaatacaagcttgctggttcagcctccatcagcagatggatagatgtatttgataaacatggggaggaagggctcagatcgctgcgtgttggcaaaaaaaggacccctgagatgttagatgatcctcttgctgttgaagctgcacgggaacaatccaaagacaaacgtatccaggagctggaaagaaaggtcaggtttcttgagttacgggtactgtatctacaaaagctgaaagcctcagttcggtaa

SEQ ID NO: 250334 - DNA, 951 bp, Klebsiella pneumoniae
atgttacgtattcctgactcagactggcaggttgtcgatgaacagccccaaatttcagttcgatttctacgaaaagtgacaccgcaggcgaaaagattcacgcaatggatgcaacggacacacggcaggctgctaggggcccccaaaaatgtcctgacgtactgcacttccgggctcattaatggtcatttccctgacataaatggctggttttacgctggtgatgccctcgctttactcacatatagcgtacacagcagtgataatgtgcctttgatcgaggcgattgaacaacataccggtttaaaactgccggttccggcttttgagagcaaacttgaaggtcagtttggaaagcaactgcgtgatgcactggactacctcgggaaacattctccttatgcgacctactacgagatcgagaagcaaaagcgaattggtaactaccgtgtggactttttcgttacggaaaagtttgacgcacctgacggctcgactaacaaacgccacagcgttgttgaatttgacgaggaagctcacaaactgccgcgatacaggaaagctgacaaacagagagataactggtttcgtaaaaatcatccagaaatcaagttaatccgggtccggcatgaggagcaggatacatggttagaggccattcagaccttaaatcagattatccggctggaagatggctatgctcactgcctgcggaaagcgtgtactgctcgtccaggtcctgagatacggataaacagcgtatctgtgcgaaatgcttatgatgcagagcaaaacatgtgtagctttctgctgaaacgccctgcacagcctctccgcgaaatggaaaacctgcttgtacggcttggtataccttatgagaaaccgcgtgatatccgcttccagcgggcgtatctcagagcgtacgggattaagacgggcaggttacagtaa

SEQ ID NO: 250335 - DNA, 183 bp, Klebsiella pneumoniae
atgataactatagaatcctatataagtgtcttgaggtggggtttcaaaggttacaacgtttggattgaagaaaaccccaagctgcggggctttctttgtaacttttactgtaacctgcccgtcttaatcccgtacgctctgagatacgcccgctggaagcggatatcacgcggtttctcataa

SEQ ID NO: 250336 - DNA, 213 bp, Klebsiella pneumoniae
atgagccggcgtggcaactgctgggataatgcggtggccgaatcgttcttcagttcgctgaaaaaagaacggatcagaaaacgcatatataaaaccagggatctggcccgggcggatatcttcgattacattgaagtcttctataaccggtcccggcgccacagccacctcggcggcgtcagtccggaggccttcgaacaggcctcgtcgtga

SEQ ID NO: 250337 - DNA, 276 bp, Klebsiella pneumoniae
atggcgaaatgtagttgttgtgataaggtactgaaccgcgggatttggactcttgatggcaaacataaaagctgcccgctgtgttcagctacgcatggtgtacagcatatcttccgacgttatcctgaagattttggcactactgatgcccgtgtcacggcgtcaaatcctgatggtgctcagagctattgtattgactgtcgcggagttgatacaggacaatcatctccggtcgatctcaccaagcagagattgtgtaatacagtgaaaacttaa

SEQ ID NO: 250338 - DNA, 672 bp, Klebsiella pneumoniae
atgattttaaatcaattagatgcagtcgagtggttgaagacactcccttctgggagtgttgatctgtttgtcacagaccctccgtatgaatccttagaaaaacatagaaaaatcggtacaacaacacggctaaaagtaagtaaatcttcgagcaatgaatggtttgcaatctttccaaacagtagatttggagagcttctgactgaaatgtaccgagttttgaaaaataatcgacatttgtacattttctgtgatcaggagacaatgtttcatttgaagccagttgccgaagaggttgggtttaagttctggaagccaatcgtttggaacaagatggccatcggtatgggttatcattaccgtgccaagtacgaatttgtcctgtttttcgagaaagggaagagaaaactcaataacttaggcatacccgatatcttggaagccaagagagtcatgcgtggttatccgactgaaaaaccagttgatctcattaagattttgatcgagcaaagtaccattcagggtgagtctgtatgtgaccctttctttgggtctggttctgccctgattgccgcttctgagctagatcgtacttttatggggaatgatatctcttcatcagcacatgattattttaaacaaaggctgcatgacaaggttcctagtaactga

SEQ ID NO: 250339 - DNA, 753 bp, Klebsiella pneumoniae
atgaggctcagcgtctggcggctgatgcgcatttatcagggcgcatcactgatgctggcactggagcgcaggcgttttggctaccgccgcatctggcagttactgcgccgtgaaggccttcatgttaatcacaagcgtgtgtaccgcctttatcatctgagcgggctgggcgtaaaacgcaggcgacgtcgtaaagggctggctacagaacgtctgccgctgctccgcccggcggcacccaacctgacctggtcgatggattttgtcatggacgcgctggccaccggtcgcaggatcaagtgcctgacctgtgtggacgacttcacgaaggagtgtctgacaatgaccatcgcattcgggatttcaggcgttcaggtcacgcgtattctggacagcattgcactgttccgaggctatccggcgatgataagaactgaccaggggccggagttcacctgccgcgcactggaacaatgggcctttgagcatggtgttgagttgcgcttaatccagccgggcaagccaacgcagaacggatttattgagagctttaacggacgatttcgcgatgaatgtctgaatgagcattggttcagcgatatcgttcacgccaggaaagtcattaatggctggcggcaggattataacgagtgtcgtccacattcagcactgaagtatcagacgccatcagagtttgcagcacggtggcgaaatggaaaatgtgaaggtaaacaaaccgaccttactaactga

SEQ ID NO: 250340 - DNA, 546 bp, Klebsiella pneumoniae
ttgcaaaaaggtgattactctgttggtgtgacctggcaacaggcaaaagactattgtcagtggttaggtaaggagtctggtaaaaaatttgatttaccaacagaggcgcaatgggaatatgcagcaagatccagagggcaatacattccgtttgcaacgaataatggtgagttcctgcccggtaaaaacatccccagccaggatgagctgagtgaatatactgatggagcaggtattcctatttatccagtggggaaatatcccccaaaccccctgggtctgtatgatatgggacttagtggctcagaatggaccaatgactggtatgcgtcagattattactctcattctccggtaaacgatccccagggacctgcgcagggtactaaaaaagtcctgcgtggatatattggcggcgacagacagtacgctttaaccatgttcaggcaatcaaaattgccagttccgaagatcgataaagacgatgactatgaaaaatatggtgttggcccgcagtatgtctttcgttgtgtcgttaataaataa

SEQ ID NO: 250341 - DNA, 705 bp, Klebsiella pneumoniae; identical to SEQ ID NO: 248688

SEQ ID NO: 250342 - DNA, 612 bp, Klebsiella pneumoniae; identical to SEQ ID NO: 180566

SEQ ID NO: 250343 - DNA, 402 bp, Klebsiella pneumoniae; identical to SEQ ID NO: 200123

SEQ ID NO: 250344 - DNA, 318 bp, Klebsiella pneumoniae; identical to SEQ ID NO: 180577

SEQ ID NO: 250345 - DNA, 1260 bp, Klebsiella pneumoniae; identical to SEQ ID NO: 200116

SEQ ID NO: 250346 - DNA, 903 bp, Klebsiella pneumoniae
atggcaaagggcaccacctcgacgccgcatgatgcggtgtttaaacagttcctcactcaggccgacaccgcgcgcgattttctggcgatccatctaacgcctgcgctgcgtcagcgctgcgacctcgataccttacagctggaatcggcaagctttatcgaggagagcctgcgggcctggtactccgatgtgctgtggtcactcaaaaccgcgtctggcgagggctacatttatgtggttatcgaacatcagagctcgccggatgcgcagatggccttccgcctgatgcgctacgccatcgccgcgatgcagcgccatcttgatggcggtcatacaaaactgccgctggtggtgccgatgctgttctatcacggagcgaccacgccatacccgtggtcactcaactggctggactgttttgccgatccacagctggcgagtgagctttatatctcgccctttccgctggtggatgtcacggtgatccccgacgatgagatcgttcgccaccggcgcgtggcattactcgagctgatacagaagcatattcgccagcgcgatttaatgggcattgttgagcaactgacgacgattttacttagcggggacgctaatgacagacagctaaaaacgctgtttaattatctgctgcagactggcaacgcgcgccgctttggccggtttatccacgaagtggcgcaacgggttcctcagcacagggagagattgatgactattgctgaaagattacaggaagtgggccgcagaaaaggcaagcgtgaaggacagcatgccgaggcgctgcgcattgcccagaggatgctggccgacggcattgcccgcgagacggtggtgaaaatcaccggcctgaccgccgacgagatcgccgcgctggcgcattga

SEQ ID NO: 250347 - DNA, 576 bp, Klebsiella pneumoniae
atgcttaagcatatggaaaaactcgctgaactgaaacgcgccaaactgctggcgctgtcgctgctgctgattgcagccgccatttttatcactaccctcgcgctaccaccgtcgccttgggtcggtgcgctaaaagctatttccgaagcggcgatggtcggggcgctggccgactggtttgcggtcgtggctctgtttcgccgtattccgctgccctttgtcgcccgccatacggcgattattccgcgcaataaagaccgcatcgccgacaacctcggccgctttgtcgaggaaaagttccttgataccccgtcgctggtcgcgctgatccgccgctatcagccagccctgatgctcggcaactggttcagccagccggagaacgcccgacgcgtcggccagcacctgctgcaggtgatgagcggttttctcgaactgaccgatgacgcgcgcattcaacgtctgctgcgacgcgcggtgcataaggctatcgataaggtcgacctgacgcagaccagcgccatgatgctggagggactgacccgcgacaatcgccatcaaaagctgctcgattag

SEQ ID NO: 250348 - DNA, 378 bp, Klebsiella pneumoniae; identical to SEQ ID NO: 180564

SEQ ID NO: 250349 - DNA, 1923 bp, Klebsiella pneumoniae
atgcgtaaggtgaagattggtgagctaatcaattcgcttgtgaacgaggttgaggcaatcgacgcctcggatcgtccacaaggcgaaaaaacaaagaaaattaaagccgcagctataaaatataagaatgcattatttaatgataaaagaaagtttcgcggaaaaagcttagaaaaaaggatttcggctaatactttcaatgcctatatgagccgggcaaggaaaagatttgatgataaattacatcataactttgaaaaaaacgtaataaaattatccgaaaagtatcccttatacagtgaggaattatcctcatggctttctatgcctgcggcatcaattcgacaaaatatgtcagccctgcaaaccaagctaaaagaaataatgccattggcagaagatttatcaaatataaaaatcggtgcgaaaaatagcgatacaaagttagccaaacttgccaataaatatccagaatggcaatttgctattagtgatttaaacagtgatgattggaaggaaaagcgagattatctttataaactcttccagcaaggctcttcgcttctggaagatttaaataatctgaaagtaaaccatgaggtcctctatcacttgcagcttagctctgcagagcgaacctccatccagcagcgctgggccaacatactcagcgagaaaaagcgcaacgtggttgtgattgactatccgcgctatatgcaggctatctacgatataatcaataaacccatatcttcgtttgatttaaccacccgtcgtggtatggcccctctagcgttcgcgcttgcggcgctatctggtcgacgaatgattgaaatcatgcttcagggtgaattttccgtcgcaggtaaatatacagtaacattcttagggcaagctaaaaaacgctcagaagataaaggtgtatcaagaaaaatatatactctttgcgacgctgatttatttgtgagtctggttaaccaacttcgctcctgccctgctgctgcggattttgatgaagtggttaaagggtatggggaaaatgatactcgctctgaaaatggtcgtattaacgctattctagcgacagcgtttaatccgtgggtaaaaaaattcttaggcgatgaccgccgcgtttataaagatagccgcgctatttacgcccgcattgcctatgaaatgtttttccgcgttgacccacggtggaagaatgtcgatgaggacgttttcttcatggagattctcggtcatgacgatgaaaacacccagctgcactataagcagtttaaactggcaaacttctccagaacctggcgtccacatgttggcgaggaaaatacccggctggcagcgctgcaaaagctggatagcatgatgccagatttcgccaaaggcgacgccggggttcgtattcatgaaaccgtgaagcagctggtggagcaggacccatcgataaagatcacaaacagtaccctgcgaccatttaacttcagtaccaggctgattcctcgctacctggagtttgccgccgatgcattgggccagttcgtcggtgaaaatgggcagtggcaactgaaggacgaggcgcctgcaatagtcctgcctgatgaagaaattcttgagcccatcgacgatgccgatctcgatgacggagaccaggaagatgaaacgctggatgacgatgagatcgaagtagacgaaagcgaaggagaggaactggaggaagtggacggcgctgaagaggccgaggaggctgagcaggaagagaaacatcctgccaagccaaactttaaagcgccgagggataatggcgatggtacctacatggtggagtttgaattcgatggccgtcattacgcctggtctggtgccgccggtaatcgggtagaggcaatgcaatctgcctggagtgcctacttcaagtga

SEQ ID NO: 250350 - DNA, 801 bp, Klebsiella pneumoniae
atgaacgcactctctgttttctcgtttcaggaaaaccaccccgtgcgggtggttctggttaatggcgaaccgtggtttgtagcggttgatgtatgtaaggcattaggactaacgaatccgacgaagtcagtatctgcactcgatgaagacgaaaagcagctttttagcggtgactctaactttaagttagggtcagcaggaaaaggggcgcagtcattgataattttgaatgagtccggcctatacacactgatcctccgctgccgcgatgcggtgaagcagggaacgacggcctggcggttccgcaagtgggtcaccaacgaggttctgccagctattcggaaaagcggtgaatacagctacgtcgaacccgcgccaaaaagcgccggtgaaccattggactggcggcaaaaggaagaattacgcggcctgataaacgatatagcccaaagttttcggtaccacaacgcatggaaaagtggtgtatggctggcgctacgtcgcgcctgcaggaatccatcccccaatccgattacggttgacgatctcccggccatcactgccgagttgcgccggatattaacgtcggcagaaaccgcgctggacaatatgcggacctacgagcgggaatttttgcgtgaggtggttcgtggggcgcgtcggagtgtgtcgcgagaggaattatcaatcatcgaccttggctcagaggtggagaaggtgctgccagcgcatttcgagctggccatcaataaactggaggccttatccacaaaattagaggctcctgccgtctcttcctga

SEQ ID NO: 250351 - DNA, 231 bp, Klebsiella pneumoniae; identical to SEQ ID NO: 206970

SEQ ID NO: 250352 - DNA, 1134 bp, Klebsiella pneumoniae; identical to SEQ ID NO: 206966

SEQ ID NO: 250353 - DNA, 330 bp, Klebsiella pneumoniae
atgacgtcaacacctgagtttttgaacaagctggactacagacagcttcagttctgccgtgatgagtgcgaggccagaatcaaggccatagaggaagaagagaaaaaggtagcctgggcggttactgatggccaaattaattatggttggtatcgaacagaggactacctgaaagctgtcgagtgtttagcacgtgaagcagaagagcgctggaaagaagaagataaaagcaaccctgagccgcgcaattggttgaatttttctatcaggggccagcgcctgccggtgtctgagtatgaagcgttatttgccgatggccagtgggggtga

SEQ ID NO: 250354 - DNA, 3975 bp, Klebsiella pneumoniae
atgaccttacaagaattctatgcggctcgcttcggtagcgatccgtattcattgcttgaagcagcgcgggatgagctgtcagagctggccacaatggctggcattaactggacagcatgcgctgataacattcagttgaacccgcgcggcggggaagaacgttattcaaaatataacggtggcgcccccgaggctctggaaaagagcctcaaagggcgtgtggaaatctactcccgcaaggaacaacacaaaagcggcatcagctacccattcgtcaactttgtccagaaagggcatgacgaaggttcctggagcggcttctccttcctgttcgccgaataccgccgtgaacaacaaagaaatcatgcgaccgtggtcgcacaacctgctgaagaactggcgcgtattgaacgccaggctgaagcccgcaagcgccgcgccgaacaacaacggataaatgaacttaaaaacaatcagttagagcaagaacggttgctcggatggttggcgttccacagtgcatgggaacatgcgccagctgaggacgggtcgtggccttacgcagtgaaaaaaggcattcgtgacgtattcagcgcttgcgatattcgtcgcgtgaccagtcacgacaacgcaaaatggagccgtggaccgactacatacatggcgattccgctggcccacctggacggacgcaaagacggacaaattgtcggctggcagcgtatcgaccagcgcggcggtaaattccagaccagcgcgatcaccagcggtgatttcgtcggggcgtgctttgttatcggcaacctgaacggcgcgcaaaatattgcagtggtggaaggtttcgccaccggcgcgtccgtatggctggctacccgtaaggacccgaaaaaaagctttgatgctgtcgtggtcgcagtggccgcaaacaacatgacccatgttgttgagcagctggtgaatatgtacccggcagcaaaaattacctgcgccctggataacgaccgcaaatcatcggctgaaggtaaaggcaacacaggcctgcgcaccggatacgacatcatggagaagttttccggcgtcaaatgtgtttacccaacttttgaggatgaccctgagcaggaatgcagcgattttaacgacctgcacagcttgagagggctgaaggaagtcgctcgccagttaacgagaaataatctgagccgtgcaaccgacctgttgtcgattacgctgaataaactgcgtactctcccgcggctgaacagacgtacttttgccaaagagctgcttcgcgccgtcgatattggcatgctgacatgcccggtaccaaacagcccgaaagaacttatgcgcctgttcagcagcacgctgcgagatatggggatcgcagaaatttataacggtaccgttaaagatcacattacgcgccggttgaatcgcaaatgccgtgccgcgcaaacatcacgttcgttcagtgaacgcatcaccaacccgaaccttcgcccgtcacacatcacttacaaacggtttgaaacctccaggatgactgatgaggttatgacatacgccgcacagctgcagggcatcgttattgtccgcgccgggatgggctctggtaaatcgacaggtctcctgcgtccactgatgctgcagtccacgcgtggcgtttccgtcgcgcaccgcgtatcccttataggcggcctgcatgaaatgatgaccgaagggaaaggcgctaaagccgacattctgcattatcaggatcccggctatcaggaaatggcgccatatgccaacaagctgactatttgcatcaactccatacttaaaggctgctggcaaccgctgatgcgccagcatgacttcttcggcttcgatgaagcaacacagggcctgcgtgccattctggccgggcgtgcgatggaaaacccggtaggcgtattcaacacgcttatcgacgcgctagcgcgtactgaagagcatgccattatggtggatgccgacgccaacgatctgcttgtcgaccttgctgaactggcgatgaagcgacgcgaggagctgggcctacctgcctggctgcaaattcacgtgattgaactcccggtcgacgttcgcaaccgcgaaaccaacaagcctatccgcgtattttataccgagaaaaatcggatcatgaccgaggtcatcgctgcagtgcaacgcggcgaacgaatcatgctggccaccgacagttcgacgttcgccgaagacgttaccatgcagctgagactccatttccctgacaaaaagtttctctgcgttaaccagaaaaacaaacaggagaaggaagtcgacgatttcaccaaccagcctaaagtgatggtgaaaaaatatgacggcctcatctacagcccgtcgatatcttcaggtgtatcgattgaggagaaacacttccaccgccatttcggcatgttctgcggcgaagtggtccccagcgacgccatccagatgctgcgccgcgaccgtacagctcaggaatacatcatcggtttcgacaagcttcgcggtaaacgtgaaaccgatccggaaaaaatcaaacgcgcctacgcgcaggccttgctcgaaacggctggccactccgggctgctgacagacgttgtctttgacggtgaccgaatttcactcggtgtggctaactcttcattcatgcagctcaaaattaaagccgccgcgctcgaggcgtcggccagaaatgattatgccagcaacatgatttgcatcatgcatgatgatggctatcaggtcgcgcctatggctaccgacgcgcttgcaaacagcatcggtaaggatttacgtaaagaagcccgtgagctggtctttgagcagcttatggaacgccacctgagtgtcgatacccctgaccaaggcgaacacgatgagttgataaaaaaacgcaccctgtctctggatgagcaggcccagctggtccgctgggacatcgaaaaggagctgcagctggatgtcgacgaggaggcgttaaaattctatttcgacggcggcctgaaaaaagtgcgtctgtttgaaaccatgcagctggatgagataaccgcgcgtcgccttgaccgcgaggaagcgttgatccactttacctacgcttatcgcgtcgccggtcgctggcagcaatttgtcacaacagctatgacacgagaacaggccgacgaggagttccacgctaaattcccggccataaccgattaccgcgtcaaatctacaccagcggttgaaataggcatgcgtggtttttacactctcaaatcagcaacgctgcgacagtacttccgcgactgtggtattgatccagaaacactgaccggtgaggccgacatggacgccctcaaacgcgccagggataacctgctaaccccggaacggcgcgatctgctgaacaacgttttgcgcataggtggcttcaacacagagaagggcaaaaagaaagcccctgaagaactatgcaaaggcatcctggagtctatggggttatccagtaagaccagacgcgccagagatggtgatgctcgacctacaatgcgttctatcgactcacagtcggtcgagttcctcatgaatattgtggagaagcgccgcgaagcagggttatcaattcatgcccgcaaggtcgaaaaaaccaccatcgaagtggatcgcgatctggatctaaatatagatatacatggtaaccctcgatccaaaacaagccacattccggacaccccgcaatcagtaattattcaggcactggaggctatcccggtgacggtgccggaagcgtgggcggagaacgcgttgccagcaaccgaaatggaggcggtacgcctgtggccagtggccagcatcgcgagaacgttcgcctcgctgtacatgaccgaatttatggacctgctatcagtacgcgagataaggctgctgaaagcttttctgagccagcggcaagccgtggcgatataa

SEQ ID NO: 250355 - DNA, 738 bp, Klebsiella pneumoniae; identical to SEQ ID NO: 206978

SEQ ID NO: 250356 - DNA, 609 bp, Klebsiella pneumoniae; identical to SEQ ID NO: 199849

SEQ ID NO: 250357 - DNA, 477 bp, Klebsiella pneumoniae; identical to SEQ ID NO: 206981

SEQ ID NO: 250358 - DNA, 246 bp, Klebsiella pneumoniae; identical to SEQ ID NO: 180600

SEQ ID NO: 250359 - DNA, 327 bp, Klebsiella pneumoniae
gtggctaaaacccctgcagaacggcaacggcagcgccgtgaacgtttaaagcagtccggcaccaccagacgcgattgggtacttgagccggaggaactgcgcatgctgggcgaaatttgcatccagcgccgcccaggcagaacgccgtattcagaaaatgaagtaatcggcctgttaatccgtaagaactacaaagagcttcagaagagcctggcgaacacatgtcagcgatgtggccaggcgctgccggtgtctgaatgcatcttcgacggcgaaaattcatgcttactgacgactgtcagactaaagctggccattaaggcgtga

SEQ ID NO: 250360 - DNA, 288 bp, Klebsiella pneumoniae
atgaaagtaaaaggcatcccatttaaccaggtcaaagaaagtctgctcaacaccccggaggcaatccggggttaccaggaagcagataaagagctggcactggtcgaaatgctgtacgagatgcgtgaaaaggctgggttaagcaaatctgccctggcggagcggatggggatcacgccatctgctattagccgcctcgaggggaacccgttgggggccagcatgaagacactgagcaaatacgcacaagcgtgcggcgctgaaattaacatccaggccgtatactga

SEQ ID NO: 250361 - DNA, 309 bp, Klebsiella pneumoniae; identical to SEQ ID NO: 200100

SEQ ID NO: 250362 - DNA, 240 bp, Klebsiella pneumoniae
atgaattttgaggatattgtgaactatcaaggcaacgaaaaaatgagacaggacgcggctgagatttctaacgaactgtatgaactctggcaaaaagtgaagcgtttccagcgtgagtacagcttcaacagcgagaacattacagacagactggcgggccgactgattggaacaatggaacccaaactggccgaccttaacagctttatggccgatgtcgattaccagtttgaagattaa

SEQ ID NO: 250363 - DNA, 231 bp, Klebsiella pneumoniae; identical to SEQ ID NO: 200102

SEQ ID NO: 250364 - DNA, 1062 bp, Klebsiella pneumoniae
atgaaaaacactgtgaaaataaacagtgctgaacttgtgcatgcagattcacttgagtacatcaaaaccctgccggacaacagcttagacgccatcatcaccgacccaccgtattaccgcgtaaaggcaaatgcctgggataaccaatggcccagcgtaacggattatttggcctggctggatgagtttttcgccgagttctggcgagtgcttaagccagcagggtcgttatatgtgttctgcgggccgaaattatcatcggacactgagctgttgttacgtgaccgtttcaacgtgctgaaccatatcgtttgggccaaacccagcgggcgctggaatggcgcgcgtaaagaaggtttccgatcttattttccggccagtgagcatattttcttcgcagagcattacggcgcggaaggctttgctaaaggccaggctgggtatgcgacaaagtgccaggagttgaaaggccaggtcttcgaaccgcttatcgcttatttccgggatgctcgccagcgacttggtatttccgctgccgaaatcaacgcggcaaccggcacgaaaatgtgtagccactggtttagcgccagccaatggcaattgcccaatgaacggcagtacctggcgctgcaggcgctgtttaaccgtaaggccgcagagcagggaataacgggattgtcagagccgcatgcggcgctgcaggaggaatacggcactttaacggcgctatattccgaactggttatgcagtattccgaactgcgacagcagtatgagaatttgcggcgccctttccatgtgacaaaagatgttccacacaccaacgtgtggacgtatccaccggttccgtactatccgggcaaacacccatgcgaaaaaccgctgcagatgatgctcgacatcatttcggcttgtacgcgccctggcgatgtgatcgccgacttttttatggggtcgggtgcaacgataaaagccgcgctgcagttaggacgcggagccatcggcgtagagctggaagaggagcgatttttacagacggtctccgagatagaaaaacaataa

SEQ ID NO: 250365 - DNA, 312 bp, Klebsiella pneumoniae
atgaacacagctatcgaatatggaaatcctgatctctggctggtcttgctcatgctggccgccggggtggtatcaagcgccctgctttccgaaacccctatcaacccgcgccgcctcatcggagacgctctgagaggcgtaatcgtggccatcatcctctgggcttacggcgctatgggcaacatctcaattttgaacgtaatcactctcgccggtttatcggctgtggcatggccacacaccgtcaacgaaatcaccggctttgcaaaacgaactatcagccgaattttcggcgggagaaaagaacgatga

SEQ ID NO: 250366 - DNA, 1077 bp, Klebsiella pneumoniae; identical to SEQ ID NO: 199874

SEQ ID NO: 250367 - DNA, 1710 bp, Klebsiella pneumoniae
atggccgcatatccaaacgtcagtgtggcgaataaatatgcgcgggatattgtagacgggaaaatagtcgcctgtaggtttatccggctggcatgtcagcgccattttgacgatctaaaaaaatcactcgaaaaaaattacccctataaatttgaccgggatttagctgaacgggcatgcaaatttgtccagctattgccccactcaagtggggagttagccgggcaaaaattaaaactggagccgtggcagagctttatattttgctcaatttttggctgggtcacgaaaaaggacaagaaacgccgatttcgcgaagcgtacatcagggtagcgaggaaaaacgggaaatcgttttttgctgccggagtgggcatttacacgttttgtgctgatggagagaacagcgcagaagtgtattgcggtgcgacaacgatggcgcaggcgaaaaaggtcttcaccccagccaggcagatggccagccgcctgccagcacttcgttccaggtttgatatttcggtatggaccgacagcctgactcgcccggatggttctgttttcgcgcctatggcgggtaagccaggtgacggcgatagcccacattgcgcgatcattgatgagtatcacgaacacgatacggatcacatgtatgaagcaatgacgatgggtatgggcgcccgttctcagccattaacgctcattatcacgacagcaggctcatcactcgaatctccttgctacgataaggataaagaagtcaaagaggctatcgagggcattacttgcaacgaacgcctgtttggcatgatttacgagctggacgcaggtgacgactggactgacccgaaaaacctgattaaagcgaaccctaacctggatgtttcggttaagtacagcgacctggttgagcttctggaagtagcaaaacaggttcctcgcaaggttaacgccttcaaaaccaaacgcctcaatatttgggtatccggtaaatccgcgttctacaacatggagcagtggaaagccgctgaagaccctgagctgaagctggaagactttaccagtgatagcagcaacctgggtcttgatctaggtcccaaactggatatgaccgccgcaatccgattatttacgcgggaaattgagggtaagcggcattattactgcgttaaaccaaaattctgggtgccggaagacatcctttataccagtgaccccaggtatctgaaaacagcagatcgatatcgtaaattcaaagaaatgcgcgccctggaaacaacggagggtgctgaaactgactatcgggagatttttgcctcaattatcgacatgcagagtgaaacccgcattgatgagattgatatcgatcctgccggtgcaacagcacttcgccaccagttggaggacaacggatttaccgtagtcgatataacacagaactacaccaatatgtcaccggcaatgaaagagctggaagcggctctggccggtggacgattccaccatgatggcaatcccattttgacctggtgtatcagcaacgttatcggaaaatttgcgcctggtggtgatgacagggtgtatccgacaaaaggtgacaaacaaagcaaaatcgacggggctacggcgttatttaatgctatgacccgtgctttgctgaacgagggcaacggtggcacatcggtctacgacgaggaagacatagcgtgttaa

SEQ ID NO: 250368 - DNA, 1287 bp, Klebsiella pneumoniae; identical to SEQ ID NO: 180579

SEQ ID NO: 250369 - DNA, 402 bp, Klebsiella pneumoniae; identical to SEQ ID NO: 200123

SEQ ID NO: 250370 - DNA, 366 bp, Klebsiella pneumoniae; identical to SEQ ID NO: 180572

SEQ ID NO: 250371 - DNA, 315 bp, Klebsiella pneumoniae; identical to SEQ ID NO: 220408

SEQ ID NO: 250372 - DNA, 138 bp, Klebsiella pneumoniae
atgatgtccctctgggatgcgctccggatgaatatgatgatctcatatcaggaacttgttcgcaccttccctaaggaagccaacccttttaatgagcatcaaaaatcgatcaacagaccacgccgtttaatttcttaa

SEQ ID NO: 250373 - DNA, 420 bp, Klebsiella pneumoniae
atgtctgcattgactccgtgggaccccttccgggaactggatgaattgcaaatcacggtcaccagcatccctttggcgtcctatcccgcagccgtgaaggcagtcgtgccgctgatcgatcagggcaagatcgaagaagccaaagccgcgctgcagtcagcgctcagcacgctggtcgaggagcgcagcgtgcttccgctgcccgtcctgcgtgcgaagctgctcctgaagcgcgccgagcccctggtagaagatggtcagcgcagcgaagcatccaatgagcgcctggagacattgttgaacgaagcccggcagcagttggaaatggcagaactgctgggctatggaaaaaggaaggactttgagcccctgtacgctgaactcaagaaaatcaaggaagcttgctcggcactacgctaa

SEQ ID NO: 250374 - DNA, 318 bp, Klebsiella pneumoniae; identical to SEQ ID NO: 152574

SEQ ID NO: 250375 - DNA, 597 bp, Klebsiella pneumoniae; identical to SEQ ID NO: 244918

SEQ ID NO: 250376 - DNA, 174 bp, Klebsiella pneumoniae
atgtatacccaaaagcgtataccaattcatgaagaagcggccacagtggcacggacaacacgccccctgaccaacaccgaagttctgcgcgcgaaagcgttagagaaggatctaacgctgcatgatggcgatgggcgtttcctgccctttctcttgctgatgcccgagggttaa

SEQ ID NO: 250377 - DNA, 237 bp, Klebsiella pneumoniae
atgtggccacagcagactgaccacgccttcggtcagctcaggcagatcgtcatcgagtttctcgcgcatgcggcccatcaggaaggcaaaaccttcaaacaggcgctcgacaaaggggtcgcgggcgcccgctttgtcgagattgagcattgccgcctgctcaggatgagcgcgggcaaactcttcacccgcttccagcaggtagcgcatttcagcgtcgtaataacgcaaggttaa

SEQ ID NO: 250378 - DNA, 426 bp, Klebsiella pneumoniae
gtggcacttctcgcagaccaggttgcccagaccgaccacttcgccgctgtggtacacgccgtgatgattcagatcctgaaagacttcccgccactcgagctgggttttgtcggtgatatcagccagctcctgccacaggctctctttgatcacccgcataaacacgctgtcgctctcgtcttcgtgactctcttcgtagctgcgggcaaactcctcgaggtcgcgtttgaccgccgcaatcaccgactcgatctcgctctgcgtcagatcgccggcgcggacgattttttcccgcgcctgcgtcaccagcgcgtcgatatcgcgctctccatggcggagccgttcgctgagcgaggagaccagttcacggtaatattgagcaaccttgttcatcatttcgcctccggtggggttaacgtcttctga

SEQ ID NO: 250379 - DNA, 1518 bp, Klebsiella pneumoniae
atgtatagccgagtaaactcaaatttattggaagatagactggatgcagagttctattctcttgagcagattaagaaccataaaacactacaagactatggtgtcataccattgagtgcatactgcaatgggataaacgttggctataccggagaactcacttctgtttatagagatcagggaacaacgctttatcgcgtttccgatatcaacggtatttttcttagcaatgacgatgttaattatgttccagatgattttgcagccaataactctcaaatatggattcgagataacgatatagtctttgctgcagttggaaatacaattggtaaagtagcgttgaagacagtatctatgccagatggtgtatgttcccgcgctttaatgattgcgaggcctttaacagacaagatcgactcgtcatttctaattgcttatctagcaacaaagtatgcacaaaaatcattactacgaggtatatctggctctgctcaaccagtcctgaataccccccttatcgccaatttgcctgttatcacagcagagtcattgtctcaaaaatacatcggggataaagttcgccaagccgagcaactgggcgcttgggcgaagcggcttgagcaagtatcatcatttatgtttgcgaatgctctagctgagctaggctacaaacaaaaaaaatccacaaaaatcgttagaacaaaactagaagatcgcctcgatccggcattttatgatgaaaaattcagtttttttgatgaatcttggttcaagattaattctgaacccttaaagcaatttatcgaaagcggatcttatggcgttttaccttcaagcaactcttacgggaaaggtaacgttagatttattcgtgccactgatctgaaaaatgcaaacatagatcctacatgctttacttacgtacccgaagaagaggttgccgataaggcaaaagtttctaaaggcgatattctaatggagattaaaggcgcgatctccacttgcgaactcgcagaatcccacctggctggcacctatattaatggtagtatattcaggttcacgcccaagggcattaataatgcctatttggcttatttcctttcctcgacaatcaaagaattatattgcgagcgagtttcggtcaataacatcatcagctatttggatctcgcgagcctccatgaacttcctgttattaggctcaagaatgatattgaagaattcttagcaaaaaacttaattaatattaatctggccaaaaaaattgcttttgcacttacgcgaagtgccaaaaccctagttgagtcattaatcgaaggccaactgaccgagcaacaattaatccaggcccaacaagccctggaagatggcgacaacagcttagatcaggcgattataagtaaactaagtgctgaggggtatgccattgaaggcgccacaccgctatttagcgatgtggatgagttatacagtttgctggaagatgcggcacaagctgaggctgaagagtaa

SEQ ID NO: 250380 - DNA, 1179 bp, Klebsiella pneumoniae
  misc_feature (1167)..(1176): n is a, c, g, or t
atgatcaaaataacttctgatatgacagaactacaatcaatgaatatcactgaagataatattagcaagcttaagtctctgtttcctgaagcatttagcgaaggaagcatcgattttgatgtattgaagcaacttttgggcgcaaatgtagacgagaaagaagaacgttatggactgaactggcatggtaaacgtcaagctcgtcagcttgctcttaccccatcccgaggaaccttacgcccatgtaaagatgaaagtgttgattgggataacaccaaaaacctcatgatcgagggtgataatcttgaagttttaaagcttcttcaaaaaagctacgctggaaaagttaagcttatatatattgatcctccttacaacactgggcaagattttatttattctgatgattatagagataatttaagtaaatatttaaattttaccggtcaagtaattaacggtaataaaatcagtactaatactgaaactagtggaagatttcatacgtcatggctgagcatgatgtatccaagactcaagctagcgaaaaacctattgcactctgatgggtttatttttgtttcaattgattcgcatgaagtatcaaacttaaaaataataatggatgatatttttggagaagaatgttatagaaatacaattgccgtacgcagaggcattaaaaatgtccaagcccagtttgaagatgtgagtgcattatctcagggacatgaatatatacttttatattcaaaaaacagcttatctcggcttcccaaactaagccaatctcaccttgaacaaaaaccggggaaatgggacaccttttggcgaggaacagataggccaacaatgcgttatgaattatttggtataactcccgaaaaaggccaatggcgatgggaaaaaaacagaacaactgaagccatagaaaactatcgctttttcttagaaaaaaagtctcaacagatgagtcttgatgattggttttttgataatcttacatcaacaaataaaaaattaaatttcgttcgtaagaacgatgaggatgttgttcagtattatgtcccaccaagtgatggaaaaatactaagcgataactggatggatatttctttaagcggaaatgaaactattttcgacaccgaaaaaaatactgacttgttnnnnnnnnnntag

SEQ ID NO: 250381 - DNA, 558 bp, Klebsiella pneumoniae
atgctcatccaattacccgagccaagcaataaatctgagtttatgactatctcagatttaacaaaatatcgtctaatcgaatcaggtaagaaagtaaaagatggaaaccccgactggaatggtgatgtcggttttcgtgtgtttaaactcgatacatctaacattcgtccgtgggaagcctctgccgaaacactttcacaacagcttgatgcttatgtaagcccaatccttgaaggccgtagtgaagaagatttgctgactgaactgatgcttaagcgtggtattgatctgagtgtaaacgttgaaacccgtcagtttgatgaattaactgtttcttgtgttgatggtggcaaattgtttacctgctttacccgtcaaatccctgcctcttctgttgaggtactgaccaaggggatcatcgactggcataagagtttgaaggctggcaaagatactgtctgctattttcttgatgacgcatttgaaaataacgttgctaaaacaaatctttgcgccattctggaacaacacggcctgactaacctgcacagcctgtaa

SEQ ID NO: 250382 - DNA, 183 bp, Klebsiella pneumoniae; identical to SEQ ID NO: 120260

SEQ ID NO: 250383 - DNA, 591 bp, Klebsiella pneumoniae; identical to SEQ ID NO: 81400

SEQ ID NO: 250384 - DNA, 537 bp, Klebsiella pneumoniae; identical to SEQ ID NO: 81401

SEQ ID NO: 250385 - DNA, 915 bp, Klebsiella pneumoniae; identical to SEQ ID NO: 81402

SEQ ID NO: 250386 - DNA, 216 bp, Klebsiella pneumoniae; identical to SEQ ID NO: 81403

SEQ ID NO: 250387 - DNA, 486 bp, Klebsiella pneumoniae; identical to SEQ ID NO: 81404

SEQ ID NO: 250388 - DNA, 246 bp, Klebsiella pneumoniae; identical to SEQ ID NO: 81405

SEQ ID NO: 250389 - DNA, 228 bp, Klebsiella pneumoniae
atgaacgcaatagataaagctatttctaaagcaggtactgcatcacgcttagcaggattgctagctgttagcgcgatgactgtcagtcattggcggaatcggtatcacggtgtagtaccggctgatagggttctgcaaatctatgaagttacaggcgtgacacctcacgaactacgccccgatctctaccctaataccactgacggtttacctaaacaggagccttaa

SEQ ID NO: 250390 - DNA, 1194 bp, Klebsiella pneumoniae
atgtcccttaccgacgcaaaaatccgcaccctcaagccttctgataaaccctttaaagtctccgattcccacggtctgtatctgctggtcaagccgggtggctcccgccactggtatctcaaataccgtattagcggtaaagaatcccgcattgcgctgggtgcctatccagccatctccctgtctgatgcgcgacagcaacgtgaaggtatccgtaaaatgctggcgctgaatatcaacccggtacagcagcgggctgctgaacgtggctcacgaacaccggagaaagtttttaaaaacgtggcgctggcgtggcataaaagtaacaggaaatggtcgcagaacaccgccgaccgtctgcttgccagcctgaacaatcacatctttccggtcatcgggaacctacctgtatcagaacttaaaccccgtcatttcattgacctgctgaaagggatcgaggaaaaaggtctgctggaggttgcgtcccgcacacggcagcacctgagtaacataatgcgccatgcggtccatcaggagttaatcgatacgaaccctgcagcaaaccttggcggcgtgaccacacctcctgtcagacggcactatcctgccctgccgctggagcggctgcctgaactgcttgaacgtattggggcatatcatcagggccgtgaactgacccggcatgccgttctgctgatgctgcatgtgttcattcgctccagtgaactgcgtttcgcccgctggtcagagattgatttcacaaaccgagtctggacgatacccgcgacgcgagaacccattattggcgtgcgttattccggccgcggggcaaaaatgcgaatgccgcatatcgtccccctctcagaacagtccatcgccattctgaaacagattaaggatatcaccggtaataatgaactgatcttccccggcgaccataacccgtataagccaatgtgtgaaaacacggtcaataaggcactgcgggtgatgggttacgacacgaaaaaggatatctgcggtcacggcttccgggcaatggcatgcagtgcgctgatggaatcgggtttatgggcaaaggacgcagtagaacgccagatgagtcatcaggagcgcaataccgtgcgcatggcttatattcataaggcagagcacctagaagcccgcaaagcgatgatgggctttgttgaataa

SEQ ID NO: 250391 - DNA, 624 bp, Klebsiella pneumoniae
atgtctggcgatattaaagcagtatttgatagcaatttaattgcaactcaggcgggttccgttcaggtgtttcattttgatatgacgacccgggaatttattggtgccgaagaaatttatattcatgtcggtgttggtcttcctgcattttcatgcctagaagaaccaccggtgcaaagtgaatatcaggttgccgttcgttctgacgataattcgtcctggtctgttaccgatgattatcgcggtatcaccgtctatgatattcagacgctggccagccatgttattaccgaacccgggcctatacccgatactgtaacgacttttgcaccatcaaccccatacgacaaatgggacggttctgcctggataatagatgtagatgctcagcacgcggctgaggttgccgttgctgatgtgcagaaaaaagaactgattgctcaggcatcggcgggtatttctattcttcaggatgctatgacccttggcatggcgactgatgaagaaaaatcccggctgacttctttgcaggcatatcgtgtacggcttaaccgagttgatacttctcttgcccctaatattatttggcccattgagaatctttcgggggttgataatggctag

SEQ ID NO: 250392 - DNA, 747 bp, Klebsiella pneumoniae
atgcaaagcctgatgcctccggttgatgcgccaaataatgagttcagcgacggtaacccctcactggggacgttaggaaccattgtcagagcattgttcctgaataatgtgcaggatgccatccggtctgtacaaagtgaactgctgtctattctggccgctgctggtattaatcctgatggcgacagtaataatcaggtattacaggccattaataaaataatggtggattcaaatatgtcggtaccgtacggcataccactgccatggccaaccagtacgccgccgacgggatatttaatctgcaatggtgcgtcattcagtgcagtgacgtatcccaatctggccgcagtttatacgaatggtgtactgcctgacctgcgcggccagacgattaaaggtctcccggcatctggccgttcgctgctgagcctggaggcggatggcaacaaatcgcatagtcatactgcatctgcatccgaaacagatcttgggacaaaaccaacatcaaccggaggagatcatgcccacggtggcgtacctggtcgcgctaaaccctgggaaatcggtggtaaccaaagtacacaattcaaccctaattcgttaggtacaacggataatgccggggatcatggtcacaccgtttacatcgggccgcatggtcacattattacggttgatgcttccggtaatgcagaaaccaccgttaaaaatatggcatttcattatattgtgagggcggcgtaa

SEQ ID NO: 250393 - DNA, 2139 bp, Klebsiella pneumoniae
atgcgttctctacagcttgccatgaccctgctggcaaaagaccagggatctaaggtactgcgccagacgctggctgacgtcctgaagcagaccaatgccaataaaaaagccgaagaagaagccgcgcgcgtacgtgagcagtcggcacagagcggcattcgtgcatcccgaaccctgcagcaggaatatcagcgggcagccaatgcccggtctgtgctggggatccgctcagaacgcgacatccagcgcgagatagcgcaaacgcaggctgcatataaccgtctcctgcgcaccggtacccttaccgctaacgaacagacccgcgcgtttcgcgcaatgacgaaccaggtcgcgcagctgcgcaccgagcttaatggtgccggtcagtcaatgtcacgtatggaacgcgctcgtatgtggggtggcaatgtcacagcgttcgccggcggtatcgcagccgcgggggccattgtcgctccctcggtgcgtaaccagatgacgtatcagcagcgcctggccatgatggccaacactgcgtttgcagatgataaccttgccggccgtcagtcaggtatgcagtcaatggataccttgatccgccgtgctgttgccgttggcgggggcaataaagagtcagccgcagagacgctcgatactttacttgcctcgggtgctgtggactataagtctgctgaacgcctattacctacattgcaaaaatacgccactgcatcgggtgctgatgcaaatgacctggctcaaatcgctattcgactcaagcaatcatttggtatcaccgatgagcaaatccctactgcactgaacatggcaattaaatcagggcagttaggttccttcgaactaaaagaccaggctaaatggctccctcagcagcttgccgccggtaatgctctggggatgcgtgggctcggtgatctggccgtattgctcggcatcaaccaggcctcagcgataacggccggctcaaccgatgaggccggtaataacgtggttaacctgctggctaaaatcaacagccaggacgcagcaacctctgcagctaagattatgtataacggtaaggggattgacctcccggggtcactggtcgccgcacgtggtaagggtattaatgcgttagatgctttcagcggtatcgttgacaagattgttaacaacaatccagcctatcaaaagctggaaaagcaattgagtagcacctctgatgggtctactcgtcgggagataatggagtcacaggcgaagctgctggagggatccgcagttggaaaaatcattgctgaccgccaggcattgatggccctgattgcataccgtgctaaccgtggctatatgaatgacgtggttaagggcgtcaatacggaacggaatctgcctgcaagtcagcaggccggtgagcagaactttgacctgattcagggtactaacctatacaaggtcaaccagctcaacaatacccgggactttgcacagatggactcgatccagccactgtctgatgtgctgggaaaactttctggcgaactcaatgactacgccggcgcgtatccgagtctgacaaaagcaatggcaggagccgagacggcaatcaaggccatggccgcagcagcatgggcttttgctggtattaaaatattatctgatatgggtaatggcagctcatctattccagggggaggtcctggtggtaggcgtacgcctcgtgctggcggctcctttggtcgcatgtttcgtggcggtctaagaattgcaggccccctggctgctgtgtttgccgccgatgacctcaatgaccaatttaacagcgttgctggtgatgcatcgaaagccggaacaagcactggagagtttctcgtacgtgagaagcaacgccgagagcagactaaacaaccattattcgactttgatttttcctcgtggtggtcatctccgcagaatatccgcatccctcagtcagccaatggctacccggtgccgccgttcgcgcagcaaccagcggtgcagaccccaatcaacatcactacccagctgcaggtcgatggccgggtactggcagaggttgttaacgaggctaacggccagtcagccgcccgtggcccacagggaggaccgcactga

SEQ ID NO: 250394 - DNA, 351 bp, Klebsiella pneumoniae; identical to SEQ ID NO: 159238

SEQ ID NO: 250395 - DNA, 237 bp, Klebsiella pneumoniae; identical to SEQ ID NO: 232068

SEQ ID NO: 250396 - DNA, 306 bp, Klebsiella pneumoniae; identical to SEQ ID NO: 136289

SEQ ID NO: 250397 - DNA, 987 bp, Klebsiella pneumoniae
atgaactatacgcatcttggccgcaccggcctgaaagtcagccgcctttgtctcggaaccatgaattttggtgacgtcaccgacgagaagaccagctcccgcattctggatgaggcgcttgaggcgggtatcaatttcattgatacagcagacgtgtatggcactgaacaatctcccgatatccagcaaggctcggggctgtccgaggaaattattggtcgctggcttcagcagggtggccgccgtgaacgcatcgttctggcgacaaaagtctatcagcctatgggaccgggcccgaacgatcgccggctttctgcttaccatattcgcaaagcctgcgaggacagtttgcgacggcttaagaccgaccatattgacgtctatcagatgcatcacatcgatcgtcatacgccgtgggaagagatctggcaggccatggaactgcttgttcagcagggaaaggttctttatatcggtagcagcaatttcgcgggctgggacattgcgactgcgcagtcagtcgccacggcccgtcatttcctgggcctggtcgccgagcaaagtctttataatctgacagcccgcaccattgagctggaggtcattcccgcatgccgccattttggcctggggttgatcccctggagcccgcttgccggagggctgcttggcggcgtactgaaaaagatggcaagcgggcgccgtgccaggcccgcgtttgcccgtctaatcgaacagtatcgtccgcagctggaagcctatgaaggattatgtgaggacctcggcgaaaccccctccgatgtggccctggcgtggctcctgcagaatcctgtcgttaccgctccactgattgggcctcgtacggtcgaacaactccagcaagcgcttcacgcaacgacaatcacgctatcagacgacaccatgagctgtctcgacgaaatctggcccggccccgggggagaagcgccccaggcttatgcctggtaa

SEQ ID NO: 250398 - DNA, 966 bp, Klebsiella pneumoniae; identical to SEQ ID NO: 144031

SEQ ID NO: 250399 - DNA, 897 bp, Klebsiella pneumoniae
ttgcgtaacgcagcactcgaacttttcaacgaccgcttaccgcacaaaccgtacttctcggatgatttgcactttggtgttcgcatcgcagggaaagaacgcgccattctggcgaaatacatccagttcaaccagcctcacgccatgttctggctgggatttgacgttgaccgcatcggcgcagctatcgactggagcgaccgcaacgctcccgcgcctacactgaccatcaccaatccagaaaacggacatgcgcacctgctttacgcgctgaaaacctcgatacgcaccgcgccagacggaaaaatgaaaccgttacgctatgcagctgctgtagagaacgctctacgtaaaaaattgggcgccgacacgggctattcggggctaatttgcaagaatccgaaccacagtcactggaaaattgccgtctggcagcctgagctctacacgctggactggttagctgactcactcgacctgaacgccgcgaacgacaaagaaattgtcgctgattatggcttaggccgtaactgcaccctgttcgacaaaacccgcaagtgggcatatcgtgccatccgtcagggctggcctgagttcgaccagtggctgcaagcctgttacgaacgtgccagcgcctataatctgcaatttgcagctcctttagatgaaaatgaggttaaatggatttcgaaaagtgttgccagatggactcatagaaaaatcacaaaggaatcattttctgattatgtgtccagaacacatacgtcagaactacaatctttcagagggagaaaaagccatggcggggggcggaataaaaatcctcactcagaaagagaaattaagccatgggatctgttagggataagcagggctacttactacaggcgtaagtag

SEQ ID NO: 250400 - DNA, 237 bp, Klebsiella pneumoniae; identical to SEQ ID NO: 144034

SEQ ID NO: 250401 - DNA, 486 bp, Klebsiella pneumoniae; identical to SEQ ID NO: 144033

SEQ ID NO: 250402 - DNA, 327 bp, Klebsiella pneumoniae; identical to SEQ ID NO: 144032

SEQ ID NO: 250403 - DNA, 357 bp, Klebsiella pneumoniae; identical to SEQ ID NO: 241307

SEQ ID NO: 250404 - DNA, 483 bp, Klebsiella pneumoniae
atgctgattatttcttctcaaattgatttgaacggagaacgctggtttttcccttacaaaaagccggcaggcagtaaaaagaaattcacgccggaagacgaggcgctatttaaactccgtctgctggtggccagtagtgagaatccacaataccgctcacgcaatgcgctggtgcggcgccatatcgacaaaatggacgcgagctaccaggtaggtacggatgctttcgatctcgccagtgtgggcgagattgactcggttgatgatcttctcatcgacaattgcgcgcgctttcttctgaaagactgggaaggcgtgggggagctggtggatggtacagagacggccgtagcgtatacaccggagcgtggtgttgcgttactgaaacaaaacccctctctgtactggcttattctggctgaggcggcgtccattgctcagggtaaggagcagcagactcaggaaaccgtaaaaaagccatag

SEQ ID NO: 250405 - DNA, 552 bp, Klebsiella pneumoniae
atggctaagggctggaacatcgacccgtcggcattcgccgggctggtggccgaagatgtcaaactacgccagcggacaatcgctattcagctgctgaatgaaattgttcaacggtcgccggtaggaaacccggagctgtgggccatcaacgcgaccgcggttcagtacaacaaagctgttggggaatggaacgaatctctttatgccgaccctgctaacctgaccaaaaccggaaggctcaggaagaaagtccgtgttaatgacagcatggatatcaggcggccggctgagtatcgcgcaggaaccttcagggcatcgcattttgtcagcatcggcgaacccgatcactccgtcccgaccgaaccggatccgcgtgggacaatgacgtttcttaatggcaaaaatattattgaccaggcgccagcctactcggtgatttacatccagtcgaacctgccttactccgtgcctctggagaatggccactcaacgcaggcgccgacaggcgtctatgccgtctcgtttaatggtgttattcaggcctacaaatga

SEQ ID NO: 250406 - DNA, 411 bp, Klebsiella pneumoniae
atgatcactttcatcactgttgaagatgtcaattcgattctcggtgccacctggacagatgaaagcaaaaaagccaaatctgtgctgatggctaatacctggatgaatggacttaacctgaaactgccgtgcgataaggcaactcacgaaaccattattcctgacgatgtgaaacaggccggcgcctatgcggcgctggcagcctcaaatggtggcctgtatcagcagaaaactgactcgggggtgctgttgagtaagaccgttgacgctgacgacgtttctgtttccaaaaccttcgcagaactcgctaccaacagctctgcattgctcggttccgacctgcagctggcgctagccatgcttaagccctatggcgtgagtcagtcacaggtgcgactggtgagggggtga

SEQ ID NO: 250407 - DNA, 192 bp, Klebsiella pneumoniae
atggggaatattgacggactgacgctgatgcagagagaagatccttcattcgctgagcactacctgcgttgggaaagtatcagacagacctcagcatcccatcaggttgccatttgcggcctgatgaatgcagggaaaagggcactgttgcaaatagtcggtggtgataaacttatcatccccttttgctga

SEQ ID NO: 250408 - DNA, 1425 bp, Klebsiella pneumoniae
atggccaacttcaacacgctgatcaaacgtaagcaatatatctggctgggactcattctggcgggcggcgcggcagcagtcggaggcgggctgtatctgtcagatctgaacatgagctctgatgaggaagccccggctcagggcgaacccgcaccggatatgaccggggtggtcgacagcagcttcaacagtaaggtggagcagcacgcgacaacagaaatgcaggcgactgccgctgatctcaacaagcgttttgactccctgcagggggaagtggacctactgagtaaggcgcgaaccgctgaccagatacgtatcgacaagctcagcagtgacaatgaagccatgcagactcagctgaaggcgctgggcgtgaaaccggctgtctctggtggcgagcccgcgccgactcctccgtcaccgccacccggtccggaaggggagccgcagccagccagttatccgccgcaaaccggcgccgcggtaccgcctccgacggcattctatccggggaatggtatgacaccgccgccgcaggtcagctaccagtctgtaccggtaccaaaccagatacagcgtaaaacgttcagttacgacaaaggaaaaaaaacgaagtcattgccgtacattccgtcggggagcttcgcaaaaagtatgcttatcgagggggcagatgccaacgcgtctgttaccgggaatgaatcaactgtaccgatgcagttgcgtatcactggtcgcgtggaaatgccaaacagcaaaacctacgacctgacagggtgttttgtgggccttgaagcctggggcgatgtctccagcgaacgcgccattgtccgtacccgcaatatcagctgtatcaaaggtgataaaaccatcgatcagcccattaacggccacgtttcctttatggggaaaaacggggttaagggagaggtggtgatgcgtaacggaaaaatcctcggctgggcatggggggccggttttgttgacgggattggtcagggcatggaacgggcttcacagccggctgttggcctgggggcaaccgcatctgttggcgccggtgacgttctgaaaatgggggtcggcggtggtgcatctaaagctgcgcagacgctgagcgagtactacatcaaaagggccgagcagtatcacccggtcattccgattggtgccggcaacgaagtgaccgtcgtgttccaggatggattccagctgaaaacgattgaagaactggaagcggaaaagaacgggcaacagcaggctcagaatcaggaggcggagccggcaccgcaggctgatgcacatcatcagtcaggcggcggtatgaacggattcaatactgacgagatgctgaagaagctgggcaaacttgatccgcgtgagttctctccgggcgcagcgccgcagggggaaaataatggctaa

SEQ ID NO: 250409 - DNA, 987 bp, Klebsiella pneumoniae
atggagaaaccgcaaaccatcgttggttttaaaatcggtaatgcgctgattgatgagctggatgtaatgcctgccaaaaaggcgcagttagcctggcgaaaaatcattgcacgtatgcgttacaacgtgcccggattgcgaaacgggatcgacgtcaccacgacgccggaaggctttaagttcgtttaccagcagttcgcaaaggctgtacgcgataagccttcgctctcaacgctgtacggcctggtgcaggcctcgacgttcgacaacgaaaagaatctgccgccggactatatcccgtcgctgatggagtcatacccgccggagctgatcaaggcttatctccgtggccagttcaccaacctgaccagcgggacgatttaccatcagtttgaccgtcagttgaataactgccaggaggaagagcagcccggagagccactgtatatcggtatggatttcaacgtcgggaagatggccggaattgttcatgtgctgcgtcttgggcttccctgtgcagttactgaaatcatcaaggcttacgacaccccggacattattcgcatcatcaaagagcggttctggctgtatgacggtcatgactaccgaaaagtgcgggaaatctatatctaccctgacgcctcgggtgattctcgtaagtcagctcatgccagcactacggatatcgcccagcttaaacaggcaggctttaatgtgatcgtgaatgattcaaacccgccagtaaaagatcgcatcaactccatgaacgccatgttctgcaatggcaatggtgagcgtcgttacaaagtgaatgtgaagcgatgcccggtctacacggaatcgcttgaacagcaggtatggggtgacaacggcgagcctgacaaaaaagctgataacgaccaccctaacgatgctggcggctacttcattgtgaaacagttcccaatcatcaagccgactggaaaagtcaccaaactgcggatgtaa

SEQ ID NO: 250410 - DNA, 987 bp, Klebsiella pneumoniae
atggagaaaccgcaaaccatcgttggttttaaaatcggtaacgcgctgattgatgagctggacgtaatgcccgccaaaaaggcacagttagcctggcgaaaaatcatcgcgcgtatgcgttacaaggtgcccggcctgcgtaacggaattgacgtcacaacgacgccggaaggctttaaattcgtttatcagcagttcgcaaaggctgttcgcgataagccttcgctctcaacgctgtacggcctggtgcaggcctcgacgttcgacaacgaaaagaacctgccggcggactacatcccgtcactgatggagtcatatccgccggagctgatcaaggcttatctgcgtggccagttcaccaaccttacaagcgggacgatttaccatcagtttgatcgtcagctgaataattgccatgaggaagagcagcccggagagccactgtatatcggtatggatttcaacgtcggtaagatggccggaattgttcatgtgctgcgttttgggcttccctgtgcagttactgaaatcatcaaggcttacgacaccccggacattattcgcatcatcaaagagcggttctggctatatgacggccatgactaccgaaaggtgcgggaaatctatatctacccggacgcctcgggtgactctcgcaagtcagcccatgccagtactacggatatcgcacagcttaaacaggctggatttaatgtgatcgtgaatgattcaaacccgccagtaaaagatcgcatcaactccatgaacgccatgttctgcaatggtaacggtgaacgtcgctacaaagtgaatgtaaagcggtgcccggtgtacaccgaatcgcttgagcaacaggtttggggcgaaaacggagaacctgacaaaaaagctgataacgaccaccctaacgatgctggcggctacttcattgtgaaacagttcccaatcatcaaaccgaccggaaaagtcaccaaactgcggatgtaa

SEQ ID NO: 250411 - DNA, 507 bp, Klebsiella pneumoniae
atgacttcatcagtaaccgttccggccgtctacgtgggcacatatcaccagtacaacggcggcagtatttttggcaaatggtttgatttaaccgacttcgacgacgaagacgaattttatgacgcctgccgggcgttgcatgccgccgaggatgaccccgagtttatgtttcaggactgggaagggatcccgtctcagtttgcctctgaatcctctgttaagtgggcgtttatcgaggcattccggcaggcgcaggacgaaggacgcgctgccgcgtttgtggcctgggcgggctataccggcgagtgcgactatgacgcctttgatgaggcgtattgtggcgaggctgaaagcgaggaggattttgcttatggctttgtggaggatcacggcctgttaaacgaggtgcctgaatccctgcgcgtctatttcgattatgaggcttacgcgcgggatctgttcagcagcggctatgtcttccatgaaggctttgtattcagcaactga

SEQ ID NO: 250412 - DNA, 402 bp, Klebsiella pneumoniae
atgccctacagctgttttggcaatgctgccggcgttggccctgctcatctgcaacgcgccatcctgataaccacggttagcgtgtccacgtaccttgcgggctatctgctcatgcgtatcacccagcagaaatccctgccgcaccgtattgctgatacgcgccatgcgatcggcttcaaggttatcagcccactcactgagcaggcgtccctgaaatggcttggccatcgccgccgcatacacagcatcaggggagattcccaccagcggatgaagcgccagaacatcgtcggggatagcgaactgaaacaggctcatctgatagcctgcctcatgctgcgccagttcctgcagctcgccggcgaggctttcgctcatcgactgaaccacatcacgatttaa

SEQ ID NO: 250413 - DNA, 987 bp, Klebsiella pneumoniae
atggccaaaaaagaagcccacagcactattaaaatcccaccaatggaatactttaagctcgacagggcagctagtattttgcaatgcgatacagatgatttacttcactatggagttattggggctataccgttgtgtataatgatgagaggattttcttctactttggcttttataggcggtaaagatataaaagacccaattgagttttatcacgaacacaaaggaaactcatcatttctttttcgtgagggcaactatatatctcattttaattccttgctcaccgagtatgacgtatacagaacagatagtgggcttattttatttaacggaatggctcatgggctatggtgtgtaggttacagtgaaatagaaagcctgctttactatggagaggcaaagctaacagatgcgacaccttttcggccatttggctgtgacatttttctcgagaaaacaggggtttcatgtcacatagttagcaagaaatattttgatctaaactggctcccattactaaacagaaaactagctgaaaaaataaaattcaattcatcgattaatcgaaatcctgagactgaaatcactataacaagctcagatatatttattgccagagataccatcttgaaactcaaagacgcaatagacacaggcgagccgatgaaaagcatgattaatggcggcgttatcgaattgagtttatcgccctccattgaaaagaaagaacacggcaatacgataaggtttcgtgaaaatcgagaatttacgataacgaatttagtttatgtaaaactcaattacccggatgagtgcaagaatgacagaggcgatgagaccaatgacgcatgggcgggggccacgctaaatcactgggattttattgcgccggggaaaaccgcaccaagtaaagactatttgacaaaaataatcgccgactttcagcaactgccgcaagaaaggaggactgtgggaaagccttga

SEQ ID NO: 250414 - DNA, 2037 bp, Klebsiella pneumoniae
atgaactttaaacttgaccaacaacaagctgaagtcgaaaaaaacgttgagacacagctctttgaactaataacaaaagtacaatctttctatttcatttctggagctggatcagggaaaactcatgctctaattacaggtgttaataaatttataactagtaactacacacaactgatatctactaatcaaaaagcattatgtataacatacacaaataatgcatctgatgaaataaaacatcgattaggtgataatgatttagtactaacatctacaatccattcttacatatgggatgttgttaaataccatatggagttattgcttgatgagcatataactttcttgaatgaagaaatagaaagaatccacggtgaattatatgaaatacaaacagagaactcttctatattgaaggtaagagatttagaggaagaccattttttttcaataattgattgtattctcgaagataagagtaaattttatgattctctaaattcagcatctactttttggggatacttagaaactatcactgatgaaaaaacattcaaccacctaaaaggcaattatcagaagctatctagcgctttcaaaaaggcaatgaaatcccaagaatttaaacagtgcctatgtaaaatacaggcaaaagaagataagtacacagaaataagatacttcaataccaaaaacatcgaaatattgcataagaatattattggacatgatacattattattgtactcataccgattaattcaaaaataccctttaatttccaaatgtatcattgatgctcacccgcttattttcattgatgaataccaagatactgatgaaagcatcattaatttatttttaggaatccatcatattgcacagcaagagaacaaaaaattatgcctaggtttttttggtgaccctatgcaaacaatatataaaagcaacgtgcacactgaatcaaaagacctaactaaactagttaaaaacatcaatagaagatcacatcaaaatatagtttcatgcattaataaaattagaggatgcaatcaagacgttcaacaaaaaccgataaaaatatataatgacaactattccttaactctgactatcgaaaacgaaggtaactatacgaatgagtatttatcttatatacttgataagtataaaagtgaatggaatgtaaacgaaaactctaagcttgcatgtcttgtgcttaaaaatgaaatgctttctcaactctgtggctttgaccatctttatactataatgttagatatctataagatagagcatgcaaaaggatttgagaagattggttctgagtttttatttagagaattacgatacgcaggctctttaccatcgctcatacatgatttattaatgcctctttaccttttaaaaagaaaaccaaacttttcaatctcagatatattcaataaacaccccatccaaaagcatagtctatcggacattttagactctatagaaattattgattcattagatctcaaatgcctaaatgattttacaaaaaaaatttctgaaatataccaagcacaaaaccccaaaatacaagaattgattaaatataattttgatattttaattgaagacttggatgaagcaaagaaaaaaattatcaaaacttgcagattaaaagatagtgccaatatagaacccttgctagataaattatttaatcttgatatcgagcagttttttctatggttagattttatttaccaaagttatcgtgacactatggtttcatatttaacatgtcacgcatcaaaaggtttagagtttgataacgttataatattcctttctgacacctttaatagaaaagagggttttttctctaaccttctaaattccgacttaaatttaagtctagacactcagcttgaatccgcaagaaggttactgtatgtttcaagttccagagcaataaaaaatttaaaaataattctattcacaaataaaaaagtagatgaatcaaaaattcaatacctactcacataa

SEQ ID NO: 250415 - DNA, 2175 bp, Klebsiella pneumoniae
atgtatatttcttttctaaaaataaacaacttcagaaagtttggagaaaatgataattttatcggatttgttaaatcacatagtgaatctccacaaaaggatttagttgcttcttcaacaaccctagtgattgggaaaaataactcaggtaaaacgacagtaacaaaagcactggaacttatacattcagactcagaaaaaataaccggccatgattttaattatagttattcaaaaaatatacttaaagaaaatctgaatggcaaaccttacataacaccaaagctatcctttgaaatagaaattatattagatgatatggcgcatgatctaattggtgattttcaacctttcattgatgcaaaaaaagccttgcaggaaggagagcgaaaagcaaatatcactattgagtatgaagtaaaaataatagcagattacatatctaaaattgaagaactcaaaactgcttactcaattgatgagtacaattcggaggccatttttagaaaatatctcgatattttatccaaaacacaattcagaagaaagataaaaaattaccaaaacataaacgttgacactctaaccccaaaaaacatcattgatttgagagtcatctcggccgcaaaaaatattcatgacaaaagactactgacaaaatcattcaacaaaataattaaatatatgtatgagagtgatgatattgaatacaaaggaatattaagcttagtagataataataaccaaagtttaacccaaaatattaaaacaaaacatcaattaggtgttgagaggattttagcaaaaatcatatcagataaagatattggaatagaactcaggtctgaattgacatttgataaactaatgtctgatttaataacttacgaacataaagatggagagtttcttgttcctgaaagtcaattcggtttaggctatgcaagtttagttagtattatcggtgaaataattgattacactaatcaaagtctaaaggaaacaagtcagagtagaataagacttttgtgcattgaagaaccagaagtattcatgcatccacaaatgcaaatcaatttcattagacatatccaagaagctttgaatgagattttatcttctcatcttgagcatctaaactcattgaaaagccaaatcctcatcacaacacactcatctcacatattgaatagtgtaatacacagtagtaacaccttcgatgacattaattacatttgccttaagggtgggaatgctgcaaatgttttactcaaagataaagaaatagcaaatacaaaggaaaaatcattacaatttgaattcattaagaaacatataaaacatcaaactccagatctttttttctctgacgccataatatttgttgaaggtattacagaagaaagggttttaaattcatatattgaagatcacccagttctcaatcgaatgaacatttctgtttttagaattgatggtgctcatgcaaaagtttacgcaaagctaataaacaaaattcaaatcccgtccttaatcatcactgatattgatttcaagaaagagaccaagaaaaccaataccgttgaagctactggcgaaattgacagcgccgttgaaggtgatgtcagtgatgtcagtgatgtcagtgatggaagtgatggaagtgatggaagtgatggaataattgaacaaatatctactctttcagaagacttaataacaaccaacgcgactttatgccacttttttgccgataaaagaatttcatcattaaaagattattatgttaatgataatttaatggttgttttccagaaggattgcgtgggagtacccaaagactgtccaaatatattttactatgccactagtttcgaggaagcattaatattaaaaaattatgacaataaattactcctagagatcctactcaaaattataaaaacagaaacattaaaagtattaggcgacccaacagatgtttgtaacattgcccataaatcaaggaaaatacagaagttattggcaagaaaaaaaagtgacttttccaacagtcttattttttcgttggttacgacagatcaacccaaacctgagcttcctgattatatattaaaagggcttgaatggcttacattaatgttaaaaagagatggtgtttcttatgaactttaa

SEQ ID NO: 250416 - DNA, 246 bp, Klebsiella pneumoniae
atgactgtggcgccgggccaggttgtagaacacttcaatgtaatcgaagatatccgcccgggccagatcccttggtattatatgcgttttctgatccgttcttttttcagcgaactgaagaacgattcggtcaccgcattatcccagcagttgccacgcctgctcatgcttggcgtcaggttattgacccggaagaagcgctgccagtcgtcactgccgtactggctgccctggacgcccttctaa

SEQ ID NO: 250417 - DNA, 723 bp, Klebsiella pneumoniae
atgacaaatgaaactgaaaagtacctggctaaaatcaaaaagctcctgaatctggcccgtcgcagttcgaattctcatgaagcggccaccgcgctcaatcaggcgcaggcattgatgcgcaaacataagctgagccagaatgatgtcgatctgatggatatcaccagcaaagccagtaaaggcgcaccgtcccatgcccggagtattcctcagtatatgactatgctcggtcagttaatttgtgaagcgatgggaacccgctgctattattcattccggcgtaatttccgcaccggcaaactacagaatagtgtcattttttacgggcccgacgagcgtcctgaaattgccgcttatgcttttgatgtactttcccgtcagatggtgaaaacccgacgtacctttattgggtcactgcgcaaaaacatcaaacccatcaccaaaacggcccgtgcagatcagttctgtgaaggctgggtaaacggggcctatcaggctgtagagccattcgttgtcacgagtaccgaaaaaacgttgatggcagcgttcctggcgaagctgaagaaagagcaaggcgcaactgaccttgaatcccgcgaagctaagaagtgtcgtggcggtgaagatgcagcggaagccggttttaatgagggattaaaagcgcgtttaaatcacggcgtatccggtaaagattcggccctttctctggagtacaagtcatga

SEQ ID NO: 250418 - DNA, 222 bp, Klebsiella pneumoniae
atgagaatattaaaagattcagtcctttccgatgagtttgaaggatgggatgaagatatggtctatgaatttgatgatggtactaaatggaaattagcttcataccattacagctatacttacagctaccgtcctagagctaagttattaattgacggctcacggtattaccttgaagtggaaggaatgggtgagcctgttgaggtagtccaagtgtcctga

SEQ ID NO: 250419 - DNA, 192 bp, Klebsiella pneumoniae
atgacgaaacaacagaaaactgccctgaacatggctaaattcatccaggatcagtccctgcttcttctggacaggcttaatgacctggatctggatcatgaggctgatttctgcgagaaactccatgaggatgcggaacgcctttaccgaagcctgtcagcgcgcctgaatgagcagcaggacggtgcgtaa

SEQ ID NO: 250420 - DNA, 192 bp, Klebsiella pneumoniae
atgaaacttgcaccacaaagccgcgatatcctgcgacagtacaaagccctgattaatgcccgccgccgcgatgccggtcagcgggaactgaacaccgcgcaggtgatggatgaaatctgcgaatacatgacctgtcagtgtgccgtctacattggcggacacttcatcttacagggcggcaagggccagtaa

SEQ ID NO: 250421 - DNA, 192 bp, Klebsiella pneumoniae; identical to SEQ ID NO: 250420

SEQ ID NO: 250422 - DNA, 249 bp, Klebsiella pneumoniae; identical to SEQ ID NO: 225766

SEQ ID NO: 250423 - DNA, 192 bp, Klebsiella pneumoniae
ttggggaaatttatcatcgtgtttgtcggtaatttcgcggtaacggaacggatcgagatcgcaaatctcattatttttgtggttaagcgttccaatatgaaacgcatgtcatttttatctgttccatatcagaacaaaatgacgaaagatttttttgtacacgcctcgccggtgatgctgccaacttactga

SEQ ID NO: 250424 - DNA, 192 bp, Klebsiella pneumoniae; identical to SEQ ID NO: 250423

SEQ ID NO: 250425 - DNA, 660 bp, Klebsiella pneumoniae
atgtcaaaaaaagaaaacttcctcataaaaaaagtaccatatgcctactatccgggaaggtcggctaatcaaaacgcaaaagctcatcagccattcgattttacattatctatggatatccgagatcacttcacatcgataacgcctaagatggtagattggttacttaccccaagggagttatacctatgttttatagatggttcattacctcaggggctctctactagcccagtaatttctaatatagccatgatggaggttgatagagcgatattatctgaattatcaaatgttgtatctaacggctccgaaccaataaacggttttgtatacagaataaaaaacttccgatacacaaggtattctgatgatttagttgtaagctttaatttgcacgagccatctatgcatttacataggcgtatatttttatatatagaggccctaataagtaaaaccataaggcagtttggttttgaaccaaataacaataaagttaaaatgcaaaatgaaaagtctggctttagagttatcactggtgtatccgtctcaagagaaatcataaagccaacaaggaaaacaaaaagaaaacttagatcagcaatacataacgccaacatagacaatgctggtgatgctgccaacttactgatttag

SEQ ID NO: 250426 - DNA, 495 bp, Klebsiella pneumoniae
atgaagctattatctatatacattgcaggcttccaatcacttaacagagcagcttatgttgaatttgctgatggtgacatatctgttatttatggtgataatggttgcggtaaaactacttttttgaaattaatacactctattcttaagcgtgatgatgagtcgcttgcaagcgaaaatgtaatgtatgttgaaatctattatgagaaaaataatggagaaagagaatttgtaccagtaagacagattcaagaggaagtagaagaggggattcttaaagactcatatgactggagcgatcttatcgattctgaattagctgattgtacatcattatctcttggtgtggagagaggcgtaacgtcagagtcgttgaaagttgaaccagtggatgtcttaaggtttcttggccatccagaatatcgctctttatttgcgaagacagatattcatttgtttagcgaaaggatggcaatgtttctaaagagatattaa

SEQ ID NO: 250427 - DNA, 915 bp, Klebsiella pneumoniae; identical to SEQ ID NO: 217416

SEQ ID NO: 250428 - DNA, 270 bp, Klebsiella pneumoniae
atgcatggcgaaaaccaacagccatatttttttaacccgggcatgaccacacaacagcttgaacactggcttgggcaacaaaaagcccatcttgcatacttcaatcgtctggtggcagaaaaagccgctcttgaggagcgactgagtcaggtctctgcggagattgagcgaatagctactggtgggcttgaaggaatgctgagttttccctgggagcccagtcctcttgtggaaaatcctcaacagggtagtggccggtcggcagattga

SEQ ID NO: 250429 - DNA, 1593 bp, Klebsiella pneumoniae
gtgagcagcaaatttatcgacgcccatgaggcggcgcggtgggtcgccagcggcgacaccgtctgcaccgtcgggatgacgcttatcggcgcggcggagtccattttaagcgccatcgaagcgcgctttctgaccgcgggcgaaccgcgtgacctgacgctactgcatgccgcagggcaaagcgatcgccagcgcggtatccagcactttgcccatccgggtatggtgacccgccttatcggttcgcactggggcctggcgccgcgctggatggcgatgatcaacaacaacgaagttgaagcctggtgcctgccgcaggggcagatcgttcatctctatagcgcgatggccgccggactgccggggcggctttcccccgtcggtctcggtacctttgtcgatccgcgcatagagggcggaaggatgaacgcccgcacccgcgaacgacccaatctgatcgagcacgtcacgtttcgcggcgacgaatatctgttttatccggctcttcctctggacgtggtcattgtgcgcggcacccatgctgatgaagacggcaacctcacgaccgatgaagaggtgatgaagctggaagtcctgcacgccgttctcgccgccagacgctacggggcgaaggtgctggcgcaggtgaaatatcgcgtagcgaaaggctcgctgcatccgaaaagcatcaccgttcccggcaacctgatcgacgccattgtggtgtgcgaagagccgcagacggatcaccgccagacttcaagctgggccttcgacccagcgctgtgcggcgatatccagctgcccgccgcgcaaaatgcgccgctgccgctggacctgcgcaagcttatcgggcggattgcctgccgctatctgacccccggctgcgtcatcaatctcggcaccggtattcccaatgacgtgattggcgccatcattcacgaggaacagctcggggagcaggtcaccatcaccgtcgagtcagggatctacggcgggcagcaggcgggtggcgtggatttcggtatcggccgtaatctgagcgcgatgattagccaccaggatcaaatgctctactacaacggcgcaggggtcgacatcacctttatgggcgccggcgagatggacccgcacgggcacgtcaatgccacacggctcggcgcatcctgccccggcgcgggcggttttatcgatatcacccagaatgcccgccacgtcgtgttctgctcctcttttaccgccaaggggctggagatcgcctgtgaacacggggcgctgcatatccgccgcgaaggcgaagtgcgtaaattcgtcgccggggtaaaccagatttcttacaacggcgaactggcccgcgccaaaggacaaaccatgcattacgtcaccgaacgggcggttttcgaactgcgcccggaaggaccggtgctgacggaaatcgcccccggcatcgatcttgagcgcgacatcctggcgcatatggattttcatccggcgatcgccgcggatcttcaggttatggacagccgattgttcgccccgccgccctgcggtctcgcggaacatctgtcccggaattcatcctctgactcataa

SEQ ID NO: 250430 - DNA, 735 bp, Klebsiella pneumoniae
atgaaacttgccagtaaaaccgccattgtcaccggcgccgcacgcggtatcggctttggcattgcccaggtgcttgcgcgggaaggcgcgcgagtgattatcgccgatcgtgatgcacacggcgaagccgccgccgcttccctgcgcgaatcgggcgcacaggcgctgtttatcagttgcaatatcgctgaaaaaacgcaggtcgaagccctgttttcccaggccgaagaggcgtttggcccggtagacattctggtgaataacgccggaatcaaccgcgacgccatgctgcacaaattaacggaagcggactgggacacggttatcgacgttaatctgaaaggcactttcctctgtatgcagcaggccgctatccgcatgcgcgagcgcggtgcgggccgcattatcaatatcgcttccgccagctggcttggcaacgtcgggcaaaccaactattcggcgtcaaaagccggcgtggtgggaatgaccaaaaccgcctgccgcgaactggcgaaaaaaggtgtcacggtgaatgccatctgcccgggctttatcgacaccgacatgacgcgcggcgtaccggaaaacgtctggcaaatcatgatcagcaaaattcccgcgggttacgccggcgaggcgaaagacgtcggcgagtgtgtggcgtttctggcgtccgatggcgcgcgctatatcaatggtgaagtgattaacgtcggcggcggcatggtgctgtaa

SEQ ID NO: 250431 - DNA, 999 bp, Klebsiella pneumoniae
atgaacgaaagaaatggaacgatagatatagtaaaactacttgccagtttttgtataattgcggttcatatcggttactatgaagattatcctgttttcttcgccgaccttttccgagtttcaacccgctgggctcttccgttcttttttgttgcagcaggttacttcattggatgctctagagaacatagcattacaaagagagtcaataaactaatcacaatatttcttactgcttcagtgttctactctttaattttattattaaagaatcatagcgacatccaaggtcagatcagtgaaatattttcgttcaaatttctgagagggatttattttcacctgtggtttattccatcgttaataattggtttcattggtcttgggtatatgagagaaaacctttcagaaaggtccgcactgataatctccattataattattacaattgcatgggttgaggacattttagtgtttttggggaaagatgttgattttatcttctccagagagattatgtctattggactggtttattttggttacaccattgcaaaacataggattcaggaaagaataagtaaaaacaaatcaatagcaactatgttactattcataatagctctaacaactgaagcgttcattttacaggaaataacaggatcaagctccagggaaaggcaattccctttattttgtagcattgctgctgtagcgatcctcatcacttgctgcaaaataaaaaccaaagagggactgctctctgagttaggtaaaaggtactcgctggctgtgtatctttaccacccactattcatatctgcatccagatttgcacttagtaagatagggatacatgatagctttgccatattgataatgacatttatttctacgctattcgtgttaatcataacagacagatatttcaacccattattcaagctaataaatggcgatatttttaaaagaaataaaaaagaagagaccatcaattaa

SEQ ID NO: 250432 - DNA, 591 bp, Klebsiella pneumoniae
atgaccagcaaattaaccagagagcgcctgcaggaaatcgctgaagatggatttctgaagcatggcgaaagcaaagagttggcccgcattgcgctggccgcaatggacagcgagtcagggtgtttgcctctcgactacctgcaggggcacaaagacggtctggaatgggcagcccaactggcagaagccaatcaccctgagaccggagactggctgtacgatgaccctatcgaactggcaaaagctattcgcaaaggtccagatatgccgccagcgcagccagcgccggtagtagagcgtgagcccatcgcgtggctcaatgacgcatatttagctcgcggcgtcgttgacggtgaggctggtagcgaagatgcaggccccggatatattccagtgtatcgccacgcacagccagcgcctgaccgcgagcagatacgcaacgatcatgccgagtggtcacaatcaacattcggtaatgttggcccgattggtccgctgaagcatctcagcaaagaagcactggaagccgctgccgaacctagcgacctgtcggaatgggctgatatgcaattcctactgtgggacgcctag

SEQ ID NO: 250433 - DNA, 963 bp, Klebsiella pneumoniae
atgacaggcaaaacaaaggcggccatgcagggccgccaatgtcaccaccaaaaacttaagcaaagtcaggataccagggctggcgctggtggtcaaagaatgagccagcgcaattctgcgcccgctgattttattcagcttttacggcaaagcccaaaagtgagctttgcgtataactcattgactccattattcttcctcactttggggaaaaagggcgggaaatcaaaccctaccctgtgctttctgtttcttcagactgattaccgagttagccatataagggctttaacaatccagtatgtggaatacgcagttgcaactaaaaaaacaatagcgattgcgtctcgccatttaccccgttccgtatcaggcataaatcattcctctggatctgccttagcttttttgcgctgctctgatttgagcttacgtccgcaggcatccagcacccatgcggagaaattggccccggagttttcggctttctctcgctctacgctggcgtcgatctcttcaataatgtcatgtggaaagcgtatttttttcgtcgctgattttgcattaactgattttgtagccataactcttcctcaagttggtgtgggaacaccatacatcaaaaaagagtacaaaaacagccttgacgtgtggccgcactttaaactagattggtgtggccgcaccttgttttgtcgatgcggaaatagcgaagcccggcagtgcgcgaacactaaccgggcctctgaccacaaaccgttaagtgaggtaacagttatggctgaattacagcatacccaaactcgccccaaatatcagtatcgttttctcgcactgagcgctatcgggcgcaacgtcattcacatcaccgctaccaccgaacgcgaagcccgtgagcaatcaccggctggctgcgtgatggtattcgctggccgtctgcctgtggaggtgcgttatgcgtga

SEQ ID NO: 250434 - DNA, 135 bp, Klebsiella pneumoniae
atgccccgatactacgaaattcccaatgtattaaaaagcagtctccgccatgagatcggcgaccgtcgcatgttctatctatacaaaacaaaaataggtgattatagtcatgtgattcctatcatgcgtaactga

SEQ ID NO: 250435 - DNA, 2010 bp, Klebsiella pneumoniae
atgaatattattgtaaaatcagaaaaaccttataacggtttttttttgcaaaatgaactaagttttgatgggtattcttgcttgctaactggtaagaatggatgtggaaaaacgagacttttaaagggaatagaagcatcctgcataagtgttttcttaaatggagaacagttaaaaaccaatgatatacggcaaatacaaactaacacgattgactcgggaaaattcacctcaaatggaaattcagataatagcaaaatattagcagatgcaattttcacctttacgtcatcaaataaagaattaatagaaaatcatccaatttattttgaaaaaaatcttcgtaactatgaggcgccgctcgcaaatataaaaaaaatagcaaacaatgcatcactacttttcaataaagaaattagtgaacttagctcagaagaaattcacctatcaatacttttaaacaaagaactcagcaacaatattacaggtaacttctcgggtaataatctagatagtctaagccaactaagcatcgactacttattgacatcgaggataaaccggaatatagcatttaacaaatcagaaggggatgacgtcacaccattgccagaagatataattctcaaatacatgggagaaaactcacctcacaaaatattcaatgaaattataaataaaatgtttcgtggtaaattccacatttcccctccaaatgaaagatcagggcatataagttataatccgaatttgattttatcttcaacagaagaaagtgtcaaaatagaaaatttatccaatggagaaaaaacaatattttggctggccataaaaaccttcgaaatttccatgtcaagacctgatgagtatttaaaaaaaagcaaaataattcttctcgatgaaccagactcgcgactccacccattaatgatagtggactttttaaattgcttaaagctactccatgaatcgttgaatattgcattcatttttacaacccactctccaacaacagttgctttgatggataacgaaaacatttttaatatcgatatcaatacgaaagataataaaaattcaatcactaagcaaagcaaagacttggcaataagtcaactattagatggagtggttcaggtttcggtcaaccctgataactccaggcaaatatatgtcgagaataaaaacgacagttctatttatgcggaaatatacagaataataaagagacgctctaaaaagaaaataatagagataccactgaacttcattagttcggggcctaaaattgccataactgaattagaaaaacacattaactccgtcctaaaaaacaccgatgactcgttaaagaaaacactggcagatacaataaatggtagtggtgattgtgggcaggtaatcggaactgtcactcaccttatcgatggggggaatacaaccgtcagaggaattattgactgggatgtacaagacagaacaccacctccacaggttaaagtttttgcaaaaaattatgcatattcaattgaaaatgttgtatatgacccaataagtctctttgcattaataatgcatttatctctaaaaaaaccttcatactatttcgaatgcgacgaggatttcatttggacagatgttaaatctgacactagtaaattacaaagaatagtagatgtgattacaagagacctactaggaagggaaaacaataaggatcatgtaataaaatacatgggggggattaatttacaaggggacagaaaatatttcatcccaagagaaacaattgatgatccagcacttaaaattttaggttcagatgtacgtaacggccacgatttagaagatgttattgtgaaaaaattcattccaggaatcaataaaatacacaataaaacaagcaagcaaccattgatttttcatttcacaaaaaaaataactatcgatttattgggcccggactttataagttgtgcatttgaggatattttctctgaaatcgattaa

SEQ ID NO: 250436 - DNA, 858 bp, Klebsiella pneumoniae
atgtctgaaacgccaatgttagtcgttgaaggcgtcgatgacatttccatttatgaaggtgtttgtcaacagcttgataaatatttcgaggtggttgctgttcagaatttcaaggatatgagtgaaggtaatagaggtgtaattgattttattgaggcattgctagaacttgaatatgagggggatttgggtcactacattctaggcattatagatcgagatgctcgctattaccgagatgaaattgttaataattcagccgtttttgtgctgaaatggtattcgatggaaagccattttatcacacggcaggcaataaaatgcgttattgaacaatgtacaagaatacagccaaaattgctaaccaatgagttaattgagatgctctatgaaaagttagcagaagctctaatgtcgttttactatatgtctttagagtgcttaaagaaagcctgcgtgaaagattatgaatctctagcatcatataagatgagcgttcaacacttgaaaaatataggcgcttttgaatcaattgttgagcgagaaatagagcttgatgaatttgctattcagatgggtgtaagccatgatatggcaggtttacttaatgtatgtaaaggtaagtggctaattggcgaattctgcaaaatattaattagtgaaataaaagggttgaaaacaaaatgtctgcatgatgaggtagataaatgtcagttttgttatagtgggaataatgaactctgtctttatggatttgaaggaagctataacgagtctcaaatagctagtgtaattaaaaagaatgaaggctacacgcaatttggttatttaaaagagcgcatagcaaacatgatctaa

SEQ ID NO: 250437 - DNA, 198 bp, Klebsiella pneumoniae; identical to SEQ ID NO: 139683

SEQ ID NO: 250438 - DNA, 624 bp, Klebsiella pneumoniae
atggccaatggccatatcaatctgatggtggcaggcctggtcggcgcctttatgacctcgctgtacaccttccggatgattttcatcgtattccacggtaaagagcaaattcacgcgcacgcagggaaggggattacccatcatctgccgctgattgtgctgctggtactatccaccttcgttggcgcgctgattgtgccgccgctggaaggcgtactgccgcagaccactgagctcgcccacggtagcgtgatgacgctggagattgcctccgggatcatcgccattgccgggattctgatcgctgcatggctgtggctgggcaaacgcacgctggtgacctccatcgccaacagtgcgcctggccgcttcttcggtacctggtggttccatgcctggggcttcgactggttatacgacaaggtgttcgtaaaaccattcctcggtattgcctggctgctgaaacgcgatccgctgaactcgttgatgaatatcccggcgatcctttcccgcttcgcaggcaaaggcctgctggtgagcgagaacggttatctgcgctggtatgtggcttcaatgagcatcggcgcggtggtggtgctggcgctgctgatggtattgcgttga

SEQ ID NO: 250439 - DNA, 222 bp, Klebsiella pneumoniae
atggcgccgcttaacgctgatggtgataaccagcttttcaaaaagcaacgtgttcaccttactggtgcgggatacgtgcagtgggatttcattctgcatgatgggagagactggcatttcaggcaggaaaaattccatcttagaactgaatttcagttgagagaatttaagcaggttgtgcgcgatgagctacaaagaatcatcgaaggccagtccaaataa

SEQ ID NO: 250440 - DNA, 1503 bp, Klebsiella pneumoniae
atgagcgccgaggcacaccaggagatccttcgcaccgaaggacttagtaaattcttccccggcgttaaggcgctggataacgtcaactttagcctgcggcgcggcgaaatcatggccctgttgggcgaaaacggcgccggaaaatcgacgctgatcaaagcgctgaccggcgtttaccatgccgatcgcggcactatctggctggaaggccaggctatttcgcccaaaaataccgcccatgcccagcagctggggatcggcaccgtctaccaggaagtgaacctgctgcccaatatgtcggtggcggataacctgttcatcggccgtgagccgcggcggtttggtctgctgcgacgtaaagagatggaggccagggcgacggcgctgatggcctcctacggcttttccctcgacgtgcgcgagccgctgaaccgcttttcggtggcgatgcagcagatcgtcgctatctgtcgggccatcgacctgtcggccaaagtgctgatcctcgacgagcccaccgccagcctcgatacccaggaggtggagatgctgttcaccctgatgcgccagctcagggataacggcgtcagcctgatcttcgtcacccattttctcgaccaggtctatgcggtcagcgaccgcatcaccgtgctgcgtaacggcagcttcgtcggctgccgcgagacccgcgagctgccgcagattgagctggtgaaaatgatgctgggtcgcgaactggaccacaatgccctgcagcgggcgggccgtaccctgctgagcgataaaccggtagcggcgtttgaaggctacggtaaaaaaggaaccatcgccccgtttgacctgcaggtccgcccgggtgaaattgtaggcctcgccggcctgctgggttccggacgcacggaaaccgccgaggtgatcttcggcattaaaacggcggacagcgggaaggcgtggatcaaaggcaaacctcagaccctgcgctccccgcatcaggcttcctgcctcgggatcggcttctgtcctgaagatcgcaaaaccgacggcattatcgccgctgcctcggtgcgggaaaatatcgttctcgccctgcaggcgcagcgcggctggctgcggccgatcccccgccgggagcagaatgagatcgccgagcgctttattcgccagctggggatccgtaccccgagcgccgagcagccgatcgagtttctctccggcggcaaccagcagaaggtgctgctctcccgctggctgctgaccaaaccgcagttcctgatcctcgatgagccgacccgcggcatcgacgtcggcgcccatgcggaaattattcgcctgattgaaaccctctgcgccgatggcctggcgctgctggttatctcttctgaactggaggagctggtgggttacgccgatcgggtcattatcctgcgcgatcgccgacaagtggcggagatcccgctcgccgagctctctgttccggcgatcatgaacgctattgcggcataa

SEQ ID NO: 250441 - DNA, 447 bp, Klebsiella pneumoniae
atgagcgaaaaatacgtcgtcacctgggacatgttgcagattcacgcccgcaaactggccagccgtctgctgccggttgagcaatggaaaggcattattgccgttagccgcggcggactggtaccgggagccttactggcgcgtgaactgggcattcgtcatgttgataccgtatgcatctccagctacgaccatgataaccagcgcgagctgaaagtgctgaaacgtgcggaaggcgatggcgaaggctttatcgtcatcgacgatctggtggataccggcggtaccgccgtggcgatccgcgaaatgtatcccaaagcgcactttgtcaccattttcgccaagccggcaggccgcccgctggtggacgattacgttgtggatattccgcaggatacctggattgaacagccgtgggatatgggcgtggttttttttatcctttag

SEQ ID NO: 250442 - DNA, 261 bp, Klebsiella pneumoniae
atggacgttctcggcctcggccagccggactttctcctcgcctcgctggcgcatccctttgatgcgttgctgacgttggtgatattcagcagtgaccgggaatgcctgctgtttattaccatcccagacagcctcacaaataaaggaaccatccagacgccgaataacgacctttgttgcgtcgtgaatatcgtaattaaccagcactttattaccgtgctcgttattcagctcagcggagtaatacaggttattgaataa

SEQ ID NO: 250443 - DNA, 2361 bp, Klebsiella pneumoniae
atgtatcatctcgacaacaccagcggcgtcccggagatgccggagcccaaagacgaacaatctatgactcctcgctggtttggggagagtcaggagcaaggtgggataagctggccaggcgcagactggttcaatacagttcaggctgaactactgaatattttgtctgatgcaggaatacctcctaataagaaagtatttaatcagatcagccaggctattgcttttcttggctcagatgctttccgacaagatattgggctcagtgatggctttaaactgattggacaggttagcagtgctgcgctgttagcacagcttcccggtagtgagggtgatagggttctgctgcgttcatacaatgaaatcactgcagttgaattgcctatgggcggcggtgagttttattacgtcagttcgcttgcgggagaaaataacggggtcactgtattcaacgggtggtgtcgtaaaaatatcaccgaactcagtacgtgggatgcgggattagttccgggtgatgattcaaacgcgagtccagccattcaacgcctttttgatgctgcaccggatggctgcacaatttacatcgacggtcggcattgcataacgcgtccgcactatctacgtggaaaatccaatcttaaaatactaccacgtaacggtgggtttcttgacggcattacgcttaaagaccagttcgagtttattctggttgatgggtgggaatattacgccccctacgaaggcgcaacgcaggggtaccccggcgggattatctctgcgctggattgtccgggtattcaggttggccccggactgaaaatcagaggtcctaaaaagcggttcaataaaacagccgcagacgtcaccttgcgccgggagtacggtgattccggtattcagctgcgtaattgccctggcgcaaaaatcaacaaaattgacgcgtatcatttctggtcgtgggggatttacagcagcgtcggtgggcatgactcggaagccaatggaaactatgtaggtgattgtgcagtacagtcagggattaatatctggaacggctgtaacaactgccaggcaaacgacaacactgttaatgatgcccgtctgtatggtttggaggtggaagtacttgattccgtgatggcagtatacggaaaaattatcggggcaagaggaaggggtaataaggtatcaggctcgaagtgggctgttgccgctgtgcgcggcgtattcaccgcagaaattaccaaaacagagattgaggactgtttctacggttttaacgcagtcaaaaacaaggatgtcccgagaagaattgactttattcacaacaaagtaaaccgcacactggtccatttgcatgcttctggttctcaaaacgtgcatatggaccacaacgatctgattgagaccgtcaaaccggactacgcggtactgaaccagtattcggttattgttgacctcgaaaccgacccgaccaaattcaggattttttattccggtaacgagaacttgacgaccaccgtccagatacggggtgtggtttacacaattgccaacaggaccgttgttgccgatgctaactacacctatggcgaaagccggtatgttatcgtcaccctgacaaccgagctggccagcgatgttgaggttggcgatacgctgcttcaaagtaccgagttcgtcgacactacggctcatgcaacttcacttatatacaccgaggacgatgcgtacctgaaaggggtgacattcgggaaaaataacctgattggtgcctttaaagtttatgagcgatttgaaaccgtattcagcgataccgagaccattgctatcagcagcttcggtcatagcataatcaaaaccgccaactcagccatcaatccggcatatcgttttgccagagcgagtgcatgggctaacgcaattgagatgctcggaattgaccatacagaggggctgagtttttaccttcctgataaatcaggagggacgaaaaacgttaaaccttaccgtgagattcagcgttcaaaaatcgtcagtattgcagccggcgggactttcccggttgagtatttctacgacaaatcggatcggatggttattggcattgacgtcacgctgaccaacgtcaaatcaggctcaaatatccagctgcgtattgacgggacaactgtctatcctgttgtgtttgcggccaatgctgctaccactgcagtggcatcattcaaagaccaaaatatgacggtgggtctggcttcaaatgcgaacacgggaaccggccgtcactcaatgcaacttttcacatccgacaattccgccgtctgtgacggttacaccatcaccctgtatttactgtga

SEQ ID NO: 250444 - DNA, 255 bp, Klebsiella pneumoniae
atgtcatttcaaagaacagtgaaagttactcctgtgaagttttatcagtctctggctggggtacaagttcctgaaccggaagaagaggttactgccacctatactgcaatccgcctggagtcgctggacagcgtcaacaaactggccagcgtttactacagtatcagcctggataatgcggaggtgctggggtatgcatatgtgaatttcacatataaagatataggtaatttactccaggaggggctttgttga

SEQ ID NO: 250445 - DNA, 192 bp, Klebsiella pneumoniae
atgaacttcacccaatatttcttttataacggaaaacataatcggacagcaactaaatattcaaaagatgtacaaagtaagttattgtctccaatatcttatgttgcagattccatagatgaactgaaaaaatccttaaaacgttcgggatttatgacacaaaagttagacaatcttttcctaaatttataa

SEQ ID NO: 250446 - DNA, 378 bp, Klebsiella pneumoniae
atggatttttttagcacgcagaatattttagtacatatacccatcggcgctggggggtacgatctctcctggatagaggccgtggggacgattgccgggctgttgtgtatctggctggcgagcctggagaagatcagtaactatgctttcgggctggtcaacgtcacgctgttcgccatcatcttctttcagatccagctgtacgccagcctgctgctgcaactgttcttttttgccgctaacgtttacggctggtatgcatggtcgcgacaaagcagcaaccatgaggctgagctgcagatccgctggctgccgcgcagcaaagcgctgggctgccgcgcagcaaagcgctgggctggctggcggcctgcgtggtag

SEQ ID NO: 250447 - DNA, 819 bp, Klebsiella pneumoniae
atggataatgagtttcgctaccaatcgaatgattacgaaaggcaatcacaacgctttgtacttccactgttcattaaagatgagcttggtaattataaccagtcttcaacagcaactctggtaagagttaatcaagtccatcattatgcaatttttgcagcacacgcacttgcaggaggaattgatataaatgacgtgttttatttttctccagatggttcgttttatcaattgattgaacattcttttggtttcaaggtttttgaaaacgatgacatagtattggttgatttttttaatcagagttttgagttaaagaattactttaatttagatagtaatgaaatccctaatggaatttcattagactttttttgttggacaggatttccattgagtcaatccaaaaaaaaagaaattcacaatacaaaatcacctgatagtttaatatctgaaatggtacatagcgatgaatctggtaattatataaagaaaattaaatatctgactattgcatctaaaactatatatttcgatcatgatttcatcaaaggttttcatagtcgtaaagaaataaaattaaaatataaaggtaaattatcaaaatcaccatcacttgcaggcatgagtgggggagcaatgtattttactaacttagaacaaaaactcgctaatacattagatgatacgtttgtatttgctggtattggcatagagcatagagttgatgattccatcgtaggagtcagcagatacagagtacttgagttgataaaatcatttgatgaatcacatccggttcatttctctcttgtttaa

SEQ ID NO: 250448 - DNA, 357 bp, Klebsiella pneumoniae
atgaaaaaatattcaattgcagtacttctaatatttacttcaattaaatcattcgctgtgactcctgctggaaaaatagagaagccttttgttgtcaataatgaagtgatttgcctgaaagaaattcagaaacaaattactccctatctcaagtcatttgaacaagaaggaggggttaaatacaagtacaatgttaaatctggtctgtcgtatatggacgctgtagggttacgattagagatcaaccgcgtggattcggggctgaatgtgcgtgtagccgatcttgattactactggctacaggaacggggcagtatgtgcgaacctgagtacatggtacttgaccgttctctatga

SEQ ID NO: 250449 - DNA, 900 bp, Klebsiella pneumoniae
atgttgataccacgtttttttaattggattgaatgtacttttgaagaatatgagcgttcatgcctaaaatatggatataattgtgaatcctctccagcctttattaagttcatgttgcaattaggtgcaccgctaaggtttttttcttacaaagtaaaaggcaacatcgttggaagtatttgtgtagatcaaggatggattgcaaatgacatcaaaaataaaaaaaaatctatcggcaccctacccgtacctaaatgcgcaatattactgccattcagctcagagataaataaaaaaatattattgccattccattcaaaatgcctacacccgttacagagaaacctctttctgaattcatcttactccctatttagtaaaagacagattgcaatttcaaaggatcttaataccgaattttcaaaaaaaacaatcgccacaagagatagggaattgcgtaaatttcatcgttctggaggttcttttaaactaatttcagaaatggatggaaatacaatcttcgatatatatagtgaactttattatgcgcgaaggctcaatcgaattgaagatgaagaaataaacaaagagtttttcattaaatttcattcatgctttaaaggcgaggtaatgttaattgatgatgagcccgttgcaattcaattactcctttcagtagataacgtggctggtttttttgttgactttattaatattggctataaacaaaatgacaatataccgtcattgggtactataatgatgtggaaaaatttaatatctctaactaccgaatcacagtctaatggaaaaaaattatactactcatatggttttatgtctggagagtataagaaacggtggtgtaatcctcatagaacaggccgagtattaatttaa

SEQ ID NO: 250450 - DNA, 366 bp, Klebsiella pneumoniae
gtgttcgttgcactaaaaacagataacgacagttataccggtacaccgctgctggataaagacgcccgggtggtggaaacagaacacggaaaaaccctgtacaaaggcaaacgtaaggtcaacggccttgaaatttcagaatggtggattaaaagacttgtagttaatgacgcagacccatcgctaagttatattttttatctcactatccatgaaaataaaattaatggcagcaaaccgcttgatctgaaaatgtcttaccgaattgatttcctaaaccctggagatgtattaaccgagaatgaactggtagctctgtgggagaatataaccgaaacaattaaatatcaccccacccggtggtaa

SEQ ID NO: 250451 - DNA, 753 bp, Klebsiella pneumoniae
atgaggtacaaaactctgccatacacgtttcaacgaaacggtaattactatctgcaaatccggctttcaaatggcaggatgtataaaaaatcactccttactgatagctatcaccaagcctcagctttgatgattaacatcactccgcacatcccatttgttaaatcattagcaactccgactccgatgtttgatgcgtttatctcaaacctgatcgtgtcaggacgcaagactgtaaaactcccgctgttatccagtctgccgcttgttgcatactctaaaaatggggaaccattggcacaagttgagccggataacgcaataactctctctgatgcttgggctatgtacaaagtcgaaaagggggggaattggactaaatcgatctcaatggcgaatgaacgttacatggaagtattgcttgcagtgttggggggaaataaggacgtaactgcgatcaccaaacaggacattagacaggtaatggaagttgttgagaatttacctaagcgtgttgttcagccgtatcgctcgatgaatgttcagcagttgatagagtgtgatgacgtgccatctgatgagcttgtgggcgttgaggctatacataagcatctcaagctctacaaatccttgttcaaaacatttctcaccgataataaagatattttatccaaatcgccaactgatggtgtagtggcggcaccatcaaaagccagatttggtgcatacagttcagctgagatgaagaagtga

SEQ ID NO: 250452 - DNA, 513 bp, Klebsiella pneumoniae
atggcgttgaaagtttttattagctactcgcacagagatgaaacgtataaagaaactttagatgaacatttatctttgcttaaacgtaatgaaataatcgatacatggaatgatagaaggttaattgctgggcaaaaatgggaggatgagatatctgaaaatcttttggagtcagatattattattttccttgtaagctcaagctttatttcatcagactattgttatggcattgagatgaaaaaggcattagaactacataacagtggtaatagtatcgttgtaccattaattattcgcccttgtgattggacatcggcagaattcggaagtatacaaggtttgccaaaagatgctgtccctgtttctaaatgggagaatgaggatgatgcgtggttaaacgcggttaacggtatcaagaggctaattggtagcattagtgaaaaaaaaactaaccacttcatcatcctcacaggttttagtaagcaaagatactttaaaatggttagatga

SEQ ID NO: 250453 - DNA, 1182 bp, Klebsiella pneumoniae
atgaagcttaatgcgcgacaggtagacgctgctaaacccagagagaaagcctataagctggcagatggtgctggtttgtatcttgaggttgttccctctggttccagatactggcggatgaagtatcgcttcaatggaaaagagaaacgtatggcttttggtgtctatccaacagtgtcccttgcgcaagcgagagcactacgtgatgaagccaaaaaaaagctggccgagggcatcgatccgtctttcgccaaaaaagaagaaaagctggttcgcgatgtgcagctcaacaacacatttcaggctgtggcgcttgaatggcacggaacgaaggtgagccggtggtcagaaggttatgcctccgacattatcgaagctttcaataaagatatttttccctatatcggccagcagccggtgaatgaaatcaaaccgctggttctgctgaatgtgctgcgtcgaatggaaagccgtggcgcgacagagaaggccaagaaggttcgccagcgctgcagtgaagtctttcgttacgccatcgttaccggtcgtgcggaatacaatcctgcagcggatctaaccagcgcaatgtcagggcatgaatcgaagcattatcccttccttactgttgaggagttaccagacttctttaaagctctcgcaggctatacaggaagcccgttagttgttcttgccgctcgtctgcttatccttacgggagttcgtaccggcgagcttcgaggtgctttctggagtgagtttgatcttgagaaagccgtgtgggaaattcctgccgaacgaatgaagatgaagcggcctcaccttgtccccctttctacccaagcgctggaaatcgtacagcagctcaaagggatgactgggcaatatccactgatattcccagggcgaaatgatccccgcaaaacgatgagcgaagcgagtataaatcaggtgttcaagcggattggatatacaggaaaggtcacgggacatggcttccgtcacaccatgagtaccattttgcatgagcagggatttaactcggcgtggattgaaacgcaacttgcacacgtggacaagaacgcgattcgtgggacgtataaccatgcgttgtatctggaagggaggaaagagatgatgcagtggtatggggattacgtggatagttgcgagagtaacaattaa

SEQ ID NO: 250454 - DNA, 513 bp, Klebsiella pneumoniae
atgtacgcggtctgcttctactggcgcgcctggaccttcgaaccggggatggactttggcgcctcggcgtggccacagtttatccagggcttcgcggtggcctgcttcttcatgccgttgaccaccatcaccctctccggcctgccgccggagcggctggcggcggcgtcgagcctgtcgaacttcacccgtacccttgccggctccatcgggacctcgatcaccaccaccctgtggaccaaccgcgaggcgctgcatcatgcgcagctcaccgaatcggtgaccccctttaaccccaacgcgcagcagatatacgatcagctgcagggcatgggaatgacgcagcagcaggcgtccggctggatagcgcagcagataaccaaccaggggctcattatctccgccaacgaaatcttctggatttctgcggctattttcatcctgctgttggggctggtgtggttcgccagaccaccgttcagcgccggcggcggcggcggcggcgcgcactaa

SEQ ID NO: 250455 - DNA, 993 bp, Klebsiella pneumoniae
atgcttaatctgcttgccaactctgatgcaaagcgttggatcaatgatgctgtcaaacggcattcatcagaaatttatggggatataaaatctgctgtgatttggaccaacgctctggatgagaacggagggttgattgttccaattgatccttacgagctatctcgacgaatcaatcaggagccattcatgatacttcataaccatgacccaggtaacccaaaggggcaggtcttagaaagtgctgtttttgataatggctctggtgttgtctttgttgcagctatcatggggttctatgctggaggtaataccatagaattcagatcaatggatttgaatctacatgatatttaccaatctcctcgagagttgcctgacatgccggaagaatcctcaattgaattggtttttgatccaagagatgtcaatccgcagtggattgaacacatcagcaaaaatgcaccactaagaattcaggtcaacgaatcatcgtacaatgatgcccaaacgactcaagaactgattagtattgggatcggctacttagctattgtctggaatccttttgtgactgctgttgcatcggaagctggtaaaaaaatgtatacagcttttcacaactggatttcaaaattattcaatgagttatctgaaagaaaaaatcccatcatcaatcttgtttcccatcaaaacggatgccaagtatttttcatattccgtggtaaagacgtgaagcaacactatgctgctcatcaaatgttatcgagtgctggagtacaagctgcagagctgataagaaaattaaaaatgcaggacaaggttccaacacagctaacatatgaatgggataaagaagcacagttatggtatccatcgtacgcagtgcttactgacaaaagcatcattgttgatagagggacacttatcgctatagaacagttgcctaagggcttaagtctcggatttagtaaaggaaaagcaaaagtatga

SEQ ID NO: 250456 - DNA, 201 bp, Klebsiella pneumoniae
atggccgttgcttccttaccagcctgcggagagagcaaagctgactgcatcctgcagcgctaccaccgctctacccttattttcagcattcagccttataaactaaacggtatttctatccctgcgcttgccccaacgtcatcgctgtcgctgttgttcgcgtttgtgtaccacaaagaggtattcagacgaacagactga

SEQ ID NO: 250457 - DNA, 1134 bp, Klebsiella pneumoniae
atgaagaaaaaaattgttagattttcggcattagcgttggcgattgggtttttatcgggttgtacaatcatccctggtcagggattaaacagtctgcgcaagaacgtggttgagcttccagacagcgactacgatctggataagttagtgaacgtgtatccaatgacaccaggcctgatcgatcagctccgtccagagaccgttcttgctcgtcccaatccgcaactggataatttacttcgtagttatgaataccgtattggggtgggtgacgtgctgatggttaccgtatgggaccatccggaactcacaacgcctgcaggtcaataccgtagcgccagcgacaccggtaactgggttaactccgatgggaccatcttctatccttatatcggtaaggtgcaggtagcgggaaaaacgcttagccaggtacgccaggatatagccagccgtttaaccacttatattgaaagccctcaggttgatgtaagtattgctgcatttcgatcgcagaaagcttacgttacaggcgaagttatgaagtcaggccagcagccgattacgaatattcctctgactgtaatggatgcgattaataatgcaggtggactggctcctgatgcagactggcgcaatgttgtgttaacgcataacggtaaagatacaaaaatatcactgtatgcattaatgcaaaaaggggatctatcacagaatcaccttttatatcctggtgatattttatttgtaccgcgcaatgatgatctgaaagtgtttgttatgggtgaggtcggcaaacaagcaactatgaagatggatcgtagcggtatgaccttagctgaagcaattggtaatgcagagggggtatcgcaggcatttagtgatgcgactggggtgtttgtgatcagacaattaaaagatgacaaacaaggtaaaattgcgaatgtttaccaactaaatgcacaagatgcttccgcgatggtattaggaactgaatttcaactacaaccatacgatattgtatatgtcacaacagcaccattggtccgttggaatcgtgtaatatcacagcttgtcccaacaatcacaggggtacatgatatgaccgagactggtaaatttattaggacttggtga

SEQ ID NO: 250458 - DNA, 306 bp, Klebsiella pneumoniae
atgaattttgaaatacctcaggcaatccaaggcgaagcgcttgccgggttaatgctgagtgaagatcacggaataggcgttaccattcaggaatggtattttgcgcgcatgctgaaaacaaatacaaatacttctcgggatgtttacgctaaagaaaaaagtgatgatgattacatgcgcgaacacttatacaacatgaagttgcaatgcctgcatgcggcgcttattcagagtgggcaatttgataaaacaaatgccaccaatattgcggaagctattaatgctggatttgatgccatcaagtaa

SEQ ID NO: 250459 - DNA, 1701 bp, Klebsiella pneumoniae
atggacgctatctttgacagagtcgtaagggaattttttccaaatacaaccatacctttttggaaaaaatggctgttcaggacggcatttggcaataaggtattttctcgcttaatatataacgagcgacttgttaataaaaatggggtcgagtgggttaatgcagttgttgaactccttgagttgaaatgtgaaagcgaacaccaccaatttaacaacatacctgagcatggggctacggttgttatttcaaatcatccgacggttatcgatggacttagcttaatacatacggtctcccgagtcaggaatgatataaaaataatagccaatcacgttttgccaattatattcccccaggtatcggaacttaccattggaattgagaatatggccggtaagatgagccataaaaaattccgcgagatgaacgatcacctgcgaaaaggaggcgtattgattatatgtcctgcgggtaagctggctaactggtctctttccgggttacaggagcataagtggaaccccggttttttacagcttgctatgagaaataatgcagcattggtaccaattcatattacgggagcaaacagtaagatttattatcttactgcaacattctggcggcaactgtcgaatatgatggttattcgtgaagctctccgccatcatggcaagaccatgaaaatcaatataggacagcaaatagccttatcctcgtttaaagaatacaataaagatctttctgccgcggcaaatgtatgtttgacgcacctccagagtatagcgaagaatggcccggctatgttagatacgattgcgccgcaagaattagaaccaggtaaaaaggagctaattagcgcaatagaggagtgcgaaatattaaggcagtttgaagacggtagaaaactagtgatatatcgctgtaatactaaccgaacctcacctattattgatgagttagggcgcttacgcgaacgctgttatcgcgatattggtgccggaactggtaacgaccgagataacgatgtttttgatgaaagttattatcatatcattttgtgggatccttctgatgtggaaatcctgggagcatatcgtgttatgcccgttggcgagcagctggcccaacatggtgtaacaggcctctatagcaacagcttgtttaaataccatgataatgcctattcctgtttagagaagtgtgtggaaattggccgcggctttattcagaaaccttatcaaaaaagtaaggtgcttgattatttatggcaagggatatttgactttataaaaagatatccggactataaatacttgctgggtgtgctgaccattcctggaacttttcctgaaaaagtacagaaactcatcatcagtttctataatatatacttttcctcgacagctgatttttgtacgccgatagcattgttcactgccgaaaatgtacaggatgatactccattttgtggcgaagattttagagcagactggagcatgcttaatcacctgctgagagaagaaggttatgaacttccctggccttttaaacagagtgctaaatggttctccccgggcggatcgtcgattcttgcattcacaaaagattattcttttaattcgatagctgggttaaatctgagctctatagataaattgaatgaaagctacgttaagcattatttaagagattaa

SEQ ID NO: 250460 - DNA, 288 bp, Klebsiella pneumoniae
atgccggagagtcacccctgcctttctaccttcttcagtaaggtagagctgcgttcctttagccttggccaggtatgttccatcgttgtgatagatagggatgctggtagtgaaactagcatcaaccgcactctcaacactaataagtggggtgtctttatactgaagtattactgggacgttgatgaaaaaattagaaccaagctcaactcgagggctttcactaaatacgagtttattctgcaaatcactcatggatacatcctttttttgtcaaaaaaaacctaa

SEQ ID NO: 250461 - DNA, 1329 bp, Klebsiella pneumoniae
atgataaaaattgcgcgcattgccgtgacgttgggtttgctttcctcactgggagcccaggctttcgcggccgggttagtggtaaatgacaacgacttgcgtaacgacctggcctggctttccgatcgcggggtcatccatctgagcctgtcgacttggccgctgagccaggaagaaatctcccgggcgctaaaaaaggccaaaccgtcctattcttctgagcaagtggtgctggctcgtattaaccagcgactgtctgccttaaaagccgattttcgggtcactggttacacctcaaccgatcagccgggcactccgcaggggtttggtcagacacagccggcagataactcgttaggcctggcgttcaacaacagcggcgagtggtgggatatccacctccagggcaacgtcgaaggaggggagcggatcagcaacggatcgcgcttcaacgccaacggctcatacggcgcggtgaagttctggaaccagtggctctcttttggtcaggttccgcagtggtggggaccgggctatgaaggtagcctgatccgcggggatgccatgcggccgatgaccggtttcctgatgcagcgcgcagagcaggcggctccagagacttggtggttacgttgggtggggccatggcagtatcagatctccgctagtcagatgaatcagtacaccgctgtgccacacactaaaatcatcggtggacgtttcacctttacgccgttccagtcattggaattaggcgcatcgcggataatgcagtggggaggggaagggcgaccgcaatcctttagcagcttctgggatggttttactgggcaggataataccggtaccgataatgagccggggaaccagctggccggatttgattttaaatttaaactcgagccgaccctcggctggccggtcagtttctacgggcaaatgatcggtgaagatgaggctggttacctgccatcggcaaatatgttcctcggcgggattgaagggcaccacggctggggaaaagatgccgtaaactggtacctggaagcgcatgatactcgtaccaatatgagccggaccaattacagttatacgcatcatatctataaggatggctactatcagcagggttatcctctgggtgacgcaatgggcggtgatggtcaactcgttgccgggaaggttgagctgattaccgaagataaccagcgttggagtacacgcctcgtttacgccaaagttaaccctgagaaccagtcgatcaataaagcattcccccatgccgataccttgaaaggggctttgttgaataaatcgaacttttgctga

SEQ ID NO: 250462 - DNA, 780 bp, Klebsiella pneumoniae; identical to SEQ ID NO: 210237

SEQ ID NO: 250463 - DNA, 1329 bp, Klebsiella pneumoniae
atgtttgaagcatattcccagcaaaatctcgaaatgacttcatttggacactgttatcagcaattggtttatcagtcctttgatcacgcaaaaatccctaaaaaagacgttgaaaaatatcttaatgttttgacagaattagcttggaaaatgcatacaaacaatgggcagattcttgaatctgagttgccacaatttttcaaagactatgggaatgtctatctaacagtaaatggtgaagaaattattaagacacttagaaataattccatacttttttctgatggttttaatataaagtttaaatacccttatctattctatttcttcgcagcaaagaaaattgcggaacagtatgtacaagacgaacaggttcgcaatgatttccgcaatcttttgtcatcattgcacagagaagattatgcaaatattttggtttttgtaactcaccatactaaagattcttgggtattaactgaaattaaaaatactctttctgaactttttcatgaacagcaacctgcgacacttgataaagatcagcttatctttatgagtgaatttattgcacaaattcctgatcttattttagaacagagagaaatcaaaactgaacgtgaaaagcatgatcagcaactcgataaaatcgaaaaagcacattctgaaataaatgattcagatgatgattacgaacaaccagatatattagcaaaaataaataaaacattcaaagggatggaagtttcaggacaaattattcgtaatagatatgcaactctaacaaggcaagatttatatgagttagcatctaatggtgccgaaactggcctgagatttttagattatttcattcagctttcgaatactgcgaaaagtgaaattgtatcacttattgagaatactctcaaagagcatccgaatctaacagatgaacaaataaataagcaagccaagcatgtgtttttacaaatgacatatggagtaattaatggagttatccgtaaaatagcctcgtcaataggttccagagaggcttcagaaatttattcatctctaaaatataagaactccgaatctcctgctattatcctgcttaatcaagccattgaattacaatttatgcgagcaattaatattcctaaactttctgataccacgcagaagttaaaaggtaacccggtctgcattagaatactaaaggagatggtcattcagcatacctatatgttcccggttggatataaagaaaaacaacaaatagccgagttgctcgacttaagtgtcaagcaacaacggattatggactcaaaaaaaatagggaaagcttag

SEQ ID NO: 250464 - DNA, 816 bp, Klebsiella pneumoniae
atgggtaaaatttctgaacgtttgagacatgcaagaattagtgaggggcattgcgtcatttgcggttcatatggtctattgagtaaggagcatgtgccacctcgttgtgcaactactattcaaccaatgtttcaaaaaacagtgtctgaacattattactctgatgaaataaaaccaataaatgctcatgccggagcgacatttaaaaccatatgcaagaattgtaatggcaacatacttgggagtttggatcatgagatcaaggttcccatcgagaatttcataaatctaattaggcaatatttagctggtgttcatttttacggaaatgttatctctacgcctttcaatgcagtaccttttttgcgtgcaatggagggtcatctgctcgcagcaacatccgtagaagtatgcaaaaatgctcttattgatagtgaatattacacaccattaagaaaatttgttttaggggagaataagaaaatagaagatactcatgatttctattattggttttatcctaacagaacacagataactgctcagctaacttcaattttcaacgatggtcatctatgccactgtagctgtatgcacttctttcccatagcttttttgattacatttaaagatgaaggaacatatccggcacatgcatccaaattaaaacttggcgacgaaaaattatatttttatatgactcaagggaatttggactatgtcgcatttccattcgcaccacttaaaggaaatcaaatgatgctgatgacagacactttcacttcggctttgttgaataaatcagatttcgggtaa

SEQ ID NO: 250465 - DNA, 222 bp, Klebsiella pneumoniae
atggcgccggaggtgccctgcccggcggcgctgcgcttgccgggcctggggtataggaccttacgggaggatcccgtaggccggataagcgtagcgccatccggcacaaaggcgggtatggccccggggatgtcctccccggcggcgctgcgcttgccgggcctggggtatatgggcctgcggggtgccggatataatgttattggtatgcaactctattaa

SEQ ID NO: 250466 - DNA, 624 bp, Klebsiella pneumoniae
atgcatcagaagattaatgaagaaagtctcactttaggtaagggggagatcctgcttatcaaccagtttgccagacacgaaattgaagccgcagggcagaatgatattatcatcaattttattattaagaccgaatttttcggtcgactcatgtccctttttgacgaaaataacatcatttcccgttttatcctttcagcaattaatggcagaaaaaaacatggagagcatattcactttaaagtgggggaaatcgacgcaattcaaaacattatgcatgtcatcattagcgagatctacagtaataaccacttaaaagagatacgcgtcaatttcctggtgggactgttgatgaccgaactgctctcgaatgtgcaagccagcgattaccatatcaacggcagttacaatgaatcacttgccatggccgtgttgagatatattgataccgattataaaactgccagcctgaaagagatctcctgtcgtttaaatcagcctaattataaggtgagtaaactgataaaagacttcactggtaagaactttagcgatttgttggttgaaaaacgcctggatgtgttgatccatctggctttgttgaataaatcagatttcgggtaa

SEQ ID NO: 250467 - DNA, 540 bp, Klebsiella pneumoniae
atgcgggacaatatctggtttacatataaagcacgcataaatgcacatcatcggttagagtggcttgagaaacattctcagttcattctcgtctggtatgccatatttagtgcggtactttccgtcatatccatacgcttcccaaaggtgctcgggggtaataccgatattatcgcgttaatactttctgtggctttgctaggtatttctcttgtagtttcaaacctcgattttcgcggaagagcgatttccatgagaaggaactatctggcgttacaacgactgtatgctaacacttctgatgaggttcctttaacatctgcacaactagataaataccatgaattactcgatgaagttgagaaccatcttgatattgatgataaggcagcacgcgtagcccaaacaggactgagatcaaggatccctaccgatgatgaaacgcagagtgttaagcgctggaaagcgaagcgatttatcttcacttactccttctatttgctccctctgctaattttttggataaactatgacagctaa

SEQ ID NO: 250468 - DNA, 1371 bp, Klebsiella pneumoniae
atgacagctaaccgaaaattcagaaagtctttttcagaacgaaacctccttaagatatataaggaaaggataaaagaatctggagctattggtattgaccgtgtacgccctgccaaactagaagctctaattaaaagtgaagttaaatttatttctgaaaaggttcaatctggtggctataatttcaccgcctataaagagaaactaatctcaaagggagccaactcaaatccgaggcagatctcaataccaactgccagagacaggattacgcttcgagctctctgcgaatgccttacggaaatttaccccgaatcgaggttgaggctcccccacacagtcattaattccctaaaggttgcactggatagcggtctttatacagagtatgccaagatagatctcagggctttctatccttcaattgaacataagctaatagctgatgtgataaaaaacaaggtccggaaaactgagattagaaaattgataatgtcatcgttggtggtacctacagtaaacgaatttaaaggcagcaaaggttcttcatcaaatactataggagtgcctcagggattagcaatatcaaacattttagctgaaattgccttatctattttcgataaggagattaatgcaataccagatatctggttcatacgctacgtagatgacattctaatattaactccggatggacaagccgaattaatagcatctaatattattgaaaaactccaacgtctgaatttaaatcctcatccattaaatgacgagaactcaaaatctaaagctggctctcttcgtgaatcttttgactttcttggctatcacataagccaaggagaactgttaattaaacatgaaagcattctcaaatttgaatcttcattggctaaaatcttcactgcttacagacacgcattaatgcaggccaagagtaagacagataaagagcgtgcgatagcttactgccagtggaagctcaaccttagaataacggggtgtgtattcgaaggaaaacgccttggatgggtatcatatttttctcaaataactacaacatctcaacttcgttccgttaaccataccgtgagtcatctcattcgtcggttcaggctctcatcagatataaaacaaaaatccttgataaaaacattttatgaacttcgccgtggaactgcagatacattcaaatacatacctaactttgataaccttgatatagttcagaggaaggaactggtttcaatgtgggtaggcaaagccaaagcagaaaaaatgagcaacagtgaaatcgaaaggcggtttagatatataattgcaaagtctgctaaagaacttgaagaagacatctcaggaatatcataa

SEQ ID NO: 250469 - DNA, 1953 bp, Klebsiella pneumoniae
atgtatttttccggattatacaagaccttaagaggcttagaagaaaaaaaattctacgatatcgcattattatttttgagcataaaaggatatcctgatttggagatcattgatggcaaaggtgacggaggtagagatgtcagatcaagttggaatcatattagaattcaattaagtgtgcggaaagactgggagcaaaagatcaatcatgaagcttctcttgctgctagcgctaacagaaaccatttcatatacgtaactaatcgccgaataaatgatcatgagagagataaattccttcaagaggaatttaaatataaaggaaagattgaagttacaatatttgatcttgcatctatctccacatcactttctctacctggatcaattgattctgttaatacgatactaggcctgccaattactggtaaaatagaagcaacaccaaaagaaattgctctcagtaatactctgttattttctagtgaagctaaagaattaaaagatgaaatcatcgagaattgcattttagctcatattttttctgacgatggagtgtcagaatcatcattgatcgaaaaaactttaaatgatctaggaaataaatctctgagtgttcaggttgtaaaatcaattaataggttaaagtcgaaaggaaagataagaattattgaaggagcttttactttaagctcagaggttagaggtgaattgaaattatcgagagatgattttgaacaggccaagttaaaagatcttaatgaattgatgagttcttttaatcttgataagaacgatgcagaattattgattaatatttcccttgagattttgtcgagaaagcagttatttcatggcgatgaagcatactcagtacaattacaagattttattgccaaacatagtcttcagaggagaaagcacgtcctttatgaggctttatccaaattaacgtctgctcgaattactgcatatggagatgcaattagccacgtactaaagacaaatactttcgatatattcagatcgcttggtagaagtcattcgataaatgtaattctagattcaagtgtagctatgcctatgttgtttggactaagcttttctaaagtaaagtcaagatacggaatcggcgcagctgctatcaacgaaatgtgccatgctcataaatttaagttagttgttcctagaccttatttaaatgaaatggcaagccacggcttaaaagcgttagaatatgcacatatatacaatatcattggtgatgagtctagatccatcttaaaatcatcaggtaacgcctacttgagtcattttggtcatattcgcgatgataagttaccaggctatgaaatgagtatcaacgactttctctcatactttgggatccaaaataattctactctagctaaaattgagagacgtatagaggatctattaagctcactagggattgaggttgtaaatatgcctcgctggaaaccggagttaagatcagagatccatgcacaaaaaccacaagaggcgtcaataataatagaccatgatgcctcagttctcactatgttgtctgatgctacggaagaaggatatatttttgctacttgggataaagttttaacagaactagtagaagaaataagcagagtatatgctgataccccgagtagtgttgttgattttctctcaatggcaaacgattcagaatttgaaatggagcaaactgttagcttacttgattctttagtttattgtgatgagaaaaaagcagaagctctggctaagaaaattgaggcgataaaatcatctgaaactgctttttcgcttcaacggttcattgatgacgcaagaaaaaaatcatcacggatgacagatcctctagatattgtaggtgtatttttttccgagttaaatgatggagatgaggaattatcaggcgtcgacagcaattaa

SEQ ID NO: 250470 - DNA, 978 bp, Klebsiella pneumoniae
atgtccaccagaaacaaaccagatggcaatgcgttaattagcgttgtggaaaggtttgttactgaggcaaggaaggaggctgatgcgaacggctcccaggtatcattagtaattcataaacgccttgccgctttgtcagatatggtgggcggatatgactttgcgaaggtcattgacgcattctggcgcgggcacgagcaggataacgaaaccttaaaatccaatgccattcgctggttgcgaggcgagtacactaccaaaactgatgcccgtaatgatcttgacgttagaaccattatctcagacgcctcattctatgattctttgaaattgatgagcctttttgtccgtcaggcaggctatgccggacttttagttagcctcgacgagatggtgaacctctttaagttgaataatacgcaagctagaacagccaactacgaacagatcttgcggatcctgaatgactgcctgcaaggctccgccgaaaatattggttttatcctcggggggacgccagagtttcttttcgatccacgtaaggggctctacagctatgaagcgctccagtcgcgtctggcagaaaaccgattcgcacagaaagcagaagtgattgactactcgtctcccacgctgcatcttgccagcctcactcctgaggaactgtatattttactgaaaaatcttcgtcatgtttatgctggtggagatcccgcgaattatctggtgccagatgatgctctgaccgggtttctacatcactgcagcaaaaccatcggagatgcttactttcgaactccccgcaataccataaaaggttttctggatatgctggctgtgctggaacaaaacagaacgatgaactggcaagcgcttatcgagggggtggcgattgaagaagacaagcccagcgatatggatgacgccattgtggaggaaagcgatcacgatgatggtctggcgaatttcagactatga

SEQ ID NO: 250471 - DNA, 2199 bp, Klebsiella pneumoniae
atgagcagtgcctacaatagtctcgatccccgtgtccgtaggtgggtttataagcaaggctggtcatcattaaggcccttgcaggagagttctattccagcaattttagcccgtgatcgtgatgtactaattagtgcaggtacagcagcgggtaaaacagaggctttctttctgcctgcctgttcggcggttgcagatctcaccggtggatttggcattatctatatcagcccgttgaaggcattaattaacgatcagcaccgtcgtcttgagagtcttggtgaagccctggaaatgcaagtgacgccctggcacggggatgtaccacaaagcaaaaagaagaacgcacggacaaacccgtctggcatcttacttatcacacctgaatcacttgagtctttgctcataaactcattgggttggctcaaacaggcgttttcttcagtggcatacattgttattgatgaattccacgcttttattggctcagagcgtggtatacagctgctttctctgcttaatagaattgaccatgtgctaggacgccagttaaatccagttccccgtatcgcgttgagtgccacgctgggagagctggaaaaagtgccagaactattgcgcccggataagagattaccttgtgaaacggtaacagacagtaatagcacagccacactacaggttcaggttaaaggttatcttgagcgggtgcccgaaaaaggagaagagctccagagctctgccgaacagctcgtctgcgcggatattttcaggctatgccgtggcaattcccacttggtctttgctaacagtcgaaagcgtactgaaagcatagcggcaacactgagcgacatatgtgaggcaaatgtcgttcctaacgaattctttcctcatcatggttccttggctagggagttacgtgagacgcttgaagcccgactgcagaaagggaatttgcccacaacggctgtttgtacaatgacgctagagctgggtattgatattggtaaggtgcagtcggtcatacaagttacacctccgcattctgtttccagtctgcgtcagcgtatgggacgttcagggcggcgcggttccccatcggtgctgagaatgttaattactgaatctgaacttaccgcaaccagcagcattgtggatcatttacgtctgcagttggtccaggcgatggcaatgatcaggttgatgatctctaaacgctggttcgagcctgcagatgtccggcagaaacattactcaacgctgctacaccagatccttgctattactgcgcaatggggcggagttcgtgccgatcagctctggtcacaactttgccagacaggtccgttccggaatgtcgatataaatgacttcaaaagtctgcttacacatatggggatatgtggcctgctcactcaacttgccagcggtgaaatagttgtcggggctgcgggggagaagttgactaatcactatacgttttatgccgtattcaatacacctgaggagtttcggattgttacgggaaaccgaactcttggcacagtgcctgtagactccccacttttgcctgagcagcacatcatcttcggcggacggcgctggaaagtgacagagatcgaggtcgaaaaaaaggttatctatgttgaggcgactaaaggcgggcagccgccactattcagtggtagcgggatgtctgttcatgatgttgttcgccaggagatgctcgctatctataggggaaatgattaccgtatcgtggtaggcagcaagagagtcgattatgctgatgctgctgccagaagcctctttgcggaagccagtaataacttccaacgctacaatctacaaaatgactgttttattgccaccggtcagaactgctatgtgatcccgtggatgggggataaaattgtcaatacaattacgtccctgcttatacgttgcggctttaaagccagttcatttgcaggtgtgattgaggtagaggattcaaacgttgcctctgtccagcgtgcacttaagaaaatgttattgtcggggttaccttcagagtttgagcttgctgcagttgttcctgacaagtatctggataaatatgacgagtatttaccagagtctttgcttgcgaaaggatatggggcaaaggcgtatgatatggaaggaacgtgcatctggctgcagaaataccttcagtag

SEQ ID NO: 250472 - DNA, 579 bp, Klebsiella pneumoniae
atggccactagttacattagtgaacacagtgctgaatactatttagtaccagcgctcaaaaacattttacaggaacaatatagccatatcgccccagtgttcccgtggatatcccgagagtttagcaatatctcaaaatatcttcataaagaggaccggtttcatgtgctggtaatgtttccgcgcagaccaaaaataaatgctcctgatgattgtgaagtatatatcactattaatgaagaactggatgcttttaataaaatagggaaagaaaaaggggttccagtgatagctggttgccctagggctgtaaatgtctgggacttatcaaattgtaataattacgcatggataaatcttagtcaatttaattattatgagtatttaaacccagtaagtaatttgaaaaaaaatggatgtttgctagagaaagaggacattctatctcttgtgagaaatagtgccatttttaatttagagtcttttgaagtttttttccgatatgcaaaagagactcaacctcacaggatgtatggaagtcaatataagcctgtatactttctgattaagacacactaa

SEQ ID NO: 250473 - DNA, 2610 bp, Klebsiella pneumoniae
atgctcagcaacgagtttttgcgctttttccaaactttagacacagcagatgtacctggcgatgttagaaaaattgcgaacttagtgtgggataatatggatagtattatcccgttaggtaccgcgcagggccagcggattcgtcgcatcgtcgatctggcgcagtcttcatggaataccctcagtccggaagtcctgccactgcctgagcagaactccgaacgtgtccccacgttcagtcggctaaaaaggctgtccgttggaccgttcagaggatttgccagacaggaggaatttgatctggactcgcgtctggtgctgatttatggacctaatggtaccgggaagtccagtttctgcgaagcacttgaatatacattattgggtagcgttgctgaggctgaaagtaaacgctttcgtaatcaaaccgactattttagaaatgcatacgtcaatcagttttctgcgcctgtgattactggtgttggatctcaagggcatgatgtggaaattgagaataacgaagcactgcaccgcttttgctttgttgaaaaaaaccgcatcgacaacttttcaagaattgcggcactggccccagcaaggcagaccgaactaatttcaacgttattcgggctggatgtattcaatgattttgtccgaaatttcactgcggagattgatggcagatacatcgatctgataggcgtaaaagccgctcaacttgcagaaaaacgccgcacactcgagggggccatccaacaactggaagcgggtaagacggagcttgaaggactggtttctgaggaacatacgctggcttctgggtaccgcgagggcctttcttttcagcagatgatgattgaattaaaaggggatgagcaaaatatcgggaccatccggcagcttgaggctgagttacagaaacctcttccgaacaagagtcacctgacctgtgcgatgttgaaggacttaaatggctctgttgaaactgtattggcggatctgtatggcaaacagaaacaattggcagaggcgagtctgcaggtttcgtttaaaagtttattcgaagcagtcgtccagttacagagctccagcccagaacagtgccctgcatgccataccccactcctacaagctacgaaaaacccctacagtcatgccagtgcagaattgctgaagcttgagtttttgtcaacgttgcagggtgaaatagctcagttggaacaatcattcagccagcagatgtaccgcgtctcacaagttgtcggcacctgttgccagtttcttcctcatgaaaatgttctcgaaagattccgagaagagaatggcatcgctttgtggcgtgatctgcatcaaccagcaggcgatggtgtcactccctggtctcttctggagaaacaggtgttgcagttggaagaagaagataaaaaaacagaagcagctgctaaattgcgggaatcccggcagcgtgatcttgtggggctgcgtgagtcagaacgccagataacaatattacagacaagaagaagtacgacagaaagggccatcgcagcggctcagttgttgattggtaactttgatacggaaaacaggcagcttattgaagaggttgtacttgaggaatgcgttgtaagaaaaaatagagaaatctcaggagcctatgcccggttcgtattgcagttgaacgcctataaagatggtttgcctcagcagttggttgcgaatctcggagacagcattgttattttgtacaatgcattcaaccgtaatgaccctccaggagaaaagctcgctggtatcaaactccccctgatgcagaatcagcggttggaggtggcatttcagaacaatccagcgcaatattttgatgctttacatgtgctcagtgaggggcatgttcgctgcatagggttggctattttgttggcaaaaaacatcagtgagcaatgcccacttttgatatttgatgatccggtcaatgctatcgatgacgatcacagagaatctattcgaagaacactgtttgaagacgccttctttgcagataagcaaatcatcctagcctgccacggagaagagttctttaaagacatacagaatttattgccagctccagtggctgcccaatccagaactttcagttttttaccacgtcttgacgaattgcatatccgcgtggattttaactgtgcccctaggaactatattctttcagcgagaagtcattatggacgtaatgaaatcagggaggcgctgactaaatgcagacagtcacttgaatcgctgatgaaggggaaagtctggcgttatgtaaacaaacacggtgacggtaacctcagccttaaactgaggtcagcaactgcacctattgagctgcgtaatctctcagatcaattgaaaaaacaaattggtcgtgccgattttaatgacccaaataaaaatgccgtgttttctcccatcgaggttttgaccggctttagcggagaatcacgtgaatggcgatacctcaataaaggtacgcatgatgaaaacgacagggcagaatttgacagggcaactgtagaagccatgataggtgcaatcgaggcgctcgatcaggccgtgggataa

SEQ ID NO: 250474 - DNA, 237 bp, Klebsiella pneumoniae
atgtgccagaagcggatctatcgtggttttaaaagcctccttcatgaagtggccaacgtttatcgaccacttcatctttgtagaactaaatcacacggggatttagttctaatcttatcccacggcctgatcgagcgcctcgattgcacctatcatggcttctacagttgccctgtcaaattctgccctgtcgttttcatcatgcgtacctttattgaggtatcgccattcacgtga

SEQ ID NO: 250475 - DNA, 573 bp, Klebsiella pneumoniae
atgaaaacaccgtattcccgtcatgacttcctgttgcagcattaccagcgctggctggacgatttcacgcgtctggctgtacgacatgggttgtgtcacccgaacatccaggccagccatcaactcaccataggttcgctccgcttcacgggtacggggcaggtcactgccgtggtaccccatgctttgtaccggttgttctgcggtaatcaacccccggtcatcacggtggcagaggacatgtccacccggctggattcagataccacgctgctgcttcaccatcccatgctggaaggcatattgctgagtgaatgtgcccgactgaagcagttcccggtacaacgggcactgctggtgatgctacagcggctgaccagccgggaaatccgacacaaaatagtctggctgtgctggcgcgatttgatgtgcggggatgacccttgcgactggctggagcgtctggtcggacagccagacgacgcgctgtatctctggctgggtgaccgccaggatagtgatcccgttttaaccctgatgatggatgaatacctgctgtttaccggcaactga

SEQ ID NO: 250476 - DNA, 534 bp, Klebsiella pneumoniae
atgaactcaaccatttttaccgcgcactgtcaggcttggcttgatgacctcacccggctgcaggtcactcatgggctctgccagcctgaaattaaaaagtggcacaggctgaccatgacgtcctgctcgttaccaaacgtgcttaccggactgctcattatcccgcagtttttgctgacggtaacgcagactgcttgtgtggaagaagaatcggtagcgggacgtatcattaaacgtgctgaggggccagcgctggcggggatgttgcgcagtgaatgttaccgactgggactcagtgcccttgctgagcagttatcgctgctcttccgccagtatccacagcccggtatacgtgaatcactgatgttgctgtgctggtgtgagctggtgaaagggattgagccggaagcatggtacgcgctgcatctgctgcttccggccacgctgaagaaatggatcaatacacgacaaaaagagttcaatggtttatcggcactgactgaggattacattcgtgccacccggccactgtga

SEQ ID NO: 250477 - DNA, 405 bp, Klebsiella pneumoniae
atgcgcatgctgaaatgttaccttgccaataatcgtgatgggcacattgtgactgctaaagacgcgatgcagtcaccaggcagggtatggacctgctcttcctgtggctgtcagttgatacttcatgcgggttcatctggtgaggccccctggtttgaacatgaccagcgaacagtgacgacgaacgttctgatgcaatgtacccatctcgatcctgaagtgaaagccgaagcccgatgccaaaaactacgcagaatcatcggcaatctggatgcacctgtaatggtgctgttctggcattgcgtgtggtgcggaaatcattacagtgggaaaaagcattgcacttcatgcggaacaggcatctacagtatcgaagaaactgacaagaaatcagatgcgaactga

SEQ ID NO: 250478 - DNA, 1149 bp, Klebsiella pneumoniae
atgacggaacagcaattaccggaaggctggcaaatggtgaagtttggcgatattgcgaaacatatctctaaacgtgtagaaccgagcgagacagaccttaaaatctatgttggcttggaacacttagatcctgatagtctgaagattaagcgacatggtgtaccggcggatgttgaagggcaaaagctgttggtaaagaaagggcagatcatttttggcaagcgtcgtgcgtatcaacgtaaggtagctgtagctgattgggattgtatctgctcagcgcacgcaatggttcttgaagaaaattctaaaatggttattcccgggtttcttcctttctttatgcaatccgatatatttatgaatcgagctgtagctatatcggaagggtcattatcaccaacgataaagtggaaagttttagctgaacaagttttcctattcccgtcaaaaaatcgacagctgaaaatgttgccaatattatcatcatgtaatttggcaagtttaaaaaacgatgcagccttagagtcattactcttttttaggaaggttatttttagggaacatatatctaagctaataatccgtcataatgtttctagagaaaaactaggtgatgtttgtcgaatcagtacagggaagacgcctcctcctaatgaacgtgaatactgggagggggatattccgtttataactccgggtgatattagctctgattcattatatattaatagcggcgagcgtaatattactcataaagggctagaaaaaactccatctgtgcctaaaggatcggttttactgacttgtataggttcaacaataggaaaagcagcaattgcatcgtgtgatttatctactaaccagcagataaattcattaatttgtagtgaaaaaatattgccagaataccttattgtttggatccagaataatttggaagttattaaaaaatacacaggcattcaggccgtccctattattaataaatccgcgttagcaaatattgatgtcgatgttccttttctcgaagaacagttaaagcttgtgatggtagttagagaaatggatagcttgagacataaattgaaaaaaaaaggtgtaattcttacagatttaacaaaatctctctttgttcaggatagtgattaa

SEQ ID NO: 250479 - DNA, 1500 bp, Klebsiella pneumoniae
atgacacttattaacctaaaagatctcgaagcccatctttggcatgctgcccatattatcaccgggcctatcgatgcatcagattacaaaacgtacattttccctatcctgtttttcaagcgcgtttgtgatgtatatgacgaagaatttgccgatgcgatggagagcgttggggatgcagagcttgccaaggggaagatgtttcaccgtattcagataccagagaattgtcactggcgtgatgtattcgctgaaaccaaagacatcggccaggcattgaaagactccttccgtggtatagaactggcaaatcctaaactgcatggcatttttggcgatgccagctggaccaataaagaacgcctttctgatgagttactggctacgttactcaatcacttcaataaggtgaaccttggcgtttcaagtgtccgtgacgatgatatggggcgcgcatacgagtacctgatcaaacgttttgcagacaaagccaataagaaagccggtgagttctacaccccacgtactattgttcgcttgatggttaacattcttgatccaaaagcgggtgagagtgtctacgatcccgcctgtggtactggtggtatgttgctcgaaactattcaccatgtaaaagaaaacggtggagatccgcgtctgctaaaaatcaaaggtcaggaaaaaaacctgactaccgaagccatcgcgcgaatgaacctgttcctgcacggtcaggaggatttcgatattgttcgcggggatacgctacgtgaacctaagtttttgcaaagcgatcgtttagaaactttcgactgcgttgttgccaacccaccatttagcttgaaagaatggggatacgatctgtggtcgaacgatccctatgggcgaaagcaatacggtcttgcgcctaaaacaaatggtgattttgcctgggtgcagcatatgtttgcttcacttaacgacaaagggcgtatggctgtcgtattacctcatggtgtgctgtttcgtggtggcgctgagggggtaattcgaaccaaattgctgcaagaaaatcgcattgtggcgattattggtgtcgcttccaatttgttctacggcactggtattcctgcgtgtattttggtgctgcgcaaatcacgcccggcaacgcataaagatcatgtattgatcattaatgctgaagaaatctataccaaggggcgtgcgcagaatacgctgtccaacaagcaggctgatgacatataccaaatttaccatagccttgctcaacaggggccggatgcaaaagaaatcgaaggcgttgcgcgctgggtacctctgaaggagattgaagagaatgacttcaatcttaatattgctcgttatgtgcaaaaaccactcgaagaagaaaccattactgtggaagaagcgctcaaagattttcaacggaagctggctgagctggaaaaagtagaagaggagctggaagccctgcttatcaaagaagggttcgaggtatga

SEQ ID NO: 250480 - DNA, 750 bp, Klebsiella pneumoniae
atgaccaaagagacgagattgctcgatttggtgtttatctggcgggaacttcgaagtcatccggaactgctgcgttacgccagtgatgcagcgattgaagcagttcgcttggcccataaagtgttttcgctggaagaagaagtctcgattaccacccttgatcaggtatttgaaatgcgggggctgttggcggaatctgaaggtctgctgggtgaactaaatgggccattaaaacccaaatccctctggttggaagagtacgagcgcgccagagagttggttaaaacgacgggtatgaaaaggccgctgaagttgtataagcaatggcttacatctgacaatgtgcgaaagcagcgtgctgaatatgttgaagttgccctggaatatttgccggatgaagcggttgttgcattacaacaagctgtaatggcaaaaatggcagaccgaaacattgcgatagaatgccctccgaccagcaatacccgtatcagtcagtatcgagatgtcagcgagcatcatatctttcgctggatgggcttgccgggtgaggcgattgaaggtgatgttcctatgtctatttgtcttggatctgatgatccagggatctttgccgcagatttgaaatccgagttctatcatcttttcattgtgttaacccgaaatttcggtttgtcgccagcggaggctttgggaaaggtagcagaggtgaatgagaatgggcggatttatcgctttcatgatgttagctag

SEQ ID NO: 250481 - DNA, 3876 bp, Klebsiella pneumoniae
atgagcacatataaaacaaatcatccgttggggtctgcggctgtcaaagatctttatgacaatgctgaaaatttagatgttgctataaacagtattacagaggctatctggacagaccgtctcggaaaagaaagaaaaacctggtttggcatggagtccgagtttaactccgatcaattgaacaggtctgaaacatttcaggctatgatttcttcgcaggaaattgcatttgactaccagctccatcagcaggcgcaaatgttcactacagccatgcttgaacagaaaaatgcatgggatgaccagatggaggaccagaaagatgaatttatcgatctgctcacttcttccggatattcgtggctcaatgattacattgatggcccagtgacattctttaatcgtagtcaggtaacagtctataatggcgtggcatatcgtcttgctgcttccactcctgttggcttcacgaccacaggaaccagcgcggaatcctgggccaatgacaaggataagctggtcccgatcggcgacaatgatatacgccagcaggtacagtatcagctcggtaaatggcttccttctgcagccgcactgatgctcagcgaagaggatgcctcagcgatttatgttcgcgggttctatggcgtgaatgatgggggggcgggtacctggctggcgacagggacgaccatcgccggtaacgcaggtaagcacatcccgtcaactgcaaaaatatacaataaaaacggggttgaatattcgttagatatctccagcggggttatcaatgtgctggctaacggattaaaaccgtacacttatgcacagtgcaaggatgattcaactgacaattatgtatgtgcagcagaagtccataacgggataatttctctgcttcctgccgccgtatatacgtcaaataatgaagaaagttatacgggagggagaaggcttaaaataaatttcccatctgtaaggacgcgttacgggaaaacgtatttcaagaaagcatctggcgtttgtgtaaacggcaataacgtaagattaattctttgtgccgggccatcaactaaattctctgtgacaggcgtaagaattgatggatttagtcatggctataacgaaataaaagagaagtgggacgccgtaaattcaaatttatattgggggtcgctcagtctgcaggattataagctgcaggatatcattctaatcggcgaccatgatataacgaaaacagccagcgcatgtacggggggcgtaggcaacatgactcttaaccctgaaggcgaaatcgtctcagggttgtacgttaaggattttaactgggatcgtgttgcgatgcccagtcagattgaggcgacttacttcaatcagcagggtcatgcgtttgataataatgcgttagattataaatatataacagatttcatggttaactcatcgggcgtccccacacgagccggtaattttaaccgtgtcaaagaagacaattgtaagtatgagtccgggagacgcggggtttaccgcaacgcttgcgactggaccaccttaaccaactgcgaaatcatcaaccgcagggcgtggcgtcagtccggcaacgttgatggaactatcccggaatacatagcggtatgtaccggaacggccatgcacgttgccgggggctattggggtcccgcagcagcaaaagactacaacgggcgtctcggaacagtatatgggaccgcgcaaaaccacgtattcagcggcgtgtacactgaatggacttacaacttctacactgtttcgcgttggggctttaacggcaaggcaagccgactgtttagcctgcatcttgattgcataagcacgtataaagatgatgccagaaactactgtatgcttcggtttgaaggcggctgtttcccgacaacagatgatggaggtaactcgctatacccggacggcttctatcattacgatacgccaaacggcctgtcgggactgtcattcaatagtccggtacgcgactggggtgcatttcatcacggcgggtatgacaataaattcgggccgtataactggtttgtgggtgcaggtacggactgggattcctggcgcgaccggccatacgcaaaagaaatgttcaacccgtacggatttgcgataaacgctggcccggcaatggcgctgtgggccaacccatctataaaatcagagatagggatctggattaaagacccgagcggcaactttgatccccaaagagtttacgcctggataacagcggcagggcaggaaagctcggctaatacggatacggcactctacaaagcccaggctgaactgtgggttgattttaataacggatataagttgttaaaaataacaaacaaacggcttaccgcctgggatggcctgtttagctatcagcggaactgcggtatttattttgacgtgccaactgatggaagcacgccgatcgttgttaaagccatcgaagcgtacacgggtggcataccggtattcccgaatggatgtggtgactacgtccctgaatcagctgcaaccagcgttctcagcacagctaccaatatagtaggggctggattttctattggtggtgggattttttcaccgggtgatattgtcggtccatggattcacgcgagacggacgcagtctggatacatcatttcccccacactgaccaacggctacacgcttgatcagaaaattgtaacgggtggctgctcgcttgaatcggcatttaaagttgcgttcagcgcgacagttgaaacagtgaatagtaatgcaacaacaataatcagcatacctgctgcttatttgccttacgttgcagttggaataccgctgtatatcactggcggctcatcaacaggcgtgacaggacaagtgcggctgattaaacgcctgctgaacagcgacggcacattatccccacgctatcttgtacaagggactatcggggcagtgggtgacacgctgactatagaccaggcgcaaatccctgcttatacgttctacaacgaccgcaatttcaatgctgttaccgcaacctcggtcactatcagcggagtgtcggtagcaaacagtcacaggtccacatactcttcagctattggctatggtggcgcagcggggtctaaagcgcaggaattttatgcgaacggtggaacagcttacacacaacggattattgctgtaactgctgcggtgatgagatttgagaccgggggtaaccttgcagtggatgggaacctgtatccgaccgccgacggcacctattcgctcggcactccatccggcggccgctggtcgcaggtttttgcatcgaatagcgttatagggacgtcagacgagacgcacaaaacccgcccacgggcagacacgccggcggaaaccgacgcctattatgaaatcgggcagctccccggcgtctggcagtggctggaaaaatatatggtcgaaggggatgacgcccgcctgcactccgggccgaccgtgcaggcggcgattgccgtgatggataagtacggtcttgactggcgggaatattccgcattctgctatgacgagtgggacgcacaggatgcgattatagagacctgggatgacgagtgggaggtgatacccggcaccccggctgaactggacgaggaggggaacgtagttgttgaggcggtaccggaaacgcgcaccctcatcagatcggccgggagcaatgttatccaggaggcgcgagaagccgggagtgtctacgcatttcgtaaggaggaactgctcttctggataagcagggcaaccattgcaaaacagcaggatattgaaaaacgcctggcagcaattgaagccagcatgtcatcgtaa

SEQ ID NO: 250482 - DNA, 639 bp, Klebsiella pneumoniae
atggctaaaagggaaagaaaaaaaatcaccgtgcctaatattatgtatatattttgtgagggtgagaaaacagaaccttattacattgagtcattcatcaatgatagagctaatggaaaatcaaaagtaataaggatccctaaggaaaaaagcacatcgcctgagcatttgctggatgctgccttagcaaagaaaaaatcatcatcaacagctgacggtgatgtcttttgggttgtttatgacaaagaagacattaaaagcaggccgatttcaatgcatgaaaaggtttggaataaagcaagaagtaatggtgttaatgtcgctatttcgtgtgtttgcatagagttctttattttacttcactttaatttcactgatgcgtcgtactcatcattcgataacctaaaatcaaaatcaccattaaatgcatgctttaaacgtattggtgtgagtgactatgaaaaagctagtgataaaacgtatcattatttaaagcaacgagtcgacattgcaattgccaatgcggataaactagaagataaaatcatcaaagatatcgggcattgtattgatgaaccgtacaaaattatggcctatacaagcttccacaagcttttgaaaaatatattggagttttag

SEQ ID NO: 250483 - DNA, 1317 bp, Klebsiella pneumoniae
atgatagtttctttggttgttgaaaattttcggtctataaaagaacgcacagagtttagcttgattgcttctggttcggctgggcacttagatgaacatgtgtacagagatgaaagcatcaattttggtgttctaagaagtgctgggatttatggggcaaacgcttccggaaagtcgaatctactcatggcttttgaggctataaggtgcatcgctactgaaaccgggagccttaaagacgaggaatcaattccatgctatgaaccatatttattatctgaagaaatgcgggaatctcctgtttcattagagattgaatttataaccaaagaaaaacttagatttaattataaagttaaattcattagatctgaggtgattgaggaaagccttgattattacccatccaaaattaaagccaacctttttaaaagggatgagtcggatgattgggaaagtattagatttggaagtcactataaaggtggcagcaagaggattgctttctttaaaaacaactcatatttagctaaggctggagataacgcatcatcaccagaaataataaaaacagcatacaactatatgggtaggtatttgcgacatgttggccttaatgaaaaaataaggctttcaagcttcggtgatagggatgcggtcgtaaaaaaaacagctgatatgttatgtctttttgatactggaattagcgaaataacatataaacaaatagagttagataaaataccatttaggatgagcgatgatgctccgcaagaaattaaggatatgattgctgaggattttggttttaattatttattttctcataagaccgagagtggcaaggatttgaaaatgccattgagacgtgaatctgagggtactcaaaaactttttgaaataatacctatgatttacagtgcgtttgaaagaggggtgacagttattattgatgagcttgacagtagccttcattcgcatatcgcaaccataataattcgtttattcaatgatccctctgttaataaatatggcgcgcagctaatatttacaacacacaaccttaatctcatgtctcctgacaaaatgaggcgagatcaagtttggttttgtgaaaaaaatagcggaaaaacaagggtttatagtcttgatgattttgataagaaaaaagtaaaatcatctactccttatgcggattggtatgatgatgggcgtttcggggctgttcctgacatcaattatgataaaattagatgtttattatctggtgaagatcttaccgttgatgatagcgtaagttttgatgatttgttttga

SEQ ID NO: 250484 - DNA, 267 bp, Klebsiella pneumoniae
atgatgacccaaggcactttggtggatgccaccatcattgaggcacccagctctaccaagaacaaagagcagcaacgcgatccggagatgcatcagaccaagaaaggcaatcagtggcactttggcatgaaggcccacattggtgtcgatgccaagagtggcctgacccacagcctagtcaccaccgcggccaacgagcatgacctcaatcagctgggtaatctgcttcatggagaggagcaatttgtctcagccgatgccggctaa

SEQ ID NO: 250485 - DNA, 255 bp, Klebsiella pneumoniae
atgtctcctgagaccgccgcgggctgggccgcctggctgagggcgctggcgtccacgatggcgcaaaaaacgtcgccctgcctcacgacggtgcagccgccgccgggcgcgggcggctgttttgtcgattttttgcacaaccagacggcggggctgaaccgatttgcacaacgccgcggcggcagaggacctggcataattaatgcttatctcttggcgggattaccacaaagtgagtacaaccggaggggatag

SEQ ID NO: 250486 - DNA, 228 bp, Klebsiella pneumoniae
atggcttacacagcaacggttatccctgtaatgatcgcatcccctggtgatgttactgaagaaagaagaattatccgggaagtaatccacgaatggaatgatattaattctgccctctcgaaagttatgctaattcctattgggtgggaaacccacacatcaccggagcttggcatgagacctcaggagttaattaatcagagactgctaaatagatgcgcggaatag

SEQ ID NO: 250487 - DNA, 468 bp, Klebsiella pneumoniae
atgattaaagacgcgattttttcaccgtgcggtaagtatcgctactcgttatcacgagtctgggacgaatcaaaaccgtatacccttttcatagggctaaacccttcatacgccgatgctgagaaggatgatcgcaccttgagccgctgcatatcgtttgccaaaagctggggctacggtggcgtatacatggccaacctgttcgcattcgttcacacccagcgacatgaaatgatgaaagcgtctgatcccattggcaatgataacgatagccacttgatacgtcttgttagcggtgccggactggttgtcgccgcatggggaaatgaaggaagacacctcaaacgctcaacgaccgtccgacagctattgccagagagcacaatgtgcttcgtcttaaacgctacaggtgagccgaagcaccctttgtatatgaaaaacgacagtgttctcatacctttaggctaa

SEQ ID NO: 250488 - DNA, 531 bp, Klebsiella pneumoniae
atgaataaaaatgttatttttttgttgctgtccattatctcctctccaggtttcgccgttagcatacctgacccggttccttcagatgcttgccattttctttcaggaatgccattcattaaaactccgtcaacctataaaccatatgctgaaggcagcgaagactatacgtgcggaacaccctattttgagatagaaacgccgaatagtggcgacactatgaacaataacatcgcttactacgtatcaggtaatcaggacaaaacaaagaaattgatgctcatgcttaatatgaataatcaagatccaaatgccgtcaaaattgcccgaggttattttataaacggttcatttgaaataatgaaaaagatgtttcctcattctcccggaaaagttgccgacattgttggtttactcagtgatgggaaagaaggtgaatggagcgtcgatgggtggaaagtctcttcagtaaaaaaagtctggcctactggtagaggttatgaacttcgtttcatcgtgacatctggctga

SEQ ID NO: 250489 - DNA, 339 bp, Klebsiella pneumoniae
atgtgttttattgacccgagcaccatgcatgaaaggttacaatgtcaggtcgtaacaatccgtgtaactagtttatcggtcagttcagcagacactttataccgccgccatgggatcgatgttgtttcgtttggcaactcgcttcatgacccggattgctactacctcattcgcgcctttgacagcgctgaaaaaatggctgcggttctcaatgctttttacgcaagcgatgactggcacagcggtccacgcgaaaacatcgttggcagcatagagaccagcattaaaacagtgatgaatctaccaactaaaagcgtggaagggctgcgggtgcaatag

SEQ ID NO: 250490 - DNA, 720 bp, Klebsiella pneumoniae
atgagatcgaaaagatttgaagcactggcgaaacgccctgtgaatcaggatggtttcgttaaggagtggattgaagagggctttatcgcgatggaaagccctaacgatcccaaaccttctatccgcatcgtcaacggcgcggtgaccgaactcgacggtaaaccggttgagcagttcgacctgattgaccactttatcgcgcgctacggcattaatctcgcccgggccgaagaagtgatggccatggattcggttaagctcgccaacatgctctgcgacccgaacgttaaacgcagcgacatcgtgccgctcactaccgcgatgaccccggcgaaaatcgtggaagtggtgtcgcatatgaacgtggtcgagatgatgatggcgatgcaaaaaatgcgcgcccgccgcacgccgtcccagcaggcgcatgtcactaatatcaaagacaatccggtacagattgccgccgacgccgctgaaggcgcatggcgcggctttgacgagcaggagaccaccgtcgccgtggcgcgctacgcgccgttcaacgccatcgccctgctggtcggttcacaggttggccgtcccggcgtcctcacccagtgttcgctggaagaagccaccgagctgaaactgggtatgctgggccacacctgctatgccgaaaccatttcggtatacggtacggaaccggtgtttaccgatggcgatgacaccccgtag

SEQ ID NO: 250491 - DNA, 258 bp, Klebsiella pneumoniae
atggtgttgagcatgcgttcgcaggagatgatgggggtggattcttatctgatggtgcgaaccctgctaacagagctggcggactacccggaggagtatcgtcgccaaattaatgcgttaagctttatacagcgccgcaccaacctgtcgcgcagccgtgttatgtcgattctggcagagctgcgcaaaggtggttacattacggtccatcgcggggtgctggaaaagataacccgcacgcttcccgcccacttttaa

SEQ ID NO: 250492 - DNA, 909 bp, Klebsiella pneumoniae
atggaacatactgttgcaggcgccatcaaagaatggcgtaaacataataaagtgatcggtcaggtcaaaataagctataaaaaaattttacgaaaatgcagagagctctcgctcgcaggaggtaaatacagagaatatcaaggactttgtgcgaaatatcagtgcgcgcggttgaccgcggtgaccaaagggctggtgccttttgaggataaaccgtttaaagcgtatctcaataaacggctgtcaaaacgacgcaaactggatattgcccatggttcactgaatttcatcgagaaaacgtttcaccctgatgtcctgccgcagctctacaatgtcgcggattttggccgcgagatgttttctattcccttgaaaaatggcgataagcttgacgttaagctgctggcctcgccgtttcaggaggaaggggagctgatgctgcagctgtttcttggcgaccggcgcgtctatagcgtctgtttttcctgcaccgacgatggccgcgcttatatcggcggcattcagggcgggaaagatatcaccaatgacgaagtgaaggtgctgactaaagagctgcatggcgcgcggccgaaaaatatcatcatgagcgtgctgtatggtttgctgcgatatttcaacatctccacggtctacgccatcgattctgattaccacgtgaaaagcgatctggtgaaagccagttattcatcgctgtggctggaaatgggcggtgagaaacaggctcgcggctggtataaactgccggcgcaagagatcaaaaagagtattgaagaggtgaaaagtaagcaccggagccagtttattaagcgcgaaggtcttaaagagctgattcagattaatatggcgaatgccctgcagcaaattaccttgcctgcgcgggtgaattaa

SEQ ID NO: 250493 - DNA, 243 bp, Klebsiella pneumoniae
atgaacatacataatgttaacgctgcttcaatcttatgcgaaaagcttaaggaacttgaagggcaatactcactcgtcgcacgcggggaagggttaggcatcacgattcagagtcgttatcaggatgatgattttgtcaatgcggtacgcaggagtgttaccggagagcttagccgacgcattggagcggtaaagcatcagcttactgaattaggcataacgtcatttaccaaagagcagtag

SEQ ID NO: 250494 - DNA, 219 bp, Klebsiella pneumoniae
atgaccgtgctggactacttattaaaatttcgcaaaatcagttcgctggaaagccttgaaaaactatttgatcaccttaactactccctgactgacacccaggagatcgtgaatatgtatcgcgccgccgatcatcgtcgcgcagagctggtctccggtggtaaattgttcgatgtgggccaggttcctaaggaaggtgcgaataagtccgagatgtga

SEQ ID NO: 250495 - DNA, 408 bp, Klebsiella pneumoniae
atgcggggcgaatggctgaatggtctggtagtggctgccgaacagcgggggctgcatctctcgcgggaactgcgcctgcacctgggccagcacgctggccggcagcgcgtgcgatgccgccagcagatgcccgtcgccattcaccagcagcagctgataatgccgctcctgggcgagggtctggagagcggcgcgcatcgccgccagcggccaggtcgcttcccgctgcggcgccggaatgttcatccgccgctcaaggcgttccgccacccactgcgcatcctcctccagctggcggatctgcctctcacggtaaacctctctggccggcaaattcatgccccgaccgagcgccaggatcgccagccccgcgagcagcgtgacgataaggcccctttttcccgctag

SEQ ID NO: 250496 - DNA, 381 bp, Klebsiella pneumoniae
atggcgaaagaaactaaatcggtgctggtggctgacctgaatgcgggtggcgctggcgtcgaagaccttaacgctgaggacctgaacgcgggagaaggtgcccaggacaatcaggtgcatagcggtacaaacgctgatggttcatctggtgatgatggtgcaggggatgattcagtcgaagctgtttcggagcctgaatttgtggttctgaagggaaacagcattcgtcatgacggtgaagtttaccgcgaaaatacgcgcatcccggtaaccggaacggatgccgatcgcctgcttgccgctggcgtgattgctgatgttcaggtgttgcgtcagcgcgtgctttctgctgcgccagccgtaagcgtcacgacggagtaa

SEQ ID NO: 250497 - DNA, 591 bp, Klebsiella pneumoniae; identical to SEQ ID NO: 35417

SEQ ID NO: 250498 - DNA, 264 bp, Klebsiella pneumoniae; identical to SEQ ID NO: 35420

SEQ ID NO: 250499 - DNA, 714 bp, Klebsiella pneumoniae
atgaacgcgaaactagcgctatgcctgctcgtattaccgttgtattcatatgcaatgacctgccctcaagggactgggttttctgctccacagggtggtttagaaggagaagaaccatacttcttcacgcctgaaggcatttgtctcaacggtcacgatattagccagcaattgaagcgttatcatgatgataaaattaccggcgcattttccttgggaaaaggggatggttcactgttttttgttagcgtctacagtgaaaagcattaccacgggagagttattcttttatctgataaaaacaaagaggctgggtatgtagtcatcttccagaaccaagcagggattagaacgaataacccaaaaatgtcagtagaaaaccttaccattaattattttgataatcagacgtcaacgctttacttcagtgctgatgcctgggctcaggcgagagccttgcatgctattacatgggtaaacccttcagagcctctaaaagtgactgaaaggtttgttcatgacggtacgtttcagggtgtcttcaatggcatgcctatggtgtctacgatcgcgcatgatgataagggggcgtacttcccctcttacgcacttcgaaccgacggttcaatattctgcaccctcaacacccgcgagaagctttggcaactgacgccatcatgcctttcacccggggatgactatcgggaaagatga

SEQ ID NO: 250500 - DNA, 231 bp, Klebsiella pneumoniae
atgaccacgttcaatgcagaaattcatgaagatatctttacctggcttaaaaagagttctcgccctgagatagtcctggatctgccatcagtgcctgccccaggcgataagctatggctgaagagtatgcgaggtacacatattgtcgaaacggaaagatgcacgatcgtggagtcgcgccgcgtttcgcgcctgcgtcctactgtgcgcttggtgttggtattgcattaa

SEQ ID NO: 250501 - DNA, 900 bp, Klebsiella pneumoniae
atggacggcgccatttttctccagcaagtggtcaatggaatgagtcttgggggcatgtacgccctgattgccatcggttatacgatggtttatggcgtgctgcggctgatcaacttcgcccatgcggacgtgatgatggtcggcgcgtttagtacgctgtttttattttcttcggttgggctacccttcggggtagccgttttcctgaccctcgggctgtgcggcctgtttggtatgctgattgaccgggtcgcctatcgtccgctgcgtcaggcctcgaaaatctccatgctgatcaccgccatcggcgtcagcttctttctcgaaaacctgtttaacgtactgtttggcggcagctcgcgcttcttctccgcccctgactttttcaaccagactcgggccttcggcagcgtcatcattaccaacgtggcgtggattgtgccgctgatcaccgtcctgctgctgctggcgatcctctggctgctgtaccgcacccgctatgggatggcgatccgcgcggtggcctttgacgtcaacaccgtgcgcctgatgggcattgacgccaaccggatcatctccctggtcttcgccctcggcagtagtctcgcggcgctcggcggcgtgttctactccatcagctacccgacgatcgatcccctgatgggcgtgcttatcggcctgaaggccttcgccgccgccgtgctgggcgggatcggcagcgtcaccggcgcggtgctgggcggctttatcctcggttttaccgaggtggtcgccgtggcgatcttccccgaactgggcggctataaagacgctttcgccttcctgttcttgattctggtcctcttgttccgcccggtcggcattatgggcgacgaacgtctggaaaggagccgtttctga

SEQ ID NO: 250502 - DNA, 1173 bp, Klebsiella pneumoniae
atgtttttttataaatatcaagctattagtcctttatccttagctatgcttcgacatggagaagtgttttttgcctctcctcaagagttgaatgatacacatgaagctaaaccgaaatttgtttttcgaggggatgatgatgtttggagaagattcatttatatggttttggtagatatgtgcatacttctcaaccttgatcctgagtcagatctttcaaaaaaaatcatctctttaagggaaagtgttttcagtaaaataaaatcaactaaaaaatcctcatttgaatatcaacagttaataaatatattatcttcgagcatacaaacttcagtaccaatagattgggacgctagggataagaaaataatccatgaagtatattgccattatgtaaataatgtttttgatacgtatttggaagagataatatacattgcatccttttcattaagtgcaaccagtctcactatgtgggggcattatggtgatgctgagaaaggcttttgcctagtttatgaatcattagacggttctgttgagatagaaagtgattgcgaacttttttggggggtgcatggggatgaagattccattcaaacgatcgggcaggttaataaaacattagttaacttaaataaaataaaatacgccaaaacccctacgagaatcaacgggtttggaaggttgtctaagcgatttttttatagtgaatatgagtctcattatgattatagagaggaggtatatagtaagacaacggatatgcatgagagggaaattggtctggttaaatacactgactggaaatatgaaaaggaaatacggttacatcttcctgtttgcagatttattccttcgtcacttaggagtattcgggttagtgcaaagcatataaaaggtgttatatttggacctaaagcatccaaggttaatagagataatgtgttggcgtcgcttgttcatttaaaaaaatatcaaatgagtaagagtgaaatattcatatttgaagccaaagggattgctaatcaatataagatgcaggtaatgccacttggaacactaagagatttcttttcatctgaaataccaatggttgttttattttcagaggctaatagcaaaagcaaagaagaagcagtaataatttcagaaattattaatcaaagttaa

SEQ ID NO: 250503 - DNA, 3027 bp, Klebsiella pneumoniae
atgaccgctaattatcccgccagcattctgccacccaacgccaccgccgtggagcgggccatagacagggccagcgccgccgcactggagaggttgccggtatatctgatccgttgggttaaagatcccgacagctgcccgctggcactcctgccgtggctggcgtgggaataccaggttgatacctggaatattaactggtcagaacaaaagaaacgcgatgcgatcaagcgcgcccactacatccaccgccatcgtggtacggtcgccgccgtccgtcatgccctggtggacagtcctttcgggacggatattgttgaatggttcaatcagaacccgaaaggggatccgtatacctttcgcctgaacgtgtatcagaacgatttgccggtgacggaatacgaccagcaggatctaaaactggcggtgctgcgcgccaggaatctgcgcagctggttttccgttcatgtatttggccgacttcagggaacctcgtatgcggccggttacatgtacgccacggagaaaatcacgccgcgctttgtcccgttgcaggtggttttatcccgctacgagctgaatctggcccccggggacgcggaaacggtcacggtgacaattctccccgaatacgcggaagataaaacctttacggtaactacatcggatcaaacaatcgcgaccgcccggatagtaaacggcgatattctggttacgggcatgaagcgaggtacctgttcggtcaccgttacgacgactaatggcgtcagtgcggtgatcagcataaaagtggtcgcggtaatgaagttcattacccgcatcgacagtgcaaccaggccaatattctttgctcatatggacgagggtttcacggttgactatggcgacggcattgacagccgggactaccgtttcgatcccgccagtgaagcttcaggttgggttattcctacacgtgaattagtacagggaaaggaatacaccatcacggttaagaacacggaaaccgcctgtctgcgcagccgtttatctaactattcttcgaaactgaaccctgttgtggaattgattagtgttacaggggaaagaggtcatctttcagggttcgctttggataccaccggattaatggctattcgtcccggagcatttgacgatttgccaaacgtgaataactgcaaaaatatttttaccaactgctcgtcgcttacaggtattccggcatcgttgttttctcgcatgaagatagaggatttttcagacgcattcagagggtgtacatcgcttactgaggttccatcggggttatttgcaaaccagcccgatgcgatcgacttctcatcggtatttgcaggctgcaccggcctgatcagtatcggcaataatctgttccacagctgtgtatctgcggtgaatttcagttacgcgtttgatggttgctcaatgcttgcaaatatcggcacgggaatatttacaggatgcggttcagcagggacattctcttatagcttcagggcgtgtaaaaatcttcttgtcttgcctgctgatatgtttacggatgttcagggcggcgcattcaccggcgtattccagaattgcgcggcactgacggcaattcccgccaacctgtttaaaacatgttctgaagcgaatcattttggcggtgcattcactggctgttcgcagcttctttctgttcctgccggtctgtttgctggtctgtcgaaagtgacctatttcggcacggtcttttctggttgcagttcgctgaaaacggtcggcgcgggtttatttgccgggtgcagccaggcgcagacattcgcctctgcattttacagctgccgctctcttgaaactgtagcgaaagatattttcagcggctgcgtagaggtgacgacctttgccagtacgttttatgggtgcagcagcctgacagcgctcccgtcctttgctgactgcgcgaaagtcaccactttctcatacgcttttgctaactgtgaatcgctcacgaaaattgatgcagatgcttttgctgttaaagcgctggtcacgacattcacatatgcttttgtaaactgtacttcgctggtttctgtggaggacggtgcatttcggggatgtagcgcgttaaccagcctgggctatacgttttcaggttgccgctctctggtttctctcgcgggagatatgtttgccggttgcgccaaagtgacagccgtcgatttcttattcgacaagtgctccgcgctggttgaacttccaaaagagctattcagcgacatggtgtccttgaaaggcatgggatcgactttccgggattgtacagcactcatctcgctaccatccggcctgcttgatggttgcatcaatctcacttcgttaacgctgacattctcgggctgcacctcactggcgttattgcctggcgatttgctgaaaaacaacattcttctgtccggcgccggatcgacgttttacggttgcacctcactggtaaatattccgccgacgctgttcgcgtcctgctctcttattacctcgtttggcgccacgttccagaataccggcgtggaggaaataccggaaaatctgttcagtggtaacccgctggtgacggcctacggccagaccttcagaggatgtaaaaaactgcgttcagtgcctgccggtctttttgccgccagcataagtgccacggtattcacgaatgtcttttcggaatgcagtgcgctggaagtcgtcggggcgggattactcaacaccacggcggtaacgacggtgggttatctgtttgacggctgcgcgtcattacacagcgacgttaacacgatatttaatcttgcgagttacccggagattgtcaccacaacggcaatattcaggagctgcgcattactcgccggcaaaggcctggtatttatgggcaaagtgccaaacgtcaccgcgcactattacgcgttttatgcgtgtgcgggcctggacgattacgacgatttacccggcaactggataacgaacaaactatga

SEQ ID NO: 250504 - DNA, 768 bp, Klebsiella pneumoniae
atgagcgatttaactgatttggcaaagctgatctgtgggaatgatgaaattgagaatgcagaaaatgattgcgagattttagaaatattaaagcatttaaaaagcgtattaaaaaatgtcctagaggaaataaaagttctaggcgaagaaacagactcccgcattacactctatggtccttttttagtcaggactctccttgaagttggggtgaccgcacttattggaagactagatcctacacgtcttctcattgttaaacgtacccagcaacatggtgagtactcgacagaaaaaccatggaactcagctattcgttggcaaggagatgtggttgatgagaaggttaagaaactttggccagttgaaaaaagttataaggatataaccaaagcactgtttggagattattactttgatttgtattggcaaaaggccttgaaaagaatatctgactcggaaagttcgggtgggacttggttggctgaaatcaaagggatggaaatagatgctttttcagcaagacgtaaaagtagtgtttctagattgtattcagaatcttcaaaaggtgttcattctgagtttgtgatcccgcctggaagtctttatgataaacttactataaaaagtttagcttcggatattatccagatattatctgagttaggtttgctagtgaatcatctgccacatattgcttaccgaattgaagcggatgaagctatagagttttttaatggaattgaagaagtagaggtgatgccgtga

SEQ ID NO: 250505 - DNA, 744 bp, Klebsiella pneumoniae
atgagaagttttgtatttgcctgcaatgcccttcagctccggagtaatgatagtcaaagtattggtttacccgatttgagtgatactttacttgaattggctagtaactattattggccattgcttgatgagattagaccaaagttgggtatgtacgaaccaatggtagagactgctcgaaatatagctgagttattatttaatgatgctgggcaaaaaacaaacaacccgagggatattattatccacagggatttagatgagaagttttctaaacccttgcaagttttagagtacgctgggtttatttctaaacgagaagcctcaagagcattgaaatctggtgggagaggtgctcgctatgctttgaatttatgcagtttgcttgaggtttcttctggaagtagacttacaaaaacattgtttgataaatggtctggtagtggtagagatgaagcgattcaattcagcaaaggcagtagattgtctgaggttaccttacccactgcacttccggaaattgagttggctatatttagcgaagacatttcatcattagttaaatcaaatgcttatccttatgggttaagtgagcagaagatacaacttctgagagacgccggctataattcagttggtgaacttgttgaggcgacagatgaacaatttcatgagataagagggattggttctgcaactgtttatcgtattagaaatgttttggggcaagcaatatggatgtag

SEQ ID NO: 250506 - DNA, 312 bp, Klebsiella pneumoniae
atggagggcgctgaaggtaacgtgtatgttttgcgtaaaacctatcagaacgaaacggcggccaggagcgcagctgcggcaaaatggatacagctccagaaaggcgcggcacagttttcgataaccctggcgcgcggccgcgccgatttatatccgggtatgcatctgaacgtgtcgggctttaagcctgaaatcgataatcaggattggatcattgccagagcggaacatgtgatcggtgataatggatttaccacgaaaatggagcttgaggcgaaaataagcgactggattgcagaaactgaacagtag

SEQ ID NO: 250507 - DNA, 180 bp, Klebsiella pneumoniae; identical to SEQ ID NO: 139583

SEQ ID NO: 250508 - DNA, 276 bp, Klebsiella pneumoniae; identical to SEQ ID NO: 208689

SEQ ID NO: 250509 - DNA, 339 bp, Klebsiella pneumoniae
gtggataacatacttacccggtgtcagcgggataccatcaaccggctgctcatcggtcagcagacggaactggcgcagggtctcacggtcagttttgaggaaacgcgggtcaacccattcatagtcgcggggtttccagccttcacgggtgtcccagaggatttcgcagacccccacgcctttgccgagtccgtcaagcaggtcaaacagcagctcaggtatctgcggctgctcaatcagatcgcgtacggcatcagccagcatcacatcatgctcatcatcgcttgcggcttccactgccggaggaataccggcgacggtcagcttgcgggtacgtaa

SEQ ID NO: 250510 - DNA, 1428 bp, Klebsiella pneumoniae
gtggcgagcaccttatccccggcgagattagccggggtcctgcgcaatgtgaccgagggaaacgcacgggactacttcatcctcgccgaagagatggaagaacgtgacctgcactatgccagcgtgctacgtacccgcaagctgactgtggccggtaaccccccggcggtggaagcggcgagcgacgatgagcatgacgtcctgctggctgatgctgttcgcgatcttgtcgagcagccgcaaatcccggaattgttgtttgatctgcttgatggtctcggtaaaggcgttggggtctgcgaaatcctgtggagtacccgtgatggctggatgccgcgtgattatgagtgggttgacccgcggttcctgaagcctgacagcgacacactgcgtgagttccgtctgctgaccgacgaacagccggtagacggcatcccgctgacaccaggtaagtatgttatccattatccccgcctgaagtccggtctgccgctgcgtaacggtctggcccgtctggtagcagtcatgtacatgttgaagtccttcaccgtgcgtgactggtgggcgtttgcggaaaaattcggcattccgatcgtcgtcggtaagtacgggaataatgccaccgatgagcagattaagatcctcattgacgccatcagttctatagcctccgacgccgggtgtgctatcccccagagtatgcagcttgatatgcaggagacggccagccgcaacggcggtggcgctctctttaaagagatggccgaatggtgcgacgcccagaccagcaaggcggtgctgggacagacgatgactaccgatgacggcagttcgcggtctcaggccgacgtgcatgatcgggtgcgcatggatattgcccgctgggatgcccgtcagctggagaacaccctcaatgagttcctggtgcgcccgttcatccagttcaactacgggccgcaggaaaagtacccgcgtgtgaagctggccatcagcgaaccggaggacctcaaagcgtttgtcgatgcgcttatcccccttgtggatcgtggtcttcgggtgcaggaatctgaggtccgggacaagtttggtctggctgagccggagaccggcgcagcggtgctctcgccgtccaacagcttctctgccttcagccctgcaccggcactcaaccgtgagcaactggcgcttaaccgttctcaggacgatgagattgacatgatggccagcgaggcgttgaaggactgggaacagaccggcgatgcgttcaccagtccggtgctgcagctggcgaaggacgcggggagctttgaggagtttctggcgcgtctgccggacctgcagaagacgctggagcctgccgcgttcgtcgagcagctggcgatgctgagctttaaggcgcgtgcactgggagatgcgaacgatggctaa

SEQ ID NO: 250511 - DNA, 855 bp, Klebsiella pneumoniae
  misc_feature (121)..(121): n is a, c, g, or t
  misc_feature (150)..(150): n is a, c, g, or t
atggctaaagctcccgatattatccccaaagaggcgctcgcctggctgaagttgaaaaagctgacgccgggtttcgattaccgtgatgtgtggaagcaggagcacagcattggtttcactntggcgaaaatgacgcagctcgacctgctntctgacgtcaaaacgctggtcgaagacgcgatggccagcggtcagtctttcgctgaattccgggaggtgctgaagcctctgctggtgaaacgtggatggtggggtcagcacatgatggatgacccgctgacgggtgagacaaagacggtgcagctcggcagcgatcgtcgtctgcgcaccatctacgataccaacatgcgtactgcccgcagcgccgggcagtgggatcgcattgagcgcactaaacgcgcaatgccctatctgctctatacgctgggtccgtcacgtgagcaccgtgccgagcacctgaaatgggcggacctctgcctgcccgttgacgacccgttctggctgacccatatcggccccaacggctggggctgtaaatgcggagttcgacaggtcagcaaatacgagtacgatcagctgcagaaaaatggtgtcccgcgcaacgtgcaacagctcgacgacagcggccagccaaccggtcatattatccgccagaccgtaccggtccgcaccgaagccccgccggtcagacgggtgaagtgggtcaacaagcgcacaggcgaagaggagatggtgccggaggggattgatcctggctgggactacaatcctggcacgcgccgacaggccgaactggagcgccagctggccgcgaagcaaagcgccttcgacagtgataacgaaacgcggcggtaa

SEQ ID NO: 250512 - DNA, 3468 bp, Klebsiella pneumoniae
  misc_feature (162)..(162): n is a, c, g, or t
atgtatcatctcgacaacacaagcggtgtcccggagatgccggaaccgaaagaaccgcaatccataactccgcgctggtttggtgagagtcaggaccaaggcggtatcagttggccgggggctgactggtttaatactgtgcaggctgaattgctaaacacnctaaaagcagccggagttacccctgataaaagtaatcaggggcaactttcagaagcaatcaagaggatcgtattttttgattctacaattgatgtacttacttcgacaataaatcgtgactatttcgtttcaagagggttttatcaacctaacgacggtggtggacatgcgtggatttctactggagttttaaggttagatcgcgcaggaaaacatattccatctgaagcaaaagtgtataatttaaacggcctagagtttcaaattaagattgatgctggcagttttgttaatcccaaagtcaatggcgtcagagagctggtggattttgacgagtctcaggtagatactgatgatttcgtatgccttggagaggcaataaacgggctttattttacattgcctatcctctatcaggctgaaaatacgctgtcctcgtcgacaacttttaaagcgctaaatatcactctgcctgatggcctgtatcgaatcggcaaagaagcgatcaagctccgcagtaacatccgttacgattttggaaaatccacgatttatgttaaagcgagcaggtcacgcaaatattcagtcacgggaacgtatctgaatggtcttgagcacgctgttgaagacattgactctatttatgcagcgtgtggtgaaaacctgtactgggaatcagtaagtcttggctttaccacaatacgagggggggcgattattggtgaccacgttccaggcaccctggacgctgactgtacagcgggtattggcattctggcgcttaatccatggtattgttctttctcggatatacgtatcgaaaacttccgcgtaaatctcgtcggaatgcagtgtcggactgacgaagacggcgtgctgccgagcagcataattccctacaagtccagcctgctgccagagaagattggaaacttctacagttgcgtcttcaaaaacttgtacgtcagcaccgcgcgatattgctgcgtgcgattgcatatcgactggtgccaatggattggcgggacgatttcgaacaacggacgctgggcatcatctcccagcggtcagcagtgcgattatttcctgatcgagactggtcatgggttccattgctcaggcgcatatctcagcatcccggcgtacaacccgactgagcgcaaaccgaacaaatccgtcattgctactgcagcgcgcggttctgtttacactgcatgctacatggaagacaccccttcgtatgtcacgatcctgaacaagtggtggaacgatggcaacgagaagggcttcggcttaaatatcgactgcatcgggtcgcagtaccgcccagacagaacctataagtacctaacttttgagccaggtgcgtttgggtattacgacgccaatgaaaactggatccctccgtccggatacggttcgtacccatcgactaacggcatcgattttgtgagatttggtagcccgacgcacgatgcaggcgcgttcccgcacggtggattcgacttcaaatacggcacctatggtgtgatgtacgccaccgatagcacgtatgtgaatccgccagatgtggattcacttcgtggacacaagactacgaaggaaatgttcagtccttacggattgatggtagcaaatggcattttgcagcttccggttctgtcgcctgcgatacacagcaatatctgcatctggtacaaggatatgagcggcaattttgacctcaacaacatcgtgttgtggcagaccgcaaacatcgatcagctcgctacggatgcggggtataactacaacctgtttatcgcaaaagccgagatggccattgattttggcaatggctacaaaatggcgatcattcagaacctcaagtggaacaacaatgatggtgtgggcacttccggcgcccagcagtcgctgcagctgaccatccctgacgccacgccggtgatcctgaaagcggtgcaggcgttcactggcggcatcccggtattcccgaccggactgaactacatccccgaaagctctgatcagagtatctgggggaatgtgcagccgacaaacgggtttaggtataatttgtttaagaaggtcggcggtggaatcttcgcacctggtgatctgattaacccatggattgcccatcagcgagccaacccggactacaagttcggtacgacgttctacgaagattatggatacagcaatcttccgctgctcgtaaaaggcgggaatgcgatcggctcgtactttgcgaaggacttcaccgtaagtgtggtgtctgttgacgccgcaaacggtcgcacgactattgatgttcccgctgcgtataaacctttcgtattcatgggggttcccctgaatatcacagcagggtcgtcaacgggttacacgggcgaaacgcgcattcacggtcgtaaatttaaagtggatggcagtctgagcgggcaatacgtgctcgatgccgttgtcggtgcaactggtgatgagttgactatcaatcagcgcaccctgaccccgcgtacctattaccgcgactataccgcagacgctctgacagcaaacggtagctttaccctgcgcgggacggttatgcgtttcgggtataacgcaggggcgacaggcacgagagcggttgagttttatgtcggcggggcaactactaaatctgctgatataactgcatacgggacctcaatcggtcttaatgcctcggctcttgtctttggggggaacattggcttcagtgcgacaaatacctgggatataggctccgcgggtaataccgttaaaaatatctactcccagaatgcggtaactgttgtttcagaccgtgatcacaaaccggtgcgggaggcaatacccgataatatcctggatatatggggaacaattgctatcaagcgatttaaatacgactgggccattgcggagaaaggcgaggatggcgctcgctggcatgtgggctacattgcacaagatatcgttgaagcgtttgcagccgcaggggaagatgctactgaatgggccttggttgtccataacgaatgggatgcccagcccgaacaggtggagtcatgggatgacgagtacgaaaccattccggcgcagtacgatgagcagggggttaagatctctgaggaaacacaggttcttatacgccaggcaggatctcgagtaactaaggaagcgataccagcaggaagcgaatggcgcctggttatggatgagtgtaatgcgctggatgctgcgtatcagcgcaggcagctggagcgtttagaatcagcgctcgcgcagttgcagaagtag

SEQ ID NO: 250513 - DNA, 1257 bp, Klebsiella pneumoniae
  misc_feature (118)..(118): n is a, c, g, or t
atggccgcaaaatgggaagaccttcgcgatgcctcgttccggggcgtacctttctttttccgcgacgtcgagggggctggtggtcgcagggctatccctcatgcctaccccaaaaaanaggtgggctggacggaagaccacggtgcggtattaactcagcagcagattaacgcgatcctgctcggcagcgactacaccgaccagcttaaccgcctgctggctgcgctcaatactgccggtcccggagaactcgtgcatccgtggttcggcgtgcagaaggttcaggtgggccgcgtcacgcatcgcctttccactgaggaaggcggcattgcctacatttcctttgaggtgtacgaggctggcgagcagctgttcccgtccggcaccgaagacaccagcgccaccacgctcagtgcggcggacaaggtcaaggaagcgctggccagcggtgattatttcgcggcacttgatggcgtcggcagcatggtggacacacttcttgaggacatggagggctttgtcaccagcctgccaaccctgccggatgcgctcagcgagtggatggaccgcctcaaccggtttaaggatctcgccggtattgtggccgccgcgcctggtgaaatgatccgcgatatcaccggcctcatcagcgatatgaaggacctggtctctgagccgccgttcgccctgcgggtctatgaccagttgcgcgataagtgggaaggcgaccgggcagcgcagtctgcgaccaaatccctggtcgataacatcagcgtgaacaccgataccggctttgccagcagcgtcacgccggcatcgacgccggagaccaccgcagcgatggagaccaacatcgcagacttccgccgtctggtcattatctccacgctggtcgctcaggctgaagcggtggccacagcgaccttcgagaccggtcaggatgcgcagaacaccggcgaccagctggcggagcgtctcggcgagactgcagcggaagctgtcgaaagcggtctccgtgaattgtggcgatcccttcgcgagctgcggttcgccgtggtcaatgatgttcgcatccgcagtatccaactgccggagctacgccgtgtcacgcctgtccggacagtgccggtgatgctgctggcctaccgcgagaccggcgacgcggagaaccgggatgagctggtgacccgcaaccggctgcgttatccctcctttattacgccttcacagacgattgagatcatcagcaatgactga

SEQ ID NO: 250514 - DNA, 396 bp, Klebsiella pneumoniae
atgaagtttaccgatgaagaacagcaaatcatccgccgggcagaggctatcatctcagccaaactcccaggcactgattacctcaccagtccggatatggtccgttccttcctgcgtctgcactttgccagtgccgatcgagaattgttttggggtgctgtttctgcctgctcaatatacgtccgcatcattgtccaaaaagcgatgcagtataacgccagcagtgtcattctggcccataatcatccttcatctaatcctgtgccgagcgctgctgataaggcgctgacactacgcataaaggcggcgttattgctcgtagaagttaatacgcacgatcatatgatcgtaacgggcaatacgttaacctcctttgcagaaagcggtctgctgtag

SEQ ID NO: 250515 - DNA, 228 bp, Klebsiella pneumoniae; identical to SEQ ID NO: 161805

SEQ ID NO: 250516 - DNA, 507 bp, Klebsiella pneumoniae
ttgccgggcgttacctacgaaacccttggtacctcgcaggctaacaacctggaagcgaagaactgcaacgtttacgtgtactacgaaaacgatacagcgattcttgaacaaggcgttatggcaaacggcgatttcttcgatgagcgccatggcctcgactggttgcagaacgccgtgcagacggctgactacaacacgctctatacgagcacaaccaaaatcccccagaccgacgccggtaccacaacccgtatcgccaacattgagctggtgctcgataaggctgtgcaaaacggtctctttgcgccgggtaaatggactggtggcccgattggccagctcaataccggtgacatgctgacgaagggctattacacctgggcagaaaacgttgatgaccagcttcaggtcgatcgcgaagcgcggaaaggtgtgccaattcaggttgccgggaaactggccggagccgttcattacggtaccgtcgcaatcacggtcgtgcgctaa

SEQ ID NO: 250517 - DNA, 441 bp, Klebsiella pneumoniae
atgtctacgtattcgtttcttgatgtttcggcctctctcgcagggcctaccgggttagttgagcttggctacggctcagcgaacgccgaagagggcattactgtcacaatgacagaggccaaaaacaccatgaccgtcggcgccgatggcgaggtaatgcacagcctgcacgccggaaagagcggcactatcacggtaaccttgcttaaaacctccccggtcaacaaaaagctctcgctgatgtacaacgcacagagcctgtcttcggcaacgtggggcaataacgtcattgtcatccgcaacaaagtatcaggtgataccactacagcgcgttcttgtgctttccagaagcaacccgatcacgctaacgccaaagtcggcaatacggtctcctgggtctttgactgcggcaagattgatcagctgcttggggagttttaa

SEQ ID NO: 250518 - DNA, 474 bp, Klebsiella pneumoniae
ttgagcgtactggttagcacggtaatacggcatgctgctaagacgctggccgacgccggtaaatatcgtcgccatatcccgcatgttgccgctggcatcacgcgtttgaacccccagccggttcaggaaaccctcagcgccgggattgttacgcatgaacctggcaagattttcgagagagcctctggctccgtcgacactgccgccaacctgacttaccgcatacccaatctgcttaatgccctccaccgtcgcgccagtgcgctgggaggcccagtacaggtcgtcgagaccactggcaattttcgcggtgaatgcaacgacggaaagcgccgccgcctcaactttgacgcccagttcaatcgctttaagcgttgtcccggcaacgacggcatcgaattttctggcgccagcctcatcaactttgaaaccgagcgagatcagaaagtccttgagcgtttcagcgttcattag

SEQ ID NO: 250519 - DNA, 285 bp, Klebsiella pneumoniae
atgacgacgctccgcagtaccccattcagggttgtctttcagcagttcaacgtaaaggcggttcaggcggcttgtagcccggatgtcaaaggcgtcttcgctgatctgccgaacagtgctgatacctgccagtggcaaaaagaaaccgaagtgatcgggaaagtctttaaaggcacaagcgacagtctggccgctgatgaggtcttcagcttcgaagtcttttccatctgtggcgaggatgaatttggccttggccttgcctgttgccgggctggccttgagtga

SEQ ID NO: 250520 - DNA, 2250 bp, Klebsiella pneumoniae
atgaataagttcatggcgcgtctaatattctgtttttttgctgaagatactgacatattcataggcaaggggcgctttactgacaccattgcacagatgagtgagcgcgatgcttctaatatgcacgaggtcatcggcacgctctttcgtgctatgaacactccagactatgagcgtgccgcagtaggtattccgcgctgggctgcagaatttccatatgttaacggcgctttgttctcaggtacggaagaggtgccgcgcttcagccgtatcgcgcgctcctacctgcttcacgttggcaatctggactggaccagaataaatccggacatattcggctcgatgattcaagcaattgccgaagatgaagagcgcggtgaattagggatgcactacactagtgttcccaacatcctgaaggtactgaacccactattcctcgacgaactgcgttcaaagctggaagatgcgggcgaaaatccacgcgctttgctcaatttgcgcaagcgtatcgcccgtatacgcatttttgatccagcctgtggttcgggcaactttttggtcattgcttataaagaaatgcgtgccattgaagctgagattaactggaggcgaggcgaacctgatcgcccatctgatattccggtcacaaattttcgtggcattgagctgcgcgacttcccggcagagctcgcccgccttgcgttgattatcgcagaataccagtgtgatgtactctatcgtgggcagaagttggccttggccgaattcttgccactacgcagcgagaattggatcacttgtggaaatgcgctgcggatcgattggtatagcttaatggatgtgagtggctcaggagttaaggtggtttcagacgatatcctgcaaactccacttgatcaagctgaaatcgagtttgaacatgaaggcagcgaaacatatatctgtggaaaccctccttataaaggaaccaaaaatcaatccgctgaacagaaggcagatctattgtttgtcttttctaaatatcctggaactttcaaagtgctcgactacgtgagcgcatggttcgtgaaaactgcggagtacctctcccatgtaaatggagcagccgctttcgtcagtacaaactcaatttgtcaagggaaccaagttcctgtgctgtggccactgataatgggactaggtgtcaggatctcgttcgcgtacacatctttcaaatggtctaaccttgcaacccacaatgctggtgtaacagtcgttgtaattgggttgacgcgtagttttggaacgaagtgtagattatttgagcatcaaggtgagggaatagtcgagagagaggtagataatatcaatgcctacttggttccaaatgcagacatctttataaacaagaaatctgatcctcctcctggctgcgccccgatggtacttggtaatcagccatacgaaggcggtcatctaattttcgatagtaaggggattgaagccctttgcatcccaaaggatgttcgagagacgatcacgcgcaaaatcttaggttcgagcgaggtaattaacggtagcgagagatactgtctctggattgagaatgagaattttgcgctggccacatcgtttccagcagtctcagcgcagatcaataaagtcaaagaatggcgcttaaagagcgagcggcaggcaacgcgttctatggccactcgaccgcatcagttttgtgagatgaagtgtggaaatcagtcggtaataattgttccaatccggagttctgagaatcgggaataccttcccgtggctctattcgatgagcggactacagtaaataaccttgcttattcgatctatgatggatctttgtttaatttggcactaatagcatcaagattgcatctaatctggattagcaccgtctgtggaaagctagaaacacgatttagttactcaaacaaaatgggttggaacacttttccggtgccaatgcttacagataagaataaggaagacttaacacgctgtgccgaggacattttgctggcgcgagaacatcatttcccagcaacaattgcagagctgtatgaccccgaaaatatgcccgctgatctacgtgccgcgcatgctcgcaacgacgaagtgcttgaacgcatctacatcggccgtcgctttaagaatgataccgagaggcttgagaagctgttcgacctctatatcaagacggccacctcggctgtaccggctaagggaaaaaagagttaa

SEQ ID NO: 250521 - DNA, 1050 bp, Klebsiella pneumoniae
atgtccctatctaatgaaaaaatcaaagaatttaacaagttaattcttgagcttgaaaaaacgggatgggaaatcataggagcttactggatgcactatgcccaaaccaacattccttcagaatatcaaaacaaactaaatatcataaccattgggtttagtgacagaaactcacgttactacaggcagtctctgagcaatgcaatacgaaaattaaaattaattgccatctccgctgatgatattacaatggcagatgatatagaatttcatagcggaatatttcacttagacgaaaaaagagagcatactttactgaaaaatgtattttttaaccgaatattcctgacagagttatatatctttagatgcattgaaaatgaatccattaaaaaatacccacccaggaaaaagataattcttttcaagtattttaaaaacaaacagttcaaagatgattttttaaaagggaaagtatggacaggaactctaagtggttttagaaaaatagaaaatgataatcaaggtgataaatctgagggattgacattttataacaccacacaatccttcacagaagatacctggaaagaagtttcaatcaacaatccatcaatcggtggcatggttaaatttggtgactcgtcaacgggcagtttattcactatatctaacttgacagtatctttgcccgattcttacactatatgctttagcacaaaaagagatgatgagttattcaaagatgattttggagagttttgcgtaaaaatcaatgatgcggaaaaactttattttgcgatatccatccccattttggaaatgaatccagatataaaacgtatgaatcataacaatgtacaatacacaaaaaaagaactaacgaatatagctgataaaatatatacagcttttcacaagcctgaaaggtacttttggcaagaagaatacagattttgctggacaatgccgcacacagagataattagcccgttcctccttgatttttcgaatttgttatcacaagagataatggaaaatatagcatag

SEQ ID NO: 250522 - DNA, 1737 bp, Klebsiella pneumoniae
atggtggagaaaaagaagaagacccgctcaaccagttcttcggttgatcccgccacgcaatatgcgcgggatgtagactccggcaaagaaatcgccgggcctgacatcaggaattcctgtaagcgacatctcaaagatttggaatcctgccatgctcgcgggttggtatgggatgttgcagcggcgcagcgcgccatcgacttttttgccaaggtactgaaactcaacggcggtgagcatgaaggtaaacccttcaacctgctaccgtggcagtgctttattgtagggtcgatattcggctggaagaactcggatggttatcgtagatttcgcatggtgtacgttgaatctggtaagggttccggcaaatcaccactggcaggcggagtggggctttactgtctaacagcagataaggagcctcgtgccgagatatatgcagctgcaacgaaaaaagaccaggccatgatcctttttcgtgatgctgtcgcgatggtggatcagtcccctgcgttagcgcagcgaataaataaatcaggcggcgccgggaaagagtggaaccttgcgtttcttcagaccggctcatttttccggcctatcagttcagatgatgggcagtcagggccacgcccacactgtgctctgattgacgaaattcacgagcacaaaaacaaccaggtcgtggaaatgatgcgcgccgggacgaaaggtcgtcgccaggcgttgattttcatgatcactaacagcggccacgacaaaaccagcgtctgctacgactatcacgagtatgggcgtaaagttgccgaaggctcgattgaggatgacagtttcttttctttcatttgctccctggacgaaggagaagacccattcaaggacgagtcctgctggaaaaaagcaaacccctctcttggtcatacttttaccgatcgctacctgcgtgagcaggttactcaggctcgggggatgccgtcgaaggaaagcattgttcggcggttaaacttctgccagtgggtggatgccgataacccctggatgagtagcgatgtgtggatggggtgcgaagaggactttgacctgcaggagctgcagggagaagaatgttatggcggcctggacctttcaggaactcgcgaccttacggcgctggcgctgtttttcccgaaaaagcgccgcctgctcgtagagttctggacgccgaaagatactctgctggaaagggctaaaacggaccgggtaccttatgatgcctgggagcgtgacggatttattcacaccactccaggtaaagcggtgaaatatggtttcgttgctgagcgaatatcagacctttcccagatgttctatatcaaagcgatcgctttcgaccagtaccgtattaagtatcttgagccggagctggaggaggctaacgtatctgtccctctgatacctcacggccagggctactataaagcgcaggaatccgggttgtggatgcctcattctattgagttattcgagcaacgcctggatgacggcgaaatcattattaaaaccaatccctgccttcgatggaatgctgcttccgctgttaccgaagcagatcagaaggaaaaccgcatatttgccaagaaaaagagcacgggccgaattgatggtgtggtggcttctgcaatggcaataggcgcttccgaaggtgatgtcactgatgatggtgatattgacgacttcttctcacaaccgttgagcatgtga

SEQ ID NO: 250523 - DNA, 480 bp, Klebsiella pneumoniae
atgccgggcctggaacagcccctgataggcaatgttgtgcaccgtaaacaccgatttggccgggttgccgcgggcggccagatacgccggcgtgaggcccgcgtgccagtcatgggcgtggatgatttcaggtcgccagaacgggtccagaccgccggcaagctcggctccgacccagctcagcaatgcgaaacgcagtacgttatcgggataatcctgcatctgttggtcatgataaggattacccggtcggtcatagaaatgtggggcatcaatcagatagatgcccacgccgttaaagtcgccgaacagcagcgtcatcggcccggcgaatgtctccctgctggctaccacctgcggctcctgtatcccgttgcggatcgccggaaaccctggcagcagcacgcgggtatccagcccatcggcaatttgcgccgccgggagcgcgccggtgacgtcggccagtccgcccgtttttaa

SEQ ID NO: 250524 - DNA, 261 bp, Klebsiella pneumoniae
atggcaaaattaaccagagcacaggaacatgacctgcaacgcgcaatctacgatctcgaaagaggaatcgcttatctgcgacaccccaagactgcggtctgctatcgccacgattatcccgcaactaccacatcggcgtattcatcacatgacgggaagacttcgctttcccccgtttgcatcgactatggttcggatatcgtcggcctttatcatgcactaaaaaccgtgaaagagttcgttgcagcacatcggaagtaa

SEQ ID NO: 250525 - DNA, 501 bp, Klebsiella pneumoniae
atgaaaaacgaacaattctggcaagataaactaaatgaactgtttgcattgggcgaaagtataagacacgacagaaacattagatataaatacgctgattatgttgctatccctgaagattacgaaacattttatggggaatcatcttactgtaacaaggatatgactgtcttttggtatgtgatgacaactcgttattatgatagatacgaaaaagtgccaaatttgtgtgatgcctttgtcgaagttgacatgagcaaaggaagtccaaatataacagtttttcatctaaatctggaaaaaattgggaagagttatttcattgattcagaagaacaagcagtagcgatcatggcatctaacgctgtttctggaattcatgacttcttatgtcaatattttgactgtagagatgattttgaatatcgcatgaacgacgaacagcaatttctgctcccttacgtacaggaaaaagtaataattggctatgaagcttcctga

SEQ ID NO: 250526 - DNA, 141 bp, Klebsiella pneumoniae
atgggcgcttttttcgtttccaatactcccaccataacgcgccaacaatggcgcgttatcttttatctggcgttcactcattcacaccaaaaaaataagcgccataaacgcgccaatttaacgcgtttttacgtgtggtag

SEQ ID NO: 250527 - DNA, 198 bp, Klebsiella pneumoniae
atgaatgaagcgaaaaaagcgtgcgaaattaagttagacgctggctatacgcaagccaaccagctgatcaatctttgcgagcgtctcggactggtcgagaaaatcaaaggaatgggcgcagcgaaaaacggatcgcagcaatatcgctttatcaaaaatgatttttataactatttggctgatgctttcaaagcgtaa

SEQ ID NO: 250528 - DNA, 231 bp, Klebsiella pneumoniae; identical to SEQ ID NO: 145440

SEQ ID NO: 250529 - DNA, 648 bp, Klebsiella pneumoniae
gtgcttcatctcatcttcaccaaagccatattctttgatcatgacctgtgccgattcccacatcagatcttccacctgcttaacgatttcggcatcggcgaaaccgtcctgtacatacgggtagcctttcaggtagctgaggtaaccggctgcagcatgtccgcagttcacgacatacagtttgcgttcaatgaacggcttcagggtttccacatagtctgcaccctggataggctggcttttcggatcaaccagagcgctgctttcgatcatcagctcacagttggaatcgatatcaagacaggtttcaccgttacgaacgttggtcagcgccagacggtcaacggaggtgttcacaaagttactgacctgatgcagctctgcgtcagtaatgatgccggtgttaaccacttcacgacgcaggcgatcggaggcaaacagggcgttttcacaggccaggacgttgattttcggctgaccggaaaccagacgctgtttcagacctttcgccaccacggctgcgattttcggcaggttatctgcccacacggaggtggtgagaatatcgcactcttcaatggccttaatagctgcatcctgttcgtctaccaggtaaataccggcgacgttggtgacttcacgttttga

SEQ ID NO: 250530 - DNA, 162 bp, Klebsiella pneumoniae
gtgggtgaagaaggcgtggaaaccgcgctggccgccaccgtgaacgaccgctttgagctgaagaatgaggcgtcggacctgatgtatcacctgctggtgctgctgcaggaccaggggctggatctcggggaagtgattgataatctgaagagtcgacactaa

SEQ ID NO: 250531 - DNA, 240 bp, Klebsiella pneumoniae
atgcttgaggtatatgccattgctggcggcgactggttacggggcaacctgaacgcgattgcggcgtttatggggaccagcacatggtcgactatagaaaagatgtgtatcgccatctcggtactcattgtggcggggaactgggtaaaaaaacacaacgtaatggaccttattggctgggtcttttccctcaccctggacgcccttctaagagtcaagctgttatcgggatactgttga

SEQ ID NO: 250532 - DNA, 1140 bp, Klebsiella pneumoniae
  misc_feature (150)..(150): n is a, c, g, or t
atgctcaacgagcaggacgacgatgaaaaagacccggtacaacccgccgtcaataagctgaaaaagcgcaagcgcggaaagatgacagcctttctggcgcttgtcgcggttgccctgattttcctgacatggggcgggaactgggtatancgcaactttctcgctcagcctaaagaggagaaacaagaggaaccggcaccgcagacaagccagactgattatcgcaagcgtaatgatctcgggatggccactgacactggccagcaggaacagccccagcaggacaacagccagggcagcaccgagggcaacaatacagcgggtacgggacaggcagcaccggcagccccgttacagctcgataaagctcgtttcctggtgcgccgtgacggcgaggcctcttctcaaggccaggtgaaaacacgacagcaggagatggcgcagctgtcaggcgccaccggtacggacgccacggcgtccgctcaggctaaggggcaggggcaacagcaagatgcggcagcggttcggcgcatcccgtttaatcctgatctttatattcctgaaaacacctccattccgtgctcgctggattatcgtttcgtctctgaccgagccggaaagctgcgctgtacgatcacaaccgacatctggagcgccagcggtaataccaagctgattgagaagggcacctctgcaaccggcatataccggacaggcggcgatgatggaatgagacacggccaggggcgcgcgttcgtcatcattacgaaactgcgtaccaaacagaaaccttatctcgatatcccaatggtagataccagcgctgctggcgcactgggcgaggcgggcatggatggatgggttgataaccattttgccgaccggtttgccggggcgctgatggtcggcatgattcccgatgttgcagcgtgggcatcaaacagtgccggacaggaggacagaaatacggactacacggagaacagtcggcaggcgatggcggatatggcgagaaccacgcttgagaacagtatcaacatcccgcccacgctctacaaaaaccagggggaaattatcaacctgatcaccgggcaggatatcgatttctccaatatctatacactgaggatgaaggaatga

SEQ ID NO: 250533 - DNA, 2142 bp, Klebsiella pneumoniae
atgaccatatacaacggcttatttgagcccaaaaaatccgcaatcaaagactgcggtgccgtgcagctggtgatcgctgtcgaagcacctaacaagaaagtcgctgaaagtattatgaccggaaaactctgggagtcttacccggcgaacggagacaactatttcaaacctaagctgtgggaacacattgaaggccagccactgccggcagtcggccagttcgatgaacatttcgcccaggaaaacacctttgacggtgaaaaatgggtggctaacagccaggatgacggcgccaccgagttgccggcaggcgatgaagttatcgatctgatgaaggtatcccccagggagcgttttgccgctgtattactcttcagcaaattagagataaccggccagctctattcgcaggttgtagattatcttgatgatctggataatcacgatgaaaccatggaagaggatgaccgctttaacttcaatgtactttgcgccctgcacaacaacgagccggttaaacatatgcatgttgaaggcctgaataatcttattcatggcattttctcccattttgaaaaccagacgccgggcaaagcggctatttctcaatttgtaaaacgctggctggaaaatcccggtaaacgtgaagacatggtaccagttgaaatcacatcaacagactccgccaacactgaaacaagcgttaaagttactccaaagcgaggttataaacatacctatgccacactggatcaggagatcgctgtcgccctactccctatttctcccgacgcgccagtattatcaggcaaccttcgcgatgctgagaaaatcattgcagacgagcgcgaagattttaaacgttggtcaatggcgcttcgcaccacggagcacattctcaaatatgaccgagacagtatttttggcgtagtgcagaacgtaccggcaaaagatacctaccatttccctgacagcctgcgccgccacattgattcatggctggaggcaaacggccgctttgaagaaaccgagacaggatccgttaaacaaccagaggcaacgcaaaataccgcctcaaacgtggtcgaaaaagcggaagcactacagccggtggtaaccgatacccaggccaaacaggcgcgtgagacgctcaacgatatgggctatggcgtttatgcgtcagacaattacagcgccagcgagccagaggaaaaactgagcgtcaaagcgcaaagaattgctgatgatgtggagcagttggtagagcacataaaccagaaagaaactatgcctcgcgctgaagaagtcgtgcgattagtcgataatcctggcaccgaacaagacaacctggcgctgtggaaacgcgtcttcaaaaccgatgagcgctttaccaaagcattcacgcaaaacggcggcggcacctcaatcaacggcacgtatcttacgatgctggctacccgtgagtttgggccaaaaggtcagggctggggcattgatattctggaagaacgttttgatacaggcgcgccaattacccgcactatcaagggtgccgatggcaataacacatgggaactgatccctgatggtatgggtggcctcctcatggagaagcaccacgttattaaaatcaggctttggtatctgaagaacgatgtacgcggcgaagaatacgcctatggctgcactccctacatttacggaagtaaatacggccctatctgcgacggagaagctactaaaaaatcactaactgacgctaccaaaaaggcgttatccggcctcggattcagcggcgatatctttatgggcctctatgacaatccagaatatcgccagaaaaacaaagcagagtttgacctcaagaatgccagcgaaaccgccgaagatgcagcgcggttgcgtcaggagttcgacgacaaactaacccgcgtcgccaatacactggcacatggcgtaacagtgaacgaaataaacggcgtgttctcccctatcgcacgtgaaatcgatgttcacattaaggccgcacaggccaacggcgacaagcaacatgaacgctatctttctggccgcctgcgccgcctgattgccattaaagatggtcgtctcaaagaactgaataaagccgaggagaaagcataa

SEQ ID NO: 250534 - DNA, 351 bp, Klebsiella pneumoniae; identical to SEQ ID NO: 234332

SEQ ID NO: 250535 - DNA, 270 bp, Klebsiella pneumoniae
atgcgaatgataaccagaaagaaaccggccttcactgagctgtatcagaccggcgtattaacgcgcatagccgccgtaaaaagtcccgatggtggcggctggcgattgttcggcttatggcggggtaaagatatagctgtgtttgtggaggctgctcgcggaggcatccgcgagtggtctggcctggactacctcgctaacttctgcgcgagttgcggcattagcctgtgggaagttcacaacaaggtcgctgaaaaagctcctgaataa

SEQ ID NO: 250536 - DNA, 594 bp, Klebsiella pneumoniae
atgagagatccccgtcgcagatgcaaagcacccggttgcggtgcgtggtttaaccttacctacccgaacgtttactggtgctgcgaagagcataagagcaagtaccttgcgcttcagcgtgaaaaacagaaagccaaagcacaagaacggttaaaaaataagcccgttcatcatatccgcactgagtcagtatcagcgggaaaatccctgagtcactggcttgaagtcactgaacgcgtggttaacacgctatgtcgtgagcttgcccttgccaatggagaagggtgcatttcctgtggaactcataacactgctgtctggcatgccgggcattatcggactgtcgctaaagcgtctcatctgcggtttacccgcatcaatatcaatctccagtgcgatgaatgcaacgtcggcaaatccgggaatattaaggcctaccgcaaagggctggtggaaaaatacggcgaatctgcggttctggagttggataacgacaacagaattcaccgctggaccatcgaagagctggaagccatccgcctgcaggcttacgccgacttacgcgcgctgaaaaaatcgcaggaggcagcatga

SEQ ID NO: 250537 - DNA, 771 bp, Klebsiella pneumoniae
atgagcaaagggactgttatttgcctctgtgatttaaccgggaaaatggctgagccatgggttgaggctggctatcgcgccgtcctggtggatccgcagcatccagagacttgcattgatgggggatatgaaaatatttcggcaaccattctggaagcgatgccacggctttctcaaattattcgtactgagaacattgtcatggttattggttttccgccatgcacagacgtggctgtttccggttcccggtggttcgaggctaaacgagccaaagacccgcattttcaggccaaagctgcgctggtcgctgagcaatgccgaatgattggaatggtgactggttgtccgtgggcgtttgaaaacccggtcagcgtattcagcagtattttcggctcatccgattacacgttccatccctaccagttcactgggctgtgcgcggatgacaactacacgaagcagacctgcctctggacgggtaacggcttcaaggcgccggcagagaatatgcacccgatggttgaagcggctatcgacgccgtgaagctggcgtgcggcaggatggtgccgaagaagaaggcaatcgaggtcatctcaggaacatctttcgccggattggtgactgactggtatccggacaaccgcattcacgaatgccctcctggcgacgatcgcgccaacatccgaagcgcaactccacttggctttgcaaaagcagtatttctctcaaacgctcctcacctcaataaaaaccaggaggtcgcatga

SEQ ID NO: 250538 - DNA, 351 bp, Klebsiella pneumoniae
atggcccgcttccagatggcgctgcatggcggctaccgcgtaacgtatcaggcgaaacgccatgtgcctgtcaggcgacgactggtgctcaatgagcacgtgaacgtagccgtcaccaccggtggttttcaggctgtagaggacgtcgctgaaatactggcggaggtcatcctcaacgaacgagccggattccagtttcagcgtgctgaggtcgcagatggcctgcagctcagcgggcaaatgcaacttcataaaatcccgggcaatatccggctgcgtcaggaactgcctgaacgtggcatcgtggggtgtgggggtgctgtttttcttcatcatcagccctggctctga

SEQ ID NO: 250539 - DNA, 351 bp, Klebsiella pneumoniae
gtgaaaaaaattaattttagcttctccattacgcggtggattggcgtggttattaaggaaattcacgagctacgccgtgataaagtcagcatcagtatggtgctcctgacacctctttttcagctgatcattcttggctatgccatcaatatggatccgcataatcttccgaccgccttactaaattatgataccgaacgcatgagtcaaatctttgtgacggaagcgcaaaataccgggtatttttcgatgattcctgtcgattcagaagaggcggcgcagaaagcctttgtgcggggggatgtcacttttatcgtgacgatccctgaagggtttacgcggctttgttga

SEQ ID NO: 250540 - DNA, 1203 bp, Klebsiella pneumoniae
  misc_feature (1044)..(1044): n is a, c, g, or t
atgtctggattacataacacccgggcacactggagcggcgtcctggcgatgacgctctgcgtatttgtgctcattgcctcagaatttatgccggtcagtctgttgacacccatcgcgggtgatttacacattaccgagggattagccggtcagggcattgcgctttctggcgcgctggcggtactgaccagcctgacgatatcccgtcttaccggatcgctggaccgtaaatggctgctgctggggctcacggcgttgatggcagcctctggggtgattattgccctggcgtccagtttcccggtttatatgctgggcagagcgctcattgggatcgtcatcggcggcttctggtcgatgtcggcggcaacggccattcggctggtgccgcaacgccaggtcccccgcgcactggccatctttaacggcggcaacgcgctggccaccgttgtggcagcgccgctgggcagctacctgggggccaccgtcggctggcgcggcgcctttttatgtcttgtcccgctggcggtgctggccttcgtctggcaatgcattagcctgccgtcgatgaaaagtccgcgcgcaccacagcggcagggagcggtgctgcgtctgttccgtctttctacgctatccctgggattgctggcctgcggactgttctttatgggacagtttaccttatttacctatgtgcgaccgtttctggagacggtgacccaggtcagtccttctggtctgtccctgatattgctgacaatgggtatcgccggttttatcggcacgctgcttattacgaccgttctgaatgcccgattttatccgacgctggtggctatcccgttgttaatggccgcaattgccggaacgcttctgctggccggacaccacacgggatcggtcgccgtactgttaagcctgtggggcctgctggcgacggcggcgcccaccggctggtggacatggattgcgcggacgctgcccgaggatgcggagacgggcggcgggctgatggtcgccgtgatccagctatcgatagccctngggtcaacggtaggcggcctggtgtttgatagtctgggatggcacagcacttttgcactgagcggtctgttactgctgggcgcggcaggggtgacttttctgctctctgtcaaaatcagatcatctcagcgcactgcgattaatgaattgaatgcataa

SEQ ID NO: 250541 - DNA, 885 bp, Klebsiella pneumoniae
atggcgaaacgggaaaactataatgacctctatctgtttatgcaggttgtgcgggaaggcagttttaccgccgcagcacaacgacttggcctggcgcagtccggtgtaagccgtgcggttcgtgaacttgaagagcggctgggcgttcagcttctggtgcgtaccacccgccggttgtcgctcactcaggcgggtgagcagctctatcacaatgtcgaatccggtttcgacgccttagatatgggactcgccacgctggcccactatcgtcaaacgccctccggtacggtacgcatcaatgccagccagcatgccattgataaagtcctgctgccgaagctggcagtatttaaacaccgctatcccgatatcagactggaactgatcagcgaaagccggtttgtcgatattattgcgcagcgattcgatgcgggcgtgcgtctgggcccggaagtcgggagtggcatgattgcggtacgcatttcgcccgatatggagatggcggtggtgggtacaccggaacattttcgccgctacggctttccacaaacgcccgccgatttagtcgtccacccctgcatcgcttatcagttcggcgacggcagcctttacgcctgggaacttaatgtggatggcaaaaaaattacccacccgcctcagggacagtgggctttcgccgatagctacatggaggccaaagcggcgaggctcggtctggggctggcctatgtcccggaagagctgattaccgacgatctcgcccagggcacgcttatccgggtgctccagcgttatagccagcgtctggaaggttcatttctctattacccgcaccgcaatgtgtcgcccgcgctgagagcggtcattgatacattgcgaatgtag

SEQ ID NO: 250542 - DNA, 255 bp, Klebsiella pneumoniae
atgggattgagtggttcagaatggaccaatgactggtatgcagcagattattactccaactctccggtaaagaatcctcagggaccagagcaagggaccgagaaagtgttgcgtgggaatgttggcggcgacagacagaacgcattgactatgtttagacaatctgcttcaccactcccagaagaagttgatggtgactatgaaaaatatggtgttggtccgcagtatgttttccgttgcgtcatcaataaataa

SEQ ID NO: 250543 - DNA, 330 bp, Klebsiella pneumoniae
atgagaaaattaatcgtagttgcttccgttgctgccggtttactgacagggtgcgatcagggaaataccaccgggagtgaaaaagcagctaaagcacttgtggataaatcggtctctaatatggtccccgttcagggtggtgagtttttaatgggtgattttggtccattagttggtgaaaaattacctttcagcatacaacaggatgataaaactttacataaggttattttaagtgatttttcgatatcaaaatataaagtcactaacgatgattttaatgtttatttgaaagtaacagataaaaaaatccacctgtggatatactag

SEQ ID NO: 250544 - DNA, 954 bp, Klebsiella pneumoniae
atgatgttatttcacaccggaaaactgcgtttccttgctgtcgccacgaccatgctggcatccatgagttttatttctgccgccagcgctgccggtccgacttatgcgctggtacaaatcaaccaacaggcgctgttctttaatctgatgaataaaggcgcacaagatgcggccaaagccagtggcaaggatttagttatttttaactctaacgataatcccgtggcgcaaaacgacgcgatagaaaactatattcagcaaggcgttaaaggcattctggttgctgctatcgacgttaacgggatcatgccagcggttaaagaagccgccgccgcaaacattccggtgattgcgattgatgccgtattaccggccgggccacaggcagctcaggtcggcgttgataatattgaaggcggcagaattatcggtcaatacttcgtggactacgtgcagaaagagatgggcggccaggcgcgactgggtatagtcggcgcgctgaattcggccattcagaaccagcggcagaaagggttcgaagagacgctgaaaagcaatccgaagattactatcgctaacgtggtcgacgggcagaacgtgcaggataaagcgatgactgcggcggaaaacctgatcaccggtaacccggatctgacagcgatttatgccaccggcgaacccgcgctgctcggcgctatcgccgccgtagaaaaccaggggcggcagaaggatattaaagtctttggctgggatctgacggcgaaggcgatttccggtattgacggcggctacgtcaccgccgtactgcagcaggacccggaaaagatgggcgccgaagccctgaatgcgctgaacagcatcacgtcgggtaaaaccgtgccgaaaaccattctggttccggcgacggtggtaaccaaagcgaacgtcgattcataccgtccgctgtttaagtag

SEQ ID NO: 250545 - DNA, 693 bp, Klebsiella pneumoniae
ttggctgaacaggtaccgcaacgcttgctggccaaactcgcgctggtagtcgccatacatcacccattcgggcggccagctcaggcccgcttgctccatcgcggtgcaaaagccctgatagcgctcgcggacgctcatcagcttgtccgggccaccgacgaaagcgatatggcgatgcccggcggcgatcagtttttcggtggcgatccgcccgccctggacgttatcggcaaacactttcggtaccttactgccgggaatatcttcatccagcaggacaatccgttcgtgacgctggacttccttgcgcagcaggccattatcggggcggttggtggtgaacagcagaccgtcgacctggcaggtatccagccagcgaatgaactggcactctttttccgggttgttgcgggtgatacacagcaccaggctgtagccgctggcagaagcggcctcttcggctgcgtcggccagttcggcaaagaaggggttggtaatatcgggaagcaccaggccaagcgtttcgctgccgcctttgctaagacggcgtgccaggctattgccgcgatagtccagttcgcgaatggcggtttcgatgcggtcgatggtgtcctgcggcagcacaatactgttgttcatatagcgcgacagggtcgccttcgacagcccggccagctttgccacatcggataa

SEQ ID NO: 250546 - DNA, 786 bp, Klebsiella pneumoniae
atgttttcagcgatctatcgctaccgtggctttattattgacagcgttaaacgggactttcagtcccgttaccagaccagttttttaggcgcggcatggctgatcttacagccgatcgccatgatttccgtatatacattaatcttttctgagttaatgcgtgcccgcctggcgggcatggacggcccttttgcctacagtatctacctctgttccggggtgttaacctgggggctgtttacggaaacgctcaatagtctggttaacgtttttctgaccaacgccaacattcttaaaaagcttagctttccgcggatctgtttaccaatcatcgtcactgcttcggcgttcattaacttcctgatcatttttggtctgttcgtgttgtttctgatcgttacgggcaatttcccgggcatgattttctttgaaatcatcccggtgctgatcgttcagatgctgttcaccctcggcctcgggatcatcctcggggtgctgaacgtttttgtccgcgacgtcgggcagttcgtgaatatcctgctgcagttttggttctggtttacgcccattgtctacgtgtccaaaacgctgccggagtgggtctctggtctgctggcgtataacccgatggcgaccattatcggttcgtaccagaacgtgatgctctatcaccagagccctaactggctggcgctgcttccggtcacggtgctgtccgtcattctgtttttatttgcctggcgtttatttaaaaaacatgccgctgatattgtggacgagatttaa

SEQ ID NO: 250547 - DNA, 1254 bp, Klebsiella pneumoniae
atgaatacccttgcctggcaggggcaggcggggcaacaaaggaaggggctgtcggacagccttattaaatcggccaaagatctggtgggcgggaaagacaagccggtcatcgaccagtcggcagccggcccgcaggggcctctggatgacacgttcggcccactgctccagctgatggggaaaaacacgggcagcaacgtcatgtcggccgatagctccctgagcctgcaaacctatctgacccgtatcacccgcgtgcgcctgcgcctgcagcaggttgcgaatgcctccgatccgctggagatgatgcagactctggcgcagaccgtcttccaggggaaaagcgtcgacctgaccgacacgcaacagtacggtagcctgatttcggcaagccttggcgaagagtggagtggcttcggcaacactctgtttgtgcagccgctgactcaggcctgggaaaccgtgcttctgccgtcggcgaccagtctgaatgataaatggcgccgttcggtggtcgccaactggcacaccgcctttgacggacgctttccgtttgccgccagcaaaagcgacgcctccctgccgatgctggctgagtttgtgcgcaaagacagcgggcgaatcgaacgttttctcacgacggagctgaacggtgtcctgcataaagaaggcagtcactgggtgccggataaggtcaacagtcacggcctggtctttaatccggcctttctgcgcgcgatcaaccagctaagccagctgtccgacattcttttcaccgacggcagccaggggatcagctttgagttacaggccaggcctgccccggagattgtcgagacacagctgacgatagacggccaaaagctgcgctatttcaatcagatggccgactggcagactttccgctggccgggggagacgtataaacccggcactctgctgacctggaccaccgtcaatgcgggcacgcgtctgttcggtgactacagcggtacctggggttttattcgctggctggagcagggtaaacgccatccgctggatcgcagccagtggatgatgagcttctccgctccggatggccgcaccctgcagtgggtattgcgctcccagcttgggagtggcccgctggcgcttctggcgctgcgcggattgaccctgccggatcagattttcactgtcgatgcggctgagagcgcacaggccctgacgacgggggtagggaatagtgacatggatgagatggaattatga

SEQ ID NO: 250548 - DNA, 300 bp, Klebsiella pneumoniae
atggagcatagccccaaaccgctcaagcattgccgccagcagcgtaacgccctccgccagaccggtttcaccatcctgctgcagacgcgcccacacgtaaaaggtgatcacgcgcagatccttgcaggtctgagtcagcagtttttctgccagctggcaaatcagttcggtatcgacaccggagatcttattgacctcatcgcggatacgctgaaaatcatcgtcatagcccggatcgtccccggttggttgggcgtcactgattggcgcaagccaggactgccactgcgcctgacgtga

SEQ ID NO: 250549 - DNA, 552 bp, Klebsiella pneumoniae
  misc_feature (419)..(419): n is a, c, g, or t
atgtccgaactcgctcaaattcagaaagccctggaagaatcacaaagtaagctgcaggggcttttcgacgaacagaaaaaacagatcgagcagaatggcacgatctccaaacaattgcaggatgatatggcgaaggttaatgaggaaatgaccaaaactggtcagcgtctctttgatctcgaacagcgactttcttccggccctgataatcctggtgaaaagaaatccttctcagaacgtgcagcagaagagctgattaagtcatggaatggcagtaaaggtaactttgaagcgagcacttttaataaatcgctgggaagtggcgctgcatctgccgggtctctcattcagccgatgcaggttcctggcatcattatgcctggcttacgtcgtctgaccatccgtgatctgctggctcnggggcgtatctccagtaactcactggaatatgtccgtgaaaacgtttttaccaacaatgctgcaagcgtggcggaaaaagcgctcaagccagaatccgacatcacattcaccaagcagacctgccaacgttaa

SEQ ID NO: 250550 - DNA, 405 bp, Klebsiella pneumoniae
gtggagctgcagaacagcaaaaactcgctcgacagctacgacatcgtcagcgggcgcaagagtcatctgaccctttatccgggcaacgtcgcggtgattgagccagaggtgaagcagatggtcaccgtctccggccgtattcgtgcagaagacggcacgctgctggcgaatgcgcggattaacaaccatatcggccgtacccgcaccgatgaaaacggcgagtttgtcatggacgtggataagaaataccccactatcgatttcagctacggcggcaataaaacctgcgaagtggcgctggagctcagccaggcgcgcggcgccgtctgggtcggggatgtggtctgcagcggcctctcgtcgtgggcggcggtgcagcagtcaggagaagagaatgaaagttaa

SEQ ID NO: 250551 - DNA, 219 bp, Klebsiella pneumoniae
atggtggtcaaagtttatcgggatcgcgccatagcgttgttgcgcgaaatcgagtcggtaatcgttatgatcgatgataaatatctgttctgcgccattgagcctggcgcaggaggcgcagagcaggcctaccgggccggcgccaaaaatagccacgctactgccgggtttgacctcggcgtttttaaccgcctgccaggcggtgggcagaatatctga

SEQ ID NO: 250552 - DNA, 564 bp, Klebsiella pneumoniae
atgtcagcgtcgacaccatgcctgacccggctcttgaggcagcggacgatattattctgcgcgtcaccgcgacagcgatttgcggttccgatctgcatctgtaccgcggaaagatccccggcacgcaccatggtgatattttcggccatgaatttatgggggaagtggtggaagccggttccgaggtcaccgcggtccgcaaaggcgatcgggtggttatcccgtttgtcatcgcctgcggagactgcttcttttgtcgcttgcagcagtatgccgcctgcgaaagcaccaatagcggccagggagcgacgctcaatcgaaaaggcatttcgccaccggcggcgctgtttggctatagcgatttgtacggcgggatcccgggcggccaggcggaatatgtacgggtccccaaagccaataccggaccgtttaaagtgccagacaccttacccgatgaaaaggtgctgtttctgtcagatattctgcccaccgcctggcaggcggttaaaaacgccgaggtcaaacccggcagtagcgtggctatttttggcgccggcccggtag

SEQ ID NO: 250553 - DNA, 186 bp, Klebsiella pneumoniae; identical to SEQ ID NO: 136243

SEQ ID NO: 250554 - DNA, 657 bp, Klebsiella pneumoniae
atgcagacggccctgggcgttaatggagatcaggaaatcgctctcctgcggcagcggctcggcgccaagctgtccggcagacacctggacgttttgctcctgcatcgccgtcaccacatccgaggccgtcagaccgcgggccgcgaccttattgggatccagccagacgcgcatcgcatattcaccggagccaaaaatctggatctggccgacgccgggcaggcgcgccagctcatccttcactttcagcgtggcgtagttgcgcatatacagcgagtcgtacttaccgtttggcgaaaacagatgcaccaccagggtcagcgtcggagactgcttctgggtggtgatccccagacggcgtacatcctccggcagacgcgcttccgcctgcgcgacgcggttctgcacctgaacctgcgcctgatccgggtcggtacccgggcggaaggtgacggtggtgaccagcacgccgtcggagccggcgaccgatttcatgtacatcatgttttcaacgccgttgatcgcttcctccagcggcgtcgccacggtctcggcaatcactttcgggttggcgccgggatactccgcgcgcacctggacgctcggcgggacgacatccggatattcgctcaccggcagcagcgggatagcgattaa

SEQ ID NO: 250555 - DNA, 324 bp, Klebsiella pneumoniae
atgctgaaggtacccaccaccgataccggcaccgcgatcagcgggataatcgacgcgcgccaggtctgcaggaacaggatcactaccagcaccaccagcactaccgcctccagcagcgtctgcaccaccgcgcggatggagtcgcggacgaaaaccgtcgggtcgtacggcgccgcccattgcatatcttccgggaagcgggtggccagctcggccattttggcgcgtaccgcgttcgacagatcgatggcgttagcgccgggtgactggaagataccgatcccgaccgcatccttattgttgagctgggagcgcagcgcatag

SEQ ID NO: 250556 - DNA, 885 bp, Klebsiella pneumoniae
gtggatcgtattcaggctatgcagatgtttatgcgcgtcgcggaggcaggaagcttcgtgcgtgccgcggaaaccctttccctgccggcctccactgtcaccagtaccattaaaaaccttgagaaatacctgaaggtgcggctgctgaaccggaccacaaggcgggtgagccttaccccggaagggatgcagtatctggcgcagtgccgggaaattctcgccctcatcgaacatagtgaatccaccctgagcgagtctgtcgcgcggcctcaggggcgcctgcgggttgatatgcccgcgggcatcgcgcatttcatcgtcatgccgcatctgccggacttttaccggcgctatcccgatatctacctgatgatcggcgtcagcgatcgccaggtcgatctcattcaggaaggcgtcgactgcgtgatacgaacgggagagctgaacaactccagcctggtggcccgccctctgggccgctttcgctgggtcacctgcgcgtcaccggactatcttcgggaatatggcgtgccgccgtcaccggaggcgctctctcagcaccgggctgtgcattatttctccggtcaggcgaggcgggccgatgagttccgcttcgttcgccatggcgagaccttttctgtacccgtcagcggcaacgccgcggtgaatgaaacggggctctatataaaaatgtgcctggcaggatttgggctggcgcagctggcgcagaatatcgttgctgaccacctgcaggaggggagactggtggaagtgctgacggactggcagccgcccccggtacccgtcacattgctctatccgcaccagcgctttctctctcccgccgtgcgggcgtttgctgagtggatgagcgaggtggtttga

SEQ ID NO: 250557 - DNA, 765 bp, Klebsiella pneumoniae
atgcaggcagagcgcggggaggaagaggggcaagctctgttcaatcaggaatacatgtgtgactggaacgctgcaatacccggcgcctattactcatcgattttggttggtctggagaaggccgggcaaatagggaatgtgccgtgggatccccagtatgaggtttacacgtcatgggacctgggcattggcgacgcaacggctatctggttttatcagtttatcggcaaagaggtacgcgtcattgattattacgaatcgtccggcgttggcctggagcactacgtaaaaatattgcgcgagaaaccgtatacctatgctgagcgtcatttcttcccgcacgatgtccgcgcccgagaactgagcaccggagcatcacgcgaagagacgctgggcaagctggggatacgctgcaaggtactgccggccacatcggttgatgatggtatcagcgaggtgcgtatgatgctgcgatcctgttggttcgacaaaaccaaatgcgaaaaaggcctggaggctctgggacagtatcaaaaagagtgggacgacactcgaaaaatgtataagccaacccctctgcataactggacgtctcacggcgcagactcattccgttatggtgcagtaggcagtaagtctttgcgtagcggcaaccgccacacaacccagcaatttgcccagtccaattacgatccttataaccctcctggacatagccagcagttttacgctgattccgactgggatctgtatggggacaactga

SEQ ID NO: 250558 - DNA, 675 bp, Klebsiella pneumoniae
atggcccgtatagcgcttgcccgacggcgtacgggtgacggcctgggtgacatcccctcccagcgatccgaactcgccaaaaccgcggcccaggcccagcgcccacgcctgatagtcccgggccagctgcgtaccaccgtagagggtgaatcccgccgtcaaaccgtagaacaaagtgccctgcagaaattccggcgagcgcaccgagtcccccccggagtggtagcggccggcgctgagactgaatttgccgcgcccttcgcgcagcatatatggcaccgcggaatagggctgggtaaaggtacgcaccgcgccattgctctcggtcaccttcacctccagatcgccgctctgcgaggtggggtagagatcgctgatggcgaacgcccccggcgacacaaaggtctcgtagatcacatacccgtgctgagagacggtcactttagcattgctgtgcgccacgccacgaatggtgggggcaaagccgcgctggctgtccgggagcatttcatcgtcagacatcagctggacgccgcgaaactgtatgctgtcaaacacatcgccggtggtataggtatcgccgatccgcagcaagctcttcagcgagcggacatcgcgctgcagccaggtgctctgggtatcccagtgccggcgctgctggtcatactgcattga

SEQ ID NO: 250559 - DNA, 924 bp, Klebsiella pneumoniae
atgcataccgtcacgtcaggtcgtgatttgctcgatcaggctaaggtgctggcgaaatatctgcgtgagtgtcccggcggatggctggcaggtcatcatctgatgaagagtgtgcgttgggatacgttaacggagttaccgccgctggatgcctccggccggacacggctattgcctcccaagcctgagagtaaagcccatcttaagcgtttgtatttacagaaaagctggtcggaactgctggagcatacggacacgctgttggcgcaaggcgtcaaccatctgtggctggatgtgcagtggtacgcctggcaggcgttgctgaaactggatgctgacagtgtacgggccgatatcctgtgccgggatatgaaagggctgctggctcgtctgccggggctggaaaccctggcgtttaacgatggtacgccattcgccgatgaagtgacgctcaactggcttaacgaacgtgtcctggatgagatggccggatggcaagatgagccggtaattgcggcgaccagcgctgatgaggtgctgtcgctggagccagaagtgctcacccgcgcggacgatgaaggtattgagtcggcgctgaactggttacaggcgcagccgggctataccaccagccgcaatcggtggctgatgcgcttactgatggcgcgggtcagcgagcagtacggaaaaaatgaaatggcgctgcatctgctggcggaactcgacagccgcgcccgggaaatgacgctcgaacaatggaagccggagcttatcttcgaggtcaaagcccgccgactccggctgctcagaggcaaggccgggtgcagtgaggcagaaaaaaatcgcttgctgccagaaatggagtcattgcttgccgggctcatcgctctggatcctgctcgcgccgcggtgctgtgcgcataa

SEQ ID NO: 250560 - DNA, 435 bp, Klebsiella pneumoniae
gtgctgacaggcagctgcggcacgggaaaaaatcatctggcggtctctctggcgaaaaacatcatccgcaaccatctcgccaccgtggaactgaccgatgtgatgcgtctgactcgtgccgtgaaaagcacctggcgccacaatgctgacacaaccgaagagagcgtactggatcactacgcttcgctggatctgctgattatcgatgaggtaggcgtgcagttcggaagcccggcagagatgaccatcctgcacgaagtgattaacgcccgctatgaaagcgttctgccaaccatcctgatcagcaatctgccacctgagcagctgaaagagtttatcagcgaccgtatttttgatcgtgtgactgacggtgggcgcaactacctggtattcaactgggcaagttttcgtgggaataacggggggcatgcatga

SEQ ID NO: 250561 - DNA, 843 bp, Klebsiella pneumoniae
  misc_feature (796)..(805): n is a, c, g, or t
ttgccggtaacgcagaaagtaccccagcaccggttcggcgctgttcagcgcattcagcaaccagaacagagagacatcggctacggcaaaatcagccatccgttcattgctttcgcgacgcatggccatcaggcgcgtcagacgagcccggagctggacgagcagctgttcaagctgcgtcgccagccagcggctgccctggatctgcagcagcggcgggagaaacgtctcgtcgataagccaggccccctgcgagtcccgctgcaggcgaacaagcggacaggtcaggtaatcgctgttgtcctggtgggcgaagcggaggatcagctccggctgtatgacggcaatctgccgggtatcatccccaaactggttacggacatcgcgccagcgctggcggaagcgcgccggcctttcggccacctcctccggcttcagacagttgccgccattcgcctgcatcaggggcagcgccagcacgatcaccgcctcgccggacgcgccgtccagcgacagcgcggacggcagcgcatcggcattgtccgtatcaatcatcgtgccatcctggaaccggacctgcagcctgtgagcctgcaggcggcccagtttgagcatctctggttcgaaggtcgcctcaaccactccccaggggtggttaagacccatccgggcaatcacttccgcagtccaggctgcatacgcagcctgctgttgaaaatgctgaggcgacaccataatgccccggccccacaacggacgttccgttttcatcatcgtccgaacctacgccttcgcnnnnnnnnnnggtccgaacctacgccttcgcctttggcatctggctaa

SEQ ID NO: 250562 - DNA, 975 bp, Klebsiella pneumoniae
gtgctgttcaaggtgatcgcgcagcttaagcggcgcggcgtgaccatcatctatatctcgcatcgcctcgaagagctgatggagattggcgacaacatcaccattttccgcgacggtcgctttatcagcgagcgtcacgtcagcgacgccagcgtaccgtggatcatcgagcagatggtcggtgataagaaaaaacactttgattatcaaccggcgccaaaaggcgacgcagtgcttgacgtcaaagggctgaccgcgctgcatcccagcggcggttacaagctcaatgacgtcaccttcaccctcagcaaaggcgaagtgatcggtatttacggcctgctgggcgccgggcgcaccgagctgtttaaaggcctggtcggcttgatgccctgccagcgcggcgaggtgcatcttaacggcgaaagcatcggcaaatctcgctttcaacagcgcctgaaaaaggggctggcgctggtgccggaggaccgtcagggcgaaggcgtggtgcagatgatgtcgattcaggccaacatgacgctctctgatttcagcctgcaggggttccgccgcgcctggcgctggttgaacccgcaaaaagaagagacctgcgtgaaagagatgatccagcagctggcgatcaaggtcagcgacgccacattgcccatcacctcgctgagcggcggcaatcaacaaaaagtggtgctgggtaaagcgctgatgacccagccgcaggtggtgttcctcgacgaaccgacgcgcggcatcgacgtcggcgcgaaaaccgacgtctatcacctgatcggcaaaatggctcagcaggggctggcggtgatgttctcatcttcggaactggatgaggtgatggccctggccgaccgcatcctggtgatggccgatggccgcattaccgccgatttaccgcgccatgcggtgacccgcgaacagttaatcgcggcttcaacacctcaagattaa

SEQ ID NO: 250563 - DNA, 603 bp, Klebsiella pneumoniae
atgaaatcagcatttgtttccaccagcgtcgttggcacgattatcggcagcatcgccgccggatggctggccaagcgctatcgcgcggtatcgctgtttaaaaatatcaacctcctgctggtcctggttggcgtcgtaatgttctttgtgccgccgacctggctgccggtggtgttccctttatacttcctggtcggcttcttccatcagatgtaccagccgtttaaatggaacatgatggccaacgctgccgattatggcgaatggaagtttggccgtcgcatcacgggtttatcctattccggtaatctgtttgctttgaaaatgggcatggcggttgctggcgccgccgtaggtttttcgcttgggctatttggctatcaggcgggcgtaacggcgcagactccgctggcgacaatgggaattgtggggctgttaaccctcggtccatcactatcttacctgctcctgtggtggctggcgcgtttctataagctggatgacaaaatgatgcagacaattcagcgcgagctgtccatgcgtcagcagcaggggcattcagagaagcatttgccgctaaacgccgttccggaaaaggcctga

SEQ ID NO: 250564 - DNA, 1017 bp, Klebsiella pneumoniae
atgaatttatttactgatgtggttacattagataaacaacacccaatatattcaatgattaaaggcgatgagtattttgctgagcgtgatgtgttaaatgaatgggcaagagggtttcaggatagagataataaatttattaaagaatttcagacatcattcgaaccgtgtctatgggaattatatttacatgcgtacatgaaagagctcgggcatgtttctgacttttcatttgatgcgcctgattttgtagtagttagagagcatgaattttgcatcgaggccactattgcactaccagcagcagggcaacaacctgcacacagttttggtaaagatacaaagctgggagactttaacgaattcaactctcaagcagcagttcgtataactaacagtttcatgagtaaagtaaaaaaactaagagaacgttattcaaaccttgaacaatgtaagaacaaacctttcatcatagcaattgcatcattcgacagaccgttttctcattttgttgcaagtagaccaattcttgccgctatgtatggcctttatcatgatgaagaagcaacgatggcattaaatgcagaagaagttatttcttacaatgttgattctgctctgaagaatggaagtactgaaattgatatggggctattttgcacccccgatttttcagatgtcagtgctgttatttatagtagtttagcaacttggggtaaattaagagcgttagctgataatccaactgcagcaactgtttaccagacatttacacctaatccaggatctatttacccaaatattcacaccgctaaaaaatgtgattataaagaacacctcttggatggtttgtatgtacttcataatcctttcgcaacgcatccattagcacccgaagtgcttggacatgctagaattgctcaatgttatatgagagagaatggatatttagattttgaagctccagatgatttcttgctacttagatatttaatgtcgcttaaatatactaaatag

SEQ ID NO: 250565 - DNA, 1362 bp, Klebsiella pneumoniae
atggtctggccgcaaggggaaggcggaaagcttgggatcgtggctgacgatctgaccggggcaactaccgtcggggtgctgctggcgcgcagtggtttaaaaaccgccgcgtttttcgatactgaatccttcgcccgaaatgaggtagagtatccggcgatggtggtcagcagcgacagccgcccattgccgaaagcggaggcccagcacaaagtgagcgctgcggtgaaacagctgcaggctcgcggcgcgcattacttcaccaagcggattgataccacgctgcgcggcggcatcggatttgaaatcgacgccatgctggaacaactgccgcaggagacggtggcggttgtggtgccggcgatgccgcagtcacggcgtattctcgtcggcggttactcggtgattgattcggtagccctgtcgcggaccgatgtggctcgcgatgtacgtaccccggtcaccgagtcgtgggtgccgggactgttggcggcgcagacccatcatcaggtcgggcatatcgcgctgacatcggtgatgaaaggcgaagggcaaatccagcaggatttacaggaacaacaacagcgcggcgtgcgggtgatagtggtcgatgcgataaccgtcgacgatgtcgatgccatcgccggggcggtagtggccctgaactggaacgtgctggccgtcgatccggggccctttaccgaacggctggcggttcgtcgcggcctgatgcgcgaagcgcggagcagcgcgcccgcgagcctgacagcggacggccagcgcggctcgattttgatcgttgccggcagcgcaacgccagtaaccaaaaaacagctccagtatttgatcgctaatgatgcccgggtctgccatatcccggtggatgccgagctgttggttgaccggaaaaacgccgctgagattgaagtcaatcgcgtggtgcagcatgcccgacagtgcgttccggcgcagcacaacgcgctctttgtttttgagtccgccttgaccgggcggttgctaaaccttcaggaagaggagcagcgatttggtctggcccacggtgaggctgcgcaaaatattaaccacggattgggcagtattgtgcgcgaggtgcttaactgtgcgtcgggtgaaattaaaggattgtatatgaccggtggtgacaccatggtcaatgtactaaaagagctgggcgccaccggaatagaaatgattgactatgtcatcccgcaaaccgatatggtgcggatcattggcggcgattatgccggcttaatttgcgtcgggaaaggagggctaaccggaccggaagatattattagcatcattgttgaccgaatttatcaggaagcacagcaataa

SEQ ID NO: 250566 - DNA, 240 bp, Klebsiella pneumoniae
atgcttcgacagtcagacatcgccgcggctttccgcgagtcggtattgcgcagttccaaggggttccagtaccttcacacacgcgactttgttaccgcgctgcgacggcgcggcatccacttatccgaggtggaggctaacgcctggatcgcacgcgagcagtcttatttcgtcgacaaaactgctgagcacagcgaaaaccgcctgtggatgatggccaacatggggagggtgatctaa

SEQ ID NO: 250567 - DNA, 261 bp, Klebsiella pneumoniae
atgactgatgccctgaccaaagaaaaaatcattgatgctatgcgaagttctattgagggtttcgccttcttaatcgtcgattcgctggagtttgaacttaagcgccagctaaccgacgctgaacagcaggaagtttccagagttgttgagcagttggttctaacgtttcctgaaccatgtccgcgctgtggggtaacgtctacccgcccgaatggtgagcattattgccatgctgaagctaccacgcaggagaataattaa

SEQ ID NO: 250568 - DNA, 1137 bp, Klebsiella pneumoniae
atggatctgttgataattttgacctacgtggccatcgcctggtcgatatttaaaatcttcaaaataccggtaaataaatggacggtacctaccgcggcgctggggggcgtatttattgttagcgcgcttattttattaatgaactataaccacccttacacctttctggcgcaaaaggcggtgatatctattcctattacgccgcaggttaccggagtggttaacagcgtcaccgacaaagcgaatcagcgcgtcaaaaagggtgaggtgctttttactattgacccggcgcgctatcaggcgcgggtcgaccgtctgcaggccgacctggtgacggcgctgcacagtattaacaccctcaaagcgcagctctctgaagcccaggccaacaccacccgcgtgtcggcggaacgcgatcgcttatacaaggactatcagcgctacctgaaagggagccaggcgcgggtgaacccgttctcggaaagcgacatcgataacgccaggcagaattaccttgcccaggacgcgctggtcaaggcgtcggtggcggagcaggcgcagatccagagccagctggacagcatgatcaacggcgagcagtcgcaagtggccagcctgcgcgcccagctggcggaggcgaaatataatctcgatcagaccaccgtgcgggcgccaagcgatgggtatatcacccaggtgctgatccgtccggggacctatgccgcctcgctgccgctgcgtccggtgatggtgtttatccccgagcaaaaacggctgatcgtcgcccagtttcggcaaaattccctgttaaggctggagaaaggcgacgacgcggaagcggtgtttaacgccctgcccggacaggtattccacggcaaactggtgagcattttaccggtggtgccggggggaacctatcaggcgcagggggcgttgcagtcgctgaccgtgacgccgggcagcgatggcgtgctggcgaccattgagctcgatccgaatgccgaaatcgatgcactacccgatggcatctatgcgcaggtggcggtctactccgaccatttcgcccacgtttcggtgatgcgtaaagtgctgctgcggatgaccagctggatgcactacctctatctcgatcattaa

SEQ ID NO: 250569 - DNA, 1326 bp, Klebsiella pneumoniae
atggccgcagcaatcccttcttacgatcaggtgtgttatgccatgaataaattaccggtagtggttaaacagaaaggccgtatcaccggaagcgagttccgccagtatgagggctttgtccgccgtgactgggagtcacttccggttaattacgtctggattggtgacggccacggcatgaagatgaaagtcgcccatcctgaccacggcaacccgttctcgccggaggtgacgtttatcctggatggtagctgccgttatattgttggctggagtctggcgttgtctgaaagtgtgatagccgttgccgacgccctgcgccacggcatcaaaaaccatggcaagccgttcctgtactattccgataacggtggtggtgagaccaacaataccttcgatgcggagctgaccggtattcttccccgcctcggaattgatcaccggctgggtatccctgaaaacccgcaggggcgagggattatcgagcgccttaaccgttcgctggccatgcgtatatcacgccagttcgctacctattacggcaccggcgcagaccgtggcaccgttcgccgcatgacaaaagcgctgcagtcggcaacgaatgcagcgaacaaagggaaggagctgacggcaaaacaacagcagaccctgcgcgatctgccgtcatgggaatcactcattgagcacattgaggccggtgtggagtggtacaacaaccgcccgcatgagtctctgccgcttcgtggagatggtgagcacttcactccggcgcagttccgccgctataagctggagaaagaagcgacagaaatcgagtggctgtctgagcttgagctgcgcgagatgttcatgccgcagatagagcgtaccgtcaaccgctgtgaggtccgtttattcaataacctgtattactccgctgagctgaataacgagcacagtaataaagtgctggttaattacgatattcacgacgcaacaaaggttgtaattcgtcgtctggatggttcctttatttgtgaggctgtctgggatggtaataaacagcaggcattcccggtcactgctgaatatcaccaacgccagcaacgcatcaaagggatgcgccagcgtggcgaggagaaagtccgtctggccgaggctgagaacgtccacaccctgccagctccggcagagcaggaatggctgcatggcaacgtctatcgccccactcgcggtacgacaccggtggcgctggcggaagtggaggatgcggaatacagcgaggatgaatatctgaataactcgctggatattctggaatcaaataagcgtaaaaacgcgatttaa

SEQ ID NO: 250570 - DNA, 1239 bp, Klebsiella pneumoniae
  misc_feature (1117)..(1126): n is a, c, g, or t
gtggcggagagctgggacaatgggaaaccgatccgcgaaacgcttaacgccgacctgccgctggcggtggaccattttcgctacttcgccggctgcctgcgcgcccaggagggtagtaccgccgaaattgacgaaaccacggtggcctatcatttccatgaaccgctgggggtggtcggacagattatcccgtggaacttcccgctgctgatggccgcgtggaagctggccccggccctggcggcggggaactgcgtggtgctcaaaccggcggaacagacgccgctaagcattaccctgctgctggagctgatcggcgatctgttcccggccggggtgcttaacgtggtgcagggtttcggcaaagaggcgggcgaggcgctggccaccagcaagcgtatcgccaagctggcgtttaccggctccacgccggtcgggcggcatattctcgcctgcgcggcggaaaatattatcccctgcaccgtcgagctgggggggaaatcgcccaacatctacttcgccgacgtgatggacggagaagaggaatttattgagaaggcggtggaggggctggtgctcggcttcttcaaccagggtgaggtctgtacctgcccgtcgcgggcgctgatccatgaatccatctatgagccctttatggcacgggtcatggagaaggtggcgcagatccgccgcggcgatccgttagataccgacaccatgatcggcgctcaggcttcccgccagcagttcgataagatcctctcctatattcagattgcccgggaagagggtgggcaaattctgaccggaggcgagcgggcggctatcgcgccggcgctggataatggcttttatattcagcccacgctgattaaaggtcgcaacgatatgcgctccttccaggaggagatctttgggccggtgatcggggtgaccacctttaaggacgaagcggaagcgctggctatcgccaatgagacccagtttggtctcggcgccggggtgtggacgcgggataccaacctcgcctatcgcatgggtcgcggcattaaagccggtcgcgtgtggaccaactgctatcatgtctacccggcgcatgcggcgttcggcggctatnnnnnnnnnngctataaacagtccggcgtcgggcgggaaacgcacaagatggcgctggatgcctatcagcaaaccaaaaacctgctggtgagctacggcaccgcgccgctgggcctgttctga

SEQ ID NO: 250571 - DNA, 639 bp, Klebsiella pneumoniae
atgaacatggcctcaataaatatccagataatcattacgttaaatagcatgcacaaaggaaaaaccatgtccgttcagcctgtcgaaataagtaaggcctatcgtttattgcaggtcgggtccaccaccatgatttccgcaaaatatgatggcgtcgaaaatgtcatgtcagccgcctgggttgggctggcaggcgagcgaaaagtggtggcctatattggcacccaggctttcactcgtcagctggtggaaaagagcggctatttcgtggtgcagatccccgtagtcagccagatggcaaccgtcctctacgctggcgggcgcagctatgccgacgcgccggataaaaatgacaccatccccttcttttatcagccggaatttgatcttcctcttgtggcaggctgtgcgggctggctggtgtgcaaagtgatgccctacccggacattcagcagcaacacaatctgtttatgggcgatatcgtcgccgcctggagcgatgaccgggtattccgcaacggacactggatttttgatgatgcgccggacgagctacggaccgttcactatgtcgcaggcgggcagttctatgccatcggcaaaggcagcaaattcgatcatgggccgggccaggactga

SEQ ID NO: 250572 - DNA, 612 bp, Klebsiella pneumoniae
atgccatcggcaaaggcagcaaattcgatcatgggccgggccaggactgaccctccccggtcatgcggatcgctgacgagatgtctgcgcaacagagcggctgatactccggcgccagacgccgggcgcctggccgtactggcgcttgaagctgcggttgaaggactgctgggagtcaaagccgagggcaatcgccacgttcaggatcggctcgttgctgtgggccaagcgttcgatcgacttttgcagctttttcgcccgaatatattctccgaggggatgcccggtatgttctttgaagatccgctgcaggtgccacttcgaatagccggctcgtcgggcaacggtgtcaatatccagacggctatcaagatggttgtcgatccagtcgatcagatcctcatgttaccccctcgcggccggttaaaagcatctttgtcagttgcatttaaaggtggcctgtttttacacaaaatgcaagttttattgttacatttaaatccacgccgggatcgcgctcggcgcgatgatgctctcctttctgctcgtcggctgcgacgacagcgtcgcgcagaatgctgcgcctcccgccccgacggtcagcgccgctaa

SEQ ID NO: 250573 - DNA, 753 bp, Klebsiella pneumoniae
atgcaaacgataatgatcaccggctgttcatcgggttttggcctggagacggcgcgttattttctcgagcaaggctggaaggttattgccacgatgcgcgctccgcaggaaggtgtgttacccgccagcgaccgcctgcggctggtacgtcttgacgtcacttcggcgcagagtatcgcagaggccattgccgaagtcggagagattgatgtgctggttaacaacgccggggtggggatgcttaatgccctggagggcgccccgcgcgaggcgatagccaacctgtttgccaccaataccctgggaacgattgccatgacccaggcggtgatcccccggttcagagagcgccgaagcgggaccatcgttaatattacctcggcggtcaccctgcaaccgatgcccctgctggctgtctacaccgcgagtaaggcggcggtaaatgccttcacggagtcgctggcgctggagctccgtgcttttaatattcgcgtcgggctgatcctcccgggacgcgccccgcagacccggttcggggaaaacgcccgccggacgatggggcagctcccggagagctatgcggcgctcggccagcagatcttcgacagcatgcaggataacgccagcgtgacgcaggcgaccgatgtcgctcaggccgtctggcgaatggtgcacgatcctgatgccccttcgcggctgccggcaggggaagacgccctggcgatggcgcaggccagtcatcgccttgtctga

SEQ ID NO: 250574 - DNA, 909 bp, Klebsiella pneumoniae
gtggttggccaggaggcggccctgagcgctattgcccggcgcctgcgcgccgcgaaaaccggcctgacgccggagaacggtccgcagggggtgtttctgctggtcgggccgagcggcaccggcaaaacggaaacggcgctcgccctggccgatgcgctgttcggcggcgagaaagcgctgatcaccatcaatctctccgagtaccaggagccgcacaccgtcagccagctgaagggttctccgccgggctacgtcggctacggccagggcgggatcctgaccgaggcggtgcgcaaacgcccctacagcgtggtgctgctcgatgaggtggaaaaggcccatcgcgatgtgatgaacctgttctaccaggtcttcgaccggggggtaatgcgcgacggcgaggggcgtgaaatcgactttcgcaacaccgtgatcctgatgaccgccaacctcggtagcgacctcctgatgcagctgctggatgaacagccggaggccagcgaatcagacctgcacgagctgctgcgcccggtgctgcgcggccacttccagccggcgctgctggcccgcttccagacggtgatttaccgtccgctgccggcggcagcgctgcgcgccattgtcggcatgaagctcgggcaggtaagtcagcgtctggcttgccattacggaatcaccaccaccctcagcgagagcctgttcgacgcgctgaccgaggcctgcctgctgccggataccggcgcccgtaacgtcgacagtctgctcaatcagcagatcctgccggcactgagtcagcagctattgagccatatggcggcggggcggaaaccgcgccaggtgacgctggggtatcacgaagaggaaggcgtcgtgatggcgtttgacgaggggacaatatccgatgagtag

SEQ ID NO: 250575 - DNA, 795 bp, Klebsiella pneumoniae
atgaccccgatatggttaggaaccagctggaaaatgaacaagccgctgtcccaggccatggcctggtgcgaaacgctggcagcgcggatgccggagggctgtcaccctgctattcagcccttcgtcattccccccttcaccgcgatccaacccgtcagccattttctgcaaacgcatcagttaccgcttctgaccggcgcgcagaatatgcatgaagcggatcagggcgcctggaccggggaaatctcggcggccatgttggcagaaaccggcgccacgcttgttgagctgggacattcagaacgacgcgccgcctttaatgaaagcgatgccgcgattaatcgaaaagtgcatagcgccttaggtcatggcctgcgcccgctgatctgtattggcgatagcgccgaggagaaacgctggcaggtgtcgcgtgaaagcgtggtgcggcagatgaagatcgccctgtatggcctgagccaccagcaggcgctgcggaccctgattgcgtatgaaccggtgtgggccattggcgaacatggtacgcccgcctcaccgcaggaggcgggtgtcattcatcaggcgctacgtcaggcgctttgcgagcggtttggtcacgagacgggaacccgtatcccgctgctctatggcggcagcgtaacgctgcaaaacgcggtggaattgctgcgccagcaggagatcaatgggttgtttatcggccgcgcggcctgggacgcgcaaggctattgcgacattgttcaacgcgttacacaggaatttattttgcaggcgcagtaa

SEQ ID NO: 250576 - DNA, 162 bp, Klebsiella pneumoniae
atggtatttgacgctgatctcaacaatcccttcctggcgcgcttttttcagcaggcgcccgactttgatacgcgaaatgccgaatcgtttggcgatctcttcctgcgtttgttcctgatcgtaataagccaccgcaatttcagtgagcagggcgtaatctga

SEQ ID NO: 250577 - DNA, 486 bp, Klebsiella pneumoniae
atgggtcagtcctttttaaggacgtcccgatcgcacggactggtgagcaggagtacgacgccacagagcggcctgagcttgtcccaaacgacagggggaaggtcatcgtacgccgggcaccagaagaggtgttcagcgagagagccatggcgtcattcgaaggaatggcagtcactatcggccatccgcgagattttgacgggcagatcatctttgttacccctgataactggcgccagctggctcacgggcacatccagaacgtacgacgtggcacggacgataaaaccgatctgctgctggctgatgtcatcgtcaaaaccccggaagccctgcaggccattgatgatggtgatgacgaggtcagctgcgggtacgacgccgattacgaacaaatttcacctggtctcgcaaagcaatctgcgattaccgctaaccatctggcccttgtccctaacgggcgggccggtttccgttgtgcaatag

SEQ ID NO: 250578 - DNA, 879 bp, Klebsiella pneumoniae
  misc_feature (594)..(594): n is a, c, g, or t
atgcgcgacgctctgttcgatctctgccgccggtttgccgatgctcatgtcgatagctgcggggtggcagttaccccggttcccggtattactctggtgcgggccctgcatcctggtgacctgcaggcggctatcgccaggccgctggtggccatgctgctccaggggcgtaagagcgtgaccaccggcctggcaagctttgactatggtccgggcgaggcgatggtgatcgccgcggatgttcccactaccagccagatcaccgaggccagtcagcgttttccctattacgcgctggtgctggagctggacctggctatcctgcgcgagctgcaggaggccgggccgtcagggccggatgaggcgccccgcgttggtatcgaaccgatgaacgccgatgtgacggatgccgcttaccgcctggcaaggctgtttgatcaaccgggggcgctggcggtgctgggggaaggtctgcggcgggagctgcattactggctgttgcagagtgtccatgggccggccatccgggcgctgggcgccgtagacagccattcggcgcggatccgccgggcggtggcgatgctgcgccgggantttatgcagccagtcagcgtcgacgcgctggccgacgccgccgggatgagcgtctctgtctttcaccgtcatttccgcgccatgaccacgctgtcgccgctgcagtttcagaagcagttacgcctgatccacgcccgccgcctgatgctggcggaagggatgagtattgcacaggctgccggggaggtgggctatatcagcgtgtcgcagttcacccgggaatacgctcgcctgtatggcgcgccgccgggccgcgatcgtcgacgggaaaaaatgagcgcctga

SEQ ID NO: 250579 - DNA, 390 bp, Klebsiella pneumoniae
atgagcgccggggggggtaacgaaatggacaaactggatgccatgcaggtctatgttgcggtcgtggatgcccacagcttcgcccgcgcggcggaggtgctcgggcagccgcgctccacggtatcgcgggtggtgaaggagctggaagcctggctcggggcgcagcttctccagcgcaccacccgcaagctcagcgtgacggcggagggtcgccggtattatgaggagtgtaaaaggctgctggccgagatggcggcgatggaagcctcctttcccgggcgctcggctcagcccgccgggcggttcaaggtagggatgccgcaatcccttgccactgcattctgccgaggatcggcgagtttttgcagcagtatcccgacctggagctga

SEQ ID NO: 250580 - DNA, 219 bp, Klebsiella pneumoniae
atgttgaggatcgtgggtaatatcgatagccgttaccacaccaatatttccatctatcacctgcggattatgatccgagttggtgtgggcatgatgttcatcaccaatggtgccatcgctgtccgtgttgcgatgcggagcatattgattaatctgatctctgagtatcagcagactctttgcgacacgccataccatgttatttaccctccggattga

SEQ ID NO: 250581 - DNA, 663 bp, Klebsiella pneumoniae
atgatgaagaaaataattgccgttgcggcttttctgctgtgcatcacggcagcgcaggccggtattgtcatgggtggaacccgtgtgatttatcaggaagggaagcgtgaagccgctatttcagtcaccaatgccgatacccatacgccctatctggtgcagtcgtgggtggaaaattacgcggaaaacgataaggccagggtgcccttcattgtaacgccgcccttgttccgtctcgatccggagcaaaataacgttctgcggattaactttattggcacctcgctgccccgcgaccgtgaatcggtcttctggctgaacgtcaaaagtatcgccccgacgcctcagggcgaggtgaataagctgcaggtgaatattaaatcgaaattcaaaatcttctatcgccccaacgacctggcgggcgacccggcaaaggcctggcagcagctgaagtttagccagtccggcggtcggctgacggtgataaatcccactccctacttcgtctctttttacgccgtcgaggtgggcgggcaaagcatcgacgatcccggcatggtggctcccttcggcgagaaaacgtggccggtgagcgggcacggcaccgtcaaatggcgggcgattaacgactacggcggcgtcagcgatttcgcccagcagtaa

SEQ ID NO: 250582 - DNA, 825 bp, Klebsiella pneumoniae
atgatgacactgaccgttgagtattatttcacccatccccaggataagctcggtatgtacgccagtgacccggaggataatagccaggaacatggccatgaatttgccgaactggtgatcgtcgaggaggggcatgggttacacgttattaatggtcgcccgctgtatatccaacagggagacgtattttacgtccagcctggcgatgtgcattattatgatgagctggggacgctgaagctgattaatgtcttaattaatccggcggtggcctttggctatttacagcagatggagggattgctgcagcaattatccgcgcagcgcgccgcctgctatggctggctggcgccggagactcgcagctattgccgggaactggtggaaaagatattttccccggcgctgagggcggcggataataccccgctacgggagtctctctttttccagctggtgaccaccattctcacagccgagtcggaagccgaatatagcagcactcgctataaactgcataaattactcacctggcttcaggagcactgtttcgaagaacataactggcagcagctggcggagcaatttcatctcaccacccgcaccgcgtttcgccatattaaagaggccaccggattaaccccggataattatctgaaacgtctgcggctggtctccgcgcgggtcaaattacgcgaaacggagatgaccattaccgaagtggcttatctgtgcggcttcgccaacagcaaccactttaccaccctgtataaaaaagtgtttggcctgacccccagcgccgatcgccgccgcccaccgggttaa

SEQ ID NO: 250583 - DNA, 885 bp, Klebsiella pneumoniae
atggcccccggggttgctatctcacttaagagacttgcctggcggcacagaaagaaattgtgcattactttcatgctggttattgctgaaaacgttgcattcctgctctaccccgttctggcgggcatggcgataaatgccatcctgggcggacagacgtcacatgcggctctttatggcctgatggttctgttcatgtggtgcatgggagccgccagacgtagtgtcgatacgcgaacgtttgcacgtatctacgcaagtcttgctgtgactgtagtattatcccagcgaaaatattcacttaatcactcgactattgctgcgagagtcactctatcacgtgaatttgtagatttcttcgagttgcacctgcccgtattgatcacctcgatcatttcccttttcggcgcagcaattatgctgttatggattgaattctggacaggtatagcctgtttgatcatcgtggcaatactgatgtgttttgtctcaagctatgccagcaaaaatgagacattctacagacggctgaataatcgccttgagaaagaggtcgattatgttaataaggcgtcttttggtgctcttaagcgacattatgacacacttgctcgtctgcgcgtagtgttatccgacagagaggcatggggatatttatcaataggccttctggtttctgctctcttttccatgaccattatcaggatgagcatggaatccggaattaatgccggacatatttattccgtcatgacctatatgtggatgtttgcaacaagccttgatgacgcaccacaacttcttgagaaattttcccagctcagggatatcggtaaacgggtttcgactgacgatgagacctctttatcaggaaaaccatgctga

SEQ ID NO: 250584 - DNA, 222 bp, Klebsiella pneumoniae
atgatgattagcggcctgctggcgattctggtcttctcgcggctgtttggcatgcacggcctgtggtacgccgtgctggaagagaactacgcccgggtggtaaaaaatacggtcgaggaaggcagcgagtcgtttggctatatgctgtgtctgaccgccaccctgggctacgcctgctactttcgcggtctggcgcgacaggcgctgtcgccgcagcgctaa

SEQ ID NO: 250585 - DNA, 1017 bp, Klebsiella pneumoniae; identical to SEQ ID NO: 138177

SEQ ID NO: 250586 - DNA, 894 bp, Klebsiella pneumoniae
atggaaccacgcgtaagttatatttcacccaggctgaatgaagaagcgctgcagcatgctatcgcttataagctcatgtttatccttggtaaagacccttcacttgccaataaacatgagtggctcaacgccacgctgttcgccgtgcgcgatcggctggtagagcgctggctacgggcgcatcgggcgcggatctcgcagcaggcaaggcaggtttattatctgtcgatggagtttctcatcggtcgtaccctctctaatgccttactgtcgctgggcatctatgaggatgttaaaacggcgctggcaggaatggggctggatctggaagagctgattgatgaggagaacgatccgggcctgggcaacggcggtctcggtcgtctggcggcctgttttctcgactccctcgccacgctggggttgccaggacgcggctacggcatccgctacgactacggcatgtttaagcaaaacatcatcgacggccggcagatggagtcaccggactactggctggaatacggtaacccgtgggagttcgagcgccataaaacccgctataccgtccgctttggcgggcgcattcagcatgagggcaaaaactcgcgctggctggaaaccgaagagattattgcggtggcctacgatcagattatcccgggttatgaaaccgatgcgaccaacaccctgcgtttgtggagcgcccaggccagcagcgaaattaacctcggtaaatttaatcagggggactatttcgccgccgtggaggataagaaccattccgagaacgtttcccgggtgctctacccggacgactcgacctattccgggcgcgaactgcgtgtgcgtcaggagtatttcctcgtctcggcgacggtgcaggggatgtaa

SEQ ID NO: 250587 - DNA, 510 bp, Klebsiella pneumoniae
gtgccgtggacggcggcctacattgatactatcggcgaacccaccgccgacctgcggtcgaatgtcgcggcggaggcgagggcgaagatcgtctatgaacgcctgatcaacgtgaccgacgatcctggcgtgaaagacgcgctggccttcctgatgacccgcgaagcggcgcatcagctctcttttgagaaggccctgcagtcgattcgcaacaactatccaccgggcaaactgccgcccattagcgagtacgctaacacctactacaatatgtctgaaggtggagaagtacgcggcagctggaacagtgacaaacacttcgattatgtcaaggatccacagccgggcgtagacggcggagatggcagtgcttctgtcggcctgacgccagagcaggaagcgctgtgcaaagcgatgctgaagcgaacgcagtctgacccgcagggcgatcctttgaccggcgccgaactcggagccgggaagcaaaacacttcatcatcggctaagtga

SEQ ID NO: 250588 - DNA, 981 bp, Klebsiella pneumoniae; identical to SEQ ID NO: 187672

SEQ ID NO: 250589 - DNA, 258 bp, Klebsiella pneumoniae
gtggatcagcacgctatatccccggaacgtatcaaagcgcacccgggtgattgccccgcgggtaggcacggtatccgccactgcgttagggacatcaagaaaggcatcgaagtcctgagggttgagcgcgacagaattgacccgatagggaacgctttgtggtacgacagcgtagccgaagggatcgatgcgcacgccggtctgattctctatccctaccccctgagcgtctttggcctccaccagcgcaaaggttga

SEQ ID NO: 250590 - DNA, 879 bp, Klebsiella pneumoniae; identical to SEQ ID NO: 216257

SEQ ID NO: 250591 - DNA, 1029 bp, Klebsiella pneumoniae
atgcgccgacttagcgatacgttatttctgacatggctttcagttctgttcatgctgagcgccttcccggcgcaggcgctgacctgcaagaccacctcgtccacgatcagcgaagtcgtgaatatcgagagcatcattaaagtctccagcagcgagcttattgccaataaaaagatatgggtctccagccctattaccgccaccttcagttgcgaagataccgataattttccgaacggtgaaagcgcctatttctggctggatccggaaaataaagccagcagcttgcccgactttatccaggtaggcattacttacaacggcatcgactatctgctacaaaataaaaaatcggtggagattggcccggcgacgctgtgtgataaaagcgggaatacctgtaagtccccggccattgggcagacattcagcctggtttaccaggtctatatcatctcgacgggccgcagagtgaccggggaaggtaaaatagacgataacctaaaattgtcgctttttcaggtagatggccaaggcggtctacgcaacggcaccgctggcgccaactataatcttttcattaccggcctgaaccgtatcagaacaatggcctgcgtccccacggtatctatttcgccaagcgaaattaactttggcgatattcctgccggtaacgcccgaccgggctactatgaaaaaacacgcccctttaccgtcacctatggtctggtcaagcagggtaacggcagtgattgcgggaccgaacctatgcttgctacgtttagcaccactaatacgatacaggagagcgccattattttgccgcagccggacagcggcttcggcattgccatctcgccaaacgccagcatgcatccccttattgagatgaatgctccgattcactttacgctggcaacgggcgcgaccctcgcgagcacctatacggcggggctgctctggttgtcgagaacgccgaagctggggcctttttccgcgaccgccaaaatcaccgtgacctttgaataa

SEQ ID NO: 250592 - DNA, 174 bp, Klebsiella pneumoniae; identical to SEQ ID NO: 235518

SEQ ID NO: 250593 - DNA, 489 bp, Klebsiella pneumoniae
atggtgccgaatataaaaaagaaaatggacgcacacgccaccgactttaaccagaatggggcgttctttctttcctcgcggggaaggtggaatataaaaggtaatgtaagacctgcgagcagggataatatgacagggctgttttgcagccataacagaaaaaaggaaaatgtatcggcaaaggcattcagcctttgcatcaggtgggaacccatatctattttctccatacgaaaactgacgtgttgggcgcaaaagatgggagcagcttataggagcgtaaccacgctcccatgcgatgctcccataatatgctccgatgaatatgcaaaaggcgctgatcgccagtggcgatcaagccctttttccgcgctttcagaatacagccgaccagtggtcgtctgtattctgaaacgccagaatgacgggcaacggcgtgtgccattacgttcgggctggacgccctcactgcatgacacatgggggtaa

SEQ ID NO: 250594 - DNA, 558 bp, Klebsiella pneumoniae
gtgaccggtgtcgatattctggtcaataacgccgggatctatggcccgcaggatttctacgccaccgacgacgcgacctgggacaactactggcagaccaacgtcatgtccggcgtacgcctgtcgcgggggctgctcccggcgatggtcagtaaaggctgggggcgggtggtgtttatctcctcagaatcggcgcgcaatatcccggcggacatgatccactatggcgtcaccaagaccgcgcagctgtcgctggcccgcggcctggcgaaatatgtcgccggcagcggagtgaccgttaacagcgtactgccagggccgacgatttccgacggctttgccgagatgctgaaagacgacgtggcgaaaaccggccagtcgctggaggaactggcgaaagcgtttgtcatgacccatcgtccgagctcggtgatccagcgggcggcctcggtggcagaggtcgccaatatggtggtctacgtctgctcgccgcaggcgtcagccacctccggcgccgcgctgcgcgtcgatggcggcgtggtggatgatattctctga

SEQ ID NO: 250595 - DNA, 816 bp, Klebsiella pneumoniae
gtgggttttatcggcggacggctggcgccgacgatattcggcaaagcggacgcccaccgtgcgcagagtcaccctggcggagccgccatcattgatgacacgacgccgatcccggcccatgccattttcagctggcggcgtacctctcaggtgctgatcgccgggatgctgctgtggctggtgccgatggccgccctgacgctaatgctgggctgggcgcatccgctgacccagatgagctggttctttaccaaagccgcgctgatgacctttggcggggcatatgccgtcttaccttatgtttaccagggggcggtgacccactatggctggctgacggcagggcagatgatggacggcctcgctcttggggaatcgacccctggaccgttgatcatggtggtgacctttgtcgggtttgtcggcggctacaccaaagcggtgttgggcgtcgatgatgtgctgctggggggcatcgcggcggcgtgcctggtgacatggtttacttttttaccctcgtttatctttattctcgccggcgggccgtttattgaaacgacccataataaggtgggatttaccgcgccgttgaccgccatcaccgccgcggtggtgggcgttatcctgaatctggcgctgttttttatctggcatagcgtctgggggccatccggtttcgacccgtggtccgcagccattgccctgggcgccgccgggctgctgtttcgctataagtggaagctgacctgggtactggccaccgccgccgcggtagggcttatcgtccatatggcgggactgtccggcgcaggataa

SEQ ID NO: 250596 - DNA, 690 bp, Klebsiella pneumoniae
gtggtactcctcggcggcctgctgctaggcggattcgttggcgccatcaacggcttctttattgcctatgaaggcattccggcgtttatcgtcacgctcgccaccctggccgtagttcgcggcatcgcgctgctggtcacccagggctactcgattccggtgccggctgacagcctgtttacctttatcggacgcgcgtgggtcgtcgggatccccatgcccgcactgctcggcattctgattctgctgatcgggcatatcgttctcaaccatatgcgctttggccgctacgtgaccgccatcggcgctaacgccgaaggcgcgcggcgcagcggcattaacaccaaagcggtcaccatgaaggtctatatcatcagcggaatggccgccgcgctggcggggatgatcattaccgcacgcctcggcagcggctcctccaaccagggcgaaggctttgaactgcaggtcattgctgccgttgtgctaggcagcaccagtctgtttggcggcttcggaactattattggcacgctgctgggcgcactgtcgattgcggtcattcagaacgggctgatcctgtcgcatatttcgccgttttacacccagatagccaccggcaccattatcctgctggctatctggctgaacacccgcattctcaacccgacgcgctccgcggcaaaaggatag

SEQ ID NO: 250597 - DNA, 1008 bp, Klebsiella pneumoniae
atgtcagcagagaaaaaacccgttgtggcgattaccattggcgatccggcagggatcggcccggagatcaccgtggccaccatgatggacaaaagcgtgtatgacgagtgcaaaccgttcctgatcggctcggtaccgattatcagccgggcgatgaaaatcatgggctgcgattttgctatccataaaattgcccatccgcaggaggcccgttttagctgggggacgttggatgttctggaaactggcgactacgattgcgacagtatcgaatggggcaaggtgcagaaactggcggggcaaatgtcgctggactatgtgatgaagtcgatcgagctgggcaaagcggggctgatcgacgtggtctctactgcaccaattcataaggaagccatcaagctggcaggatgtaagctcccgggccataccgaaatctatcaggtggaaacccaatctgattacggtctgaccatgttccacgtccacaacctgcgcgtcttcttcgtgagccgtcatatggcgctaaaagcagcctgtgactatgccaacaaagcgcgagtgctggcctgcgttcagcagatccaccatgaatttaccgccctgaacatcaaaaatccgcgcattgccgtggccgccctgaacccgcatggttccgacaatggtctgtttggtcacgaagaggctgacaatctgatcccggcggtgaaagcggcccaggagatggggatcaacgctatcgggccggttccggccgattccgtgttccatctcggcaaacaggggcgctacgacgccattctctcgctgtatcacgatcaggggcatattgcctgcaaaaccctcgactttgaacgttcgatcaccattaccttcggcctgccgtttatgcgcagctccgtcgaccatgggacggcgtttgatatcgccggtaccggtaaggcgggtaccgtcagtatgctggagtcgacgctggtggcggcccgttactggaaaatgaagcatcaataa

SEQ ID NO: 250598 - DNA, 222 bp, Klebsiella pneumoniae
atggttggcggtgaacagcagattctggatgtcattatccgcgtaattatcgctgccaaggtcgccgaagttacgtgcatacaccgaatagtcgccgcgcaggccgcttccccagtcgacatcattgatcccgccgccggtaccgccgaggaacatgatgtcgctatcggtaaagtggatatcgaagttatcccgatcgaagcgcttgccggcccaaattga

SEQ ID NO: 250599 - DNA, 246 bp, Klebsiella pneumoniae
gtgatcgcgcagctgtcgcatgttattaaacgcactgtcgcgggaaccggccacagcctcattgcgccccaccatgatagcggacaaggcgagatcagggcgtccaccgaaggcatcaatacgctgaaggttctcatgcatgaggcgcagattgataacccggtttcgcgcttcgatgtgcttcgccagcgcatcatcacgcgccacttcatcagcagcacggagagcggcttcctccagggataa

SEQ ID NO: 250600 - DNA, 336 bp, Klebsiella pneumoniae
gtgggctacctgaatcaccgtaccgggcggaccatcgactggcttttctccctcgatgaaggcgactacgcgatccgcatgcgggagacgctggtggtcgacgataccgatgcctacattcaggccggcattcaggggctgggcctgatccgcgtcgccagctatctggcgcaaccttatctgcagagcggggcgctggtcgcctgtctggagcaggccgcttctgatcttcccttgtcgctggtctatccgcaaaaccgctatctgccgccggcggtgcgcgcgttttatgactggagcaggcgcgtgctgcaacccccgcacagcgaggcctga

SEQ ID NO: 250601 - DNA, 657 bp, Klebsiella pneumoniae
atgtttggcgccggagagttcgtcccggcgcgcgcgcagcagctttttcgcatcggcctcagcgactggagcgaacactggctgatgcccccgctgttacccgggctgatgcaggaggcgcccggagtgtcactgcagtcgatagccgccgaccccttccaggttcgccagttgctggaggaggagcgcattgatgtcgcggtgtctgtcaacaaacagagccgtggggagatcgtcagcgagccggtgatgtccatgggagtcaccaccctgtggtcgccgcagcagatcccctgccgcggtccgctgtcggtgagcgactttgtcgcctgggaacatgtgatggtggcctatcgcgaaaccggccacggtgaaattgaccgccagctcgccagccaggggctcgcgcggcgcgtgcgctttgccacgcagaatttctccacctttcccctgctgctgaccaccctgccgctgttcgccaccgtcccgcaggggctggcgcagcgctggcaggcgcagtatgcgctgcgcgcggacgctccgccggtagcgtatccggaatttacgctgtgcattttgcggcacaaacggcgggcgcaggatccggcgctgaactggctggtgacgaagttaaaacaggccatgcgcggccaataa

SEQ ID NO: 250602 - DNA, 810 bp, Klebsiella pneumoniae
atgcgcaataaaaccacaaaaatcgcactggcgctgggtatgctgctgctcgcctcgcaggcacaggcggaccagttggctgatatcaaagccgccggcgtcgtaaaagtcgccaccttcgacgccaacccgccgttcggctccgtggacgccaaaacccaccatatcgtcggctacgacgtcgactttgcccaggcgctggcgaaagcgctcggcgtcaaactcgagctggtggccaccaacccggccaaccgtattccgctgctgcagtccggcaaagccgacctgatcgtcgccgacattaccatcaccccggagcgggcccaggttattgatttctcaacgccgtatttcgtcaccggccagcagttcctcgtgccggccggctccccggataagctcgatgagtacagcaaagcgcgcatcggcgcggttaaaggcaccaccggcgaacaggccctgcaccagcgtttcccgcaggctcgcgtcctctcctatgacgatattccgctggccctgaccgccctgcgcaacggcaacgtccaggccatcacccaggacagcaccatcctcgccggtctgctggcggaagcgccggataaagccaagtttaaaattctgcccgacctgctcagcaaagaagagattggcgtgggcgtgaagaaaggcgaaccggccctgctgaaagccgtcaacgatgagctggtgaagctggagaaaaccggcgaagccgcgaaaatctatgatgtctggtttggccctgccactaaaacgccgcagccgcgcgcctttaccatagaagcgaaataa

SEQ ID NO: 250603 - DNA, 561 bp, Klebsiella pneumoniae
gtggtggcgggcctgctgatcgccctggtacggatgctgcgcctgccggtgatcgaccagctgctggtgatctatatcagtctggcccgcgcaacgccgctggtgacgctggtgctatttctgttcctttccctgcccacgatgggcattaacctcgataagaacgtggccgccatcgtggcgctgacgcttaacacgtcggcgtttaacgctgagatctggcgcaacgccttccgcacctttccgcgcgaacagcgggaggcggcggagtcggtgggaatgcgccgctggacctacttccgctacatcatgctgccgcagatgtggatcgagagcctgccggcgctggtcaatgagatgtcctttttgatcaaaggtagcccggccatcgccgtgattggcgtggtggatctcacccgggtcaccaaccgtatctcctcggtcacctacgagccgctgtcgccgatcctcgccgccggcctgctgtatgtggcgatcatcggctgtttgttgaagctgcagggtatcgcggaacgtaaagccaggcgtctggcgcgctag

SEQ ID NO: 250604 - DNA, 900 bp, Klebsiella pneumoniae
atggtcgcgggcatgatgatggcatggcaggcagcggcggcgcagccgaaagagctcaatctgggcattctcggcggccagaacgccacccagcaaatcggcgataaccagtgcgtgaaggccttcctcgataaagagctgaacgtggataccaaactgcgcaactcttccgactattccggggtgatccagggcctgctgggagggaaagttgacgtggtgctgagcatgtccccctcctcctacgcctcggtttatctcaataatccgaaagcggtggatatcgtcggcatcgccgtggacgacaaagatcagtctcgcggctatcactcagtggtgatcgtcaaagccgactccccctacaaaacgctggacgatttaaaaggcaaagccttcggcttcgccgatccggattccacttccgggtatctgatccctaaccatgcgtttaaagaaaaatttggcggtaacgccgacaataaatacaacaacaccttctccagcgtcaccttctccggcggccatgagcaggacatcctcggcgtgctgaatggccaattcgcgggcgcggtcacgtgggcctcgatggttggcgattacaacaccggctacactaccggcgcgttcaaccgcctgattcgcatggatcatccggatctgatgaagcagatccgcattatctggcaatcgccgctgatcccgaacggcccgatcctggtgagcaatgcgctgccggcggactttaaggcgaaggtcgtggcggcagtgaaaaagctggacaccgaggatcacgcctgctttatcaaagcgatgggcggtactcagcacatcggcccgggcagcgtggctgacttccagcagattattgatatgaaacgcgagctggtgagcgcgcgttaa

SEQ ID NO: 250605 - DNA, 390 bp, Klebsiella pneumoniae
atgcatatgcacggtctttcccagcaggccgccaaccttgggatccagtggcatgtgatggcgatgtacggcccgggatttttcaccggccggctgatccagcgcttcggcgcagtgcgaatggcggcggcgggattgctgatcaccgccgcgtcggtggcggtcggcctgagcggtctcggcgtgtatcattactggctgtcgctgattttgctcggcatcggctggaactttggcttcaccggcgcctcggcgaaaatcatcgatttccaccgcccggaagagaagacccaggttcagtcgctcaacgattttctggtctccctggtcccggttgcggtggcgttgttgaccctgctgctgcgccccttatccccatcccgcgcttag

SEQ ID NO: 250606 - DNA, 318 bp, Klebsiella pneumoniae
gtgatccccggcggccgggcgccggagtatctgcgcctgaacgaggaggttattaaactggtacaggcattcgacgccgcgcgtaaacctatcgccgccgtctgccacggcccgcagctgctggccgccgccggtattctgcagggacggacctgcagcgcctatcccgcctgcgctccggaagtgcgcctgagcggtgggcactatgcggatattggtatcgaccaggcgcatgtggacggtaacctggttaccgcccccgcctggcctgctcatccacagtggctggcgaaattcgccgccctgctggcggaataa

SEQ ID NO: 250607 - DNA, 702 bp, Klebsiella pneumoniae
atgccgacgctgatcgttcccttttttgcctccattatcagctgcctgattatggtctatatcatcggtacgcctatcggtatctttacggaagcgcttacgtctttcctgagaagcatgggcacgtcgtcgaatttggtgttaggcgcagttataggcgcattgtgtattgttgactttggcggcccgctaaataagacatgctttgctttcgtgctgaccctgcaggcgcaggggataaatgaacccattaccgcacttcagttagttaacaccgctacgcctatcggatttggcctggctttctttattgccaaactgctgcgtaaaaatatctataaccgtgaagaagtggaaaccttaaaatcagcggttccgatggggattgtgaatatcgttgagggttctattccgatcgtcatgaatgatattgtgcgcggtatcgcggcggcggctatcggcggcgcgtgcggcggggcggtcaccatggtctatggtgcggatgcgacggttccttttggcggagtattgatgatccccacgatgtcacatccgatggcaggcatcatggccctgctggtgaatatcgttgttaccgccacggtctatgccgtcatcaaaaaagatatccctcgcgacgtgattgttgataatgattacgaagaagaggatatcgacctggatgatattaaagtgagctaa

SEQ ID NO: 250608 - DNA, 225 bp, Klebsiella pneumoniae; identical to SEQ ID NO: 161443

SEQ ID NO: 250609 - DNA, 828 bp, Klebsiella pneumoniae
gtgggctgtagcaacaaatgtgccagcgctgagcacttccagcatgtcgccgatattgatcacgaacgcctcttctccggcggcgttcttgacgggaggtgcatcgatccacacgctttcttcattgagaacttcaaggccgggctggtcggcgagcagcagggtgaagcattcatagtcggtgtgtgcaccaattccgggaacatcttcgacgctggcgtcgaacgggtaatggatcagccgcagcttagccggcgggcaggtcaccatcggtttgaaatacccttccggcaggccgagcgcgagggcgaaagcgtcgaacagacggtggccgagggcgaaaaccgcgtcgtagtaggccagcacccgcgtgcggaaatccggcagatcgggccactcgttggcgccgatcagcggcgtaccggcgagcaccagcggatggtcatccgctgcctggaagccgatatcgaaagcctctttatggtccggcttgccggagccgtagatctcttctccttccggaacgtagcccttatggcttttggagtggccgatgtaatagttcatcttctcctccatcggcagggcgaagatctgcttcgccgcctcgcggacgccggcgatcagcgccgggtcgatgccgtggccggtgatgtagaaaaagcccacctcgcgcgccgcgcggccgatggcgtcggccaccgcctgacgcctggcgaggtcatcgccggccagatcgcggatatcgatggtcgggagttcagtaaaagcgtgcttcacggcggtcatggctgcggttcctgttcagtgagcgttaaaaactgctga

SEQ ID NO: 250610 - DNA, 564 bp, Klebsiella pneumoniae
atgatcattccgtcaaagttaatccgcgccgctctggtgtgtgtagccaaaaacgaccctcgttactacctgtgcgggatacatatcacaccgaaatacatagagagcactaacggtcgagtagcgctgcgcatggagcatggcatccggacaaagagggatatcatcgtccagtttgaagggaagatacctgctaaggctgagacaacagagcttatctttaataaagaaccactcgcgattcatcgtgaccagtatctaaatcgactggctattaccggcattaaattgatagatggtcgctttccagatttggggaaaattatccctaaaaaattcaacctaagcgccaatccagtcattcaggccgaataccctggatatccgacaaagatgttcagttgtgaaggtaactttattcctatgcaaatttggccctctggcgagtttgatgcagtgaaaataaagttcaacaaacaaatcgacaccgcctatggcaatcctcaattcatagtcatgccatgccgtgacgattactttaaggttaaggaacaggaatcatga

SEQ ID NO: 250611 - DNA, 474 bp, Klebsiella pneumoniae
atggtcgggctcgaccgcgccagccgctactcgctgctggaggcggccctgcatattggtcgctactttccggccgagcgggcggcgaaagccaaagcgatggccatcctggaggatatcggcatcgcccacttcgcccatatgcaggccacaaacctaagctatggcaaccagcgcaaagtggagatcgcccgcgcgctggccaccgcgccgaagctgctcctgctcgatgagccggccgccgggatgaacccgaaggagaccgaggatctggcggagctgatcttccgcatgcgccatgactatcagctaagcgtcctgttaatcgagcacgatatgcccttcgtcaaccgcctgtgcgagcgggtgatggttctggagtacggtaagccgttgttcagcggcctgatggccgaggcgatccagcatccggacgtcatttccgcttatctgggagaagccaattatgcttaa

SEQ ID NO: 250612 - DNA, 681 bp, Klebsiella pneumoniae
atgagcgctaaattttcaccgtcactgatgtgcatggatttaacgcagttcaaagagcagatcacggcaatgaataaaaaagcggatttttaccatgttgatataatggatggcaattacgtccgcaatatcacactgtctcccttttttattgagaatctgaaaaaaattactactgtgcccattgatgttcatctgatggtgaatcatccggaagatatcattcccatgtgtctcgaggccggcgccgatatcatcagctttcatcccgagacggcgaataacaaaatattccgcctgctgaatcagatcaaggatgcgggcaaaaagtgcggggtggtgctgaacccggcgacaccggcagaaagcattgccgaatatgcgcatctgctggataaagtgacggtcatgtcggttgaccctggctatgccggacaaaagtttattcctgagtcgctgaacaagattagaaagctcatcaacatgcgcaaaaataatggttatcgctatctgacggaaattgatggctcttgcaatgagaaaaccttcggtcagattgctgaatccggggtagatgtctttatcgtcggcacatcgggtctgttttcgctccatgaggatgtcagccaggcgtgggacagaatgatcgagatcttccagcgggaaactgtcgctgcataa

SEQ ID NO: 250613 - DNA, 534 bp, Klebsiella pneumoniae
gtgcaacatgagctgaaggcgagcgggcttgatgacgccagctgtcagcatattctcaccgcccagtgcgcgctgctcgatgaagccgtgaaagggcgcggcgtggaggatgaggcctgcctgcagtggtatgacattccgctgcaggggcacttcctcggcaccatggacgccggcgacaccctgtgcgagcggatgcgtgatgtgttgcgtgaaccggcgcccaacctggccgtggtcacctgttttcagcgggtgatgctgctgggttttattggcagctttcgctccctccacgaccccgagcgcctgaagctggtcaacgcgctcggtgagcgtgttcctccttttcagtgcccggctaccgctcccgtactggtagagagtcgcgccggtctggggataagcggctggctggccccatggccggtacgtattggcctgagcgtggtggtggtactcgccctgtggtggggactcaaccactggctcgatcacctgctgctgaccttgttaccggggaaggtgaaatga

SEQ ID NO: 250614 - DNA, 684 bp, Klebsiella pneumoniae
atgagtgaacagaaattaattgctgaatcccgcaccttcgagcagcaaatgattgaccgggataaacgcgccacaaaagccggttttgttgttggcggtgtgggtctgctgattgcggtactggcgctcatcgccgtggtcgtgatgttgccgctgaaacagacggacgttgagctctatgccgtggataaccacacaggacgggtggatcacgttacccgggcatcaaaaaccagcctgaccgcagaagaagcctatcaaaaggcgatggccgcgaactacgtgaaaatccgcgagcgctacgtctatccctccctccaggacgattacgagacggttcagatgtacaacagccccgaggtcaacaatgactatctggcgttgtatgccggtaaaaacgccccggataaggtttacaacaacagggctaatacggtgaagattgacatcctgtccagtcagatcaccgatggcacggctcccgataaggtcgccactattcggtacaaaaagaccatccgccgccttgttgataatcagacccgttacgagtactgggatgcgcgttttacgttccactctgacccgaataaagagatgagcgacgaagagcgcgaggttaactatttcggctttaccgtcacgagctggcagacagaccgtgaaatccggggaggtgaatga

SEQ ID NO: 250615 - DNA, 396 bp, Klebsiella pneumoniae
gtgaaacgcgcgcatctgatccgtgcggcgctggagtccatcacctatcagatagccgacgtggtggtggcgatgcgtcagcatgaggagttcaccctgacggcgttgatggtggacggcgggccgaccaacaatgactggctgatgcaataccaggccgatctgctcggctgcccggtgatgcgcagcgacgtgccggagctgtccgccatcggcgcggcgttgctggcacgcaaagcgctccatccgggatcgaccgccgatctgcaggccttcttaaccgaacatagcacctttcagcccgacatggcccgccaccagcgcttacaaacgcgctggcaggagtggcgccatgcggtcgaccgaacattatggaaaccggactcgccagcctga

SEQ ID NO: 250616 - DNA, 270 bp, Klebsiella pneumoniae
atggttaacctctttctgcgcgatttttgccgtcgtcggcaggcaggagacgcccgcaataccgatagccgggttataacgccccttcgagataaaccagataaaccagccgcccagcagagcgccgacggcggaaatggccagcgcgccgataccaaggatcaggatgatggcaactttcgggtcgagaatagtttgcgcttcacacagcgtgcccagcagcaggccgagaaacagcgttgcggtataggtcagcgtggattccagtaa

SEQ ID NO: 250617 - DNA, 210 bp, Klebsiella pneumoniae
atgacctccatcgcctttatcgccgggaccattccgctgatcctcggccacggcgcgggggcggaagtccgcggcgtcaccgggatcacggtgttctccgggatgctgggcgtgacgctcttcggtctgttcctgacgccggtgttttacgtgacgctacggaaactggtgacccgcaggaagccggtccaggaggatctgcccgcctag

SEQ ID NO: 250618 - DNA, 480 bp, Klebsiella pneumoniae
atgttagattaccgcttcccgacagctttgcagatggttctcagcgtagcaatggcggagcagatgggtgaacgttcgacgagtgcgattctggcctacggcctggaagcgaacccgagctttatccgtaaactaatggttccgctaactcgtgacggcattatcgtctccacgcttggccgcaacggctcaattcatcttggccctccggcggacaagatcaccctgcgtgatatctatctttcggttatcgaagataaaaaactgtgggcgtcgcgtcctgacgtcccggcccgctgcgtggtcagcgccaacgcctgctggtacttcaaatcggttgccgacgaagcagagcaggcttcgttaaacgtcctcgctcgccataccgtggccagcgcgctggaggcggtcaaaaacgccgataccagcggctgcgacccggtgccggaaatgatcgcccgctttaaaaaagcgcattaa

SEQ ID NO: 250619 - DNA, 375 bp, Klebsiella pneumoniae
atggcgcttaatggccataaagctgtgcatcagctctttcatcgggccgttctccgggttggcgtcggtatcaattgggccgggctggacgacgttgaccgtgatgccgcgcgggccaaaatcccgcgccaggccgcgcgccagcccctgcagggccgatttgctgaccgcataggccgccattcccggcactggcatgcgatcgccattgaccgagccgatgacaataatgcgcccgccttccggcatgcggcgcgccgcttcgacggaggcatggtagggggcgtgaatattgatgcggaacaggcgatcgatggcatcgctgtcctgctcgagagcgtcaccgaaaagcgcgatcccggcattgaccactaa

SEQ ID NO: 250620 - DNA, 639 bp, Klebsiella pneumoniae
ttggcgaccttcagccaggggattgtcgtcggcgcgtttatcaacggctttgcggtggctgaccgccgcttcgccggttcgacgctggactggcttacccctttcaatctgttctgcggtctggggctggtggtggcctatctgctgctgggcaccacgtggttgattatgaaaagcgaaggcgcgctgcagcagcggatgcgcgagctgacccgcaaggtactgctggcgctgatggcggtgatcgcggtggtcagcgtctggacgccgttgggctggcgctacgtggcggaacgctggtttacgctgcccaatttcttctggttcgtgccggtgccgattctggtgttggctctgagcctgtggatctggcgcctgagcgcgcgccccgccagccatgcccgcccatttatcctgacgctgggcctgattttcctcggcttcagcgggctggggatcagcgtctggccgaacattatcccaccgcatatctctctgtgggatgccgctgcgccgccgtccagccaggtatttatgctgccgggcgcgctgctcattatcccggtgatcctgatgtataccgcctggagctactacgtctttcgcggcaaagtctccggcagcgagggctatcactga

SEQ ID NO: 250621 - DNA, 627 bp, Klebsiella pneumoniae
gtggttacacgggttgaagcactgggcgcccgggcgatcgcgttgcctttcagcgccggcgaaatcgacacctttgacgcatttgttagcgcttttcagggcgcgctgacggagctgggcgccgataaatttgattatctggtcaataatgccggcaacgccagcggcatgggatttcttaacgccacggaagcggaattcgatgcgctgtatcgcatccacgtgaagagcgtttttttcctcagccaaaaactattgccgctgctggccgatggcgggcgaatagtgaatgtttcgtctggccacacccgcatcgtgatggcgaaccgggcaccctatgcgatcatgaaatccgcggtggaaaccctgactcgctatatggcgtttgagctgggcagtcgcgggatcacggtgaactgcgtggcgcccggcgccatcgccaccgatttcagcggcggggtggtgcgggataacccgcaggtcgctcaggcggtggcgaatatgacggcgctgggccgacctggcctgccagaggatatcgggccgatgatcgcctcgctgttatccgatgatcatcgctgggtgaatgcccagcgaattgaagtgtccggtggaatgcgcatctga

SEQ ID NO: 250622 - DNA, 222 bp, Klebsiella pneumoniae
atgctcaggggcaggcaacgcggcatcctgaatcttcatcagctctttaacctgacggtcacgcagtgctttctgggtaactgcgggaaggctgtcgatgtgatattcaaacgccttgcttccctgacgcttacgcaacagaacctggttgtctttgaccagtttgcccatcatggctctgatgccctgtggcgttcccggcaaacctggcaggcccactaa

SEQ ID NO: 250623 - DNA, 186 bp, Klebsiella pneumoniae
atgagctttaaacatgaacttggtcaggtggtaaccgttactatcagtgaagaaaaagggcatatcaaagctcgcgctgaatatacgcatggccccaatcagtaccttattcattatcgtgcagcagacgggcgagctgtagacgcatggtttgaagaagtggagttgtctccatctgcacagtag

SEQ ID NO: 250624 - DNA, 279 bp, Klebsiella pneumoniae
atgcttttatctcttggaatgaataaaaacgacgtcatgcagatcatggggtcgccacgcaggactgatgtgaaccaggaacgcgaacgctggatatactggaataaggctctctatggttacacaatcattgataacgaacaattggctaacgatcgactggttataacgttcgttaatggtaaggtcaccaagtggggtcagcaaacgctgactgatgacataatggagtcatcacaaaagagtgcacaggcttatgctgaggcattcaagaaatag

SEQ ID NO: 250625 - DNA, 714 bp, Klebsiella pneumoniae
atgcggaatgctgatgaagtcgctgccgttgtcggcggcattgaccgcggcctggcaggcttcgaggatatccgggcggaatttggccagctcggaaaggtattttttggcgcggaacataaacatgccgctgttccagtagtactccccggaggcgaggtaggcctcggcgcgctcgcggtccggcttctccacgaaacgggccacctggtacggggtgtgggcgctgtcggtgagggccacgccgcgctggatgtagccgtagccggtttccggggcgttcggcacgataccgaaggtgaccagatggccttcatcggcatactgctcggcgacgcggatggcgtcgtggaagaccggctggttattgatgatatggtcggcggcgaggaccagcatcagcgggtcatcgccgtgacgggtggcctgaagggccgccagggcgatggccggggcggtgttgcgcccgaccggctcaagaataatgttgttcgacagcttgttgagctggcgcagctgttcggccaccaggaagcggtgctcttcgttacagatgaccatcggttcatggatttcaaggcccgagagtcgggtgatggtttcctgcagcatggagttctgcccgaacaggcggaggaactgtttcgggtaaagctcgcgagacatcggccagagacgactgccggtaccaccagccataattacaggaagtaa

SEQ ID NO: 250626 - DNA, 333 bp, Klebsiella pneumoniae
atgaaaagcattcaagatcaggttttagacttgtttaaagatgagatctcaacccgtttagataaaaattggaaagaaatcccattggaacttgattatgacttatttgatgctcccggcgacgatctgcatgacgctttaaataaatttgaacaaaaatttaatgttgatctttccagtgttaaatggtcgtgttatttcccttgggagaatactccaatgctaactcggtggtttaaagtaaaacgagaagatgtagaaaaaacgcgtaaacctttaactatcaaaatgtttgccgaatcagcaaaagcaggtaaatggctttacgactag

SEQ ID NO: 250627 - DNA, 519 bp, Klebsiella pneumoniae
atggcggtagtccacgaatccgcgacggtctttcgcattacggcggttggaagcataggttttggtgaacacaagctggcccacggcatagaaccccgccgccttccatgcggccataaagcggtccacacggttccagccgtagaaactgaccatcagggcgtcttttttaaggacgcggtacatctccagcgtggccggttgcagccattcgtccgtcacatccccggcaatctgtctgccctggcggtccttaaaaccgacgaggtaaggcggatcggtcacaataaggtccacggcacggtcggggaatccgcgcatcacatcaatacagttcccgagaatgaatctggacatggcagcactcctgtagtcagaggggacaggaggtatcaccgcgataccgttccctgccgcacgctgcctgttcatcgcgtccggtcacgggtcaggccgaccgtggaataccgcagccgtccgtcttttggacggcaaggatatgccgcgaaagcggcttga

SEQ ID NO: 250628 - DNA, 297 bp, Klebsiella pneumoniae; identical to SEQ ID NO: 216086

SEQ ID NO: 250629 - DNA, 249 bp, Klebsiella pneumoniae
atggcccgcgagctgggcgggcgcggcatcaccgtcaataccatcgcccccggcgctatcgccaccgattttggcggtgggctggtgcgggacgatgcagaggtaaacgcgcagtttgccgccatgacggcgctgggacgggtgggcgttcccgaggatattgggccgatgatcgccagcctgctacgcgacgataaccgctgggtgaccgcccagcggatcgaggtgtcgggcggacaaaccatctga

SEQ ID NO: 250630 - DNA, 486 bp, Klebsiella pneumoniae
gtgagcgtggccgatctgacccaggctttcggcatcaatcccccgagcttttatgccgctttcggcagcaagctcgggctgtatacccgcgtcctgcagcgctacagccagaccggggccattcccatcgatgccctgctgcgagacgaccagccggtggcggcgtcgctcatcgccgtactgcaggaggcggctcgccgctatgtggccgatccggccgccgccggctgcctggtgctggagggggtacattgtcaggatgctgatgcccgggtggcggcaggcgaatggcatgctgcggcaagagccaaaatccagcagtatatcgcccgccatcgcccgcaggacgcgctgcgggtgactgactatatggatacgctgatgcttggcctgtcggcgaaagcgcgggaaggggatagtctgccgcgtcttctggagaccgtgcggctggcaggcctggcgctggagcgcatcctgccagcctga

SEQ ID NO: 250631 - DNA, 690 bp, Klebsiella pneumoniae
  misc_feature (519)..(519): n is a, c, g, or t
  misc_feature (523)..(523): n is a, c, g, or t
atgcatggtcttaacacccttgagcatcagccggcgaagatcgcggccatcgaagggcactgggaaaatcgccccggcgaggccacgccgctgctgctgtttggcctgccggacatggagcaggagcggacccgctatggtctggagatccccgctctcggtagcctgatccttacccacagcctgcataagcaggtgccggccctgaaagatttcccgaaagaggaccgaccctattcgcccgccgtcttctggtcgtttcgcatcatggtcgggatgggcgtgttgatgatcgccttagggatctgcagcgcctggctgcgctatcggcggcggctgtaccactcgcgtcccttccagtggtttgcgctctgtatggggcccgccggtcttattgccctggtcgccgggtgggtgaccaccgagatgggccgccagccgtgggtgatatacgggttgttgcgcacgcgggatgcggtgtcgttgcacagcaccctgcagatggccatcagcctgctngtanttatcgtggtttactgcgccgtgtttggcgtggggtattactacattttccggcttatcaaaaaagggccgcagccggtgacggagctgacctcgcaaaccgcaggcaccccggcgcgtccgctctcagcggctgagccggtgcgtgatgaggagaacgcatcatga

SEQ ID NO: 250632 - DNA, 576 bp, Klebsiella pneumoniae
gtgctggcgctgctgctctccttcttcgccgcccgcaacatcatgcgcggcgtggtgctggggaccctcgccctgctgatgcgccgcctgtttgatgtgctgcgcgggatcgacatggctatctgggggttgatttttgtacgcgcggtaggcctcgggccgctggccggggtgctggcgatcatcatgcaggacaccggtctgctgggacggctgtacgcggaaggacacgaagccgtggaccgatctcccgggcgcgggctgaccgccgtgggcgcgaatggcctgcaaaagcatcgctttggcatttttacccagtcgttcccgaccttcctcgcgcttagcctgtatcagattgaatccaacacccgctccgcggcggtgctgggcttcgtcggcgccggcggtatcgggcttatctatgccgagaatatgcgtctgtggaactgggatgtggtgatgtttatcaccctgctgctggtggcggtggtaatgatcatggacaccctctccgcctggctgcgccgtcgttatatcggcggcgccgcggtgccgctgtatcagagcggacgctag

SEQ ID NO: 250633 - DNA, 369 bp, Klebsiella pneumoniae
atgaagatttttaacattacaccaatgggtaagccgaggatgacccgggcagacaaatggaaacagcgggaagtggtcatgcgctaccgggcattctgcgatgaggtccgtctgatgaacgttgctatgccggagcagggcggacacataaccttcgtggttcccatgccaaagagctggagccagaagaagcgagtaacgatgaacggacaggcacaccagcagaaaccagacgccgataacatgatcaaagcgctgatggatgctctgtttactgatgacgcatatatctgggactttcgtgtaacaaaagtatggggtgaatcaggacaaattttaatttctgatatcggagaggtgtccacatga

SEQ ID NO: 250634 - DNA, 579 bp, Klebsiella pneumoniae
atgtttgacgaagtcaccgccagcaacctgatcgtagtggatatgcagggcaaggtcgtagcgggcgacgcgccggctaactcggcgggctttaccatccatagcgcggtgcatatggcccgggaagacgcccactgcgtgatccacacccatacgctgccgggaatggcggtggccgcctgcgaggacggcctgctgcagctcaaccagatcagcaccgaattttaccagcgcgtcggctaccatccctatgaaggggtggcctttgacctcgacgaacgggcgcgcatccagcgctcgctggggaataatatcgccatgatcctgcagagccacggcctgctgtcggtgggccgcaccgtggttgacgcgttttacatcatgtactacctgaaccgcgcctgcgagatccaaatggccaccgcccagctggcggccctcagcccgatccacaccatcgctccgcacctcagccagcacgcctgcgagcagctgatgggcgtggagcatgaacgtcaacaggtctggcaggcgtggctgcgccgtcttgaccgtctcgatacctcttacaaagactaa

SEQ ID NO: 250635 - DNA, 483 bp, Klebsiella pneumoniae
atgacagcgattaaccgcctttatgcgtcctccgggtctgaggtcatcattggtacattgcagatcgatattggcggccagacgcattatttgtgtgagggttatgaggacattacggcggttaccgaggggggcgaaaccgtaacgtttattgcctgtgccattgtcctatcccttcctgccagaaacgaagacgggacgcaggacctgaagtttatgctgtgcaacatcgacggcgttgtatccacggctattcgcaaggtcattgatgccatgtccactgccagcatcacattcaggaaatacatttccactgaccttaccgcgccagcggagccgccttacgtcatgccggttaaaggaggctcctggacaccgctgactgtaaacgtcactgctggttttaaaaatatgctcgattatgcctggccacgtgacaggtacacgttgacgtacttccagggtcttcgttacacacgatag

SEQ ID NO: 250636 - DNA, 372 bp, Klebsiella pneumoniae
atggcaagtgtttccgggacgccaggtgaccaaactgttgttagcgattttggcaagcacagtggtgatattgagtcaatgtcacgaaattctggtattaaagagaacgtaagaaatcaagtggattctatggtggaagataacaccaggataaataatgctggtaaaatcaatatcaaagagcaaggtgaagggattaaacaacagaatgcagattttgagatgttacataaaaaagaaggaaatgactttaatgagcgatataataaggaattgaatggtcaagtgaacaatccactaagcaacacgactgaggagttcaggaagaaggctgaagaatctgcaaggaaaatggatggtaaattaccataa

SEQ ID NO: 250637 - DNA, 240 bp, Klebsiella pneumoniae
atgcgaaagccaataaatatatttattatattgatatcggtgctgatactcaccggatgtgataacaaatcagataacatgttatccggttattcacatggagaatttgtatacctttcatattctggtaatgaaaaaatagaacggatcttgatcaataaaggagataacgtcgccgcaggacaggagttagtgaagattgagtccttcgatgggctggtgatgctgccaacttactga

SEQ ID NO: 250638 - DNA, 279 bp, Klebsiella pneumoniae
atgatggtccagaccaaagcgccgataccagggcgctcccttctgcccatcgtgcacgagacggccggcctcattgcgcagggcatggagggccgtcagttgatagtcagaaacggaggggtgggccaccaggtcgcgggcttttcccgcgactgtagcaatctgactgtaattgagggcaaaggagagcagcagtcccgccgcccacaggccgaggatggccagcagaccgcacgccaggccccgctcccacgccattcccacgtgatgcccgcgtaa

SEQ ID NO: 250639 - DNA, 516 bp, Klebsiella pneumoniae
atgggaatggtagccgctctgcctttattatgcgggatggtgattgaagtttttgctggctgggcctcggatcgtctggtacataagaaagtactgtctctaacagcgacccgtaaactgtttttgactatcggcttgcttatggcactttgtatcggctttgcaccatttaccgactctgtgtttatgaccgtctttctcttgtgtgtcgcaaaatcaggcacgacggtcgccgcatcgcaggtttgggccttaccgggtgatgttgcacccaaaaatagcgtctcaattgtcgctgggctgcaaaatacggtttcgaatatgggaggcgcagtcggtccgatcattacgggtgcgatcgttgctgcgacaggctcattcaactgggcactgattttctcggccattcttgttgttatcgggataatcaactacctgttcctgatgggtaaaattgaacctatcaatgacaaaggtggaaaatcacccgtccttaatgccgcagaacaacattaa

SEQ ID NO: 250640 - DNA, 483 bp, Klebsiella pneumoniae
  misc_feature (239)..(239): n is a, c, g, or t
atggctattccaggtaatatgtggatatacgacgacggtggggcactaatcaaaggtggttgtgatgttgcagacagggagttcagcatcgaatttaaagggtttcatcacaatctctccattcccactgataatgccactggcaagcctaccggcactcgtcagcactcaccaatgatcatcgttaaagaattcgactattccagtccatacctctacaaagcagtagctactggtcngaacctgaaatctgctgaaatcaaatggtataaaatcagcgatgctggtcaagaagtggaatacttcaatatgctacttgaaggcgtccgaatcgtatcaatatctcctacaatggcttccccagaagacaagaacaacaaccatcttgaatctgtcgaacttagatatgagaagatcacctggaaacattgtgacggaaatataattttcaccgatgcctggaatgaaagacaaacagcataa

SEQ ID NO: 250641 - DNA, 294 bp, Klebsiella pneumoniae
atgaccttgaccgacgccagcgtcgggaaggtgacggtgcagattggccctaccctgcgcggcacccagctgcgcgacggctacagcggcgccagctatcaggactttaatgaccaggtgctgttcggcgagtacagcaagaatatcaacagtcaggcggtcaaaatgattcagacagccaacgtcaaaaccggcgacagcgtggaggtgtacggcgtcttctcggcctgggatattccacaaactctcccggaaattaccccggcgaaaatcattcatgcagggggacaataa

SEQ ID NO: 250642 - DNA, 552 bp, Klebsiella pneumoniae
gtggcggtcgccatcgccacggttttcgcgtttcttgccgccaataacgcctggtccccggcgccggtgcgctttgccattcgcgtgctggtggcgtttttgcgcaccatgcccgagctggcgtgggcggtgatctttgtgatggcgttcggcatcggcgcgatcccgggctttctggcgctgatgctgcataccgtcggcagcctgaccaaactgttctacgaggcggtggaaagcgcgcaaaacaaaccggtacgcggcctggcggcctgcggcgcgtccccgctgcagaaaattcgcttcgccctctggccgcaggtgaaaccgctgtttctctcctatggctttatgcggcttgaaatcaacttccgctcgtcgaccattctcgggctggtgggcgcgggcggcatcggccaggagctgatgaccaacatcaagctcgaccgctacgatcaggtgagcatcaccctgctgctgatcattctggtggtgtcggcgctggacatgctgtccggtcgtctgcgcctgtgggttctggaggggaagaaatga

SEQ ID NO: 250643 - DNA, 372 bp, Klebsiella pneumoniae
atgttcgcccagatttatcccatcgtcgcggcctttgcccgcgagaagggcattgcgttacgcattgaccgccaggtggcggcgcagagtgggctcgaccagcaggcggcgcgcagcagcgccggcttcagcagcgagttttacggcgaagcggtctctgaggaactgtttctgcagacgctggatgcctccatcgcccgcggggagcgctccctggaggtgatgtgtcatccggcttatgtcgatcggatcattatgggcagcgcctactgctatccgcgactggatgagcttgatgtgctgacatctgcctcgctgaaagcggcggtggccgagcggggttatcgtctgggaacctaccgcgacgtgtaa

SEQ ID NO: 250644 - DNA, 258 bp, Klebsiella pneumoniae
atgaataaagtcattcgcaaaggcgataccctgcgggagtatgggggcagggtgctgatggggcattatcagtgttttggtctggggttcgcctgcaagggcgacctggtcaagtgtaacaaacacggtatgacgaccattgctgaaggcagcgcacgaaccacgattgatggccagccggttgcgctgcacggtcatcgctgcgcctgcggctgcacgctggtcagctctaacccagactgcggggttgatcagtga

SEQ ID NO: 250645 - DNA, 243 bp, Klebsiella pneumoniae
atgacaagacaatacgttaaaaaaatcacctatccatgcctgacagcggcaattttccaggatgtccttttcgtcatgagtcctgccagcgcatcagaattgctttcagaggcggataaggcgactgagttctatttgaatcatttcccgttcgcgacgctggatgacatccgagaaggcattctgtacagctttggcggtctctacctgaacgatttccaacttatccgggaggcagcatga

SEQ ID NO: 250646 - DNA, 396 bp, Klebsiella pneumoniae
ttgaataccgactggctgaagctggcattgctccgggtatttcagtccggctggacggtggtgattctggttggattgtcactgctgttctgcagcttcactggccgtcaggcgtttattgtctggtggctgactttcgccggggtgctgttaattggggcgagcgtatggctcggcaatctgccttaccgtctgctgcatccgggtaattctactcgccagtggtcaggtgtgttgtcctggataatctggggagctggtttcctgttgctggccgtcgctcccgcgaatgcaaaagacccgtggaccctgctctttaatccgctggctggactgactgccttccttctctggttatgggtttcacataaggagccccttaaatggatccgataa

SEQ ID NO: 250647 - DNA, 243 bp, Klebsiella pneumoniae
gtggcccagcgcgccggtgttgagctcgatgcccggcgttttttgccgcaccgggtggccggggagatgggaattggcatgctggtaggtctccagccacacgtccgcgaagaagccggcttccgccaggacgcagtagtagcagcccacggcgtggcctttcgactggatgtagatatcgcgctgcgggtcgtcgagccggtccggcgcgacgttaaggacgcggaaatagagcgcggttaa

SEQ ID NO: 250648 - DNA, 282 bp, Klebsiella pneumoniae
gtggccactgcttccgcccgcatcggcaccatcctggtggtggcgccccggcaggtgaactatcgctttcagtacgccaacggctctctgaccaacaccgggaatgcgacgctgcggatcctcgcctacggcccctgcctgaaggccgccgatggtaaggaatgtaaagagaattactacctgatgccgggtaaatcgcgccgttttacgcgcgtggacacggcggataaaaaaggacgggtggcgctttggcagggtgagcagtttgttcccgtgaaatag

SEQ ID NO: 250649 - DNA, 216 bp, Klebsiella pneumoniae
gtggagcgcgtaacgcagcagacgttcagcaaagccgtccacaccctgcccgccctgctggagcagctgcggacaaacccggatgacgccatgctgcgctatcgcgccgccttcgcccggggggatggcgtgtggtggccgatgggcgacacctggaatgcccgccaccagctgccgacccaggacattgccggctggctgcagaccgcgcgctga

SEQ ID NO: 250650 - DNA, 360 bp, Klebsiella pneumoniae
gtggactactgccatgaaggggcttatgtccttgccaaaggccgccccgtgccgccccttaaaccgctgccggatgtgctgcccttcccgtataccggtaataccctgcatccgacgcagaaaccagtggaggcgctacagccgctgattgagtcattcagcgctccgggcgcgattgttctcgacccgtttgccggaagcggttcgacctgcgtcgctgcataccgtgccggacgccgctatatcggcatcgaaatgctggcgcagtaccaccgggccggaaccgaacgactggccgccatgcaccgggccgtaaataccccggcggcgaacgatgaatggcttccggaggccgcgtaa

SEQ ID NO: 250651 - DNA, 279 bp, Klebsiella pneumoniae
atgaatcgtcggcgtctggaagccatcctcgacgtgaagcaccgcgcaacagagcgctttgcacagggccatctggtgcgcggtgtgcagattgaagtcaccctcgacagtcacggctttgccggacgaggcgatatatgcctgtttggcgagatgcttagccgcttcttcgcgctctacaccgacatctacttgttcaaccgcctgattatcattctgcaaccaaccggagaacgactggaatgggaagagaagcacagccgccgcattcccggctga

SEQ ID NO: 250652 - DNA, 300 bp, Klebsiella pneumoniae
ttgcagcagcaggatctgtggcttgacgtcctgcccgcccgggtcgctctgccacgtcgctattgcctgcgctacctgaaggtggaggtcaaagcgctgtcgcgcaagtttcgtctgcagttcgatgagatcgctctggaaaccgtcacctctgccggcagcccgcacccggcggtcatcgccgatccgcagttgaaagccattgatgacgttgccgttcgtaccctgaaaaactgcatgcaggaggtgtttgaagatgggccggggcatcgggcgggctgccgacgctgcggcagctga

SEQ ID NO: 250653 - DNA, 180 bp, Klebsiella pneumoniae
atggtggccgacggcggccaggtgtatctcagcggtgtgccgcaggagggaaccctggcggtgagttggaacgtcaacaatcagtcgcagagctgcatgctgcattttcatcttccggataacccacagcagagtctgaatacggtgaaaaccgtctccggactgtgccagacacgctga

SEQ ID NO: 250654 - DNA, 249 bp, Klebsiella pneumoniae
atggtcaatgacgatgtgctggcggcgctggagagcggccagctcgccggggcggtgctcgacgtcttcccgcaggagccattgccggcggacgatccgctgtggcgccatccgcaggtggtcatcaccccacatatggcctctgcggcctctgccgaggtgatcgcccgccagctgctggagaacattcagcgccagcgccgcgggctgccgctgaaaaacctggtcaataagcacgccggttactga

SEQ ID NO: 250655 - DNA, 324 bp, Klebsiella pneumoniae
gtgctggcggaagttggcaccgccgggcagcgtcaggcgctgatgcgccgcctgcagcagcagccgcccgccattgcaatgaacaccccgtacctgcgtcatcatcacattgttgccctgctacagtccggcctgcgcgaggaggcggtggcggagatcaaagcctactggggggcgatggtcgcctacggcgccgacaccttctgggaaattttcgacccccaacatcctgacttttccccgtatggcagtaagcttatcaacagttactgccatgcgtggagctgtaccccggcctggtttattcgccagtacggactttaa

SEQ ID NO: 250656 - DNA, 276 bp, Klebsiella pneumoniae
gtgacggagtctcaccccctgtttaacgatattccgggcgaatggccgtggctgctgggctataacgaagttgaaatgcacccggaaggcaaactgctggcgaccgtggccggtaccggtcatccgctgttggctgttcgcgaatatcagcagggacgctcgctggtgtggaccagcgacatgtcggcgcactggctgccggaagagtttgccaaatggcccggctatcgccagctgtggattaactgcctcgactggctgacggaacgccgctga

SEQ ID NO: 250657 - DNA, 210 bp, Klebsiella pneumoniae
gtgctggtggtcggcagcggcgagtggctgcgcttcctcgatcagccgctgcagttcttcggtcacgatctcggcgcgtacccgggcctgcgaatggtggtcttctccctgctgttgctgattatcatgctcttcgcccgcgaggggctgctggggaaaaaagagatttggcagatgggaagaaggaacagcagctatggcggaaaataa

SEQ ID NO: 250658 - DNA, 186 bp, Klebsiella pneumoniae
gtgcccctcacgccattgcgtcatgtgccggcggcgatcccgctgcgtctggaaaatcagtatttcagcctcgatgtgtcccaccctctggcaacggaaatgctgcagagcggcacctgtatgttttacgtcccggggatgctcggtgagcctgaacttgaactttttgcggtactacgaacgtga

SEQ ID NO: 250659 - DNA, 564 bp, Klebsiella pneumoniae; identical to SEQ ID NO: 234839

SEQ ID NO: 250660 - DNA, 276 bp, Klebsiella pneumoniae
atgaataattcaatcatagtaccagaagataaagattttgtatgtgcatttgtgacttcaccagatagcttgtatgaggctattgaatcatatcataattacgtacattcggtcgaagagatagagtttgagcacgtccttctttatttattgtgttctatactggttgagggtggagcagatattaccattaatgaagagttaagaatgtgtattgagcacattgtcaatgaaaagaatagtatcaaaaataataatgccgataaaaagatgtaa

SEQ ID NO: 250661 - DNA, 207 bp, Klebsiella pneumoniae
atgaataataaaaatatacgcctgctccgacttcctgaagttatgaataaaaccggctatggcaaagcatggatttatcgtctgatcaacgaaggtttatttccacaaccagtaaagattggcgttcgtgcaattgcttttatcgaaagtgaaatcgacgaatggatagtgtctgctattgagcgttcacgtaaaaatgcagcctga

SEQ ID NO: 250662 - DNA, 252 bp, Klebsiella pneumoniae
atgcttgatattcttgtctgggcacaggaacaggacgttcgtgtctcagaacgctggctgtcgcggttgctttactcgattgatgacgaagaggtacgctatgacaatcagataaaagatacagatcggcctctggcaatgaaagcgatgacaatcgatttcattagacaatttcatctttttataaataaaaacagtcatctaaaggatatgaaagtatctgatgtcattacactggctgaacgtgactaa

SEQ ID NO: 250663 - DNA, 993 bp, Klebsiella pneumoniae
atggacctattaaagtacttatcagaaaagggattaaccgaaagggctctcgacttcatcatatcacaattattcttcaatgcagagtcgcctgataacctaaaatatgctttaaaagctggctatgatattaatactgttgatagtagcggcaataatgctatttttggctgcaggacactggaagcactggattttctgctcagaaatgatatcaatatacataatatcaacaaggagggacaaaatgcgctttttcatcaaaaaaaacccgaaatactaaagaagctgattgaattaggtttagacacctcacatacagatgctaaaggctatacctgcatttttgaacattacagggatcctgaagggctgacagaattaatcaatgcaggttgtgacataaatcacgtcgataacagggggagaaatattctattcctccctctatccccggaagttttatccatagcaataaatgccggatgcaatgtcaaccttattaatcatgcaggaacagggtttgttgaagaggaatatgataatgagctacacaagatcattctcttccatattgataaatttgaaagaagaacgttgcatgtcgatttttgcaacatcaattcagtattatttttgtatgacctatctgagcatggattcaaaatagatctcaataaagaccgtttcgtcattaacagttgcattagcgattacatagatattttaagaactcttaattgcatcagtgacattcaggatgttaatttctataagtataacggtgaccctctttacaaagatatcgataagctaattgtaaagtggatgataagaaatggattcctcattgatctaaccaaaatttctgatgataaaaatcatgatgatatattaaaatacaaaaccagttatgagcagaaacaaatatccagacatctaaatgccattaaaagtcagtcatcaaaaatcaaaagtggtgggcgactgtga

SEQ ID NO: 250664 - DNA, 276 bp, Klebsiella pneumoniae
atgttcgaaatatttattgctttaatacctgtagtaggcggcattttaaactctttgataacacctatcctgggaggaagaaaggacgaatctgacattattgacaaactcgctctgcaacttgaaaaagaaaaactatttcatttgtacttgaaagctatattccagtgttgtttcgctgtcgtccaattccaccaggagtacttaaaaaactgctttatctggaaaattcatttgaaatccttcagctcagcgccccctgccgaaagttattag

SEQ ID NO: 250665 - DNA, 153 bp, Klebsiella pneumoniae
atgcaagtgtggaacaatcaggaaaataaatataataaaactaaacgaagtcacagtgaccgtacgcttctttccgtttctgtcatactttttacgtgtattagctcagaattgactaaacgcagctacagcaaagagccaagccttatttaa

SEQ ID NO: 250666 - DNA, 1830 bp, Klebsiella pneumoniae
atgagcaggcattttactgaagaggaagcggtactccgtataggcgaagtctgcgaggtttctggacgtgctgtgaccattttggtagataaaaacaaaaatctcagtgatttattttatcatgggaaaattctaagaaatgtatcagtgggtagcttcattgaaataaaaaaaggtttcatgagcctgatcggcaaggttgaagcggaacgagtcattgaggaaaaacatctcggtgggagcggcagtgatgcttggcgatatcgacgatacttgacctcgactctgacgggttacattgatcgtactggctgcttcattggtggttcgcgtgaactacctctcatcggtaatgaagctttcgtagttactgaagagatgatacatacggtgcatcagatagctgatgcagacgaaactgtgatgaagtttactcgtacagatcttgaagatattgaaattgcattaccaatcaatggtcttattaattcccatattgcaattttcggtaatactggcagcggaaagtcaaacaccctagccgcgctatacaaagcaggtactgcccaagttaaaaatattctcggcaaccattttaatgaaaaatgtaaatttattctattcgactttaatggagaatataccgccccacactgtattactaacgagaagacggtttataatctcaacacgcatcatgcaggtggtgacaaacttcctctacccagagaggttctgcttgagcatgatatgctctccgttctaaccgatgccaccgacaaaacacagaaaccttttctgaagcgagtgcttgaatttcgcaagaaggtgatgaccgctgacaatcctcttgagtttatgcgtaatatcctgaagaaaagaattaggcagaatctctttagtggagataagcccaaatgcgatgctataaatcaattgttcagtccaatttttgacgatgacccagagcttatatctgatcttgagtatcattcaactgcatataaatggaagttgaggggtggtatcattttcaatgctgaggctgatactgaacgctcctatttattcagtctcgcaagcaactttttatttaaaacagatatgattcaagatctgttggattttatgtacttacagttaattcaggaatatgtttctaacaagtctaaccctgagcatatttcaccagttataaatagaatgagtgctaaccgtaaagatatatcgaaaatttttgatacatcaggacagtttaatttttgggggagatataatttcacggtcttgaatcttaatatggttaatataaccatgaaaaaaacgcttcctcttttgatagccaagtgggcttacaatatgaagaaaatgtctaccgagtcatctacactgcacatcattatagatgaagcccataatattttgtctaatacttcttttcgagaaacagagagttggaaagattatcgactggaaacctttgaggaaatcataaaggaggggaggaaatttggagttttcatcacaatttccagccaacgccctaatgatatatcgtcgacaatcatatcccaagcacacaattattttattcatcgccttattaatcagaatgatctctacgcaattgaaaaatcggtatcatatatagaccggctgactgaagagtcgattcccacgctatctacaggaacgtgtatttttagtggtgttgtctgccccatgccgctcaaattaagagtggctgaacttccaactgaagaaaaacctaagagtaatactatttccttcaatgatttagtacctgagaggcagggagacgatgactag

SEQ ID NO: 250667 - DNA, 1044 bp, Klebsiella pneumoniae
atggcagttaagcgcgcatactacggtaacgatagtgaccgagactactttgagcgagtatttcagtcagctaacattaacttcctcatcggttctggtgcatccctccctgccattaacgtactggggacaatcgaaacggaccttcagcagcttattaatgatgagcaggaagaagaatacttcagggtgggcactgactttttgacagctgtttggcttcctcatgaatgcatgctgcagcgcggccacggagcccccttcgcacctcaggtgatcaccaatttagaatgtacacgtaagaattatgatgcattcatgtcttcactggaaaagatactgactcgacgtcggactggcctacttcctaggcgtattaacgtttttacgactaattatgatttgtttattgaagaagctgctactcgtaataataacattctttttaatgatggttttaatagaagatcaaatatctggggagatggtgagtttgacgcgggcagctttaaccattcggtaagtgcaactggaaatctgtataattataaagtagaacttcctactgttaaccttataaaactccatggttctctttcttgggaacattctaaagggaaaattttttatcgtattgcagatattaagcctcttaactttctcaccccagccgaaatgaaaaaatgggtacttgctcacacacttattcttccacgcaaggagaaatttaaagagactctactacagaacgtttattatgatttactgagaacctattccaacgagcttgataaagaagcaaccctactaattgtctttgggttctcgtttgctgatgagcatcttgaaacaataactaaaaaagccttgcgcaacgctacactgaaactgctgatctttgcttacgatgaggccagtgttagcggatttatggagagattccgagattactcaaacgtagagattatttatcgcccaggaggaaatgttgatttctcggtaatgaataagattatcacgtgctatctaggtggatcgagatga

SEQ ID NO: 250668 - DNA, 537 bp, Klebsiella pneumoniae
atgaaattcaagcatggtcgctacagacctaatcaatatctcatttgtgatccgtatggtttttatcatgtgagaattgcaatacctgactacatgcaatcgctgtttagtggaagaaaaacgctagttcgaactctatcaaccagtgaactaaaaatagccagaatgaagcgtgatcagatagcggatgagtttcaccgtttgcgagatgccatccttccagacaggccagatagtgtggcagacgtgatcgagttatttcgaagcaaggcaaagtacgcgaagacagcaacgaaagcgcaagttattaataaatgtcctgctttacgtgggatgttggatatttaccttctacaaaatagcaacaaaaagaaagtaacaacgttatctaaaactaaaaaagcggtagaggtatttctcgatcatcttcgtaaacgtgatattgcactcaacgaggtaaaccgaaccacagttacagcatggattgatgttctccagaagaagagatcgcaacaaacaatcggctttgttgaataa

SEQ ID NO: 250669 - DNA, 540 bp, Klebsiella pneumoniae; identical to SEQ ID NO: 138799

SEQ ID NO: 250670 - DNA, 765 bp, Klebsiella pneumoniae
atggtattggatgacgaaaaatataaatttatagaaggaagaataaataaattaaatacaatcaatgatgtattaaaatcagctattgattatgaacaatgcgcactaaaactaaagccatcagaacatccaacatttttcaaccaccaagctatctctataaatggtgaacagtttttctcagctaaagatatatcaacctggatacctaatatagacttgcttcgtggagcatgtagccttaatgatggtgttatttttataaaaaataatcagatcgttccattgagctcggggcaacgattatttgcctacatcgtaattaatgtcgttgcatcaataaaagataatagcttgattgttattgatgaacctgaacttttcttacacccaacattagagatagaatttgttgggcttttgaaaaagatacttaaaccatttcgctctaaagctattcttgccacgcattctttatcgattactcgagaagttccttctaagtgtgtacatatatttcatgatgaaggcgacggcttagaaatactgcctcccccatttgaaacattcggtggtaatgttcaacgcatttcatcctatgtttttggcgataaatcaatttctaaaccgttcgatgaatggcttgaaatgcaattgcaagacattgaagatcctgaaaaattaattaaaatgttgaatgaagaaattaatgaggaaatgatcatgaaaattatgagtttaggtaaaaaatatcatggtcgctaa

SEQ ID NO: 250671 - DNA, 342 bp, Klebsiella pneumoniae; identical to SEQ ID NO: 242404

SEQ ID NO: 250672 - DNA, 159 bp, Klebsiella pneumoniae
atgcttttggtgccgaaggccggactcgaaccggcacgtatttctacggttgattttgaatcaactgcgtctcacaagtcattgattatcatcactaacttgttacgtacctacggttcgtacaggcaatttcgccaacagattgccccagcaaaatag

SEQ ID NO: 250673 - DNA, 306 bp, Klebsiella pneumoniae; identical to SEQ ID NO: 198590

SEQ ID NO: 250674 - DNA, 354 bp, Klebsiella pneumoniae; identical to SEQ ID NO: 198588

SEQ ID NO: 250675 - DNA, 594 bp, Klebsiella pneumoniae; identical to SEQ ID NO: 198587

SEQ ID NO: 250676 - DNA, 828 bp, Klebsiella pneumoniae; identical to SEQ ID NO: 198586

SEQ ID NO: 250677 - DNA, 210 bp, Klebsiella pneumoniae; identical to SEQ ID NO: 198585

SEQ ID NO: 250678 - DNA, 933 bp, Klebsiella pneumoniae
atggatgtacctatcacggcgctaaatgactactattggtcatattttcgcagatatcagcttacccgtaataagttgcaattgtataatgccttgaaactttctgatcccatggtgattgatatgcctgatgatgaatcgaaaagcagtaatgtcactgatatagctaacgcagtggcggcggtagctaaagaagtacccatatatcaagatgcaattcagcctgcagcgcaggaggtcgggaaagccttggggactgtggcaaagcttgtgaatgttgccttggcaccagtcagtgcattggtgtgggggtatgagcagattcgtgagtttatttctgtaaagattgcggaaaagttaaaagatatcccccctgagcacattgtatcgcctaaacctaatgtggctggtccagccattgaagctctaagatatacaggatttgatgaacaattaggtgacttatatgcaagtttacttgctacgtcgatggataaaaacactgcagaacttgcccatcctgcctttgttgagataataaagcagttaacctctgatgaggcaaaaataatatcaacttttgagagggattctgattttccagtaattaccattcgaatggggaataaggatggaacaagatatattgattactatcgaaatttttctttaattggaataaatgcagggtgcgataggttagatgctatacctgaatatttagataatctttgccggttggggatttgctatattccagaaggtaaatatttctcagaacagaaagtttacaatgatattattaacagtgacgaagtattaattataaaaaaagagatagagtccaaaggaggttttttctcccttgcaaaaggaggattatatgttactgacttcgggcgtcaatttgttcaggcctgtttacgaaaataa

SEQ ID NO: 250679 - DNA, 1650 bp, Klebsiella pneumoniae; identical to SEQ ID NO: 227588

SEQ ID NO: 250680 - DNA, 1041 bp, Klebsiella pneumoniae
atgagcacagcgtacgaacaacttttagttgaaaaaattatcgattttggcgacagtttttccgatgttaaacagcccaacaacgtgatcacaagtttaaatttatttggtgatgagaatctcagcatcaataaagttttaaatgaccgtctcgtagaggatgcagatcgcgttaatagcgaaaatgccccttatgtacacagtgattttaacactaccgaattacctacatttgacagtcatttcgtcgaacttcgaacatttaaacgggtagacaaaattagctctcgctcgttcgaacaggctcgtggttttggcaaaactgtagctgaaactatggacgaccagattgcaaaataccttattgaacatgatgtcgcgtatcaaaacacgctggaaactatcctcgctgaggctgttctttcaggtaaacaatctggagtttatacggctcaaggtgatttatctttttttgctgaatttaatcaaactaaatccacagcaatattcgattttagtactactgcaaatgtcctcgcacaactggatgctgtacagcgccaaattcgacaggctgcacgtagtaaactgaaatctatgcagggcattgtttgtttatgcactggtaatatggcgcagaatttggcctaccacaaatcgattcttgatgcagttatctatgcaactcctgttaatgacccagctaattttgttggcactctgcaattttaccttcaggcgtatcctgtatggtcactgaaagggatcacttttgttgatgtcactggtgatagttatctggaatccctaattggcgagaacaacgctgtttttgttccccgttttgcgcaggatagcggcgtatttaaactgtttaacggtattggaaccatgcatgcaacgcttggaaaaactccggctaaattccatcaatacgcaattgttgatgaaatgcaatttccgacactgatttcagagtctgcacacctggcaattaataacctgccacaggctgtggtatacgccagtatctccggctaa

SEQ ID NO: 250681 - DNA, 366 bp, Klebsiella pneumoniae
atgaaaatttctacatcatacctgtgggcatccgatatcgtcgcctatgctgctgacccaatcaattttgatgaggtcgttaaagttaatgcactggcgtctgaaattgtagcaggttcgctactcgataaaactacactgactctcgcaaatgacgccactacagcagaaaatctaattctggttttagatcctgcctgggctggtcaaaagtatttacgcatttgccgcaatggtctggctacttttgtacgccgtgaaaacctggttgctgcatctggtgcagatatggaaaccctgtttaataaattggctgaaaatcttatcgtcattgctggcgatgaaaaaatgcttcctaccacctaa

SEQ ID NO: 250682 - DNA, 336 bp, Klebsiella pneumoniae
atgaggcctttcttttatttcaatttgcaaaatgaaatggatttaaaaatgaatatcaaaaaaacaacattaactgatggtcggcaggggattacaatttttgcggagccagacattatttctgaaatggtagccctttgcaaacaacggaatatccccgtggaagagtcccctgaggtttcccaggagactctggataatctgaccaaaaccgctaaacaaatctcagctattgaaaaagtaaaggctattgccgatgaactaaaaaacaaaaaggctgaggaggctgaatctccaaaacaaattattaaaaacattctcaaggggaaaaaatga

SEQ ID NO: 250683 - DNA, 459 bp, Klebsiella pneumoniae
atgcaattaaacaccagacaggaaagagtttacaccctggctaacatacttggctcagggaagcctgtatcggcgcaatccatcaccgcgacgctggcctgttctgagccgacactaagccgggcgcttaaagagctgagggaaacttacgctgctgaaattaaatacagtaaggctggccactcctatcagatggtacactccggattactggataagaaaacactcaagagaatgagtgaggcactggaccttaattctgatttaaaaacacatgaccagggggcacgggtggtactggataaggatataaaaacttccgtttccctgtcgataagacgccgtgttcttcgcaaaattgacaaactggctgcgctaagcggtacatcaagaagcgaggcagttgaaaaattagtagagttaaaaattgatgaaattatcaatgagatgaagaaatag

SEQ ID NO: 250684 - DNA, 150 bp, Klebsiella pneumoniae
atgcagaacagcaacattatggcgttaccgctcgcgctatgcaacgtagagcaaggtcaagcggttaaagtgccagcaatggccgggagtaatttccatcttgccatttacaaaaccttacatttgtgtgattttgaaccatttttttaa

SEQ ID NO: 250685 - DNA, 234 bp, Klebsiella pneumoniae
atgcatacctacagggccgttggagccaaatacgggaacattgccctgtcggcgattggcatccgaaagagaatccccataagtgaatcgacaaacccatttgaggcgcactacactccaatgctgtggcacctcgcccatccactcgataccagaaggtttgagtttgaccgatgcatcaataccatgagtgaccgcgtggtcaatgagacgcagcttttgctcggtcaatag

SEQ ID NO: 250686 - DNA, 909 bp, Klebsiella pneumoniae
ttggatttgtacctgggcgagccacaggaaaatgagaattgtaagtggttcgatattgctgactttggctacaggaagatcactgttgaacgtccgctgcgtctcaagagtcaacttaagtcagagagtatcgagagcttgcgatttgcctcgggtgatgaggctctgcgagctgaaatctataaggaatatggggaaaagctctatactgagttcgctaaagtcaagccgctcattgatgcttggttgaaaggtgaagatgagaacaacgatgatgacagcgatgaagagggcgaagaaaacaagtctgccaggcagatagttccggcaaaacgtcgcaagaaactgctcgatggcacgacatgggggcgcgacaagggactggtcgagcttgctttacttgcgcagaaggagattggccagaccgtttttgacgatcacaacgaattccgcactcgtttcgatgctgtgctaaaggcgaacggtaaaaaattaggggcagccgagaagaagatgatctatagggcggtgagctggcgagacgaaacggcaccacctgttattgctaagcgcaataagcttaaagaaagcgatttctttgaacagggatacgacggcgtatatttagaagttgtgggcaaggatcgcttcattgtcgagtatgaagcggactctgatcttcgcgatactgagcaagtccctctaaaggaacaaggaggcattgatgctttctttgagcgagaagtacttccattcgctcaagattcttggattgctatggacaaaactcagattggctatgagatttcatttgcccgctacttctataagccggccaagttgcgcacgttacaggagattcgtacagatatcctcgagcttgagcacaagatcgtgggagcgcaatga

SEQ ID NO: 250687 - DNA, 1830 bp, Klebsiella pneumoniae
gtggcgtttgccagcctcctctcgatgcaggctgggtcaacccgcgtaccggaaaatgcagtacagcaggcgctggccggtaaaggccgcaaagtcacgtcgctgctgaagcccgtggcgtggatgttcgtcatcgccgccctgttgatcgcactcgattcggcggcaggcgtcggggtactgatactgctgcagcgcggcattgactccggcgtcgccgcaggcgatatgtcgactatcggcctctgcgtcctgctcgccctgtgcctagtagccgtgagctggagctgttattcgctgcagacggtcttcgccgcaagggcggcggagtcagtccagcataccgtgcgtgtgcgcaccttcggccatatgctgcgtcttggcctcccctggcatgaaaagcatgtcgattcgcgtctgacccgcatgaccgttgatgtggactctctcgcccgctttctgcaaaacggccttgccggtgcggccaccagcctcgtgacgatgttcgctatcgccgccgccatgttctggctcgacccgctcctggcgctgacggcattaagtgcggtgccacaggtcgcactggcaacctggatttatcgccgactcagctcccctgcttatgcgcaggcgcggctggaaataggcaaagttaacagcaccctgcaggagaaagtctccggcttgcgcgtcgtgcaatcgcatggccagcaggaacaggaggcagcacggctgcgtgcgttatcggatcgcttccgcacgacccgcgtgcgtgcgcaaaaataccttgccgtctatttcccgttcctgaccttctgcaccgaggcctcctatgccgccgttctactggtgggagcatcgcgggtcgccgaaggtgaaatgaccgccggggtgatggcggctttctacctgctgctggggcaattctacggaccagttcagcagttatcagggattgtcgacgcctggcagcaggcgacggccagcggtaaacatattgatgaactgctggcgaccgaaggcactgagaacgtaaccccctcttctgcaccgcccgccaccggtgcgcttcatcttgatgatgtcacgtttagttatcccgacagttccgagccggcgttgaccaaacttaccctgacgatccccgagggaacggttgtcgcggtcgtcggtcgcagtggtgcgggtaagtcaacgctgattaaactgattgccgggttatattcccccacctacggcagtatcagcatcggtgatcggacgattgatgatgcctcgcttgccgattaccgtctccagattggggtggtcgatcaggatgtggcgctgtttagtagtgatattgcggaaaacattcgttattcacggccatccagcaccaatgacgacgttgagattgcttcactgcgggctgggctgtatgagacggtacgcaatctgccgcagggattccggacaccggtgagtaacggcggtgccgatctgtccgcaggtcagcgccagctgattgcactggctcgcgcgcaattagcgaatgctcacatcctgctactcgatgaagctacgtcacgcttggatcgcgcatccgaagaacgattgatgtcatcgttaatagatgtcgcgcacgccaggcagcactcggcgctgattgtggcgcaccgtctgaccaccgcgcagcgctgcgaactgattgccgttctcgataaggggcagcttactgaatacggcactcacgaacagcttttagctgcaggcggcctctataaccagttatggcatgacagtgtcggcagtactgtgctacatcgacagcacgacatcgcgggatag

SEQ ID NO: 250688 - DNA, 1782 bp, Klebsiella pneumoniae
atgcgccccagcagccagaccggcttcgcgccggtcattcgcggtgtggccaacagcaatgcccgggtggaagttcggcagaacaactatctgatttacagcgagaacgtcccagccggtccctttgagctaaatgatatcaacgccgttaaccgcagcggtgatttctacgtgaccgtcattgaagccgacggtagccagacgacctttactgtcgcctacaccaccctgccacagctggtgcgggcaggccaatggaattatcagttgtcggcgggtaagtatcatgacggcgctgacggctatgcccccgccctgatgcaaagctcgctctcttatggcctgaataataccttcacactgtacggtggcgcccttgcagcggagaactatcgcgccggcgcctttggcgtcggtagtaatctgggggagattggcgccctctcagccgactatacgctggcgggaacgacgctggcgaatggccagcgcaagcagggagggagcgtgcgttttctgtatgctaaatcctttttgtcgagcaagaccgactttcaaatcgcgggctaccgttactcaaccgcaggttattatagcctcagcgatgcggttaacgagcgtcgacgctggcacaatggcctgtacgaaaatgattactggccctctgacgaatacgaaagctggcaggcaagcgctccccaacactattacacgtcctggttttataataaaaagcatcgctttgatatttctgcccggcaaactctcggtaagaacagcgctttcttccttaacttcagccagcaaaattactggaatagctcaggaagcgatatctcgctgcaggcgggctttaacagcactatccataacgtgaactatggtctgtactatcagaatacgcgcagccacttcacccatgacgacaatagcatcacactgcgcgtttccatcccttttactctgcaagaaaaccgccggatcaataccgcatttaccctcgcccacagtaaatcgtctggcacgtccgggcaggctggggtaaacggcacgctgctcgatgatgatcgcctgagctgggccgtcaccagcgcctatgatgacaccagccatagcaccaacagcgccagcctgggttatctcggccagtacggtaatctgtataccggctacgcctacagcaaaaaccatcgtcaggcgagtctgaatctgagcggcggcgtggtggcacaccgcggcggcgttaccctctcgcaaccgctgggctcaacctttgcgctggtggaggccaaagacgctcagggggtagggatagagaatcagaccggcgtgcgcatcgatcccttcggctacgctgtcgtaccacaaagcgttccctatcgggtcaattctgtcgcgctcaaccctcaggacttcgatgcctttcttgatgtccctaacgcagtggcggataccgtgcctacccgcggggcaattacccgggtgcgctttgatacgttccggggatatagcgtgctgatccacaccaccctcgccgacggcagctatccaccattgggcgccgagctctatcgcgccagtgggatcagcaatggtctggtcggcccgggaggagatgtctatgtcagcggagtcgattcaggcgaaaagctgcagatgaaatggggcgaaacgcaccagcaaagctgcgaaatcactctgcccgaactgcgccaggagcctcagcaggcgacggcctggcgtgaattatccttaatctgcacagtaaccccctcgaggtaa

SEQ ID NO: 250689 - DNA, 360 bp, Klebsiella pneumoniae
atgcgttacctgaggttccagcgagattgtaggcaacatttgcgcggtggcattatctacctgggcttgtgcctgtgtagcctgggccaaagcggcgagcaccgctggtacggttcgataatcaattttactaacggcgcaggcggcatccatagcctgcggtacgctttcggttacggaggtaatacttccgagaccaagatacgtcgccagcgttgccttccagcgctcaagcgctgcctgatactggataagcgttgcctgcgcgccctcaacgcgggtatccgtctgcacaacatcagaaagcgatgtcgccccggcgtcgttgcgctggcgaataagatcgccaatatgctttaa

SEQ ID NO: 250690 - DNA, 180 bp, Klebsiella pneumoniae; identical to SEQ ID NO: 227565

SEQ ID NO: 250691 - DNA, 435 bp, Klebsiella pneumoniae
atgaaaaaagaaaaccgcctcggacagcaggcggctaacacagatactcgcggatctgatgttacgccaccatcctacaccgttcaagcctcaaaacgcattccgaagaaacaccgcgcccgtacctacatgctgcgctgtggagctggtgggtggacagaaaacgatatcctgcgcaattgccgcctctcatctggccgcaactatgcgagcgagcttgagcgcgagcttgatatctgtctggaacgcctggaagagaaaaaccctgatggtatcggtgcgcacatgcgttaccggtttgcgtgccgtggtgacgtgctgaaggtgattcagttcgttaaccgcatggccgcagtcaaccaacactacgggctttctaagcaagatatcgccgacattctgaacctctacccggacaacttcaccgccgcataa

SEQ ID NO: 250692 - DNA, 219 bp, Klebsiella pneumoniae
atgaccgcacagcaagcagcacaagtagcaatcccccaatctggttacatccgccgctttctcttggctgagatactgggaatccatgttggcacattagatcgctgggttagggataaacgcattcctgcgcccgtgaagttgggcgaaaaaattaccgctttcgacgcggttgagattaacagttggatagcagaacgtcgcgggaaggtggcctga

SEQ ID NO: 250693 - DNA, 306 bp, Klebsiella pneumoniae; identical to SEQ ID NO: 226571

SEQ ID NO: 250694 - DNA, 552 bp, Klebsiella pneumoniae; identical to SEQ ID NO: 213868

SEQ ID NO: 250695 - DNA, 774 bp, Klebsiella pneumoniae
atgtatcccggtggaaatgcgctgaactttgccgcttatgcggccatgctggggcacaatgcggcctatttggggatttttggtaatgatgccgctgcggaacacgttatgcaggtgctggataaagttggcgtcaagtggccacactgtctgcaggtggcaggagagaacggctgcgcacagctgaaaatcgaagagggagaacggatatttcttggttcgaacgccgggggtattcgcaagacaacttcgatggattttatttttcagcatgagcaatacctgcgtgagtttgatctgatccatagcggctgttatagctacatggagacgcacttacctcagttacgcgagctcaacattcctgtctctttcgatttttcagatgactttgtactggagcaggcgctgccgctgtgccgttacgtcgacttcgccttcttctcatgcgccgactacagcctggcgcaaacacgtgaaattgtgcaacaagcgcaggccagcggaagtcgcattgtctgcgcgacgcgtggagatgaaggcgcgattttatttgacgggcaggattggtatcagcaggcgcccgattacgtcactcccgtcgatacaatgggtgcaggtgatgcttttattaccgctttcatttgccattttctggcccaacctacgggtaacaagcgcgaagcgattaccaagagcctgcaaaaagcagcagctttctcggcacaaatttgcctgaaagaaggggcatttggctacgggactcactattaa

SEQ ID NO: 250696 - DNA, 357 bp, Klebsiella pneumoniae
atgcctaaccacgctctgcgggtgacgcttacggcattcggcaaaaatatcaatacagcggcgaattgcggcatcgccctccgcattcatacagcagttgaatccacgagcatcagccaacaaaacctgctggcgcagggcattataatcaacgggtcgttcattgttcgtgccgggacgatcggcataggggtaaatcatatcgccggtatgatcggcaataacgccatcgaccataaatttaaagccatgaaaccgcagccatggcgaatgaaagcggcgtcgggcctgttcaccgaaagcaagatcgacaggcgcagatacgggctgagaaacaatgcttactctcagcaatag

SEQ ID NO: 250697 - DNA, 1053 bp, Klebsiella pneumoniae
  misc_feature (414)..(414): n is a, c, g, or t
gtggatgcggaaattgcgcgactgtatcgcatcgcggcggaaaacgggcattacaaagccagtattaacctgcagaacggtgcgctgcgcgggcgctttgcgctgagcagccatgaacgtctgcgcctgagtcagcaactgattgatgcgaaggtggccgccggctactactttattgccatctatctggagcacggtgcggcaggactggcgcaggacccggagatggcgctgcgttactatcgtaaggcggcagatgaagggaatccccaggcgcaggcgtatgtgggggataaactcgctccgattgatattgcgccggatatatcccgtcagatgcgtcgctgtgctgctgaacagggagagagagaggtatccagtgatctgggtgttaacctgaaaaataataagcgntgtcagcaggcaactgaggcattccagttgggtgtggcagcgggagattcaacctcagccggtttcctgatgcacggattttccggacctgaaccaacggacaggctgttctatctggcactggaaaaggatcccgagcgtgcccgtcgttatgagcagataggtgctgtgctggcgaaatactcatgggcccatcctgtcgtcccggaaatcaacgatatcgtgccgctgccgccggccccgctgccggagtgggacggcaagctgaagtggctggaggaatgggaggccaatatcccgccgccagtgcctgatgcagcgctgatagagaaactggcgcaggcgaaacagctgaacccggcgacgggcaggccgctgccaacgtcaccggactttgagaaggacagcgtggcgcggctgcagtgccgcagcggtgagccctgcccgcaaagcggctactggcagccggcgtggcggccccgtgaaggaatgagcgaacatgccatccgttatttccgcgagggagacatcatgccggtggagaaggtgaccttcgttcggccacgtccctggccgctgcgcgacagactggtcgtggaagcgcaggagacggtgtggcgccgtgtcggcgaggcataa

SEQ ID NO: 250698 - DNA, 870 bp, Klebsiella pneumoniae
atgagcatatatgttcagactcaagtatccgatcgcgcccctgcagatttaaataatcaggaaatggcccttcctgtatcatctgggctacgggtcatcattgctgacgataaccctaccaaccggttattactgcgccgtcagttagatattctcggttattatgtagatgatgtcgaagatggcgaacaggcattcagtttgatcaaacgacgacagtacgatctgctgataacggatctcaatatgcccggaatggatggacttacactagcccagcaggtaaggaagattaatcccgccctggtcatttggggcttaacggctaatgcgcagcctgacgaaaaagcacgttgtttggccagcggtatggatttgtgcctgattaaacccgttaatttgccgcaacttgctgcagcttttaacagcataacgcagcgtctggaaaatccaactcagactgaaatatcggcgtcattaaacacacaattggatactacagtatgtaatgaactgattgatatgcaggcactacgggctaacgcaatggatgatacggcattcatgcttgaattaattaatcaggcataccatgagaatgtcaaagatctggcggcgcttaaaaaagcgatgttcagccatgatcgagatatcgttcgatatcatctacatcgaattaatggtacggcacagttaatcggcgcaacgtcgttacatgtgcttgcagataaattagaaaatgcactggcatcagagcaaccgctttcccttttcggggaggatatgcagctgcttgaacaacaattgattgcattagggaaagcaatggacaattttcttaaaagggaagggcttacctcaagggaataa

SEQ ID NO: 250699 - DNA, 726 bp, Klebsiella pneumoniae
atgtcgaattttggactgcaacagaatacttccgtaccgttatacaggcagcttaaagataaaatcctcagcgatatttcttccgggaaactcgctgaaggagagaaaatccccaccgagattgagctcagcgaactctacaatatcagccgtattacagtgcgcaacgcagtgaaagagctggtagccgaaggctatttggtaaaaaagcaggggaaggggacttttgtctgtctgcctaaaattgagcgtaaagttgttcacttacttagctttactgccgcatgcgatgctaaccatctaccaacccatagcgtagtgactcgtcgtgagattctgcaggactatcgtaatgcgcgtcagcttcttgagcttgagagcgatgattccgtgctttatatccaacgccttaggatcgctggcgatgcgccgttaatgttagagaataattactactctctgaaacgattaggttttttacagcaggaggatcttagcgggtcgctgtatcagctattgcgtgaaaaatacgcgatcgtgcctacctatgcgggtgaaacgacagtagaaatggtgcgtgcggattctgacagcgcaccgctgctgaagcaaccgcccggcgaaccgttattcctgatgaaaacgctaattctggatagccagcatcagcctattcattatggagaacagtatatcgtcgccgagcgttacacgtttagtttctga

SEQ ID NO: 250700 - DNA, 942 bp, Klebsiella pneumoniae
atgttcgcgctgggttatgactcaatgactgcgatcctgattctttttctgggaacccagattggctacgttggcgcaatgaccaatccgttctctgtactcattgcccagggcgtagcgggtattcagggaaatccgcagctttggctacgtgctattgcatggctggtcttcacgctactggctattgcttacaccatgtggtacgcgcaccgtgttaaacgcactccgcaaaagtcgccggtatatgaaaatgattgtcgcaaccgcgagcagtttttgtcgatacaggatacgtcggtccatttttccatcgccgatcgggtaattatcatcgcctttgtgctggcgctggccgtcatctcatgggggttaatcacgcgtggctggtacatggttgagatcggctctgtgttcctggctctggggctgttttccgggatcgtcgggcgcatgggcattagcgggatggcagacagctttgtcgaagggtgcaaagagtttgtctacgccgccgtagtcataggtcttgcgcgcggtattctggtggtggcggagaacggacgaattatcgatacgttgctatttggtttgtctgaaatgctggaagggttgccgcagtatgcgtttaccactctgatgctattagggcataacgtcatcaccttttttgtgccctcatcttcgggcgaggccgcgctcactatgcccgtgctggcgccgttaggcgatttggttggtatcaataaagaggcgatggtgatggcttatcaatttggcaatggcctgacgaacctggtctctcctaccggcggtgtattgctggctgggttgtctattgcgcgcattgggtttggtcagtggttaaaggccattgcgccgctgtttccggtgctgtggatagttagcgctgcttttgctgcgatttcggcctgggtctga

SEQ ID NO: 250701 - DNA, 333 bp, Klebsiella pneumoniae
atggacatgaaaaacatgccagagcaaccgctggtcttccagtctggtacgcagagcgccggactggaactggttgatctctatctgtggatcttcaaacgctttatggaaggtaaagaactaacccggccgctgacacgcctggtttataccaaccggcatacctctatcacctccagcgtgtcactggacgcgatcggcaaacagtttaaagcgttcatggagaccctgccggagccaacggcggacatgttgcaaaaagggcgtgaacttcaggcccgggaagaagcccgccgtctgcagcaccgggttcccggtttcactagcatctga

SEQ ID NO: 250702 - DNA, 711 bp, Klebsiella pneumoniae
atgcacttttatgttgatgaaaccggccataccggaccgaacctttttgacagcactcagccgatactgtcctacggcgtgctgtcctcacccgatgatctcgatactgtcgcggagcctgccctcgctgcgctgcgtaaaaaaatgggggtggtgcgactgcacgccgccgaactgggtatgcaccgcctggataacgtcatcgatacgttactggttctgcagaaaaagcaccgtatccgctttgatatctggcaggtggtcaaacgcgatcacgccatcatttccttcttcgatcaggtgtttgaccaggggatgaatccggtggtgccctggacggcctactggaccccgcttcgctatcccctgctgataaatctggcccggctgtttgatgatgagctagcggaaaaagcctggcgcgcccgtctggaagcccacgatggccggtcggcggcgttgttgggggaagtctgcagcgtactgctttcacgtgtcgggatgctgggcgatccccgtttcattgaaattgtgactgatgcgctgtcgtgggcaatggcccactttgatgaactcagctacaactgcaaaaccaataaagaaaaactgcagatcatgccaaacatgattggctttcagtccgtgcttcatgggatctgccaccggctattcgcgctcagccatgggagctggggccaggtctgccggtga

SEQ ID NO: 250703 - DNA, 306 bp, Klebsiella pneumoniae
atgaacaaactcaccactttgcgcgtcctgcataaatgcaattccagtggccagttgcgacaacaagtccagatattgtcgatcgcccgtcgtttcggtgtatttcaccagcgccagaatactgacggcattaccgccaagtttaatttcattttcgacatcacaaagaaacgcagcctgtcgtccatcagcaagcgtacgaacagaaataaggttattgaccaggtaagcaatcgcccgatcgatcgcctgacgaaggtgcggctgcttagtcgcctcccacccctcaatcagcgaataggttga

SEQ ID NO: 250704 - DNA, 627 bp, Klebsiella pneumoniae
atgggctggcagggaagcaaaggcagcattaacgcgggctatggccactcccataatattaccggaggggcaattgcgcactctgaaggcctgacgctgtcgcgaacgcttggaagctcaatggcgctggtcagtgcaccggacgcaagcggcgtccgtctcaccagcggcaatggcgtaaccgattggcagggttttgccgttgcgccttacctttctgattataccagcaacaacatcggcctcgatcccagcactctgccggataatgtggacctgccgaaaaccaacgttgaagtttacccgacgaaaggcgcagtggtgaaagccgatttcgctactcgtatcggttaccaggtattaatgaccctgacgcgcgtgggcgggatgggcgttgtgccctttggtgcgacggtttcgctgttgaataacaaggagcgtgatgatgcgaccagcatcgtgggggataacggccaggtgtatatggctggtctgccggtgaaaggggaattgtccgtggtgtggggtaaaggcgtcgataagcagtgtcgggtgaattttaatcttaacggccttaagccaacggcacaaatgccggtaattcaattgaatggcgattgtcgttaa

SEQ ID NO: 250705 - DNA, 681 bp, Klebsiella pneumoniae
atgagcgctaaattttcaccgtcactgatgtgcatggatttaacgcagttcaaagagcagatcacggcaatgaataaaaaagcggatttttaccatgttgatataatggatggcaattacgtccgcaatatcacactgtctcccttttttattgagaatctgaaaaaaattactactgtgcccattgatgttcatctgatggtgaatcatccggaagatttcattcccatgtgtctcgaggccggcgccgatatcatcagctttcatcccgagacggtgcatatcaaaatattccgcctgctgaatcagatcaaggatgcgggcaaaaagtgcggggtggtgctgaacccggcgacaccggcagaaagcattgccgaatatgcgcatctgctggataaagtgacggtcatgtcggttgaccctggctatgccggacaaaagtttattcctgagtcgctgaacaagattagaaagctcatcaacatgcgcaaaaataatggctatcactatctgacggaaattgatggctcttgcaatgagaaaaccttcggtcagattgctgaatccggggtagatgtctttatcgtcggcacatcgggtctgttttcgctccatgaggatgtcagccaggcgtgggacagaatgatcgagatcttccagcgggaaactgtcgctgcataa

SEQ ID NO: 250706 - DNA, 306 bp, Klebsiella pneumoniae
atgagtgataatctgcctgtcataacagagaatatgggtaaagcggggcagatcggctacagccctcaccagtctgaacacttcagcaatctgggaaggttcaagtcgatcaaggtcatccataacgacgatgaatttcagatccagagtaaccagttgtttcgcaatttcagcccgcagttttgttgtcgttttttgatcaactgcgagacgactctcggtaaatacttttatcccgcctgctatccagttaatgatgctggaaaactgcccgatatactgaaccagcggaagaacgcgcgatga

SEQ ID NO: 250707 - DNA, 1128 bp, Klebsiella pneumoniae
ttgacgcgatttgccgcagagaatgcgccgcagttactcaatgaattaagcgacaatcaatggctattcccgctgcacccgtggcagggggagtatctgttgcagcaggaatggtgccaggagcttgtcgctaaagggctgattaaagatttaggcgaggccggcgcgccgtggctaccgaccacctcttcccgctcgctatactgcgccaccagccgcgacatgatcaaattctccctgagcgtgcgcctgaccaactccgtccgtaccctgtcagtgaaagaagtgaagcgtggaatgcgcctggcgcgcctggcgcaaaccgacgactggcagacgctacaggcccgcttcccgactttccgggtgatgcaggaagacggttgggccgggctgcgcgatctccacggcaacatcatgcaggaaagcctgtttgccctgcgtgaaaacctgctggtggatcagccgcaaagccagactaacgtactggtctccctgacccaggccgcgccggatggcggtgattcgctgctggttgcggcggtaaaacgcctgagcgatcgcctcggcatcactgcgcaacaggccgcccacgcatgggtcgatgcttactgccatcaggtgctgaagccgctgtttacggctgaagcggattacggcctggtgctgctggcgcatcagcaaaatattctggttcagatgcttggggatctgccggtcgggcttatctaccgtgactgccagggcagcgcgtttatgcctcacgcggcaggctggctcgacaccattggcgaggcgcaggcggaaaacgtcttcacccgtgagcagttgctgcgctacttcccttattacctgctggttaactccacttttgccgtgaccgccgcgctgggcgctgccgggctggacagtgaagcgaatctgatggctcgcgtacgaacgttgctggctgaaatgcgtgatcaggtgactcataaaacctgtctcaactacgtgctggaaaatccgtactggaacgtaaaaggtaactttttctgttatctgaacgaccacaacgagaacaccatcgtcgatccctcggtgatctacttcgatttcgccaacccgctgctggctcaggagggttaa

SEQ ID NO: 250708 - DNA, 513 bp, Klebsiella pneumoniae
gtgcagtcagcctattatgacatcaacgaggatatcgtggagatcaaggctgaacccaagctctttgagctttaccatatggacaggcgggtcctgcttcggctgaaagccattgacgccctgcagcggaaggaatctgcccaggcgctgtatacctacatcgagagccttccccagaatcccgcacctatctccatgaaacgtatgcgggaccggctgaatcttacctcaaatgtctatacgcagaaccacacggtccgaaaggctatggagcaacttcgggatatcggctatctggattacaccgagtttaaacgtggccgggcgacttactttagcgttcattatcgcaatcccaaactcatcagcgggacggtgaaggtaccgcgcaaggaggaagaagagaaggcgccggagcagaattatgacgaagtcatcaaggcactgaaggctgcaggcatcgatccgcagaaacttgctgaagcgctatcggcgatgaagccggaaaattga

SEQ ID NO: 250709 - DNA, 252 bp, Klebsiella pneumoniae
gtgcgtcagctgttggccgacgcctgcggcgttagcatcgtgagcaccgccagccgcgagccggtgctgttaggttccgccatcctcggcgcggtggcgggcagagtcgcggcttcgctgccggaggccatgaagcagtttactcaggtggatgccacctatcacagcgagacggcgtttagcccgcttcatcagcgcaggtatgcggcctataaggcgctacaacaggccggcaggctgattcgcgaataa

SEQ ID NO: 250710 - DNA, 573 bp, Klebsiella pneumoniae
atgctgcggcgtttgaatatggcgcagggaaaccagggcaatcacgcccccggtaaggcagaaggccagcgccagccacagggtgcccatttcgccaatgtggggaatggtaaagctcggaatatagctgccgaacacgccgatacccaccgagtagaccgcccagaaccagcccagcgcggagctggaactgtcgctgcggacgttgtggataatggcgacgataaaggagtagaggaacagcgggtaggccaggccgcggatgccataaaacagcaggatcagcgcatagttggcgcgaccgaggccgaagacgaggaacagtacgtggaatacacaccacagcacgaagccaatcagcatggccttgcgtggggtaatgatttccgccaccacgccggagacccacgccgacagggcggcagccagaccgtagagagtaaaggcaaaggaagcctgcgccggggtgaatccgagtgctttgatgtagtgcgacagaaaagccagctcaaagccgtcgccggtcataaacacggcgatggcgacatatccccagatgaggttgagcggtag

SEQ ID NO: 250711 - DNA, 237 bp, Klebsiella pneumoniae
atgcagccgaaccagcgcaccaccttcatccagcccagtttttccccgaggatcccccacagcacgttagagaaaatggtggtgaagaagaagactgcccatacctggagccattctgaagtgctgaagcccagctcatcgacaaacatcatcggcataatcaccgcaaagccgaacagcgagagggtattgatgatcctcaccatgctcgacagcagaatattgcggttggtatag

SEQ ID NO: 250712 - DNA, 342 bp, Klebsiella pneumoniae
gtgacactgtgcggcgcggaccccggggactttattggccacaatactcatcccaatgccggtaccgcagatcaggatcccacgctcgtgttcgccctgtttaatcgacatcgccaccgcatgggcaacatccggataaacggtactcccctggcgtttatcgctgctgtaatccgcgacgttaattcccaacccattcaaataagcgacgatggaatcgcgaaaagcataggcggcatcatccgcaccaatagcgattgttttcatggttatttccttaatttaacagtacgtcttaatgacaattcgggtaaaacgaaatttggtcgccaggctgaataa

SEQ ID NO: 250713 - DNA, 714 bp, Klebsiella pneumoniae
atggtactgataaaatgttcctgttcgctggaaaataacgccagcaggggctgtttacggaggctgaccagatcggctgccagcgcggtcaggagccagggcgctgcgggtcccggaataccgtaccatttttccagcagcgcgatatcttcagctttccatggggtatgcattttgccgccctgcgtgataagcgcggcgcttctttccgtccatttttttgcgtccccgataacggagggcgtctggcaggcgacagtctgggtttccagaaacagggtgatatcgtcttcaaagttcgtcatatctaagggcataggacgtaacagccgtgatgagtgcggcagatggtatttttgcgccacatcatcgctggtcagcagcagcacggccagcccgtcggagtatgctgtaccaccgttgagctggatgaccaggagtaaattgaccgtcagtacaggctgcttcaggcgctcctccacttccgacagtgagaatgagccggtaacggtaatatcatcaggcacggcgcggccaggaatgtgttctttccagagattactgaaactgctggtcagctcaggcgagggattatccgtgatcagggtgacatacagcggtagctcttccggcaggcactgcacgcgctcttctatactggtcagcagcgcatgcatcgcactcaactgcacgggctcttctaccggaaggtaa

SEQ ID NO: 250714 - DNA, 519 bp, Klebsiella pneumoniae
ttggaaaaggatcccgagcgtgcccgtcgttatgagcagatagtcaaggtcctggcgaaatactcatgggcccagcctgtcgtcccggaaatcaacgatatcgtgccgctgccgccggccccgctgccggagtgggacggtaagctgaagtggctggaggaacgggaggccaatatcccgccgccagcgcctgatgcgaccctgatagagaaactggcgaaagcgaaacagctgaacccggcgacgggcaggccgttgccgacgtcaccggactttgagaaggacagcgtggcgcggctgcagtgccgcagcggtgaaccctgcccgcaaagcggctactggcagccggcgtggcggccccgtgaagggatgagcgaacatgccatccgttacttccgcgagggagacatcatgccggtggagaaggtgaccttcgttcggccacgtccctggccgctgcgcgacagactggtcgtggaggagcaggagacggtgtggcgccgggtcggcgaggcataa

SEQ ID NO: 250715 - DNA, 450 bp, Klebsiella pneumoniae
gtgattcagctgcctgaggtcaggatatttctcctgcaggctgcgcacgaagccctcctgcatatagcggccaatattgtcgtaatgcttggtttcgttatccagttgccagccgataatcgccggatggtgttgcacatgggccatcagcgtgcggataattttttcggcatagcggcgaaaggtcgggttgacgatatccatgatctgccgcggaccatatttttgctgccccgcgacggtggtgaccagaatatcgggatgtttcgccgccagccaggccgggaccgcgtaggtgggcgtcccgacgatgaccgcaatgccggcctcatgcatcgcctccagcacccggtcgatatggtagaaattatactggccctcttcaggctccagcgtactccaggtggactcggcaatacgcaccacgttaatgccggtttcgcgcattaa

SEQ ID NO: 250716 - DNA, 696 bp, Klebsiella pneumoniae
atggcgattgtctggaaaatgcagatcagcgcccaccctcagcaggggcggctgtccggcaaagcatcgccggttaccctccgcgatgccgtctcgctgttaaaaattaaaaaattctggttcttcgccctctatgtcattggcgtcggggcggtctatgaaacctatgaccagcagttcgctatctattacagccatttctttgagagtaaagcccggggtgcagaagtcttcggttatttaaccacgggtcagattttccttgatgccatcgtgatgttctttgcgccatggtttgtgaataaaatcggcccgaaaaatgcgctgttatactgcgggctgattatgagcttgcgtattatcggctccgcgtgggctattggccctgtctccatcagtctgattaaactcctccacggttttgaaagctcggtgctacttgtcgcggcattaaaatatattacggctaactttaatcctctgctgtcagcgaccgtttacttaattggcttccaattttcgaaaagctttagctctatttttctctcgaccggtatcggccatatgtaccagagcatgggctttaccagtagctatatcgtactcggcggtatcgctctgtgcttcacgcttatttcttttattacgctggataaagcgcgtgtcttctcttcacaaccggtgcccgcgaattaa

SEQ ID NO: 250717 - DNA, 273 bp, Klebsiella pneumoniae
atgcgctggcaaaatagcgtaatttactatcgtccatcactctatctccctaaagaggtgcgacgtttatttttttattggaatatcaacaacggcgccgtaatcattaatatatttcattttatgcaagcgctgcatgctggcgatattgacagcgtggtgactgtacggcagcaacataaagtttttcagaggatagatttttcctttgttgtcgatcgcctcggcattaataaccgtaatatgcagtgggctgttgttagtaaaagataa

SEQ ID NO: 250718 - DNA, 912 bp, Klebsiella pneumoniae
ttggatccgacccgcagtgaatccaatgttggcgaaagtcaggcaaaatatcgcgcgtcattagctgcaagcattcgcctgaccgccgaggtgaacaaccaaccgctgatttttccaccatcgctgaaggcctggccggggctactggcggaagaaactcgcctctatcacagtcgcagggagcagctaacgaagtctatgcggcaactggatcagtcgttatcgctggtcaatagtgagctggcgataaatgaaaagctggctaagaccggtgcggccagtaatgttgaagtgcttcgtttacgccagcaggctgccgatattgagctaaagaaaattgacctcaacactcgctactatgttgatgcccgcgagcagttgtcaaaagccaatgcggatgtcgccagccttgccgaagtgattaagggccgggcagattcagtggctcgattgaccgtgcgctcaccggtgcaggggatcgtcaaaaatatcaaagtgaataccatcggcggggttatcgcgcctaacggtgaactgatggatatcgtccccattgatggtcgattgttgatcgaagcgcggatttctccgcgcgatattgcatttattcatcccgatcagaaggcgctggtgaaaattaccgcctatgattatgccatctatggcgccctcaatggtgttgtcgaaacgatatctcccgacacgattcaggacgaggcaaaacctgatgtttactattatcgggtgtttatccgtaccgatcataactatctggaaaataaacgcggtaagcgttttttaataggtccagggatgatcgctacggttgatattaaaaccggagagaagacagttatggattatttggtgaaaccatttaatagggcaaaagaagcgctgagagaaaggtaa

SEQ ID NO: 250719 - DNA, 231 bp, Klebsiella pneumoniae
atgcagaaagtcgaagctctccggctgcgcgagcttttgcgcctccgtgacgctggcggcgaaggtatcccacggcattacggcctcgatggcggcgaacggatcgccgccgctctgtttggcttccagcaaggcttggccgatgcggccatacatccgcaccttgtcattgatcgccttgccggaagcctgaaactgctgctgatgcttgttcttggcggcgttgaatag

SEQ ID NO: 250720 - DNA, 753 bp, Klebsiella pneumoniae
atggaacgcgcccgggcagccgggcatcttaccgcttccatggccggggaagcgccagccgttatcgaccgggcggcagatttggtcttaacagtaccctgtggagaagagcgggctggcgccaaaaccaaagggtatcactgcaccatacttaatctgatgctgctggggcttgctgtcgccagtcgccagcggcgcctgagcgatgaggagcgcaaggcgctactcatccgcatggataccacgtttaatcatttgccgacgctcattgaggcctcgcaggcgtgggttctcaatcatgcccgaccgcttatcgacagcgcggacattcgcctgaccggtccggcaaggctgtttggcaccgttcaggaaggtgcgctaaagatgcttgaaacgctacgctgtccggttgccggttacgaatttgaggagttcatccacgggatctataacgccttcgacgagcgctctaccctgatcatgctcgatccgtttcccgatgagcgtcaggatcgcctggcggaaatacttggcggctggactcagcatatttatcgcattggtccacaagtcgaaaataacggcaaaaatatgcacttcgcatttattaacgatcccgactttgcggtctttgaatatattattccgttacaaatggtttgtgcccgactgccgccagtgaagggcatcgatcccgcaataccgaaggatccgcagttccaccagaaaatgaaaagtaaacaactcaattaa

SEQ ID NO: 250721 - DNA, 273 bp, Klebsiella pneumoniae
atgttctccacaggcagcggcaatccgtgggcagtggctctggcggatatcatagctggtgatcatgcggttgatctcgctatctaccacgtcgccttgcgcatcaataaaccgcccgaggatctccccgatgccgccgcgggcggtcagctcatccatctgcgcctgattgataaagccgtctttaaagatcggactttgcgtgcccagcggaccaatgccgacaaaaatcacgtccgcctcgcgggcgacgccggagacgctgcggaataa

SEQ ID NO: 250722 - DNA, 168 bp, Klebsiella pneumoniae
atgcgtaaccgcgccggaaataatatccacttcctgttcaattactccggcgaggcgatggatgttgtcagcgagaccctgggtaccgcgctgctgagcggggagacagtatacgtcggccagccgttgcgcctcagggcctgggaatttactatcatcgaaagctaa

SEQ ID NO: 250723 - DNA, 1053 bp, Klebsiella pneumoniae
gtggatgcggaaattgcgcgactgtatcgcatcgcggcggaaaacgggcattacaaagccagtattaacctgcagaacggtgcgctgcgcgggcgctttgcgctgagcagccatgaacgtctgcgcctgagtcagcaactgattgatgcgaaggtggccgccggctactactttattgccatctatctggagcacggtgcggcaggactggcgcaggacccggagatggcgctgcgttactatcgtaaggcggcagatgaagggaatccccaggcgcaggcgtatgtgggggataaactcgctccgattgatattgcgccggatatatcccgtcagatgcgtcgctgtgctgctgaacagggagagagagaggtatccagtgatctgggtgttaacctgaaaaataataagcgatttcagcaggcaactgaggcattccagttgggtgtggcagcgggagattcaacctcagccggtttcctgatgcacggattttccggacctgaaccaacggacaggctgttctatctggcactggagaaagacccggagcgtgcccgtcgttatgagcagataggtgctgtgctggcgaaatactcatgggcccatcctgtcgtcccggaaatcaacgatatcgtgccgctgccgccggccccgctgccggagtgggacggcaagctgaagtggctggaggaatgggaggccaatatcccgccgccagtgcctgatgcagcgctgatagagaaactggcgcaggcgaaacagctgaacccggcgacgggcaggccgctgccaacgtcaccggactttgagaaggacagcgtggcgcggctgcagtgccgcagcggtgagccctgcccgcaaagcggctactggcagccggcgtggcggccccgtgaagggatgagcgaacatgccatccgttacttccgcgagggagacatcatgccggtggagaaggtgaccttcgttcggccacgtccctggccgctgcgcgacagactggtcgtggaggcgcaggagacggtgtggcgccgggtcggcgaggcataa

SEQ ID NO: 250724 - DNA, 492 bp, Klebsiella pneumoniae
gtgaataacgccgggatctggctgagcggctacgtcaccgagatctgcccgcaggactgggatctggtgatgaatgtcaatctgaaagccatcttccatctcagccagctgtttgtaaatcactgcctgcagcatgaccagatgggcagcattctgaatattacctcgcaggccgcgttccacggctccacgacgggacatgcgcactacgcggcaagtaaggccggcctggtcgcctttgctatctctctggcgcgggaagtcgccaaacaaaaaatcaatgtgaacaatatcgccgtcgggatcatggatactgcgatgatccgtaagaacattgagcaaaaccctgactattacgtcagtcgtattccggtgggccgcgtggcccagccgcaagaaattgccgacatcggtgtcttcatggtttctcctaagaccagctatatgacgggagcaactctggacgttaccggcggtatgttgatgcgttaa

SEQ ID NO: 250725 - DNA, 639 bp, Klebsiella pneumoniae
atggatgacagcaaaattccggttaacccgcaaaaggagccctcagaaacggtcatttacctggcgcgttattctgaagaaaagcagcatctgacgctgttcaacgcattccgtaaagtgtccgcacaacgtcccgatgcgcggctccatacttatggcgtcggcccgcttcgccgtaaacttagcgatcaggttaaggcgtggggattagaagacgtgataaaaatcaacggatttacctcggatattgctgccgttcatcgacacgcttgctgtacggtcctctgttcaaatcaggaggggcaatctctgtcggcggtcgaggccatggtctacggcacgccgttaattagttttgctattaaatatgggccgcgcgatattctgcaggaccgccaggccgggattctggtgccttacggcgacgaagaggcgttggccgcggccttagttcgggttatttccgataaggcgctacaaaaagagatgcaggccgccgctatccgcaatgcgcgccgttattacgctaccgcgatagccgggcgctgggaaagctggttacagcacaatgagcagcgaatgaaggagcaggaggagaagccactcaatgtggcttcgctcaaacaacgtgtcgtgtaa

SEQ ID NO: 250726 - DNA, 711 bp, Klebsiella pneumoniae
atgggctatgccttcgcaatgtcgccagccctgaagcgcatctatcaggacccaacggagctggggcgcgccctgcagcgtcatctggtgctgtttaacaccacgccccatctctcgacctttatcttcggcctgtcgattgccatggaagaagagaaccagcgtaaccccgaatttaatgaggagtcgataaacgcgattaaaaccagcctgatggggccgctggcgggcatcggcgactccatattctggggatcattaaaggttatcgccgccgggatgggtatctatttcgcccagcagggcagcctgctgggaccgatactggcgctgttagtttataacctgccgcatcttttgtgccgctggtatggcctgaagctcggctaccgggcgggtacgacctggctgatgagaatttaccaaagcggccttatggaccgggtgacctatatcgcatcaattgttggcctcatggtcgtcggcgcgatgaccgccagcatgatagatatcaccaccccgctcagctttaccgccgggcagaccaccatgaaggcgcaggagtttattgacaaaatacttccttcgctgctgccgctgcttttcacccttgggatgtacaagttgatccgcaagggagtcaatattaactggatcctgctaggaaccgtcgcgtttggcatggcggccagcgcgctaggcctgctttaa

SEQ ID NO: 250727 - DNA, 168 bp, Klebsiella pneumoniae
atggtttttcctttgtgcatgctatttaacgtaatgattatctggatatttattgagggcatgttcattttcgggccccctttcgtaatccaccgtgcaacgatacgccaggcgattaagcgtaaaaaggtgcgtaaattgttttcattattcataatccacgaataa

SEQ ID NO: 250728 - DNA, 195 bp, Klebsiella pneumoniae
atggatttcttgaaaagatggttaaaagaagaattctttctttttttatggggatggggtattgtgttattaatcattatatttagcatgattgcagtctctctttttcctgatattgccattaacttaataggactttttgttttattaatcattgggtttcacgttgtcgtttggtttaaagttaaaaactga

SEQ ID NO: 250729 - DNA, 645 bp, Klebsiella pneumoniae; identical to SEQ ID NO: 210672

SEQ ID NO: 250730 - DNA, 378 bp, Klebsiella pneumoniae
atgccggcgggggaaaagcagagcgcttccccgtcatccgtggtaggggggtcacttcaggtttccacggcaacggtagttaagctgttttaccgcccgggagggctggcgttaccgcagcagcaggctatgggtatgctgcagttttcatccaccgggcagggccttcgggtgaccaacccaactccgtattacattacgctcgccgatcttaaggtggccggagtcagggttcctctcagtgcggtagcaggcaacaccatgatagcgccttttggggctcagttatatgcgcgtgcgccgcatcaggggcgggttgaatggaaggctatcaatgattatggcggtacggaggtgtttcatggttcggtccgctaa

SEQ ID NO: 250731 - DNA, 408 bp, Klebsiella pneumoniae
atggccataagaagctccgctggagaggatatagaagagcttttcatcttgatatttttgggcaaaacgctggcagcgatccgcaacctgctgacggccatgagcaatgacgccattaatttgggtcattccctgttggaaatcagcgtaattattgaaaccttccacctgctgcaacgtatcaacgcacaggttgaggataatcgccatcggattatcgaccacattggtatcgttaccccaggcatagagaatgttgtgactggcgtattcgatcaactgtgcctgagcgttgtgagtcagcgtaatagtatgcgcttgatgctgttgagcaagcttagccgcagcgacggattccggcgtgttgcccccgtgcgaacagacgataaccagcgaattctcccctaa

SEQ ID NO: 250732 - DNA, 441 bp, Klebsiella pneumoniae
atgtctacgtattcgtttcttgatgtttcggcctctctcgcagggcctaccgggttagttgagcttggctacggctcagcgaacgccgaagagggcattactgtcacaatgacagaggccaaaaacaccatgaccatcggcgccgatggcgaggtgatgcacagtctgcacgccggaaagagcggcactatcacgataactttgctgaaaacctccccggtaaacaaaaagctctcgctgatgtacaacgcacagagcctgtcctcggcaacgtggggcaataacgtcatcgtcattcgcaacaaagtatcaggtgataccactacagcgcgttcttgtgctttccagaagcaacccgatcacgctaacgccaaagtcggcaatacggtttcctgggtctttgactgcggcaagattgatcagctgcttggggagttttaa

SEQ ID NO: 250733 - DNA, 555 bp, Klebsiella pneumoniae
atgaccctcactgttgcgcagatgacactaccatcacgcccggatgcctggcgtggggaggccagcctcgcggagatagcacacgctctggcggaagctgacccccatgacactgtgcttatcgccggatgtcaggtggttgtcgcccagccgggggcggtgcaacccgccggagagtctgcggtactgtggctcgccggacgggacggtccggtgcacctgaccaggggggaaatctattgcgcagaaaaaggggaggccctgactgctgtagccgctcgtgtgctggagcagaacgaactgagcggccccccggaagcctgtgcgctgttttttcagccggggctggaagcgctggcgcacagcggttgggatatcaacctgtatcgccaggatgcctgttggggagacatcggcgagatggaaggcttgaccgttctgtcactggcggcgatctacgccgcgcactaccaacaaccgtgtggctggctagcccgcgatcccttgaataccctcgcaattggaattgtaaaacctgatggacaacgtcaataa

SEQ ID NO: 250734 - DNA, 525 bp, Klebsiella pneumoniae
atgctgctggtggtggcgattttcgcgccgctgattgcgccttataacccgctggtacaggacctgaatagtgcgctggtcgcgccgaatgcgcagcactggttcggcaccgatgagtttggccgggatatctttagtcgcctggtgtatggctcccgcatcacgctctatatcgtgctgctggtctcagtgaccgtcggtccgctcggactgctgctgggcgtcagtgccggctatttcggcggtaaagtcgatatggtgctgatgcgcgtcaccgatattttcatctccttcccgagtcgtcctctggcgccatatcgtgccgctgtgtctgccctcggtcattatccgtatcaccatgaatatggccgggatcattctgaccgcggccggcctaggctttctcggcctcggcgcgcagccgccagagccggagtggggagcgatgatctccagcgggcgcacttatatgatggagtgctggtgggtcgtaaccattccggggctggcgattttgatcaatag

SEQ ID NO: 250735 - DNA, 390 bp, Klebsiella pneumoniae
atgggtacagtgtttgaagagttgatccggcgtttcaacgaagaaaataacgatcaggcaggtgaacacttcactccacgtgatgtggtacagcttatggccaaattactatttttgcctgtggctgatcgaatagaatccagcacctactccctgtatgacggctcctgtggtaccggtgggatgctgactgtagctgaagatgctttgctggaattggctgaggaatatggcaaagatgtgtccattcacctgttcgggcaggaaatcagcgatgaaacctatgccatttgcaaggctgacttactcctcaaaggggaaggcgaagaggctgaaaacatagtgggtggtgcggacaaatcaactctttccgccgatcaattcagttag

SEQ ID NO: 250736 - DNA, 549 bp, Klebsiella pneumoniae; identical to SEQ ID NO: 213371

SEQ ID NO: 250737 - DNA, 273 bp, Klebsiella pneumoniae
ttgttttgctgccgaattagcttcgctctgtgcgtttcgctcgtttttagcggcttcggcgttggcttcctgctgcttatatgtctggagcttaacctgatagtattctctgaaagcttgcgtaccggctttaagcccctgccgttcagcgtcacgccatgcctgcgcctgctgtttggcctctccagtctgtttagtgatgaaaagctcctggcgggcctgctgcaaggccttagcctggctgtcgctgaggctgattgtaatggctcgtag

SEQ ID NO: 250738 - DNA, 186 bp, Klebsiella pneumoniae
atgggcgcccatgccatctgtcgcatgattgatttccgcaaccatatcctgctcagcgctagcgataacagtggcggcacccgctttaagaagcatgtctcttttttcggcagttcgggtaagcgcaatgggtttagcacccagcatgttagcaatctgtatggcagccagtcctacgctgcttga

SEQ ID NO: 250739 - DNA, 435 bp, Klebsiella pneumoniae; identical to SEQ ID NO: 212770

SEQ ID NO: 250740 - DNA, 195 bp, Klebsiella pneumoniae
atgaccgccgccgttatggtgggctggtttgcggaggtatttgctgcctcaaacgacatggtccatgtctcacgcaccgtctcccctaatccggaaaaccaccgggtctaccagaccaaataccagctttataaaaacctgttatcagaaatgcagtcgccgtggaaaagctgcagtaactacatcgcgcactaa

SEQ ID NO: 250741 - DNA, 480 bp, Klebsiella pneumoniae
atggctgagctcggcctttttgccgaagtttatgcacaaattctgctccttaacccctgcgaagccgaagcctatatgcgcgaacgctatggggaagagcgcgaagcgcaattctacgattatgccgcactatttggggctggcgtgacggtgactattggcaccgatctgcccctgtttattccttctgttcctgactcgatgtatgccgcctgcagtcgtcagttccctgatggttcacccgtgaatggctggtaccgcgaacgcggaatgacccgacaacagctcttaacggcatggacgctgaatagtgctcgacaccacggcatggaagagatgaccggtagccttgagccgggaaaacgcgcggatatcgcggtttttgaccgtaatttgttgagctgcccgaatgatgagttacggacttctaccgttgtacttaccctggtggatggccgtattacccatgaccttctgtaa

SEQ ID NO: 250742 - DNA, 132 bp, Klebsiella pneumoniae
atgtgggtgaggctaaaaaagagaatttattttcttttcctggcaatcgtcctccagaaattgaggtttaccaaaatgctgctgttaaagaatttttacatcaagaatatgggattgattttgattggctga

SEQ ID NO: 250743 - DNA, 336 bp, Klebsiella pneumoniae
atgaactccaataccgctgccacgcttcagaagctgaaaaacggtaacggtgattacatctggcgtgatcgtctggttgacggttctcccgataccctgctgggccgtccggttcagtaccttgaaaccatgcctgatgctgatgccggagaagcgttcctcgcggttggcgacttcaaacgcggttacttcatcgtggatcacactactggtgtgcgtacccgcccggacaacatcaccgagccgggcttctataaggttcacaccgataaatatctgggcggcggcgtggtggactccaacgcgatcaagattctggagcttgctggttcctga

SEQ ID NO: 250744 - DNA, 267 bp, Klebsiella pneumoniae
ttgccagagaaggcgaagccgacagcattcaagcgtcaggtgctcgcctctgccgatcaatctctggtgcgctctattgtcggtgatgccgatatcagtaagctgaaaaaagccacggtagatatggctttcacggctgtttctgagctggcgaaaaaccgcaataccaaaaccgtcgacagcctgcaaacgcagactgccaccactgttaaaaccattgccggtatgaatcaggccgcgcaggaattctggtctaaacgaggctaa

SEQ ID NO: 250745 - DNA, 303 bp, Klebsiella pneumoniae
ttgagcgcctcccgcgacgaggcggtaaacctgaaacaatctatcgccatccagcgccgccagcaattgcttggcgaacaaacccgcgccctgtatcaggatcaatatttacagctcggcacgcgtccgttactcgacctgcttaacgtcgatcaggaaatttatcaggcgcaatttaatcaggtattaactgaagcgcaactgcgaaatctggaactggactgtctgttcagtacagggaaaatgcgcgccgtttttgctctggataaccaaagaattcagggcgtggagattcgaccatga

SEQ ID NO: 250746 - DNA, 375 bp, Klebsiella pneumoniae
atgtgctataccgtcgacttaaccactcagcccaatatcgattaccagcagtatccccaggaagactggaagctaaacctgttttcccattatctgggcgtgctgtactgctgcgagacagacgaaggcaagaaaattgtctccggagcggtggtcaaaaccagcgcgccgcatttatcagaactggaaaataacgttgtgacgcggattatcgagaaaagccccaagctcaaggcgatgcacgcggagctggcgccatgccagatcttcagtactgtcatcccttcccagccgggaagaatgctcagtctggaagagtgcctgcgtcctctgcacgccttctatctggagaagaaagcggagcttaacgcctga

SEQ ID NO: 250747 - DNA, 348 bp, Klebsiella pneumoniae
atggtcggcctgatgcacctcgccggtccgacgctactctattttttaaacggatttctaccggtattttttgccattctgcttggttcttcggcggtaagctggttcctggaggccattccgccggtgataaccaatggattgatcgtcgccagtaagatcctgccagcgctcggcttcgccctgctgatcagcatgatgctcagcagcaaactgatgccgtacctcggtctgggatttctgatagcggcatataccaaactggatatcatcgccatcgcgctgttcgctgtggtgttggcatttatcatcagccagttccttaatcttaagcagcaggagagctaa

SEQ ID NO: 250748 - DNA, 189 bp, Klebsiella pneumoniae
atggacgctctcaatcacttccttcccggcgatgccaggggcaacatttataacgatatcttccgccgcttccacgatgcgctgtatgaccacaatatcagcctcgacatcatccacgatgtgaacgaggaaacctcgcgctaccgggtgctgatcgttcctggtctgtacgccgccgatgagggctga

SEQ ID NO: 250749 - DNA, 276 bp, Klebsiella pneumoniae
gtgcgcctgcaggtgctgggcctgctggatgacctggttcagtcgcgcgggttggggctgatttttatcagccacgatatcaacctggtgcgcagcttctgcgaccgggtgctggtgatgtacgccggacgggtagtggagtccatcgccgctaaagatctcgataacgcccgtcacccctacactcagggattgattaactcgctgccggatatgcagcatcgtcgcccgatactgccggtgctgcagcgtcaggccagctggttaacggattaa

SEQ ID NO: 250750 - DNA, 291 bp, Klebsiella pneumoniae
atgcgcccgtggctggcgaactttgagcagcagattaaatccgcgctgctggtggcatcgcctgtacccggaatccgttatcaggtggagttcgactccgctgatcttctccgcgctactcctaccgaacgctacgcaacctatgagcgcggcatcaagaacgggatcctgaatcctaacgaggcccgcgaacgcgaggggatgccaccgcgtgaaggcggtgacgagttcagccaggcatggaagcaggaagtcactgtgagcaagggcaataaggatggtgacgaatga

SEQ ID NO: 250751 - DNA, 408 bp, Klebsiella pneumoniae
atggcgagcgatgatgaactggtgaaagtgctggagctgtgcggtgcgctggagtttgtcaacaaactgcctatggggcttgaacatctggtgatggagggagggcttgggctttccggcgggcagcggcagtcactgctgctggctcgagcgctcatccgcgatcccaatattattctgctggatgaacccacctcattctttgatgaacgaacagaaaaagcgtttgtcgagcagctggcccgttgggcaggagagcgtacgttaatcatcgccactcacaaagcggcggtgctcaatatcgtcgatcgtatactggtaattcaggacgggcagctggcgctggataagcctaaagcgacggtatttgagcaagaaaaagcgcgtgctcaggtggtgaacatatga

SEQ ID NO: 250752 - DNA, 300 bp, Klebsiella pneumoniae
atgcaggtggtggtcaatcgctatgagcgcgaccgtcaggctcgtcaggcggcgcttcgcctgcatggctgccggtgtcaggtatgcggtctggatatggccagccgctatggcgatatcggccagggctttatccatatccaccatctcatcccgctggccgggatcaagcaggactaccgtctgaaccctgaaaccgatctgatcccggtatgtcccaactgccatgcgatgctgcaccggcgagatccgccgtttactccagaagagctgaaggcccggctgcgccccgcagactga

SEQ ID NO: 250753 - DNA, 408 bp, Klebsiella pneumoniae
atgaactctgtggcgatggcattgatattcattaaatacaatactcgttcttacatctcatcgttgttatttggaattatttattttggcgtcggctgtggttttatctttagcacgtcattcggtattaatactttgtcattgctgttttgtgttttatttatccttgccgggtatagtcgcatcgccatgggatttaaagatcgggctatgaagggtcgttattggtgtattttcattggcataatagacctcatcatcgccctggcctggctccgcgctagcgaagacgccaactatatcatcactgtcaccttcattggtctggaaatgctgttctgtgccggattcttcttagtgctcagctatgcactgaataaagcacaaaaaaaattaatcaccacgtaa

SEQ ID NO: 250754 - DNA, 240 bp, Klebsiella pneumoniae
gtgcacaccactcgtcgccaggtggcgcagtatggcgtgcgcgtcggcgccgtactgccgggcccggtggttaccgctctgctggacgactggccaaaagccaaaatggacgaagcgctggccaacggtagcctgatgcagccgattgaagtggcggagtcggtgctgtttatggtgacgcgttcgaaaaacgtcaccgtgcgcgacattgtgatcctgccgaacagcgtggatctctga

SEQ ID NO: 250755 - DNA, 246 bp, Klebsiella pneumoniae
gtgcgacaacatgacgatgacatcgctgatacacatcagatgctcaagctggcgatcgctgagttctatttttggcgccttttcatcgcgttccggcaggagaccactgcccttgatgcctttcgcctggccgtcaagatcctgccacgcccaaaacagggccggacgcatcaatggctcttgctgctcgtcactgagaatgtgcgtaaacaacagcggaaatacccgggtatcgtaaaagcgtaa

SEQ ID NO: 250756 - DNA, 177 bp, Klebsiella pneumoniae
atgttcgccaatggcccacaccggttcatacgcaatcagggtccgcagcgcctgctggtggctcaggccatacagggcgatcttcatctgccgcaccacgctttcacgcgacacctgccagcgtttctcctcggcgctatcgccaatacagatcagcgggcgcaggccatgacctaa

SEQ ID NO: 250757 - DNA, 276 bp, Klebsiella pneumoniae
gtgactcttgttttactgaacgccaacgccgccgtggcggcggagaaagcgtcggaaaccacaccgaaaaacatgacttgccgggaataccttgatatgaaccctaaggcaatgaccccggtagcttactgggcaatcaataatgagaccgtctataaaggtggagataccgttgactggaatgaaacggacaccgtctcggtaccaaagttaatcaaaatctgtcatgaaaagccagaaagtaaaattatgcaatgggtgaatgatattcgataa

SEQ ID NO: 250758 - DNA, 123 bp, Klebsiella pneumoniae
atgctgacgccgccgagcagcggacgcggatatcagcgcaagtctccacgtatccaggggaggcagatcaacgtttacgtcctcaactacctgccggaggactacaaccagccagaggaatag

SEQ ID NO: 250759 - DNA, 249 bp, Klebsiella pneumoniae
gtgctcagaggatggcgtaacagcctgctgtttgtcgccgcgctactgctgctggatggcgtgatgtggtttctgttgcattctgaggatagcgcgctgctgctgggtaccggggtgctggcgctggcgctgagcgtcctgatgtttttgacccgtcgcgtggactggtatgcattatcgctgccgaaaggcacagtgcctccgacaccggctgccgatgacgataagctgcgtctctggaaagagtga

SEQ ID NO: 250760 - DNA, 138 bp, Klebsiella pneumoniae
atgatcaccgcgccgatactggtcgcctggtttgataaacggctgaaaaagcgtgcgccagccgctgaaccgctgaaagaggtgaaaagtgaagaaagcgtgacattatcttcccctgccgccaaaggacacaaatag

SEQ ID NO: 250761 - DNA, 351 bp, Klebsiella pneumoniae; identical to SEQ ID NO: 231803

SEQ ID NO: 250762 - DNA, 552 bp, Klebsiella pneumoniae
ttgagtaacgacagcacagagcctgggtatctaacccccgtcggggatgctcctgattacgataaggagctggaaaagcaactgagtcgctgggtaagaggcgtgacagggattgcggttaacctggtattgccccggtttaccgatccccagtccaaaataccgccgaacggtgagacgtggtgcgggtttaacttctccacgctcttacgtcccggcacgcctgcaaatgtccaggtaagcgaagagcaaagcgaacaatggccatgggagagcatccaggtgcttttctgtttctatggccccggcggttccgggatggccacgcggtttcgcgacggaatgtttgtagatcaaaacgcagatacgttgcgacgaatctcgggtttgtcgctggtgagcgctgatgatatacgaaacctccccgaattgatcaacaaccagtgggtgcgccggtatgaccttgccgtgaccctttcccgcaaaaacacccgtacctacaacgttaaatctgtcgttgaccctaacgtcacgatagttaccggagactaa

SEQ ID NO: 250763 - DNA, 924 bp, Klebsiella pneumoniae; identical to SEQ ID NO: 227609

SEQ ID NO: 250764 - DNA, 204 bp, Klebsiella pneumoniae
atggcgaagaccttttccacggccactgcactgcccgtcaatgacaccaaaaccaggccaattaacggcataacggtggagagcgttcgcttaagtaccgcgcaggtaatgtgccaacgcgatatcccggagacggtccaggtgattatccagttttcactaaaggttgccgctaaagcatccgagaatatccgccccagatag

SEQ ID NO: 250765 - DNA, 975 bp, Klebsiella pneumoniae; identical to SEQ ID NO: 137832

SEQ ID NO: 250766 - DNA, 834 bp, Klebsiella pneumoniae
atgatgaatgtgattggaattggcgataacgtcgtcgataaatatgttcatactcagactatgtatcccggtggaaatgcgctgaactttgccgcttatgcggccatgctggggcacaatgcggcctatttggggatttttggtaatgatgccgctgcggaacacgttatgcaggtgctggataaagttggcgtcaagtggccacactgtctgcaggtggcaggagagaacggctgcgcacagctgaaaatcgaagagggagaacggatatttcttggttcgaacgccgggggtattcgcaagacaacttcgatggattttatttttcagcatgagcaatacctgcgtgagtttgatctgatccatagcggctgttatagctacatggagacgcacttacctcagttacgcgagctcaacattcctgtctctttcgatttttcagatgactttgtactggagcaggcgctgccgctgtgccgttacgtcgacttcgccttcttctcatgcgccgactacagcctggcgcaaacacgtgaaattgtgcaacaagcgcaggccagcggaagtcgcattgtctgcgcgacgcgtggagatgaaggcgcgattttatttgacgggcaggattggtatcagcaggcgcccgattacgtcactcccgtcgatacaatgggtgcaggtgatgcttttattaccgctttcatttgccattttctggcccaacctacgggtaacaagcgcgaagcgattaccaagagcctgcaaaaagcagcagctttctcggcacaaatttgcctgaaagaaggggcatttggctacgggactcactattaa

SEQ ID NO: 250767 - DNA, 1566 bp, Klebsiella pneumoniae
atgcatagtaaggctcccgatttgattttacgttctgatgctatttttactgctgccagaaatgagctatttagcggatatgtagtcattaaaaacggcgctatcgcggcgatgatagcgaatggggaagatattcaaacctggagaggtgaaagaactcgctttatcgaacttggcgatcgcctgatttgtcccggattttgcgataatcacacgttttttaccggctatatgagcatgcagcgtggcgtcgatctccatgccgcccgcgatagtaatcatgcccttgaactattacaggatgcagaaaaacttctccctgaggggaaaagcctctatggctggggctggtctgctgcccgttggggagcggtgcctgatgccagactattggatgacgctttcccgcagagaccggttgtcgccattaacgatgacaaaagctattgctggatgaaccgtgccgccgtggagctttatggctttaccgctgaagagtgcagcgcggaggcgagaatcgcattattggatgagatgctgtctgataccgcacagttaaaaaaagaaatgcgggcatttatggcccgacttgccgggcagggaatcacggcaataaaagacgtttgtttcaacgatgcgccgcagttgatgaatgcctgggatgaactggaaaaagaggatgcgctattgctgagagtaagcattgtttctcagcccgtatctgcgcctgtcgatcttgctttcggtgaacaggcccgacgccgctttcattcgccatggctgcggtttcatggctttaaatttatggtcgatggcgttattgccgatcataccggcgatatgatttacccctatgccgatcgtcccggcacgaacaatgaacgacccgttgattataatgccctgcgccagcaggttttgttggctgatgctcgtggattcaactgctgtatgaatgcggagggcgatgccgcaattcgccgctgtattgatatttttgccgaatgccgtaagcgtcacccgcagagcgtggttaggcattctctgagcgatctggaatgtccgcatccaaacgatattcccagaatggctgagctcggcctttttgccgaagtttatgcacaaattctgctccttaacccctgcgaagccgaagcctatatgcgcgaacgctatggggaagagcgcgaagcgcaattctacgattatgccgcactatttggggctggcgtgacggtgactattggcaccgatctgcccctgtttattccttctgttcctgactcgatgtatgccgcctgcagtcgtcagttccctgatggttcacccgtgaatggctggtaccgcgaacgcggaatgacccgacaacagctcttaacggcatggacgctgaatagtgctcgacaccacggcatggaagagatgaccggtagccttgagccgggaaaacgcgcggatatcgcggtttttgaccgtaatttgttgagctgcccgaatgatgagttacggacttctaccgttgtacttaccctggtggatggccgtattacccatgaccttctgtaa

SEQ ID NO: 250768 - DNA, 357 bp, Klebsiella pneumoniae; identical to SEQ ID NO: 182584

SEQ ID NO: 250769 - DNA, 273 bp, Klebsiella pneumoniae
atgatccgttacacagaaacgatgagcaataaagattgtaaaacccctctcgacttaatgataaaaagttttaagtcagggttgatcccgatagagaaaatgccattgagcaagaccgaaaggcttattcctctgaatatcaacaccgctggtaagatatttacacacgcaacatggccgagatgtcgttacattttcgtaccggatgaggcgggaataatgaaactggttaacgtggtcaaattaagattaaaacctctggaggaaaaatga

SEQ ID NO: 250770 - DNA, 627 bp, Klebsiella pneumoniae
atggacggtattcccgtaccgtttgccccttacggccagccacagctttcactggcgcctgtctcactcgggaatatggacgccatcgacgtggtacgcggcggtggtgcggtgcgttacgggccgcagagcgtgggcggtgtggtgaactttgtcacccgcaccattccgcaagacttcggcatcgaagccggcgtggaaggccagctcagcccgacgtcctcacaaaataacccaaaagagactcacaatctgatggtgggcggcacggcggataacggttttggtaccgccctgctttactccggcactcgcggcagcgactggcgcgagcacagcgcaacgcgcatcgacgacctgatgctgaaaagcaaatatgcgccgaacgaggtgcataccttcaacagcctgctgcaatactacgacggtgaagccgacatgcccggcggcctgtctcgcgcggattacaacgccgaccgctggctgtccacgcgccattacgatcgtttctgggtttctgggggcgtcgcaagctggcaagcctcggctatcagttccagccggacagccagcataaattcaatattcagggcttctacaccgaaaccctgcgcagtggctacctag

SEQ ID NO: 250771 - DNA, 243 bp, Klebsiella pneumoniae
atggatatggctgtcgatgccggccgcggtcaggatcaagtgttccccggaaatggcgtcagtgctgagcccgacaatcatattctgcgtcacgccatccataatggccgggttaccgcttttaccaatgcccacaatcaggccatctttaataccgacgtcggccttaatgacgcccagtttggcatcgagaatcgtgacgttggtaatcaccaggtccagaacgccgttatcgcgcgttaa

SEQ ID NO: 250772 - DNA, 387 bp, Klebsiella pneumoniae
atggcttacgccatgcgcaatagccggattgatggtcagcttggcaacgtagcgcaatacccggaagttatcgttgccgtcgctgtcttctggcagtttgccgcgggcgactttcatggcatgggctgtctgcacaacgcgcagccagttttctccgacgcgtcccatcgcctgagagtcgctcgaaaacatcgagattacgcccatgtcatgcagcacgttttccgccgcgatagtttccggacggacgcggctttcagcgaaggagacgtccgcagccacgtttgggttcaggttgtgacacaccatgatcatgtcgaacagttcagcctgggtgttgatgccgaatggaagggtagggttagtggagctgggcagcacgtttaa

SEQ ID NO: 250773 - DNA, 2274 bp, Klebsiella pneumoniae
gtgaatgtcaggcaactgccggacctgaaagatttgcctgctacggctgagatagacaatattggcgcgcttatccctcaggcgaccaccatgctggatctggcgcgcctgcgtctggatatcagcgtacctcaggccgcaatgcagcctgaagtacgtggtgcggttgacccgtcgcaatgggaggaggggatttccgccctgatggcgaactatagcctcagcgccggtcgtaccacgaattccggccagaaccagacctcacataataacaacctctttgcaaccgtgcgcgccggggcaaacacggggccgtggcgcctgcgcagcaccatgacccatacccgggtggagaataacggcggtaataatgccctgacgaccacccagacacgcttttcgaatacctaccttgcccgcgatattcggggctggcgctcgaacttactcatgggtgagagtagcaccggtagtgacgtttttgacggtatccctttccgtggggtgaagctcagctctaatgaacagatgctcccgagccagcttcgtggctatgcgccggccatcagcggcgtggcgaacagtaatgcccgagtgactgtgcgtcaaaacggcaatgtagtgtacgagacctatgtggcgccagggccgttttacatcaatgatatccagcaggccggcctgtcaggggactatgatgtcaaagtcacggaagcggacggcaccgagcgccagttcatcgtgccctactcttccctgccggtcatgttgcgtcccggtggctggaagtatgagctgacggcgggacagtatgacggcaatctgacagatggttcccgccgggctgattttatgctggggaccgtggtatacggactgccaggtgatgtcacgctgttcggcggtattctcgccgcaaaagactaccaggcgttcaacatcggtaccggggtatccctgggatacgtcggtgcgctctcggctgatatcacgaattcatcggcgaagtttgataacgaatccaccttgataggccagtcttatcgcgttcgttattccaaaagtctgctgtccacgggcacctctgttgatttaaccgcgctgcggtattcaaccgaggattattacagtttcagtgaattcaacagtcagggacaccagttgcaggagggagtcagcccgtggtccctgcagcgccgccgtaacagcttccagacgcagctcagccagcaactcggggactggggaaccatgtatttccgggccagccgggatgactactggggaggcgaacgtacgctgaccggcatgtcgctgggttacagcaacagcctgaaaggcgtcagttacggtgtcaactacaacattgatcggacaaaggatgcgaacggtaactggccggaaaatcgccagatttcgtttaacgtcagtgtgccgttcagcatctttggctattcacgtaacctgcaatcaatgtatgccaccacgacgctcactcatgataacaccgggcggaccctgagtcagaccgggctcagtggtaacactctggacgggaaactgtcctacagtgcttcgcaaagctggggtaaccagggacagatcagtaacaccaacttaaataccggttaccagggaagcaagggaagtatcagcggcggatacagctacagcagcgatatgcaggctatcaacatgagcgccagtggcggggtgatggtgcatagtggcgggataacgctgtcacgtgccatgggcgattcggtggcgctggtgagtgccccgggggcggctggcgtgagtgtcaacggtggtacggcggtcaccgactggcgcggatatgcggtagtgccttacctgacggattacacccgcaacagcgtgggtgttgaccccagcaccttaccggaaaatgtcgacctcacacagaccaacctcaatgtatacccgaccaaaggcgctgtcgtcaaagcaaactttgcgacccgggtgggttatcaggtgctgatgacgcttaaactcgacaatggcgtggtgccgtttggagcagttgccacgttactgaatgcggggatggcagaggtgaatagcagcatcgtgggtgatgacggacaggtttatctgaccggattgccggagcggggggagttactggttaagtggggcgagacagcagcacgtcagtgccgtgtcagttttgacatctccggtttatcgacgtcgccggataaaccggtccgtcaggtgacctatacctgtcagggcgggaaatga

SEQ ID NO: 250774 - DNA, 609 bp, Klebsiella pneumoniae
gtggtgaacagtccaaggaggaagcccctgcgccgttgtcacgatttcatagaattcaggcttgccgaggttagggccaagcgccttaatgcgcctggtgagctgtgggttaatcatccagcggtcaagtacagccagacctttaaagctgcccttgccaaccttatccagcaccagcggagtcagcggtgcctgaccttcaatcagaatcagcgccaccgccccgccatacagccgggaccatttcaacgtctcgttgatgcaatcccaaagctgaagctcatcaaaccgcgattcaagaatgccacggcgtttcgggtcaatctcactggtgatccgcacgccctttttggtcatatcgtccgctttcgaatcgactgcggcaccaataatccaggaggaacgataagcccactcgatgagcaggcggttgcggctggtatagttcgccctgtaggtcgatgcagcatgctggttaggctgctgcattccgacacgggcaacaaagttatcgtacgaatccgccgtggcgactcgtcctgttttcttcgccatggtgactattctccggctttttcggtactcgtggcggataggataatttgttaa

SEQ ID NO: 250775 - DNA, 348 bp, Klebsiella pneumoniae
  misc_feature (310)..(319): n is a, c, g, or t
atgacttctactctgacatccaaaccgacgctgaatccggttctgcgtagcttctggacgacgcaggcgcgtaacaaagtgctttatggtggccggtcatcgtcaaaatcatgggatgccgctggtatcgccatatttctgtcgaataaatacagccttcgcttttgttgtgcgcgtcagatccagaacaaaattgaagagtcggtgtataccctgctcaaaattcagattgaccgctttggcctgcggcatcgtttccgcattctgaacaacaaaatcattaaccgggtgaccgggtctgaattcgtcnnnnnnnnnngtcttttatgggctctggcgcaacattga

SEQ ID NO: 250776 - DNA, 768 bp, Klebsiella pneumoniae
gtgttctggcgctcctttacgctacagggctcctggaactacgagcgccagcagcatatgggctatgccttcgcaatgtcgccagccctgaagcgcatctatcaggacccaacggagctggggcgcgccctgcagcgtcatctggtgctgtttaacaccacgccccatctctcgacctttatcttcggcctgtcgattgccatggaagaagagaaccagcgtaaccccgaatttaatgaggagtcgataaacgcgattaaaaccagcctgatggggccgctggcgggcatcggcgactccatattctggggatcattaaaggttatcgccgccgggatgggtatctatttcgcccagcagggcagcctgctgggaccgatactggcgctgttagtttataacctgccgcatcttttgtgccgctggtatggcctgaagctcggctaccgggcgggtacgacctggctgatgagaatttaccaaagcggccttatggaccgggtgacctatatcgcatcaattgttggcctcatggtcgtcggcgcgatgaccgccagcatgatagatatcaccaccccgctcagctttaccgccgggcagaccaccatgaaggcgcaggagtttattgacaaaatacttccttcgctgctgccgctgcttttcacccttgggatgtacaagttgatccgcaagggagtcaatattaactggatcctgctaggaaccgtcgcgtttggcatggcggccagcgcgctaggcctgctttaa

SEQ ID NO: 250777 - DNA, 1161 bp, Klebsiella pneumoniae
atgaagaaactactcgaattacgccagcagaaagccgcactcaaaacacagatgcgttccatgctggacaaagccgacaccgaaaagcgcagcctgaacgaagaagagggcaaaaagttcgatgaactccgcgcccaggctgatgcgcttgaaattgaaatcacccgtcttgaagccgtcgccgacgatcagcgcaatctgccaggtacttccgttgaaggtgagccagtaagcaacgacgagctgcgccactacatcatgaccggtgatacccgctctctctccacgctggtgcaggctgacggcggttataccgttatccctgagctggacaaagagatcatgcgtcagttgcaggatgacagcgtgatgcgctccatcgctaccgtgaagaccaccaaaaccaacgaatatcagaagctggtatctgtgggcggcgcgacggtaaatcgcggtactgaaggtgaagcacgaaccgagaccagtacgccgaaggtggagcgcgttgatataaaactcaacccgatctacgcctacccgaaaaccactcaggagattctcgacttctccgaggtggatattctgggctggttgtcttctgaaatctccgacactttcagcgctaccgaagaaaatgattttgttaatggcgacggtacgaagaaatctaaaggcttcctggcttatcctcgcgcggccaccagcgataaaacccgcgcattcggtacgctggagaaaatggaaacggctgctgttacctctgatggcctgattgatctgctgtacaagctgaaagccaaataccgcaaaaacgccgtgtgggtgatgaactccaataccgctgccacgcttcagaagctgaaaaacggtaacggtgattacatctggcgtgatcgtctggttgacggttctcccgataccctgctgggccgtccggttcagtaccttgaaaccatgcctgatgctgatgccggagaagcgttcctcgcggttggcgacttcaaacgcggttacttcatcgtggatcacactactggtgtgcgtacccgcccggacaacatcaccgagccgggcttctataaggttcacaccgataaatatctgggcggcggcgtggtggactccaacgcgatcaagattctggagcttgctggttcctga

SEQ ID NO: 250778 - DNA, 606 bp, Klebsiella pneumoniae
atgtcattcataaaatcgctaaacaaaaaaaatcaaacagaccaaatagaagtgacgattaacgttaggttaacccaagaagaggaccatttactgacattagcaacccagcaatctggttataaaaggaacgagctattctacctcctagcaaaggaatacatctttgatgatgaaagcttaaaggaaatggctgaggagtctggcgctgagttttcagaaggcttataccaaaattgttatgtggttaacactaacagagttcatcatgaagaagatgataagttcatgatttcagagggcgtagcggcaacatttgaagatggttataaggaaaaaatggagcaggttaaaaaaggagatttagtctttctttatcgctccggcgaaggaattgttgcacatggtatcgccagtggtgatgttttaaagaaagatcataatggcgtgccagacaagacctactaccagaagctatcaggctttgttaggtacgaaaaaccactaaccgcgtctgagatccagagaatactggggagaaacgttgtgtttatgcacacgctatttagcattagagatggctataaactgcttaaaaaagattaa

SEQ ID NO: 250779 - DNA, 579 bp, Klebsiella pneumoniae
gtgatttcgcggactcatggcgactttttccgccagcttatctacgctgaggtcggcggtgaggttttcgagcaaccacgccagcagatcgttaatcgggccctgggtggcggtctgctgaaggttatagcggctaaactgcagctggcctcccgggcgacgcagatacatgacgaagtcctgggcgatatcgcgcgccaggctgaagccatagtcttcttcaaccagcgccagcgtaagatcaaagccggaactgaccccgccagaggtccagatatgttcgtcctgaatatagagcggcccgccctcgacgcggatctgcgggaattccgcctgcatggtttccagcagcttccagtgggtagtggcccgtctgccgtccagcagtccggtttgcgccagcagcatcgcaccgccgcaaatggagactatgcggcgggcatggggagcggcaaggcgcaaccagtcaaccaccgccatcccctcctgcgggttttgacctctgccggtaatcatgatggtatcgaggggctcgcgagggtcaatctcatgcagacgatggtcggccagcagatttaa

SEQ ID NO: 250780 - DNA, 1335 bp, Klebsiella pneumoniae
gtgtctaatgctataaatccaaatcaaatgaatatctataatgacatacgtaaagcaaaagagaaccatgttaacagcagtttaaaaagattaacaaaacatgtcttttgtcctaagtgcaacatccaagtcagggctgctaatcttgaaaaacatctagctaaacatgaagtaaatccattaatgatgcccaaaatcccccatcctccccaaccggtcaggtcgcccagaaagatgaagcctccggtcatcgagattaaaaaaaatgcagtcaaatcttctgctgttttaagagataatgcagagaagagtgttagcggttgggcagataaaattaatcgtacaggtgctgaactaagagcgctctatgagggcaaacaattaccaaagcataaagcagaaattagaaaagctaaatttaaagcgacccaggacatttcctgcctgatctgtaaaacacccttaaaatcttctaatctgaataaacattataagaaagttcatggtattgacatccaaatacaagagcttgaaatttcaggtgtgggtgaattgaaccaagaaggatttatttctcattggtccctgcccgggaccgggaagcaggcacttgagtcatcttgtgaacgtatacgaggtggtaaatttgaagagattgaggaacacttctttgaacactggttgcgcctgtttagcgaaaaaggttacaccgtggcaatggtacaagcttttaggcgtacttcggaaagtaaacacatcagtaagtcagagataaaaagttttctcgaagttgttaaaccaatcaaaaagaaaccacaaatacaggaaacaactgtttgtggtaaagaactttccgaatctgttgaactaattaaggagctacatttatcgagtgtgaaaggggtgaaaaaagctatccacaccgttggccgagatagtcaggagcaagctgcttttcgtaaagctgtcagcatgaactataatcatcgctgtgcaataactggggacgaagtagctgttgaagcttgtcatattcaaacacatgcaaattacttcgataactcactggataatggtgtcctgttatccgtaggcttacaccgcttgtttgatgcagggataatgattatttgccctgaaacaatgactatcagttttacacgtaattgcttctataaaaaatatttggatggggcattagtgaaacaagggcggatcccgattagcaagaaaaaactttccgagaagaactcaggaattaaaatttgccatgagattacgccaggcctgcgagacgttatcgcggagcaggatggtgattacactggccgctga

SEQ ID NO: 250781 - DNA, 267 bp, Klebsiella pneumoniae
atgcacgccaagggcgagattgatgctgtgctgcgggtagcggcggtggatatgccgccagcattcaacgatggcctcaagcagggcctgaggagtgggcgcgttgaccggcaaatgctgatgaccatccactgccagcaggcgggcgtcggcaagctgatattcaatgctggtcggggtgatattcatgcacagtgtccaggcgccgtgctcggggatctggtagctgccgctgttcacgccccgtttgctcaagtgttccgttga

SEQ ID NO: 250782 - DNA, 429 bp, Klebsiella pneumoniae
atggtcgaatacagcggtgacatcgggtgggaatacactctggtgggcatcgccgccttttactgcagggttggcccaccacaggaaatggcgcggcgtggcgttaccattgaagatcttgccagtgatttcaatcagcgcgcggtcaggatagagcgtaaacccggccataacctgcaaaccgcgcatgggctccgcttcccccatccatacggtctgcgcgccgttttctccctgctgaatagaaaaatcgaccggcttaaaggtcgtcggccggtgatgttgcggccagttaaattcgattccgccggagatccagggcccgagcagccctaccagggctggcttaaccacctcattgtaatagacgaaatcacgttgtttgactttatcatatgcccggtgaatacggccgccaagctccggtag

SEQ ID NO: 250783 - DNA, 591 bp, Klebsiella pneumoniae
atgttatttattgacagcagtaaaataaatactcttggcagtacgctgttaaaaagataccgtagagctactgccgttatggccgttatactgctgttgtgtgcgctggcctgtatgctcttcccaatatatagcggtgtggtcattagcaccctgactggtgctttaatgttcatctgtggcatgaactctgtggcgatggcattgatattcattaaatacaatactcgttcttacatctcatcgttgttatttggaattatttattttggcgtcggctgtggttttatctttagcacgtcattcggtattaatactttgtcattgctgttttgtgttttatttatccttgccgggtatagtcgcatcgccatgggatttaaagatcgggctatgaagggtcgttattggtgtattttcattggcataatagacctcatcatcgccctggcctggctccgcgctagcgaagacgccaactatatcatcactgtcaccttcattggtctggaaatgctgttctgtgccggattcttcttagtgctcagctatgcactgaataaagcacaaaaaaaattaatcaccacgtaa

SEQ ID NO: 250784 - DNA, 1614 bp, Klebsiella pneumoniae
gtggcctcggggccgttccgcattcaggatattaacgaagctgtgagcggtgaactgaacgtccgggtggaagagcaggacggtggtgtgcaggagtttgtagtcaatactgcgaatatcccatacctgacgcggccaggctcggtgcgattcaaattaactatgggaaaaccatcagattggcaacatcatttacgcgatccgatgttcggtaccggcgaattatcctgggggatcagtaacggttggtctttgtatggtggaattctgaggggcggggattataacgctctatcactgggcatcggacgtgatcttatgttcctgggagcgctgtcatttgacgcaacacattcgcgtgttcgtctgccctgggaagatcttacgctcaatggggattcttatcgactgagttattcgaaaaacttcgaggagtacgatagccaggtaacttttgcaggttaccgcttttcagaacaagacttcatgaccatgagtgagtatctggacgcacgatcttatggtacacgcagcaatggcaatggcaaagagatgtacaccgtcaacttaaacaaacattttcgcaaattggaactcagtagctatatcaactttagccgagaaacctattgggaccggccaactacagaccgctataacattaccttatcacattattttgatttaggacggttccgtggtgtgagtatatcgttatcggcttatcgcaaccagtacaatggaaccgaagataatggggcttacgtatccatgtcaattccgtggagtgatagttcgacggttagctacaacgcgatggtcagccataacgacaatacccatcgggttggatattacgaccgtgttgacgaacacaacaactatcaattgagtgcagggaactccagcagaggagtgagcgtgagcggttattacagccatgaaggtgacatggcacgcatgagtgccaatgccagctaccaggatggtcgttacagtgccatcggtttaacaatgcagggcggactcactctcacttccgaaggcggtgcaatgcaccgctctggaatgatgggggggacgaggatgctaattgatactgaaggtgttccggacgtaccggtccgtggctatggcagtaccagccgtaccaatgcctggggcaaggcggtaattagtgacgttaacagctattaccgaaacaaggcaagcattgatttgaaccagttgggtgacaacattgaagccactgtgtcggtggtacaggctacgctgactgaaggggcgattggttacagaaaatttgatgtaatttctggcgctaaagcgatggcagctataaagctggctgatggtagtgaaccaccgttcggtgcgactgttataaataagcgaaagcaggagacgggtatcgtcaatgatagtggaaacgtttatttaagcggtattaatgccggagaaaccatggtggtgcattggggaggctcagcacagtgtgaagtgaggatgcctgcacttctgcaaccagatatgttgatgaatacattgcgactactgtgtaagccgcttgatgggggcatacctggcgccgacgatattaagccggctgcgtga

SEQ ID NO: 250785 - DNA, 699 bp, Klebsiella pneumoniae
  misc_feature (613)..(622): n is a, c, g, or t
atgttttttaaaaatcctgcgcgtatcgttaatagtttctttattcgtcaccatagctatcgtgttcgaattgatgatgtagagcactatctgtcaggttatatcgcttatcagaagtattttcaggcagccagcaaacgtcagcaatcgccaatcgcggcgccgcccgcgcctcggggaacgaccctttttttgttagagaatctgcgcgacgtggggaatggtattgaggttgcggctacccggcgagcaaggctgtttgttgaacatttacacaccgtcccgtggcttatcaccgccgtctggaacccagaccttaacgatgcggtaaaagcgttgaaggcgcggggagcgttgccggaagcggtgccggtttataacctctacaatgcattagcgtcgtgcctgagtgcggggaagatcgtcccgcttcccgggctgaaaggggaggttgagcttcgtcagacagttgtgccgaaagcagaggcgccaatcggtaaaaataattatcaattacgcccgcaggggcaattggtggaagattacgtcgatagcgcaggaaacgtgttgctgcgtaaatattttgatatcaagaaagcgaatctgcagattnnnnnnnnnnggatgtcgctttgccgggcggggaggtcaaatcctttaaccaacaggaagcgtttttctcctggatgctggaaatga

SEQ ID NO: 250786 - DNA, 921 bp, Klebsiella pneumoniae
atgatgctgcccgcagcgggcaactggcattttatcgtcgataaaaacaaagcgtggaaagattttgtctgttcgcaaccggcacagcggatgaactgcacggttagcgcggtcatccactctcatcatcaattgctaaacggcgggataaaagcttcttaccgtcatttactggaacaaccgcaactggtggatcggttaatcgtactcaccgacgaacaatggcaagatttacagcaagaggggatccccggcgctcgccttgtggtcatccccaaccatatggatgacagcaaaattccggttaacccgcaaaaggagccctcagaaacggtcatttacctggcgcgttattctgaagaaaagcagcatctgacgctgttcaacgcattccgtaaagtgtccgcacaacgtcccgatgcgcggctccatacttatggcgtcggcccgcttcgccgtaaacttagcgatcaggttaaggcgtggggattagaagacgtgataaaaatcaacggatttacctcggatattgctgccgttcatcgacacgcttgctgtacggtcctctgttcaaatcaggaggggcaatctctgtcggcggtcgaggccatggtctacggcacgccgttaattagttttgctattaaatatgggccgcgcgatattctgcaggaccgccaggccgggattctggtgccttacggcgacgaagaggcgttggccgcggccttagttcgggttatttccgataaggcgctacaaaaagagatgcaggccgccgctatccgcaatgcgcgccgttattacgctaccgcgatagccgggcgctgggaaagctggttacagcacaatgagcagcgaatgaaggagcaggaggagaagccactcaatgtggcttcgctcaaacaacgtgtcgtgtaa

SEQ ID NO: 250787 - DNA, 906 bp, Klebsiella pneumoniae
atgaccgtttctctggattcgccgctttcgggtggtgcgggcgaaggccgtcagcggctgcaacgcgcggcggcgcgggccgtcgggtttatcggcaaaatggcgcgcaatccgctcacggccatcggcggaggaattatctttatgctgctggtggtggcgattttcgcgccgctgattgcgccttataacccgctggtacaggacctgaatagtgcgctggtcgcgccgaatgcgcagcactggttcggcaccgatgagtttggccgggatatctttagtcgcctggtgtatggctcccgcatcacgctctatatcgtgctgctggtctcagtgaccgtcggtccgctcggactgctgctgggcgtcagtgccggctatttcggcggtaaagtcgatatggtgctgatgcgcgtcaccgatattttcatctccttcccgagtctggtcctggcgctggcgtttgtcgccgctttaggaccggggctggagcacgtggttatcgccatcacgctgaccgcctggccgccgattgcccgtctggcgcgcgccgaaacgctctctctgcgccaggctgattttatctccgccgtgcgtctgcagggcgcttcatcggcccgcgtcctctggcgccatatcgtgccgctgtgtctgccctcggtcattatccgtatcaccatgaatatggccgggatcattctgaccgcggccggcctaggctttctcggcctcggcgcgcagccgccagagccggagtggggagcgatgatctccagcgggcgcacttatatgatggagtgctggtgggtcgtaaccattccggggctggcgattttgatcaatagcttagcgttcaacttcttaggagatggcctacgtgacatcctcgatccccgtagtgaataa

SEQ ID NO: 250788 - DNA, 234 bp, Klebsiella pneumoniae
atgtctgagtataccaatgttacgaacggcacaaaccagcaggaactggcgctctataagaccattgtgaaaattgaaaacaaaacctttgaatataatggtaaaacgctttcgctttcaaatggcctcaaggctcaagctgttgtattcctggaagagcgtccgctctatatgtggatgtttacccctgtgtataagataactcaaagcattactgggccgatccatgactaa

SEQ ID NO: 250789 - DNA, 774 bp, Klebsiella pneumoniae
atgattgaagttcaacatctcaacctcgcgtttggcgagggggagaagcgtaaccaggtgctgtatgacgtcagtttccacgttaagcccggcgagatctacggtctggtaggagagtccggttccggtaaaacgacggtgctcaagtgcctggcggggctgtttacccactggcagggggaactgaccatcgatgctcagcccttagggcatgaaattagccgcgagcgctgccgtcaggtgcagatggtatttcaggacccctacggatcgctgcatccccgtcacaccattggcgatatcctcgaagagccgctgcagatccatcgtatcaacgaccgcgaccggcggatcaatgtgctgctggataaagttggcctcaaccgcgcctttcgcgagcgttatccgcatcagctctccggcgggcagcggcagcgcgtggcgatagccagagcgctgattcttgagcctcaggtgctgctgctggatgagccgacgtcggcgctggatgtgtcggtgcaggctgagatccttaacctgctggcggaactgcagcgggaggctaagctcacttacctgatggtcacccacgatcttggggttattgcccacttatgccagaaagtggcggtgatgcagtacgggaagatcctcgcaaccctgacggtcgatgcgctggtcagcggccaggcgcagatggcctatacgcagatgctggttaacgccagtcggcaatatacgcgcgaaatggcgcgcgaggtggcggaatactaa

SEQ ID NO: 250790 - DNA, 996 bp, Klebsiella pneumoniae
atgtgtataagagacagatttgatatagagacctttgactgggggtcagactattacaaaaaacatggcgtgatgatgccggaagaagggctgaacatgctgaaagcatttgatgccatttacttcggcgcggtgggggccccggatgtccctgaccacatcacactctggggcctgcggctgcctatttgccagggctttgaccagtacgccaatgtgcgacccaccaaaattctgccgggcgtcacttcaccgctgcgcaaccgcgggcctggcgatcttgactgggtcatcgtgcgcgaaaactccgaaggtgaatattctggtaacggcggccgtacccaccgtggtttacctgaagaagtcggtaccgaagtggcaatctttacccgtgttggggtgacacgcattatgcgctatgccttcagactggcacagtctcgtccacgtaaactgctgaccgtggtgaccaaatccaacgcccagcgccatggtatggtgatgtgggatgagattgccgctgaagtggcgcaggaattctcggatgtgcagtgggacaaaatgttggtcgatgccatgacgcaccgtatgacgttgcatccccagaccctggataccatcgttgccaccaatctgcacgccgatatcctttccgatctggctggcgcgctggcgggtagtctgggcgtagcgccgaccgcgaatattgatcctgaacgccgtttcccttccatgttcgaaccgatccatggttccgcattcgatatcaccggcaaagggattgcgaaccccattgccactttctggaccgcggtacagatgcttgaacatctgggcgaacgccatgccgctgcgctgattatggaaagcattgagtatgtgtgtgaaaaaggcattctgacgccagatgtcggtggctcagccaataccgcggaggtgacacgcgccgtggtgcactacattgacgctaaagctgacattgccgagaccgcataa

SEQ ID NO: 250791 - DNA, 1164 bp, Klebsiella pneumoniae
gtgcaaatcgtattacccaaagataacgatccgcagctggtgatttactcgctggcggcgctgggcaacctcggagtgttggacagtaaaacggtgcaaagccaccagcaggataacgactggggtaaccgctggctaaccacccatgaagccggttccgggccgtttatcctcgaaacctggcaggcgaaagatgtgctgcgcatgaagcgcaaccctgactactggcgcggcgaggcgaaaatgagccgcgtggtactgcgtcatttccaggagtcgcaaactctgcgcctgatgatcgaaaaaggcgaccttgatattgccaacaatatggcggtttccgatatcaacgccctgcgcagcgatccgcagctgaccgtcgatgcggtgcagcgcggcaccatgtactacgtggcgatgagcatgaaagaggcgcacttcgccaatccgaaagtgcgcgaggcggtgcgctatctgattgattaccagggtatcaataaagcgctgatgccgggctacggcgtgctgcaccagcggcctatcaaagcgggaatgccgtccacgctacccgatcccggctacaggctggacgtggcgcgggcgaaaaagctgctggcggaagcgggatatcccaacggctttgataccacgctgcgggtactctccgatcagccatttcttaacatcgctatcgccgtgcagtcgacgctgatgcaggcggggattaacgccaaaatcatcaccggcactggtaaccagatctacggcgcaatgcgcgagcgtaaatttgacctgctggtaggtcgcggcggcagcgggatggagccgcatccgcactccagcctgcgcgcgctggtctataacccggataacagcgataaggcgcgcctgaccaacttccagggctggcgtaccggtttttacgacccgcaactgaatacaatgattgaccaggccctgctggaacgcgatccgcaaaaacaggtggctgactaccaggccatccagacacgctacgaccagctggttccggctttaattccgctttcgcagatggttgattcggtcgtcgtgcgcaacgaggtacgggagtatcagccgcacccctccgccaccacttttctgcgtgacgtttataaagtccgcgaaggagagaaaggatga

SEQ ID NO: 250792 - DNA, 441 bp, Klebsiella pneumoniae
atgaacaaatttgcggcgcttctggcggcaggtatgctgctgtccggctgtgtctataacagtaaggtgtccaccggtgcggaacagctgcagcatcatcgtttcgtgctgaccagcgtcaacggccaggcggtcaacgccagcgaccggccgctggagctgagcttcggtgagaagatggctattaccggcaagatgtatgtatccggcaatatgtgcaacggctttagcggggaaggtaaagtgtcggacggcgagctgaaggtcaaatcgctggcgatgacccggatgctgtgccacgacgcccagctcaataccctggatgcgacgatcgacaagatgctgcgcgagggtgcgcaggtcgatctgacggaaaaccagttgacgctggcgaccgccgaccagacgctggtctataagctcgccgacctgatgcactag

SEQ ID NO: 250793 - DNA, 618 bp, Klebsiella pneumoniae
  misc_feature (610)..(610): n is a, c, g, or t
atgatgatgtcgctcaaccgccgcatccaccgcgcttaccagcgtacccgcgatgccaatttctccctcgaaggcctcaccggcttcaccatgtacggcaaaaccgctggggtgatcggcaccgggaaaattggcgtagcgatgttgcggatcctcaaaggcttcggcatgcgcctgctggcgttcgacccgtacccaagcgccgccgcgctggagctgggggtggaatatgttgacctcgccacgctgtacaaggaatcggacgtgatctccctgcactgtccgctgaccgacgaaaactaccacctgctcaatcgcgaagccttcgatcagatgaaagacggggtgatggtgatcaacaccagccgcggcgccctgatcgactctcaggcggccatcgacgccctgaagcaccagaaaattggcgcgctggggctggacgtttatgagaacgaacgcgatctgttctttgaagacaaatccaacgacgtgatccaggacgatgtcttccgccgcctctccgcctgccataacgtgctgtttaccggccaccaggcgttcctcaccgccgaggcgctgatcagcatttcggagaccactctgggtaacntggggtaa

SEQ ID NO: 250794 - DNA, 576 bp, Klebsiella pneumoniae
atgcccggtattttgtggttaaggcaacgctcggctatcaccgggtcaatgcctatcgcggccatctgggtgcgcatggtgcgccgcaggtcatggatactgaacggctcaacgtcagccatttctttaagtacggacggcataaccatattcagcgtggcacggctaacgtgggccgttgttctggcgcgtctggccggaattaaccagcgactatcaccggcgaaaagtcgaatctctttaatccattcgatcactggcgccggcagcgggatatcgatgtcatcaccattctttgcccgcgagccagggagatgccacacctcgttatcaaggtcgaactccgaccattcggcggcacagagctccattttgcgcaccccaagcgccagaataatcttgaaggtcagctcattttctctgctgattccacgcccgcggcgtagcgccttgaagaacataatcagctcatcacggcttaacgcgcgtttgcgcccctgctccttcccgccagcgtctttggagccaaaggatatcgccgggttaacctctatcattccgcgtaccacagcgtaa

SEQ ID NO: 250795 - DNA, 645 bp, Klebsiella pneumoniae
atggctcgactggatctaccgtgcattggttctgctggtggtcgcctgcccgtgcgcactggtgatctctacaccggtcagcatcgtcagcggcctggccgccgccgcccgccacggcattctcatcaaaggtggcgtctatctggaagaaggccgcaagctgcgctggctggctctggacaagaccggcacgatcacgcacggcaagcccgcacagaccgactttgtcacatggggcaatgcactcgcctcggacagccgcagcatcgctgccagtctggcggcccgctcggaccatcctgtatccaaggcggtggcacaggccgcgcagacggacggggttgccttgctcgacgtggccgaattcaacgcgctgcccggtcggggtgtgcaaggccaaatcaacggtgcgacctaccatctgggcaaccaccggatgctcgaagagctggggcagtgcacaccagagctggagcagcgcatcgctgcgctggaaaccgctggcaagaccgtcgtgatgctggtgggcgcaaaaggggtacatggcttattcgccgttgcggacaccatcaaggacagcagcaagagagccatcgccgagctgcatgctctgggcatcaacaccgtgatgttgaccggcgataa

SEQ ID NO: 250796 - DNA, 786 bp, Klebsiella pneumoniae
atgtttctccgctccaacctccagcaggcctcctttaacttcgaacgtattcatggcctggggttttgctacgacatgatcccggcgatcaaacgcctttatccgctcaaagccgatcaggtcgcggcgctgaagcgtcatctggtgttctttaataccacgccggcggtgtgtggcccggtgatcggcgtcaccgccgccatggaggaggcccgggctaacggcgcggccattgacgatggcgctatcaacggcatcaaagtgggtctgatgggcccgctggccggcgtcggcgacccgctggtctggggcacgctgcggccgattaccgcggcccttggcgcctcgctggccctctccggcaacattctgggacctttgttatttttctttattttcaatgcagtgcggctggcaatgaagtggtacggcctgcaactgggcttccgtaaaggggtcaatatcgtcagcgatatgggcggtaacctgctgcagaagctgaccgaaggcgcctccattctcggcctgtttgtcatgggggtgctggtgaccaaatggaccaccatcaatgtgccgctggtggtttcccaaacgcccggtgcagacggcgccaccgtcacgatgaccgtccagaacatcctcgatcagctctgccccggcctgctggcgctgggcctgacgctactgatggtgcgtctgctgaacaagaaagtgaatccggtctggctgattttcgcccttttcggcttaggcattatcggcaacgccctcggctttctgtcctga

SEQ ID NO: 250797 - DNA, 144 bp, Klebsiella pneumoniae
atgatcgatgatatatcgagctgccagttgggtggtcaccacgctatccactttgccaagattgagactactcagagcggtactggtattctcaacgatgatccaatggacgtcgggatacttctgaatcagcttatcccgtaa

SEQ ID NO: 250798 - DNA, 435 bp, Klebsiella pneumoniae
atggacaggcgggtcctgcttcggctgaaagccattgacgccctgcagcggaaggaatctgcccaggcgctgtatacctacatcgagagccttccccagaatcccgcacctatctccatgaaacgtatgcgggaccggctgaatcttacctcaaatgtctatacgcagaaccacacggtccgaaaggctatggagcaacttcgggatatcggctatctggattacaccgagtttaaacgtggccgggcgacttactttagcgttcattatcgcaatcccaaactcatcagcgggacggtgaaggtaccgcgcaaggaggaagaagagaaggcgccggagcagaattatgacgaagtcatcaaggcactgaaggctgcaggcatcgatccgcagaaacttgctgaagcgctatcggcgatgaagccggaaaattga

SEQ ID NO: 250799 - DNA, 390 bp, Klebsiella pneumoniae
gtgcgatacaacccctatcaggatgtggtaggcgtctggactgtctgctatggccatactggcaaagacatcatgctcggcaagaagtacaccgaggctgaatgccgcgcgctgctcagtaaagacctgaacgccgtcgcccgccagattaacccatacatccagaagccgatccccgaaacaatgcgcggggctctgtactcgttcgcctataacgtcggcgctggcaacttccagacctccacgctgctgcgcaaaatcaaccagggcgaccagaaaggtgcgtgtgaccagttgcgccgctggacttatgccaagggcaagcagtggaaaggcctggtaactcgtcgcgagattgagcgcgaggtttgtctctggagtcaaaaatga

SEQ ID NO: 250800 - DNA, 1104 bp, Klebsiella pneumoniae
  misc_feature (251)..(251): n is a, c, g, or t
gtggttgccgaagagcaatgggatttttacgagcgcccgccgctgtcgaaagcggcattgctggaggccgaaccggcgctgccgcggttattcagcgccgaggtgcagcaggcactggatctgcgctggtaccgcccgctgcgcgcgaaatcgatcgaccggcaaaataaaaccctggcgctgagcaacggcgaaacgctggcgtacgacctactgctgatcgccaccggcggccgcgcgcggctgccgtncgaggcctgggggcagcatcctcaggtatataccctgcgccactggcaggacgcgcagcgtctgaagcagcggttggcatcggcaacgcggctggcgatcgtcggcggcggctggattggcctcgaaatcgccgcctcggcgcgcaaaagcggcgtagccgtgaccctttatgaacagcagccggcgctgtgcatgcgctcggtcagtatggaggtctcgcaggcgctggatgagttgcatcgcgggcagggcgttgatattcgccgcggctgcggcgcgctggagctggaagatgataacggcttgccgacgctgcactgcgacggccagcgggaaaccttcgatgcggtagtggtggggatcggcgtcgatctgaatctcgaactggcgcgcgatgccgggctcactgtcgatcgcgggattgtcgttaatgcccaagggcgcagtaacgatccggcgattttcgccgctggcgatgtcgcccagcaccatcagtacggtctgtgcattcagtcgtgggcctttgcgcaaaatcaggccatcgcgacagcgaaagcgatgctcgatccacaggccagcggctacgacgaggcgccgtggctgtggtcagatcaatacgatcgcaatatccagatcctcgggatcccgcaagcgggcagccggaccattgtgcgtgacgagccgcagggcgcgatctacttctccctgaatgccgatggacgcttaactcagctggtggccttcaataatgcacgtatcgtgaagctggcgaagcgctggatggcggcgggaagggatctctctaacgtcccgctcgctgacccgactttctcgctgatgtcattgcgataa

SEQ ID NO: 250801 - DNA, 747 bp, Klebsiella pneumoniae
  misc_feature (619)..(619): n is a, c, g, or t
  misc_feature (623)..(623): n is a, c, g, or t
atgtctaaagaacgtcgtctctcaagaatattcgcaaaagacggtaaatccgtgaccttagcgctggatggctactatttttccacgaaaacaaatggtattgataatacgataaatcagctccctgctctggtggaacacggcctggattgcgcgctcgtcacgtacggcatgttgaagaattatcgggaagcattgaacagcgttcccgttgtgttacgcgtcgacagcacggtcagtatctttgacaataccgttcccgatactacccccgttttttccgtcgaagatgcgcttaaagtcgctgccgagggcgtggtctgcatgaccttccccggcgccttcaatgaagaaaaaacccacattatggcgatgcaactcgcacaggcagcggatcgctggaatgtaccgctgattgtcgaatcgctcccgtatggttatcccgtcaccagcgatgactctaacaatccggccatcatcgctgcatcggcccgcgcagcggtggagctgggcgcggacgtcatcaaaacgcgttttaccggttcaccagaggaccgactgatcgttgaagctgctggcgtgccggtgcttgctttaggagggccaaaaaccggcaatngacngttacttcaaatttgttcagcactgtatgcagatgggtgcgaaaggcgtggctgtgggacgaaacattacccaggatccgcagccggcgaaagtggtagcaggtctgaatgccatcatccatga

SEQ ID NO: 250802 - DNA, 273 bp, Klebsiella pneumoniae
atggctaccgtgcttaacgtggctatcggcaaaaacgcgaatatgctcagcgcgcagcatgctgcggtagcgcagcgccttagcggccgccccttcaataaatccttcgttggcgatataggcgttggcccactggtttacgcggacgaaatcggccccgcccgccagggcgatcgccatcgccgggatcgctgcgttcgccaggacattaatgcccagcggcacaccaaaacgctcgcgaactttctcggtaatcaccgccatcagcgctga

SEQ ID NO: 250803 - DNA, 741 bp, Klebsiella pneumoniae
atggcgcaaccggcgcgcatcgtatcactgattatcagcgatgtgcctggcgataatccgacggacgtagcgtctggccccaccgttgccgataacagcgcaccacgtgatgcgctccgggtactgcagcggtatggcattgcgatcccgaagcccgttagcgaacggctaaaccagccggccggcccggtggaaaacgccgcgacaggcgaggtcaggcttatcgccacgccggcgatggcgttagcggcggcggctctggccgcacgacaacatgggttcaccccccttattttgggggatgctatagaaggtgaaagcagggaagtggcggtggtcatggccggtatggcgagatcggcgaagcagtatggtcacccgatttcagggcctgctgtgctgttgtcaggtggcgaaaccacggtgacagtaaacaacactcagcctggaaaagggggccgcaataccgagtttttactcagtctggcctgtgcgctccagggggaacacggtatctgggccatggcgggagatagcgatggtattgatggcacagaagatgccgcaggtgcgatcgtcttcccggatacgcttgcgcgcggcaagctgagcggtcttaatgcagtgcaatatctggatggccatgatagttactgctattttcacgcgcttaatgatttgctgatcaccggcccgacgttaaccaacgtcaatgatattcgggcaatattgattgcctga

SEQ ID NO: 250804 - DNA, 357 bp, Klebsiella pneumoniae
atgctggcccatcgcactcagctgttcttcttccagcagcccatcgctgctggcaaccaccgcctctttcaggccaaatttttgcttgagctgttgctcgagccacaggttttcattgtagtcatagttgatggcgatggtaacaatgccctgctcgcggccgcgcttcagcaggcgactgatggtggtgcgatagatccccagctcgcgagcaatttgcgcctgagtcatatcctgctcgtaatagagctgggcgattttgacaatcaaccggatatcgtcactgttttccatggtcatctgcaggctcctgcacatttgtgcaaatcgcgggtttgtgctgttgatctgatataa

SEQ ID NO: 250805 - DNA, 636 bp, Klebsiella pneumoniae
atggcgaaggtaggcttccggatcgataccattcagcctgcacgtcccgatcagtccgtacagcagggctccgcgctcaccaccgtggtcgctgccgaagaagataaaattctttttcccaagacagacggcacgaagggctcgttcggcagcgttgttatcaggctctgccaggccatcttcacagtagtagcacagcgcatcccactggttcaggacataagcgaacgcttcgcccagacgggactttttcgacagcgtctcatttttttctaccagccattcatgcagcgatgccagcagtggtttgctttgcgattgtctggctgccagacgctcttctgtcgtgaggccgcgtatttcttcttctatcgcgtacagctcaccgatacgtttcagggcttcttctgctgtcgctgtgtgagtgcttatatagacatcatggatttttcggcgggcatgggcccaacatgcggcttctgtcagcggccctccttcacgttccggactgaacaaccgatcgtagcctgcgaaggcatccgcctgcagcacaccatgatagtggcgaaggtgttgctgaggatgttttccctgccggtctggcgagaaggcgaaccatgccgctggcggatctga

SEQ ID NO: 250806 - DNA, 315 bp, Klebsiella pneumoniae
atgccgtcggatgcgctgagaagtcaaaagatggaaaacagggagagtgaggcacgggcaggcgaagcggaaaatttacaaaactctcaacggggttcaacccaaaataacgaactgactcccgccactggttcgcaggcagtgagtgaaggcgctccccgggaagaggggcaacaggcagaggagaacgacgtcatgggatcatccggtgtcagtgagtcggttcctgcccaggaaacggtttctgctacgaaacccgccgaagataatattgtggggaatcccgcacaagaattggtaaagacagaggaatag

SEQ ID NO: 250807 - DNA, 213 bp, Klebsiella pneumoniae
atgcaccaccatccggttaaatcttcccgatttatctccgtcgcctacgatgacgcctccgccacactggaaatctatttctatcaccagccgccattacaatataccggggtcccaccgcgtatttttcatgattttttacaggtggtgtcaaaaggccggtattatgacggggtgatcaaaggaaaatttcccgaacgcaagctacgttaa

SEQ ID NO: 250808 - DNA, 294 bp, Klebsiella pneumoniae
atgcatttcaccacgccgctgccggtaatcgcggcgatgagctttagcacctttatgtggggcaccggcgcgccaaacattttcgcgctgctggctaaagcgacccatccacgggtcagcgccacggcgggtggaattttcaacgggctgggaaactttgccggggcgctatcgccggcggtgatgggcgcgcttatcgccttcacccatagcatggattccgggctgatttttctggcggtgatggcggcggtgggctgcgccctgttactgccgctgctgagacgctactga

SEQ ID NO: 250809 - DNA, 393 bp, Klebsiella pneumoniae
atgggtggcggtaaagctgctgtaggtgtcgacgattttggcaatcagcaggcagacatccttcagaccgtgaatatccagatagcgcgtgttgatggggccaataatctccagcagccgctgaatatggccggggtgaaggtgctgccagaagttcgcattttcagcgacctcgcacaggatatcgcagagcggcggatcgatctcccgatgcaaagcgacgaactgttccaccaccgcccgcgtgggccaggcggcaacgtggctatcggccggcagcagccgttcaaaggcatcagcgaaatagacaatgtgctgttcgcgggagccccggtggttcgggctaaaatggtgatcgcgaataaagggaacgatgggctggaaggtcgctaa

SEQ ID NO: 250810 - DNA, 180 bp, Klebsiella pneumoniae; identical to SEQ ID NO: 227565

SEQ ID NO: 250811 - DNA, 369 bp, Klebsiella pneumoniae
gtgcgggagcacagctacatgaccggcgaacttctcagcgactatagcgagctcggcgacatcattaactgggcctcgaatcatcatgaaaaaatggacggcagcggctaccctctgcatctcgaaaaggagcacctgaccctcgccgaccggattatctccatcgccgatattttcaccgcgctgaccgaagatcgcccttatcgtaaagggatggcctggcaggaagccttacagattatggaagcggatgttataaatggcgctctggatagcgatgtcttcctcgttttgcgccaccatgcggaaacgctacacgccatcattcttcagacccttgcccctctgcatagcgagcgccgcctctga

SEQ ID NO: 250812 - DNA, 384 bp, Klebsiella pneumoniae
atgttgaagatgcagatcatccaaaaatgcggactcacaaagagctcgcgacgcgcgctgcggcgcgcttcctgcgaggttttatcgctgctcgctctcgcctccagttgcacgccgcgcagcccgatgcgtacaaaaatcagcaccggtatcgtcagcatcgccatcacgaaaaatgtgctctgccagccgaaggtattgagtagccaaattgacagcgggaaacccagcgccgcgccaaccggcgtgccgagcagccacagcatggtggcgcgggcctgtagccgctgcgggaaggtgtggcgcaccacggcgaacgccaacggaaacagcggcccttcagcaatgcccaacaggatgcgcagcgtcaccatcagcgcgtag

SEQ ID NO: 250813 - DNA, 273 bp, Klebsiella pneumoniae
atgatccaacttgccgctgttaagcttttccgccgcctgttcaacggtggcgatgtccagcgtgacgcccgctggctttgccaggttaagcgacatcgtaatgaaggcatccgccgcggctttggcgttggcgacgatgatatggtcgatatccagcgctcgggtccaggcaaaaaccacctggccgtgcagcagccgataatcaatgcgcacgagtttaatcatgagattctccctgtgggtcagaggatggttgtgttattagaggattga

SEQ ID NO: 250814 - DNA, 309 bp, Klebsiella pneumoniae
atggtcgccttaacgctggtcaccgtggggattagcgcatcaaaaccccctttgtggagcatgccaaccctgttcctcagcggcccggctgcggccgctggcattgccgctatcaactccatcggcaacctcggcggtttcgttggcccgatgatgattggcgtgatccgcgagcaaaccggtagttacagctggggcctgtactttgtcgccggattgctggcgctctcggccctcgtggtcatgattctttctgccagagcgaacagatcgccgacggcagagcttccacatcctcatactcattaa

SEQ ID NO: 250815 - DNA, 384 bp, Klebsiella pneumoniae
atgctttttcggcgtgagcgcaaggtatttcacgccgtcggcattcatgtctttataggacgctggcaccagagcaatgccgagtcctgcggcaacaaaactcaggatagtctgcttctcttcagcatactgcgcgatgacaggcatgctgcccccctctttgaaaatattcattgtcaggtcatggctgtgacgccgggtgcgtctttccggcaagataacaggctcgtgccgaaagtcatcgatactgacttcatcataactgaccagccggtggttagtgggcacggcgagcacgcaagtttcattggcaataaatcgcgttgtcagcatggcatcaatgtgttccggcgggcgcacaaaaaccacatccagccaccctga

SEQ ID NO: 250816 - DNA, 381 bp, Klebsiella pneumoniae
atgcagtcccagcactttaaaaccatctcatcctactgggacagcctggatgtggcgctggtgggtattggttcaccggccattcgcgacggcgcaaactggcacgccttctacggcagcgaagagagcgacgatctcaacgcccgccacgtcgccggggatatctgttcgcgtttctacgatattaacggcgggttagtcgataccaatatgagcgaaaaaaccctgtcgatcgaaatggcgaagctgcgccaggctcgctattccatcggcatcgccatgggggaagagaagtactctggcattcttggcgcattgcacggacgctatattaattgtctggtgacaaacagagaaacggctgagttattactgaaataa

SEQ ID NO: 250817 - DNA, 309 bp, Klebsiella pneumoniae
ttgccagggggtgatgatctgtatacgcgcctgactaaagtcagaatggaataccgcactgaagcccgcgaggtcttcagtgcctttatcctgactggagataacgggaccgtcactaaaccgcaaccgcaggatggcatgattttcatcatccagggtttccatcagatcggtaaaatatcgtccatctactacgctgaaaaccgtgatgccattaccggcaccagaggcgtagatgatagccgtctgatgcggaacgctgcgggtaccgttaatcgccgttatttccagactgcccatctctgctga

SEQ ID NO: 250818 - DNA, 276 bp, Klebsiella pneumoniae
atgtcgaccagcatgctggtgaacaaaatgaaagcagaagcccagcagcgtgcgctggcgctggaaatctatgcggtggcggtggcggaatttgaacgtgaattgccacacgccgacgtcatcctgcttgggccgcaggttaaatatgaagccgggcgcctggccgcgctggccgcgccgcagggcaaggcggtggcggtgatcgatatggctgactacggcatgatgcgcggcgccgcggtgttggataaagcgctagccctgctcgaacactaa

SEQ ID NO: 250819 - DNA, 228 bp, Klebsiella pneumoniae
gtgggggagacgctgaacggctatctcgcgccgctgcgtcaggataaagagacgctggcgctggtaaagcagattaacgccgcgcgcagcgaaagctaccagcagcttgcggatgacaacaatctgccggtggatgaagtggcgaaaatggccgggcagaagctggtggcccgcgcgcagcccggggagtacgtccagggattgaacggccagtggctgcgcaaataa

SEQ ID NO: 250820 - DNA, 222 bp, Klebsiella pneumoniae
atgaatgttgcaccgtctggcacactccatcacaaaatcaagatcggcgctatcatcgaagccacttatattatcaataagggagccggaaaagagacggtcttcctggagtacgcaggcgataccaagacgatagttattcaaaccaatctttttaatctccagattatccgccagtatttcgccggaatccggcgagagcagtccgcacataacttttaa

SEQ ID NO: 250821 - DNA, 162 bp, Klebsiella pneumoniae
atggtcgatccggcgacgcaacgcaacacccatacgctacacgccgaaggattgttcggcgagtttcacctggagctgagcggcctgccgctcgccagcaatccgaaaacatcgaccctcgcggcactgagcgcgggacgcgcctgccgtgaactggcataa

SEQ ID NO: 250822 - DNA, 306 bp, Klebsiella pneumoniae
atggtcagcagtatgctcagcgcgatcccggaattcgtcacccgcggcctgcagattgccggtggtttcattgtcgtcgtgggctacgcgatggtgctgcgaatgatgggcgtgaaatacctgatgcccttctttttcctcggttttctcgccgggggttatctcgacttcagcctgctggccttcggcggcgtgggcgtcatcatcgcgctgatctacatccagctcaatccacagtggcgtaaagctgaacccgccgcctccactgccccctctgcccccgcccttgaccagcttgacgactaa

SEQ ID NO: 250823 - DNA, 972 bp, Klebsiella pneumoniae; identical to SEQ ID NO: 214758

SEQ ID NO: 250824 - DNA, 810 bp, Klebsiella pneumoniae
atgagcaagccatttctcaaatgggctggtggaaagtatacccagctggctgacctgttcgtgcatatcccggcagggaaacgcctgatagagccattcgttggtggtgggtcggtattcctgaacagcgaaaagcacgcagattacctgctggcggacgttaatccggacctgattaatttgtatcagatgttagcggtggtgccggatgaagtggaattgaaggcccgctggatgttcgagcacatgcggtcaccagatggttatgagctgatccgttccgagttcaacgctcagacgctggatgctactgaacgcgcagctgcattcctgtatctcaaccggcattgcttcaatggcctgatgcgctacaaccaggcgaacaagttcaatgtgggctggggaggctacaaggctccgtattacccgatggatgagatgaaagccttcgcggctatggcgcataactgcgtattcatgactgctgattaccgtcggacaatcagcctggccgggaaaggggatgtggtttactgcgatccgccttacgaaccgatgccgggaacaaccgggttcaccgcctacgccgctggtggttttagctgggataaccaggtggacctggcgaagcaatgtgtatctgcctttcaccgtggcgctcgggtagtgatttctaactcatctgcaccgaaggttctcgacctgtaccgggagcatggttttaacctgcaattcatcaaagcgcgccgttcgatctcctgcaaaagcagtacgcgggaagtcgcaaaagacgttgtcgcgatcctttaa

SEQ ID NO: 250825 - DNA, 972 bp, Klebsiella pneumoniae; identical to SEQ ID NO: 214758

SEQ ID NO: 250826 - DNA, 186 bp, Klebsiella pneumoniae
  misc_feature (168)..(177): n is a, c, g, or t
atggttgttcatatcaataagaatactctaccggagcaagaaattcccttttatgagccggatgatgacccaaatggcagtcgcgcctgcataaatcccaaactggttgaacaacttggactgaaacccggggtactgaaagaccttgcttggtggcataaggggggnnnnnnnnnngaagtgtga

SEQ ID NO: 250827 - DNA, 261 bp, Klebsiella pneumoniae
atgagttcagatgaagccgtgaagcaatgggtcagagaagtaactgccactgatgaaggcctcgttaacctgttgatacgattacagaccagtgtcttcagctctcacagaggggcatatcgccggattgcgcgtgaccaggtcagtccgttctttgatgactggtcagcagtcgaagagaagctgaaggttatgctgtccggcaacgagctgacgccggagcaggaagaactcaaaagtgcactgggaaatgacgactga

SEQ ID NO: 250828 - DNA, 687 bp, Klebsiella pneumoniae
  misc_feature (586)..(595): n is a, c, g, or t
atgaagacgttcagggcatccaatgcagactcgtttctgacgcttgcagactggctccccggtatcagcggacatgatgatgcacatctgaatctctttgagcccgtcagtgaggattttcgtcatatccagacgaccggtaaacgactcagcagtctgacgcactggcgatattattatgccttctcctcaccccagaatgttctgcccactgatttctttaatgagctttttaagcaggcaggcgtaccggaaaaccagcagcagctctctgaaaagctcctttcaaaaatcaacagtgtgggtagtctgtccggaacctggttcgaacatatactaagcaggctgacaccggggctgattaaggaacgtaatttcgaagagtgtgctgggttgattcagtttttcttcgatcacacggatgaggtcagcactcgcttccggatccgtaacacatggttttccctgcgtgaaactggcattaatcaggttgtacggcatctgctgaagcatatgcagaatattgatgagaccagaacagtcacgcagatggaaaagctgattgttactggcgcttcgccgttcnnnnnnnnnngatcttatctgggaacacggtcttgctcaaaatgcagtaccttccccttcagacgctcttttcagtcgcgatattacggaacggttgcgtga

SEQ ID NO: 250829 - DNA, 279 bp, Klebsiella pneumoniae
atggatatcgcccatgggctggtgggtaaaacggccattcatcctgatcagattagtgtgatagaggaggcgcttaaagtgtctcctggtgagcattcagatgcgttacgaattctgaattccacccaggcagtcttcaaatctcagggagcgatgtgtgaaccggccacccatcgccggtgggctcaggggatcctgggacggggacaggtatacggtctgactacggggcaaaatccggaaggaatcaggcttattccagtttctaagcagcactga

SEQ ID NO: 250830 - DNA, 510 bp, Klebsiella pneumoniae
  misc_feature (477)..(486): n is a, c, g, or t
atgaaaaaacaacccaacccatgggaactcggtgccacgctgtatatgcctgccacacgcaaggatatcgctgaggtcgttctggaagggaaaataccggggctacgctctctggttgtctgcctggaagatgcggtcagcgagcatgacatccctcttgcgattcagaatctttcactgtttttgaagcaattgagacacgcaagagccgtcaacgatgatgagaagtacccactggtatttatccgcccacgtcaccctgatatggggagatggttaacgactaatttcgacctgagtgcagttgatgggtttgtactgcccaaattcaccctttccacgctcccggtttggtgggacatcatggcaggaacatcattgatgatgatgccaacgcttgaaaccgaagaagtctatgatgttattaaaatgcaggcgctggcaaatgaactttcgagtcatgactgccgtgaccgnnnnnnnnnnacagtcctatgggttatgtcataa

SEQ ID NO: 250831 - DNA, 369 bp, Klebsiella pneumoniae; identical to SEQ ID NO: 227457

SEQ ID NO: 250832 - DNA, 351 bp, Klebsiella pneumoniae
atgtgctttaatctgccgctcgatattacttacctcctcgcgcagaagctgcgccatacgcctgcaggaactgataatatctgcaggtgtgtctgtcgacaggtatttttccagcctgttctcctcacgcagggcatcacccagcagaacatcacgccgtcgcaggagtgcagcgagatatctgatttcgggggacggcggctcccagtggtgtggcttcttaaggaatgcgtaacaggcaagcatatacgcatccaccttatccgtctttgtcattattcccatgccgcgtgcaaactcccgactgcggtgagggttggccagagaaacccggaaaccggcgtcatgtaa

SEQ ID NO: 250833 - DNA, 309 bp, Klebsiella pneumoniae
gtgcttgattatatagatgttacccaacggctgcagaaatacttacagaatgcgtctgatcatcgctgtattaaagtgttcagaaaatcaattagctcgctggacagttgtgtcaatattaaacttacgaaacaggaggactctcttctcccctatatcatctcaggtttaaataataagaaaattgctcaggccaccgaccttagcaatatgatgatcagtcactatcggagaaacatctaccagaaactcaatgtacgcaatattgcaggcctgtatcatttcctgcactccctggaggggggataa

SEQ ID NO: 250834 - DNA, 660 bp, Klebsiella pneumoniae
atgagcatgaaatggtatgacctagcaaagtccctgatgaaaacgaagggcataaaccaggaagagctggcagagcatctcgggatcaccaaaggtgccgttagtcattggctaaacgcaaggagagagcccagtctggaggacatagctaaaattcttcgcttcctcggcaagaataatttttctgtgggtgctggcggcatgataattgatgaaaacatcaagggtgatgttgagtacgttgggccctataagcgcggcaacgaatatccagtgcttagtagtgttcaggctggatcgtggcgagaggctatagaaccttattccatcaaagatgttgatctgtggcttgagtcgaatgcacatatccaaggggaagcgttctggctgcttgttgaaggcgattccatgacgtcaccagtcgggctaagcattccagagggtacctacgttttgtttgataccggccgagagccagtaaatggcagccttgtgatcgcaaagctatccgaatcaaacgaagcgacattcaaaaagctgattattgatgggggacagaagtacctgaagggcttaaaccctcaatggccattggttcccatcaacggaaactgtcgaatcattggtgtggctgtagaaactaagttgagacttgtgtga

SEQ ID NO: 250835 - DNA, 642 bp, Klebsiella pneumoniae
atgggaagtgacaccgactgggatcggctggaaaacgcgctttcagcctctctggaagctcagggattacaatggtcggtaaatcccggtgaaggggctttctatggccctaaactggagtttgtgttgcgcgacgcgatcggtcgtgactggcagtgcgggacgctacaggtagatatgaatctgcctgatcgattcgatattggctacattgccgaggatggttcgacaaaacgcccggtgatgttacacagggcgctcttcggctctcttgagcgttttaccggtattcttcttgaacactacgctggtaaactgcccgcctggctgtcgccggttcaggccgtggtcatgacgattactgataaacaacatcgatacgcggagcaggttctgaaggcacttcgccggaaaggacttcgctgtgagaccgatcttcgtaatgaaaaaattggatacaaaatccgggagcagacgctggcccgcattcctttcctcctgattattggcgatgcggaggaaaatgcggcgcgtgtcaccgtacgcgatcgtacggggaaatgtatgggaacactattactcaacgaagcagctgactgcattgagatgtgttgccgaccgccggaggtgcgccttgattaa

SEQ ID NO: 250836 - DNA, 306 bp, Klebsiella pneumoniae
gtggcgtatctgcgccaggtcttcttccgtcagaccggtcattttcatgacggtactgcggtcaataccgctgctgagcatggtacgggcaacttcgagcttgccttcattgcggcctttttcgataccacgttgttcaccgagctgaatccccttctcgatgcccttctgttcaagctgttgagcgatggtcataagtgcgtccccgtgttgcggcacacgcagtgccagttcgcgtacaaaggcttcggcgtcggctgtttcgcctgcctgcacgatatagtgtaccagcgatatgacctgtga

SEQ ID NO: 250837 - DNA, 312 bp, Klebsiella pneumoniae; identical to SEQ ID NO: 235322

SEQ ID NO: 250838 - DNA, 264 bp, Klebsiella pneumoniae; identical to SEQ ID NO: 225043

SEQ ID NO: 250839 - DNA, 123 bp, Klebsiella pneumoniae
atgttcaaaggtgtagagatacgcctgctggcgaagaatatcctcgtgacaacagagcacaccgtgtctggctgcgtttttcagaagcgcttcataattaagcagtacttttccttcaactga

SEQ ID NO: 250840 - DNA, 369 bp, Klebsiella pneumoniae
atgaatcaccgcgttaacgtcctcttcaggcagagctgccagcgtatcggcaatcttcggcagtacgctttccagcactgcaccagagttacccgcagcggcctgcgctttcagcgtggaaaattcgctaaccagcccggccagcaccggcagcagtttgcggctaaccttcaactgctggaaaacatcgagctttgcggtgcggtatttaacgcctttgatttcaaattccatctgttaaaactccccaagcagctgatcaatcttgccgcagtcaaagacccaggaaaccgtattgccgactttggcgttagcgtgatcgggttgcttctggaaagcacaagaacgcgctgtagtggtatcacctga

SEQ ID NO: 250841 - DNA, 276 bp, Klebsiella pneumoniae
ttgttcttcagcataaaccagatttatatctacgcggattatctgtccatcaggttcgatatccgggcgggcaatatccgccataatcttgtgcgcagctatatcatggctctcctcatctggctgtttatttgcaatgacctgttcaatatcagaaacaacagcagcattttttttcattacctgctgcgcctggagtctcttcataaaaggtttcttggccattacttacctcctgcgagcataataattttctgggtaagttctttatactga

SEQ ID NO: 250842 - DNA, 327 bp, Klebsiella pneumoniae
atgaatggtgactgcgaatacgagcttcttaacgtctgcggccacttttgtcagatcaattttgacctgctcatcgtcaccgtcgccttcaccggtacggttatcaccggtatgagtaacggaaccatcagcagatttcaggttgttatagaaaatgaaatctgcatcgccacgaaccttgccattggctgccagcagaaatgcggaagcatcgaggtcaaagtcctgaccgtccgtagagcgtgcatcccagccaaggccaaccaggacatttttcatgcttggcgcggttttgctcagggaaacgttgccgcctttagagagtga

SEQ ID NO: 250843 - DNA, 594 bp, Klebsiella pneumoniae
atgctgttatttcattttaaaaagcaacgcggagctgagcatctaattctctgcggtcttgccatctcttttttgttcggggcgctgactagttattttattttttcgggcgatcagcgagccgccagctcagtgcttttctggtcactgggtggcctgggattagccacctggaataatttgccttttgcagtgttcagcctggtattgctgtttgcctttgtcctgttgcggtggcgctctctggatggtgtgctggcaggagaacaaacagcgttgtcgctggggattaacgtgagtcgtctgcgcatcgagatttttctttgttgtgcactggcaacatcgttgatggtggcattaaccggcgtgattggatttgttggcttaatggtgcctcatctgtgtcggcattttgcaggagttaagcatctgttgttgttacctctgtgtggcgtctggggtgcaatattactgtgtgtcggcgatatagtcagccggacgatactggcaccacaggaactaccaattggcattattacggcgggcattggagggttgtttattatcatgttactcgcgcgaaactcgccctag

SEQ ID NO: 250844 - DNA, 192 bp, Klebsiella pneumoniae
atgggcattgaggattcccgggataaaacgaccgagcgtttaaagctggccgctcagtctgcgcttgaaggtaaggcagatgtggcgtcgatgcatcttgaagccgcaggccagattgcgcgtgatgcctcaaaggctgtcattgaggcaggcgatcgtctgaccccactatctgaaaagacagagaaatga

SEQ ID NO: 250845 - DNA, 201 bp, Klebsiella pneumoniae
atgctctctttgcacctgttgcaaatcagcctggtctatatcaataccctgttgattcaaaatgtgctgacagagccggcctggcagcagagaatgacagaagaagactggcgtggtctgaccccattgatataccaccatgttaatccgtatggacgtatcgagctgaacatggatcaacggctggcgctggcagcctga

SEQ ID NO: 250846 - DNA, 129 bp, Klebsiella pneumoniae
atgtcgacccagcactttactgacaaacagaaatgcgcgttttggattccgccgttcggcgatatcaaagagatcagtaagaggataatcggtttcctcgctgcttacctcaattcgcccacaggataa

SEQ ID NO: 250847 - DNA, 273 bp, Klebsiella pneumoniae
atgaatgatgatgaagccgcagcacttgccaccacgctgaaatacctggggaatgtgctgggtttgcttgaacaatcagcagatgcctttttgaaaaaccgcagtgatcttcatcctgcagaactgcaacttattgaaaggttaattcaccagcgcagtaaggcacgacgtatgggcgaatgggacaaggccgatcgtttaaggaatgaattagcggagcaaggcattgaacttgaagatgtcggcgaaaatacctcatggcgtttccgataa

SEQ ID NO: 250848 - DNA, 240 bp, Klebsiella pneumoniae
atgactcacttcatcattgagcaacgacagcatcatgatttcttcggttcgttcctgtttcagccgttcaacatcctgttttgtcagactgatatccggctggagctcagttatctccctgcgcaagcggtcgataaccgtttccagccgggtaaatttatgaatgacagggatttgccaggtgaaccccagggagcgaatttgctcagtaacgatccggatattacgggacacctgtaa

SEQ ID NO: 250849 - DNA, 132 bp, Klebsiella pneumoniae
atgagtgatagcttttacagcctcagcaaatttgtcgcgaagccggttgatttcacccaccagcgacatcacctgatcatgattgtttctgaccacaacgaatccgggatattttcgggtgattttggttga

SEQ ID NO: 250850 - DNA, 498 bp, Klebsiella pneumoniae
atggtttgccgtgcctttgatggtgatttcctgccaggaaattccctgaagattttcgacagcaccgatctggatcccttcggcttcaagaacaggtccctgttcgatgtgcagttcaatgtattcatgagggacgatcgagccgggctccaggtctcccgcatagccaatacgctgcagctcatcacccagacgtgtgccatcagtgccgacagtgtccaggattttcttcagcgagatcccccctgcatagacgagcgatcccatcatatcgggttgataacggataccctcttcgtttgtgaatgcgccgacagtaatcgggcgggaaggtttgatcccggcttttctgaaagccctgacgacagccaggccggacaggacaccgtaacaaccatcgaaagcgccggcgtttacaacggtgtcaatatgggagccaatcatcagtggctgcttttcgttagcactatctaccgcaggcagtgtgccataatatga

SEQ ID NO: 250851 - DNA, 360 bp, Klebsiella pneumoniae
gtgccgacggacctgctgatcccgccggagcagttctctctgctggcaagcaccatcgtgtccagcgctggtaaccagtcactgctgacctatctggaaaccaacaccatcgcataccaccagaacgggcgccctctgaacatccgtccggtgaaatgggcgaaaggtcgtggcgtgtcgaactctgatcgcatgatgttctacaccaacgacaagaaatacgttcgcttcccgatggttccgctgatgagcgtgccgatccagtatcgcggcctgtatcagctcgtaacctattacggcaagctgggtgcagtagagccggtttatccggaaactctggcctacgtcgacggcatctaa

SEQ ID NO: 250852 - DNA, 207 bp, Klebsiella pneumoniae; identical to SEQ ID NO: 235318

SEQ ID NO: 250853 - DNA, 258 bp, Klebsiella pneumoniae
atgcggcgcatggtcagttgcgataacgtcgataatgccttcattaacgcctttccagagggcttcctgatgaaacgaggtttttacggatgggttacatttgagcttatgccccagcgtttcataatcgtcataattaaaaaacaggtgatgaacgcaggcttcagccgtgatggttttctggcgcagcgcctccagcgtgggggctgcatcaaagagaacaagttcgtctgcggtggtaatgtgcagaacatgtaa

SEQ ID NO: 250854 - DNA, 363 bp, Klebsiella pneumoniae
atggcgctgggcaaacgggacaaaaaaaactatcagatggacccggcaaatgcgatggaagcgttgcatgaaattgcccaggatttgcaggagggggcagacatggtgatggttaagccgggcatgccatatctggatattatcagggaagctaggaaaacttttgcagtacccgtttttgcctaccaggtttccggtgagtatgcgatgcatatggccgcgttccggcatggctggctcgacgaagagcaaacggtgcttgagtcacttatatgcttcaaacgcgccggggcagacggcatattgacttactttgccagctcggtagctcagtggcttaatcaacatcaacgggaatattga

SEQ ID NO: 250855 - DNA, 162 bp, Klebsiella pneumoniae
atgcagcgaccggcgaagaatattgagatcggatataagaaatggaagggcctggccggtgacgatttttttctcattctcccgcgcccgccatacctgaaccagtgcttttatcagaacgttgcggaagtctggaaaacccaggctgctgttaacgcttga

SEQ ID NO: 250856 - DNA, 183 bp, Klebsiella pneumoniae
atgactgccgtcacaggtaacggtgaaggcgactttctgcacgtcgggcttgaggcgggacagatcaacggtgaaaacgctattggtcccttcagcactgaagctaatggaaccatcttcattacggggttgcccgtaaaagaccatatcgctgtcaccccgaactttcccgtcagcgaataa

SEQ ID NO: 250857 - DNA, 198 bp, Klebsiella pneumoniae
atgaaagctctccacgcattgcggggtgtgattcagcagacgcacctcaatcaggccaagcatctcctgcccggcggcatccggcgccagacgcgcatggtagccgaggataagctgtgcctgttcaagggcgatacggcggcgcgaacactgggaagcggacaggccgataagctcgctcagctcctgattggttaa

SEQ ID NO: 250858 - DNA, 186 bp, Klebsiella pneumoniae
atgatcctgacctccaacctgccgttcgggcagtgggatcagacgttcgccggtgatacggcgctgacatccgcgatgctggaccggatcttacaccactcacatgttgttcaaataaaaggagagagctatcgactgaaacagaaacgaaaggccggggttatcgcggaagctaatcctgagtaa

SEQ ID NO: 250859 - DNA, 1119 bp, Klebsiella pneumoniae
atgaaaaatcatgaattgaaacgcgctaaaagaaggtttataagtatattaaaaaaacaattagccaatacaattaaaaatgaatccggcgatgtagattcattgactaaaaacaaacttcaagttctaaaaaaacgtcgcttcaaaataattaaagataaagatcatcaagaaaaagtggagaaaagagaaagaatttcagcacctgtattcattgactattataatgagtcaaacctccataaaacaaatctctttttagctaaacttaggaaaaatatcatcgaaaaaaggaagagtatttcaattaatttcgaccaaacaaaacaaattacagcctcagcaatgatttcttttttagctgaagtagacacgcttatttcttgcagcccgaaagggaaaaacgccataacttttactcatcctaaagttgagaaagtagaaagcgtattaaaacaaattgggttttataatttactaaaaaaacccgtgagagaaacgaaagatttcgaggatgttgcgtattggaactatgcttctggtgcgagatctgatacacaacaagcctcagaggcgatgaaagaaattgagttaaaaataagccaaattgctcaaagaaaattatacaaagggttcattgaagcgatggcaaattgtgtagagcatgcatactacggtcaagaggctgatgatgatacttcaacaaaatggtgggcttttgcaggtatcaaggaaagtgttttggttgtagttatttgcgataaaggaattggaattcctaaatcactccctttaactagaagagatgaaatcattgaatctgttaaaaacatgcttcaactaaaaaaactcaatgattctgcaatgataaaaatagcctcacaaatgggtaggacaagaactaaacaaggtcatagaggaaagggattaaaagacatacgagccataattgatactttaaacgaaggaaatttgagcatttacagtaacaaaggttattatagatattttagaaataataaagaattatttgataacaggaaagagcataaaacaagcgtttgtggtacaattgttgaatgggcgatccctttaacggctgatgcgcgagaggactaa

SEQ ID NO: 250860 - DNA, 195 bp, Klebsiella pneumoniae
atgactgagctgaattacaaccccgaagaccccgacaaaatgctgttgccagcaggtaagtcctgcggggattgcgcgcacattcgtcgctgcaaagctattttcggccataccgaaactgacacctattgcgactggtctccatcgcgtgcggttttccatcagccatcaaaccaagaaggcggcgccgcatga

SEQ ID NO: 250861 - DNA, 720 bp, Klebsiella pneumoniae
atgaaacttattaagtattggaaagttcagcttctgaaactttctcattcttccggcgctctctgcagccgtaatccagacgataccctgttatttgaggggtattcaaaagacaaacccaatatcaagctaggaaccgggctcagcatcgaactatttacggcgcctgactcagtggaaacctgtatcttccgagaccacctcattgacggcgcgttatgcattcctgtgtatgaagacgatagcgacgatttagatgatggaactcaggaagagcaggctgagcacgaacaagctgctgaggaagtaaagccaggaaagcttatcggaaattttgaactgtccggaggcgccaaggatgttctccatgcgctgtttttccgtggcgctttagaggacggagatttgccctcaaagtctggcgcatcgcagttgaggaagttggggtttattaagactcagaattcagcggtatcataccgtggggcaagtttttacaatttcctcaccccggccgggcaggagtttgccatggcgtatcttgcagatagtttttttggtaagcccatctcctcctccttcgaagacgtcgtgaagccggtaatcaaatggctgaatgagaatgccaatcctcacgcctcagcaatcgttgatgcgaccagagccacgctgttcaccggagaaactagagtccacacggaagagttcattaaggactga

SEQ ID NO: 250862 - DNA, 1854 bp, Klebsiella pneumoniae
atggcactctcagacctggccgttcgacaggccaaggcaactggcaaggcatacaccctccctgacttggatggcctctccctggccgtcacggctgcagggggcaggacttggcacttccgctactactgggcgggcaagcagaagcggatgtcgctcggcacctacccggaggtgacgcttcgcgaggcccgcagcctgcgcgacgaagcgcgcgccctgctggccaaaggcaccaatcctcgcgttcaccgcaagcagaagcgcaccgctgtccggctcgccgacgaaaacaccttcgaggcggtgtatcgcaagtggctcaagcatcgcgggctcagcctcaaggaaggccggcagacgaccctctcgatacttccgcgcatcttcgacaaggatgtgctgcccgccttgggcaagcggtcggtctatgagatcaagcgtcccgacctcttggaggtgatcgccaagatcgagaagcgcaaggcactctccgtcgccgagaaagtcaggacgtggttcaaccaactgttccgctacgcgctggtgatcgtgccgggcctggaacagaaccccgcctccgatctcgatgtggtggcgatgccactgccacccgtcaatcacaacccgttcctgcgcatggccgagctgccgaagctgttgcagcggctacgcagctatcgcggcaggcggcagacccagctcgggctgcggctattgctgttgaccggcgtgcgaaccggagagctgcgacaggcgacgccggatcaattcgatctggaccgtgggctgtggatcatcccgcccgacgtcgtgaagcaactccagttggatatgcgcaagaagcggcagcaggcgaaggacatcccgccctacatcgtgccgctgtcgattcaggccatggagatcgtccggcacctgctggatgagttcaagccggcccagcgccacctcttccggcacgacagcgacttgaagaagcgcatcagcgagaacaccctcaatggtgccctcaagcgcatgggctatcaggaacgcctgactgggcacggcatccgcggcacgatgtccactgcgctcaacgagatcggctacccgaaggtctgggtggatgcacagctctcgcatgtcgatcccaacaaggtcagcgcgacctacaaccatgccgagtacgtggagcagcgtcgccgcatgatgcaggactgggccgatcggctcgacctcttcgagcagaaccaggtcgaggcggccagcatgccactcaccgtgcatctggaaggcgtgcccgcattccagagtgagcaaaccgcaaatgcaccctccacgccggttagcgcttcgccaatcctgctggtgacgaagccgggtgacgccatgccgttggtttctgccgccgcacatcggctgccggcggttgcgccccctcgatcagccgcgccgctggtgccttcggacattcagcgcgagaggatggaactgttcgatgtcttcgaagcgccgcacaaccttcccgtcgcggcgtttgccaagatggcgggcaagtcccgcaggtggatcagctacgagatcaaggcgggcaacttgctggcgttgaacgtaggcaaccgcggccagcgcgtgccggactggcacctcgacccactcaagcacgagctgatccagtccgtcctgaagctgaccaggggtgcggacccctggcagatctaccatgcactgctgcaaccgcgctcgatgctgcgggggcgttcggcactggagggcgtgacggccggcaatctcgacaagctcgtcatagcggtgagcacagccgtgaaggagagcgaatggaccccgccgcgagtcggggtcgcctag

SEQ ID NO: 250863 - DNA, 627 bp, Klebsiella pneumoniae
gtggaatcgagtgacatcaccgccgaaattcgcatggccgtcctcggcgaatgggtgcctccccagctcgccgacgtgctcgccctgcagcgtgccgaagagccggagacccatgccgtcctggccggctggacagatcccggtcgaggcgcggagctgccggacgacggcttcgacttcgccttgtctgcggttgcccggcagtggcctggctgggtatgcgaaccgctgtggcatgacacgctggcggtcgccgtggccaagcgctcccacctgctggcctaccgtgaagtgccgtgtcaggaagtgctcaagcagccgttgatctgctcgcagtccacggctcatgaaccatggcgcatgaccgtgcagcgcgtgttcgagaacgcgctgcaggagcgggagcaaacggtggagacattcgatgtggtgatgacgctggttgccgccgggtacgggatcaccattgcgcccgccgcgagactggcgagctacctacgccgaggcatcgccatgcggccgctggccggcgcaccaacgatcgtgatggcttacctgctccgtcgcgaggcttccttgtcggacacccaggcaagattcgcccaccgcgcgcgcttggtgtcctga

SEQ ID NO: 250864 - DNA, 300 bp, Klebsiella pneumoniae
atgccaaagcgttcgatccaaaggggccgccccaccggcaccactacctacgaagcggaaccagccatcgcgtttggggctgccgtgcgggaagaaagaaccaaccagggcatcgctcaggaaacgctggcccacatggccggcatcgaacggtcgcacatgggcaagatcgagcgcggcgagcatgtccccacgctccctctcatcctcaagattgcccgtgcgctgaaatgcagttccgcccacttgatgactctgaccgaagccaagctggcagagtcggccccatccgcagattga

SEQ ID NO: 250865 - DNA, 1836 bp, Klebsiella pneumoniae
atgctctcgctgttccagcgcaaaagggtgccacccgccgccggcacaccgcccacatccgccatcgaaactccgaaaggggcgatgcggccggagtcggccgcatcgctgctgaccacgccgcgtcggcagaaactgctggaacacatctggcagcgcacatcgctctcgcgccggcagttcgccacgctctacctcgccccactggagcgctacgccgaattggtccagcagttcccggcctccgagaaccaccaccacgcctatccgggcggcatgctggaccacggcctggagatcgtcgcctatgcgctgaaactgcggcagtcatacctgctgcctgcgggcgtcacgccggaggcacaggcggcccaggccgaagcctggactgcaggcacggcctacgcggccctgctgcacgacatcggcaagattgcggtcgatctgcacgtcgagcatgccgacggcagcgtctggcatccctggcacggcccgctgcgaaagccctaccgcttccgttaccgaaaggagcgcgagtaccgcctgcacagcgccgccaccgggctgctctacgcgcgccttctcgatcgggacatcttcgactggctcagcggctatcccgacctctgggccgcgctgctgtacgtgctggccggccagtacgagcacgccggcacgctcggcgagctggtcgtgcaggccgaccaggcatcggtcgcccaggaactcggcggcgatcccagcaaggcgctggtggcgcccaagcatgctctgcaacgcaaattgctcgacggcttgcgctacctgctcaaggaagcgttcaagctgaaccaggccggcccggcggacggttggctgacccaggacgccttgtggctggtgagcaagaccgtctccgacaagctgcgcgcacatctgctatcgcaaggcatcgacggcattccggcgagcaatacggcggtgttcaacgtgctgcaggatcacggcatcgtgcagccaacgccggatggcaaggcgatctggaaggctactgtcaccagcgacgccggctggtcgcacgccttcaccttcctgaaactctcgccggcgatgatctgggatgccgccgaccggccggcgccgttcgcaggccgtgtgcaggtcgaagaggaacaggcggagccgacgccgcaggcgacaacggtggccgatgggccgcgcgccgaaggcatcgaagctgcatccgcgagcacggcgccgatcgcatccgcagccatggacaccggcgtggccgcgctgctcgacctgctgggcgacaccgctctacccacagcgccggagatcgccgaggccgagccgaccccttcgaccgtgcccccgccgcagatgagcctcgcgccttcccaggatcgcgcggagccctccggggcgcacttcatggcctggctgcgtcagagcatccagacgcgcaagctcatcatcaacgacgccaaggccctggtgcataccgtcgtcggtacgacctacctcgtcagccccggcgtgttccagcgctacgcgcaggagtaccttcaagtcgccgcgctggccaagcaagagaagctggaggggtggcagtgggtacagaagcgcttcgagaagctgggacagcaccgcaagcagccgagcgggctgaacatctggacctgcgaagtcacggggccgcgcaagtcgcgccggctgcacggctacctgctcgccagcccggatgcgctgttccaggagacgccgccagacaacccatacctgcggctcgtcaacgaggccgcaaagcgcgaagattcagcccttgggggcaaggacgacgatcaggcgtag

SEQ ID NO: 250866 - DNA, 921 bp, Klebsiella pneumoniae
atggataagacctacgcggacaccgttcgcctgctgctggccgtcgcgcccgacgtgttcgccaacgacatcttcgccatgaagggcggcacggccatcaacctcttcgtgcgggacatgccgcgcctgtcggtggacatcgacgtggtgtacctcccgtggcagacgccgcgcgacgaagcgctgcaagccatcaaccaggagctggccgccatcgccgcgcgcgttgcgccactgggcgtgcagacacgcctggttcgcgccaaggacctgggagacaccaagctgatcgtcgagaacgacgccagccaggtgaagatcgaggtcaacgtcgtgttccgcggcagtgtgctgcccgtcgagcggcggccgctgagcgccaagaccagcgatctgttcggcgtcgagttcgagctgccggttctggcaccggacgagctgtacgccagcaagctggtggccgcgctggatcgacagcacccccgcgacctgttcgacgtgtggcagctctacgaatcgggcgacatcagcgacggcatggtcgagtgcttcgtgatctatctggcgggccacaaccggccgccccacgaagtgctgttcggcaacgacaaggacatcgccggcgagtacgagcgggcctttgtcggcatgaccgaagtggactgctccctggagacgctgctcgacgctcgcgccaggatgcggcgcgagctgccacagcgactgagcaccgcgcacaagcagtttctgagcgggctggcgcgcgcagaaccggactggtcgctggtgcagtgccagcacgccgcgcaactgccggcactgcgctggaagctcgccaatctcgaaaccttccgcaagcgccgtcccgacgacttcgcagcgcaatccgccgccctcgacaccggcttgggccagagctga

SEQ ID NO: 250867 - DNA, 801 bp, Klebsiella pneumoniae
atggctctaggggtcgattggattctgtgttatttttatagcatgaatggaaattctcggcaccaggtaatcaagcgactgcaggcgggactcccccgtggggcgccgttcgaccttgccaccctgagccagttcggggtgtcgccccagctcgccgcccactatgccgacggcgggtggctcgtgcgcctggcccatggcgtctatgccttcccgaacgatgagttcggggtctacggtgcgctgaagttcctgcaacagcgcgtgcccggcctgcacgtcggcggcaagagcgccctggccctgcagggggtgcggcacaacctgggcagccgggaggcgctggtgctgtggggcgacggtcgcttcgcgttgccggcctggttcacttcgcgctttccggcccgctacgtccacgcccgcctgttcgactggccggacacggcgctggccggcaagaccctgaccacgccgcctggcctgcccgaggatctgcgggtggcagcccccgagcgtgccgtgctggagctgctgtacgaagccggcgtcaagcagagcctcgaagaggcccgcaacctcttcgatggactgcgttccccccgcaaggacttgctcgggcaactgctgtcctgctgcgccagcgtgaaggccgtgcgcctgttcctgacctgggcgcgcgagaccagcctcgtggacgtcgatgccctgctggagcagtacccggttcgcaccggcagcaacacgcgctggatgagccggctcgatgacggcaccttgctgagcctgagacctcatggataa

SEQ ID NO: 250868 - DNA, 366 bp, Klebsiella pneumoniae
atgagcaccaacacgcacaacgggcgctggagccaccggctgggccggggggctggccgtgcctggcgtggatacctccgccgcgagcagcgtgtcgccggctggctggtgacgcgcggggtgcccgcgggcgcggcgacggcggtgctctggatcgtcaagctcgccgtgctcggtgcgctgctctactccgcgttctggctggccctgctgcttgcctttgcggtgactgctgcatggctcgtgcagcacgacgactctgatcaagaggaaccgcaacccgagtggagggaaggccccaacggcttcgggctttatgacaagagcgactggcgcatcgacccgcatgtgaccgacgacgactga

SEQ ID NO: 250869 - DNA, 1524 bp, Klebsiella pneumoniae
atgacgctctacaccacggactacctggagtattacctgaccctggtggcttgggtggtcaacaacggcatctggagcattctcgtggccagcggcgtgttcgcgctgccgttcgtggccatcgtgatccaggagtggctcaaggcccgcagcgaaggtgcggacgaaggcaacaagggcgtgctgtcgtcgatgcgcatcgagaaccgggtatgggtggcgatcgtggtcatcatgttcgccggcatcccgttcatcccggtggatctcgccacgatcaggttcgacaccacgcgctccgcgcaatgccaggtcaacgtcccgctgcccaacgacacgggctggtccaacgtctacacggcgctcaacgaccagagcgcgctggtgccggtgtggtggttcttcatgcacgcgctgtcgaaagccgtgacgggctccgcggtggcagcgattccctgcggcacggacctgcgtcagattcgcatggatgtggatgccacgcgcatcgacgatccggtgctggcacaggaggtcgccgacttcacgcacgactgctacgggccgtcgcgcgccaagctgttcatgaaccggccgacgctctccgacgagcagatgaacgacgtcacctggatcgggtcgagttacttcctcgacacgcccggcttctatgacacctatcgcgccaagaccccacgcacggcctggccctacgacgcgacccgcgatgcggggctggcacaggtggacagcggcggcggctatccgtcctgccggcagtggtgggccgatggcggccagggactgcgcagccggctgctggcacaggtcgacccggacctgctgacccgcatcgggcgctgggtgggcttcctgtcgcagagcgaggtcaatgactcggtgatccgcgccgtcgtctcaccgcggcagcagaagatgaaccagggcgccgtctacaccgattacggcggccagatcgacaagacgctgccgaacatcgtcacgcgcggcgcgagcgacctggggctgaccgtcggctcgctgggcttctttccggcgatggacgtggtgcgccaggcgctgccgatggtgctgacgatgctcaagatggcgctcgtcatctgcatcccgctggtgctgctgatcggcacctacgacctgaagacggtggtgacggtgagctgcgtccagttcgcgctgttcttcgtggacttctggttccagctcgcgcgctggatcgacagcacgatcctggacgcgctctacggctgggggtttggcgccgacaggccgcacacgaacttcgatccgctgatcggcttgaacaacgcctttggcgacatgctgctcaacttcgtcatggcgatgatgttcatcgtgctgccgacgttttgggtcatggcattggcttgggcaggcgttcgcacgggaaatatcgtgcaggggttgtccaccgccacctcggacgccaagggcgctggggggcgtggcgctggtatggcaatgagcgccgtatcgaagaagtga

SEQ ID NO: 250870 - DNA, 354 bp, Klebsiella pneumoniae
atgagccggctggcctggctgcggctgccatggctgttcaaccgccgcgtcggcgtggcgctgctgtggaccttgctggtggccgccgccgcggtggcggtgaacatcgccggcatccacgtggtcggcggcgtcgagggctggcagcactggctgcaggcgcacgccggccacttcttcgtgtggcggctgtgcctctacggagcgacggcttacggctggtggtggatgcgtcggcgcctgttgcggcgggagccgtcccgcgagacgcatcagcgcctgctgcgcacggcgatcgcggccgtgatcgccgtggtcgcgctggaagtcagccaactgttgcggcacggctga

SEQ ID NO: 250871 - DNA, 1407 bp, Klebsiella pneumoniae
atgaacgcctccctccctgacttcctgcgccgcgcgaagccgcacctgcgggtcacgctgctcgtggcggtcatcacgctggtcgtcggcgtcgcctgggcacagacccgcatcgaccccaatggcgtgaacgtcagcggcagcgtgatcggcgacgacgtgctctacagcatcggcggcggccgggccgtgtcgatggggggtgccggcaacatgcagagcatcggcgtcggcgtcggctggaacagcaacctgatctgcggcgacatgagcatcaccacgacgctgcagaaccagctcaacggcatcaccaacggcttccagacgatcatgagcaacgtgatccagaacgccaccagcgccgtggcctcgctgccggcgctgatcatccagcgcgccgacccgggcctgtacaacctgctcaccaacggcatcctgcaggcgcgcctggatttcgaccgctcgaagatgacctgccgggccatcgccaatcgcatggcggacatggccggcggccaggccggctgggaccagctcgccgaggggatggcgctgcgggatgcggtcagcagcaccgacgccgtctccgccatcgagcgggccgagtccaacaaagggaacaacggcgtgccatgggtcggcggcggcaacgcgggcggctccggtcagagttcgatcaaggtggtcggcgatgtgacgcgcgcgggctacaacctgctcaacgggcgcagcgccaccgatacctcgtcgatcgcgcgcagcgcctgcggcaaccgcctgacctgccagacctggtcgtcgccccaggcggccgcggactgggcgacccgcgtgttgggcgaacgcgagcagcgcacctgcgaaaactgcacgaagacccagaccacgcctggcgtcgggctgacgccaatgatccaggaagagtacgagaccaagctgcaggcgctgcaggaactggtgacgggcgcccggccgacgacgctggccaatctcgacgcagccggcagcagctcgctgccgatcacccgcggcgtgatcgaggccctgcgtgacgaacccgaccaggacgtgctgggccggcgcctcgcgtccgaggcggcgctgtccagcgtgctggagaaggccctgctgctgcaacgcacgttgctgaccggcaagaaggagccgaacgtcgctgccaacgagctggccgtgcaggcggtcgaccaggagaacagcgcgctggagcaggagatcaacaacctcaagaccgaactggagctgcgccgcacgctggccggcaactcggcgatggcgatcatccagcgccacagcacccgcgcggccggctcgcgcggcgtcttcgagggcgacaccacacgcgaccgtctgcgggaagtccagaagccgcggagcggtacgccatga

SEQ ID NO: 250872 - DNA, 945 bp, Klebsiella pneumoniae
atgagcctcctgctggcatgccgccgcctgcgcgccaccgtcgcctcgctgctgctgagcgcggccacgtcgacgttcgccctggacaccgccaccatcgtctcgtcggcgctgtcccccgactgcctcgaataccgcgtggtcggaatctgctactggctgtactgcacgcccttcggctgctcggtgcgcacctccgtcaaggtgcgccactacgtccccgatgcggtggtgtctagctactcgaataccggagaaaacccgtggctggaagtcagggcgatgagcatgcctaacccgaccgcgaaggctggcggtgacggcacgaccaatcacgacaacgagaacaacctcgccaagttcaagaacgccgatgtcatcggccatccggccgggatggtgttcagccagttcgccagcgcctccggctacacctgcgaaggcgcgggcacggccttcatgccgtatctgctgagcacgctcgacacgatcgcctggcgctacaacatcccggaagcgttctaccccgaagcgctcatccccggccggcgcgaaatcggtacgcgcaccggcctgaacctctggggcaacgtgtatccccgcggcggtttcttgcaccagaccgacgaccacaagagcggcgccgtggtcgcgcagcgcgccggcgacatcgtgacgcgccgcaaccagattcacgtgtaccagcctctgctggccaacgcccgcgacggctactggccggccggcgcgctgatggagaccgacgcctcgacgggcaagtggcaggagctgacgcccacgctctcgaacagttgcgtggtcttcccgcacagccgcacccgcgtgcaggcccagcagggcgactacgcctgggcattgtggcggccgtactcctgctgccggcgccgtggccaggtcttcctcggcagcgtcgatttcatgtga

SEQ ID NO: 250873 - DNA, 438 bp, Klebsiella pneumoniae
atgccagctcccatatccaacccatttgtagcgcagtggcgcctgcttgcggccggactcttggctgtgctgctcggcccctccgcctgggccgccgatgtgctcgtcgtcaccgacagccgtcatccggtgcaggccccggccggcgtgcggatcatcgagctggaccaggccacgcgcatcaaggtcgaactcgccgcgcacctgccggccgacccgcaacaggccgcagccctggtgcggcagcggttgcatgacggcggcgaggcccttcaacgccgcatcggccacgcctaccaaggtgtcgcggatgcctggggactgggcatcgccaagattcccgccgtggtggtcgatcgacgctatgtggtctacggcgagcccgacgtgtcccgcgccgtcgcgcgcatcaacgcctaccagagcgcgcagccatga

SEQ ID NO: 250874 - DNA, 678 bp, Klebsiella pneumoniae
atgagggacaccaaaaactacggcagcaagacactcaagggccgcaacctcgcatggctggtggcgacgctcatcctggactttctcgtccttctggtccttgccttccacaccgcgatcgaggatctgacgccgactcgactggcggccgttcgcgccagcctgaccgcactgttgccgatcccggtgctgatcttctcgtcgctgatttcggccgaccacaaggccatcctcgtattctggcgctgcaagcatccgttgccgggttcgcgtgccttttccgtgcacgcgccggcggatcaccgcatcgacctgacgaagctgaaaaagaacgtcggcgagttccctgtgggtgaacgcgaccagaacgcgaagtggtatggcctctacaagcaggtcgattcagacccctcggtcgtggacagccacaagaactatctgctgttccgcgacattgccgcgatgtcgctgctgctcgtgcccatagttcccgcggtgatgtatttcagtgggttggatacgcctcgcattctgatctcgaccgcttggttcctgggtcaatatctggtcgcggcattcgctgcgcgcacgacaggcatccgcttcgtgcagaacgtgctggccgtgcatgccagccggaaagtgacgaactcgcggaagaaggaggctgatggatag

SEQ ID NO: 250875 - DNA, 879 bp, Klebsiella pneumoniae
atgccaggcgagatgatcttgaagatatgggacgttgaacatggcgcctgcgccatgctcacacatcgctctgcctacggcgtggaagggcgcctggcgatgatcgactcgggtgacaacagcaccacaggctggaagccgagcacctacatcaagcactacctgaagcgcaacgttctggactacctgttcgtgacgaatgcggacctcgaccacatcagcgatctgaacaacctgtggaaagaaggaatcacggtatccacgttcttccgcaatcgcagcgtgtcacccgaagtcatgaggatcatcaaggaggccagcggcgaactgaccgaggacatcgaacgatacttggacattcatgctggctacgtctaccccgtggacgtccccttcgatgagagtatgggaggcatctcggtgcggacgttttggaactcgacgccacccttttacgacacgaacaacctgagcatggtggcattcttcaagtacgggccattcaagattctgtttcccggcgaccttgaggaagacggatggctggcgctgctcgaacagccggcatttcgagctgagctcatcgacacgaccgtgctcgtggcatcccaccacggccgagagaacggctactgccgggcgctattcgactactgtcacccgcgagcgatcgtgatgtccgacaaagcaatcgtccatgatacgcaggggatgactcagacctatcgccagcgcgtcatagatcactggccgaacggagttcttgtcgccacgactggaaaacagcgccgtgtgctcacgacgcgacgcgatggctggattcaattcaacgtcaatgatcgtggcgatttcaccatctatacggagtgctatggatga

SEQ ID NO: 250876 - DNA, 2247 bp, Klebsiella pneumoniae
atgccggatgcgtaccacgagctcgctaacgtcgtagaggtcaaggacgccagcgaactaacgatcccccgtgcgaaagcgctgtttggcgcggtccagcgtcagcgcgactattcgcttgtccagattctccgccatcccgttgacggcgatccgacgctcgaatgtctcgtcgtggaggtcgagtgtgacgacgtaccgccgaagaatccggtcggcatccggtaccgtgagcgcttggcgctgtgtgtccccaatgaccccaagaggctgatcgaggtgttggcgctgcgtcaggacttcccgatcctgatgcatcagaaccaaggcgtacccggcacccctgcgagcctatgcctgtatttcgagccagccggagcggtaatgcgcacctggacgcccgaagcattccttcgtcgcatccagtggtggctggagaagagcgcccgaggcgagctacacgcggcggaccagccggttgagcatctcttctttgccagcaagtacgaactcgttctgccgtggaatctgaccgaactccgcaaagatcccgctctgcgtttcgccatcgttctccggcatgaacgccctgacggcggtttcacttgctttctggaacccattgcgaagaccgccccgcgtgtcaagacgaccaagcacattgaactggcgctgccccccatcgtgcacggcctcgtcgagcgtgatcctgtaacgctggggcaactggcggatgtactggcacgacgcgaggtagacctgattggtcctctacgggaagcgctacaggctgacatcgatgaagcaggcacgaccgcctcggctgacgacaagggcacgatcatcctcttgcatatccccattcgccgaagcgtcgatgccgagcccgatggcgtcgcgcatcgggcattcctcgtaccgattggcggcctcgaactcggcatcgcctgcggtgcattgtttgtccatgaaaaacggtactacaaggacctgctgaaccagcaaccagcaacggcatggcgcgagcagcccatcctgcccatggctgtcctgactcaaaacgaccgaacggcggcgatgcgtcaatccggggtcacggaagaagggccagcgggcgtattggtcggcgcaggctcgctcggcagcgcgctgctaaatctatggggccgcagcggctggggacgttggacggttatcgacaaggatcacatcaagccgcacaacctctctcggcacggtgcctacgcgcaacacattggcgagaccaaggccacggtggtcgcaggattacatgccgccgcaatggaaggagcgaccgagattgtcccagtagtggctgatggctgcgactttgcacaggcggatgttgcacaggcgctcgccggcgccgcactggccatcgacgcctcgaccacacttgaatacccacgagcggccagcgtggtcgatacccttccgcgacatttctccgtcttcgtcacgccgaacggcaacgctgcagtgctgcttgccgaggatgcgaagcggatgcaacggcttcgcacactggaggcgcagtactatcgcgcactgatccagcaggactgggggagagtccacctcgacggccacgcgagcaccttctggagcggggcgagttgccgcgacatctcactcgtgatgccttactcgcgcatcctgggccaggcaagcacgctggcggagcagatccaggccgctgtggcgcgcgaggatgccctgattcggatctggcaacgcgatcctgcgcgtggcggcgtcgaggtgcatgatgtgccagcagtgcccgagcggcgtatcgcgctgggtgagcttgacctctacatcgacgacggtgtcgaacaacagttgcgggttttgcgccagcaaagctttcccaacgaaaccggtggcgtgctgctcgggtactacgatttcaacatcaaggctgttgtcatcgtcgccggtttgccagcgccctccgacagcaaggccagccccgactccttcgagcgtggcgtcgccggacttgctgaagcggtcaaggacgccgccaagcgcaccgcgggcatggtcggctacgtcggcgaatggcatagccatccgcctggccactccgcatctccgagccggcacgatctcgtgcaactcgtccatctggcactcggcatggccgatgacggcctgccggctgttcagctcatcgtcggagagcaagacctgcaaatcttgcaaggtgcggtgcagtga

SEQ ID NO: 250877 - DNA, 1161 bp, Klebsiella pneumoniae
gtggcagacgtgcataaggttgtcttttacccggtcggaaacggggacaccacccagattgtcctgtctggcggccgccgcgttctcttcgacttttgccaccgcgatagagccgaagataccgacaccccggaaatcgacctgaagtcccgtctcaaggacgaactgaaggcagtcgatcgcgactacttcgacgtggtggctttcactcatgcggacctggatcacatccaaggcagcaccgacttcttcgagcttcagcatgccaagaagtaccaaggcgaaggccggatcaagattcgggagctttgggttccagccgccatgctgctggaggaggccgacaaggaccatcagcaggaagagtttgtactgctccggcaagaggcgcgacaccgcctactggaaggcaaggacatccttgtgttctcgaagccgaaggcgctcgccgattggctcgaacctcgactgaaagaacggggagaagcggcttcggcgcgcgatcatctcttcatagacgccggcacaattgtccccggattctcgctggccagcgatggggttgagttcttctgccactcgcctttcatccagcattgtgacgaaggagacatcatccgcaaccgcgcctcgctggtgttcaacgtacgtttcctggcagatggcgcgtattacgactacctggaagtgggcgatgccacctgggaggaaatggaagacatcgtccgcacgacgaggtaccacaagaacgatgatcgcctcgcctgggatctgtacaacatcccgcaccattgcagctatctggcactcaacgaggaaggccagaaaggcgacaaagagactgagccgaagccgctgatcaaggaactgttgctccaagggaagcgcgacgcctacatcgtcagttgcagcaagcccattccagacatcaaggagtcctacgagcaagtgcaaccaccgcacatccaagcccgcaacacctacgagcgctacttgaaggaagtcggcggacgcaagtttctggtgacgatggaggagccgaacgccaacaagccagaaccgatcgttttcgagattgccagcggcggcgttacctggaagcgttcagcgtccatcggcgcgccggccatcatcacctcaactccgccgcgcgcaggctga

SEQ ID NO: 250878 - DNA, 495 bp, Klebsiella pneumoniae
atgtctcttgtcatcgccgactcccgcccggagtcgctcaccctgatcgccgcccagcacgaagactggatcatccggcaggccatcaccctgctggagaaccgcgtgttcaaggccggtccagcgctgggcagtcccgccgccgtgcgcgactacctgcgcctgaaactggtcgcggagccgaacgaaatcttcgccgtcgtgtttctcgacaaccagcaccaggtgctcgccttcgagccgctgttcaagggcacggtcgaccagacttcggtgtatccgagggtggtggtccagcgtgcgctggcgctcaacgcttcggcgctgatcctggcgcatcagcatccctcggggaacaccgagccctcggccgctgatcgtgcgatcaccgagcggctgaagagcgccctggccaccgtcgatgtccgggtactggatcacttcatcgtcggcaagggcagcccgtactcgttcgccgaagccggcttgttgtag

SEQ ID NO: 250879 - DNA, 744 bp, Klebsiella pneumoniae
atgcgcatgccttccttcgcccgccgtcatccccggatcggtctgctgatcgtggtgacgattgcggtggcctcgtggatgctgctgcgcgcgccgcaaccggcaaccgagtccatgcccctggccgccgccgggtccgaagcgtcgaaaccggccggcccgccctggctgtatggccgtgccgatgcgcgcttcacggtggtcgggtacgccgacctggagtgtccgtactgccgggcctacttccccgcgctcaagcgctggatcgacgcccatcccgaggtgaactggcagtggcaccacctgccgctgtccatgcacgagccggccgcgactgccggggcacgcctggcggagtgcgcgggcgagacggggggacataccacgttctggcaggccgtggcgtggctctacgcgaacacccgtggcgacgggcagggtgtgccggcgagcctgcactatcccgagctcacgccagccatgcagggctgtctcgagagcgatcgccccgatgccgtcatccgtgctcaggcggtggaagccgcggagcagggcatcgcggccacaccggccttgcaactgcgcgaccgcgagaccggcaagaccctcctgctgcacgggcctgtcgaaggtgatgccttgctgtcggccatcgacctgctcgccgccagcggtacgaccgttgccgaacctgcccattccgaagacatgcccaccggcggtgccggtgacatgcccaggtag

SEQ ID NO: 250880 - DNA, 2889 bp, Klebsiella pneumoniae
atggcctggtcgctgccgtggtcacgcaagcccgacgcatcgcctgctgacgccgtggatgcgaccgatgatgcctgggcacggcacgtggcggccttggtggcacagggtgtcgccgagccgggcagcgcgctcggccggggccggcgcaggccggccacccaggccgaccacgatgcgctctatggcgtcgcgccgtcgttcgcggacttgctgccctgggtcgagtacctgcccggcagcaagtgcatgttgctggaagatggccagtcggtggcggccttcttcgagctggcgccggtcggcaccgagggccgcgagatggcctggctgtggcaggcgcgcgatgcgctggagaacgccctgcaggactccttcgacgagttggacgacaacccctgggtggtgcagctctacgcccaggacgaggccaactgggacaactatctgcgctccctggcgaactatctgcagccgcgtgcgcaaggcagcgcattcagcgacttctacctgcgtttcttcgcccatcacctgcgggccatcgccaagccgggtggcctgttcgaggatactgccgtgacgcgcctgccttggcgcggccaggtccggcgcgtgcgcatggtcgtctaccgcagcacgtccgcggccccggcctcgcggcgcggccagtcgcccgagcaggcgctgacgacgatctgcgaccgcctcgtcggcgggctggcgaatgccggcgtgaaagcccggcgtctcggcgcggcggacatccacgcctggctgctgcgctggttcaacccgaatccgactttgctcggcgccactgccgaagatcgggaacgcttctacgcgctgacccgctacccggaagagcgggaggagggcgagatcgaactcgccagcggcaccgacttcgcgcagcgcctgttcttcggccagccacgttcggacgtgcccaacggcctgtggttcttcgatggcatgccgcatcgggtgatcgtgatggatcgtctgcgcacgccgccggcgaccggccatctgaccggtgagacgcgcaaaggcggcgatgccatgaacgcgctgttcgaccagatgcccgaggatacggtgatgtgcctgacgctggtcgccacaccccaggacgtactggaggcgcacctcaaccacctcgccaggaaggccgtcggcgagaccctggcctcggagcagacccggcaggacgtgcagcaggcgcgcgggctgatcggcagcgcgcacaagctctaccgtggcgcgctggcgttctacctgcgcggccgcgacctggcccagctcgatgcgcgcggcctgcagctcgtcaacgtgatgctcaacgccggcctgcaaccggtacgcgaagaggacgaggtggcgccgctgaacagctatctgcgctggctaccgtgcgtgttcgatccggctgccgacaagcgccagtggtacacccaactcatgttcgcgcaacacgcggcgaacctggccccggtctggggtcgcagccagggcacagggcatcccggcatcacgttcttcaaccgaggcggcggtccgatcaccttcgatccgttgaaccgcctcgaccggcagatgaacgcgcatctgttcctgttcggccccacgggttcgggcaagagcgcgacgctcaacaacatcctgaaccaggtgacggcgatctaccggccgcgcctgttcatcgtcgaggcgggcaacagcttcggcctgttcggcgacttcgcggcacggttgggtctcaccgtgcatcgagtgaagctcgcgccgggcgcgggcgtcagtctggcgccgttcgccgacgcctggcgcctggtcgatacgccgagccaggtacagacgctggacgccgatgcgctcgacgaagaccagaccgatgccggcatggccgtggaaggcgacgagcagcgcgacgtgctcggcgagctggagatcactgcacggctgatgattaccggcggcgaggacaaggaagaagcgcgcatgacgcgcgccgaccgcagcctgatccgccagtgcattctcgatgcggcccagcattgcgtggcggacagacgcacggtgctcacgcgcgatgtgcgcgaggcactgcgcgagcgcgcccgcgacgccacgctgccggagatgcggcgcgcacggctgctggagatggccgacgccatggatatgttctgccagggcgtggacggcgagatgttcgaccggtccggcacgccgtggcccgaggcggacatcaccatcgtggacctggccaccttcgcgcgcgagggctacaacgcccagctctcgattgcctacatctcgctcatcaacaccgtcaacaacatcgccgagcgcgaccagttcctgggccgaccgatcatcaacgtgacggacgaaggccacatcatcaccaagaacccgctgctcgcgccctacgtggtcaagatcaccaagatgtggcgcaagctcggcgcctggttctggctcgccacgcagaacctggacgacttgccgaaagcggccgagcccatgctcaacatgatcgagtggtggatctgcctgtcgatgccacccgatgaagtcgagaagatcgcgcgcttccgcgaactcaacgcttcgcagaaggcgctgatgctctcggcacgcaaggaggccggcaagttcagcgagggcgtcatcctgtccaagtcgatggaagtgctgttccgcgctgtgccgcccagcctctacctggcgatggcgatgaccgagcccgaggagaaggccgaacgcttccagttgatgcagcagcacggcatcagcgagctggatgccgccttccgcgtggccgagaagatcgaccgtgcgcggggcatcgaaccgctggcgctggacacgttggcctga

SEQ ID NO: 250881 - DNA, 435 bp, Klebsiella pneumoniae
atgcctcggatctggattgacgcggccgccgtgctgctggcggccaccctgctcggcggctgcgccaccagcaaggagaagctgctgccacacggcgacagcaccatgctcgacatctggcatcaggagaccggcggcagcgcgggcggcggccaggccgcgcggcaactgctcgatgcgcgccagggcctgcgccggccgctggccgatgccgatgtgcaggcggcgcccggcgtgcaggcgcgctacacccgtaccgcgcagaacgagatctaccgccagttccaccgcctgccgaatcccgacctggtgatgtacgtgttcccgcacctggcgggcaccgacccggtgccggtgcccggctacagcacggtgttcccgctctaccagcgcgtgcagtacgcgatgccgggtgaacgcgtggaggactactga

SEQ ID NO: 250882 - DNA, 1434 bp, Klebsiella pneumoniae
atgaagagtaatccgctgctcaagtggctgctgatcccgatggcgctgctgctggtgttcgtcggcatcaagctgttctccggcgcccccggcggccagcccgcccccaagggcgcggccagtacgctcacgcccgaggagatgaaagccctgggcatcgcaggcgacacgccgcgcgataccgtcgccacgctggtggcccaggtgaagcagttgcgcaccgagctgcaaagcgcgctcggcgacaacaagcagcacaaggccgagaacgagcgcctgcgtgcccgggaaagcgcgatcgaccaacgcatccagagcgcgctggaaggcgaacgcaaccgcctggagcaggagcgtaaccaggtggccagcgacaggcagcaggcccaggggctgctgcaggatctgcagcggcaactggacggtctttccggcaagggtggcccgtccgacctgcccgtcgggctgggactggaagagggtgacggcaagcgcttcaaccgcggcgtcggtggcacgcagtgggtcgagcccgacgatgccaaggtcgacgccaagaacggcagcaaggagccgagctttcccctgagcttcgggccggcccagaagagcctgtcggccgcagtggaatccgtcgccgacgtcggcagccgcgccgtgggcgcatccacgaaggctgtctacaccgtgccgtcgaactcgacgctcatggggtcgattgccatgacggcgctgatcgggcgcgtgccgatcgatggaaccgtcaacgacccgtacccgttcaaggtgctgatcggcccggacaacctcacggccaacggcatcgacatccccgacgtggccggcgccgtggtcagcggcacggcctcgggcgactggacgctctcgtgcgtgcgcgggcaaatccgctcggtcacgttcgtgttccaggacggcaccatccgcacggtgccggaggacagcagcaagggcagtagcagcggcggcaactcggggcacaacggcgccagcatccaaggcggcctgggctggatcagcgacccctacggcattccgtgcgtcagcggcgagcggcgcagcaacgcccagcagtacctgggcagccaggcactcatcaccgcggccggcgccggcgccgcttcgctcatcaagtccgacaacggcagcgtggccgtggtcgccaacagcaacggctcgctgggcaccgtcggcatcagcggcaacgaagcgatgggccgcatcctcgcgggcggcgtgcgcgacatggccgattgggtcaacaagctctacggccaggccttcgcggcggtctacgtgcagcccggcgccagggtggccgtgcatctggagcagccgctcgacatcgactacgacgccaaggggcgtcgggtccaccaccgcaccggagaagcccatgcctcggatctggattga

SEQ ID NO: 250883 - DNA, 915 bp, Klebsiella pneumoniae
atgaagcccgttgccttgtcggccctggccagcgtcctgctgatcctcggtgtcgtgccggccagccaggccgtggaaatcctgcgctgggagcggctgcccctgccggtgccgctggtggtcggccaggagcgcgtggtcttcatcgaccgcaatgtgcgcgtcggcgtaccggccagcgtcggcgaccatctgcgcgtgcagagtgcgggcggcgcgatctacctgcgggcgagcgagccgattccgcccacgcggctgcaactgcaggacgtggaatccggcgcgctgatcctgctcgacatcgccgccgagccggcgaaggacggccaggcgccgctggagccggtgcgcatcgtggaagcggaggcccccgcgaagcgctacggcggcggtgcagcaagtggcgcggacgagcaggccgatgcgcccgcagacaaatccgttccccggcgcgaaacgccggtatcggtcgtgctgacgcgccatgccgcgcagaacctgtacgcgccgctgcgcaccgtcgagccggtcgccggcatcgggcgcgcaaacctgcgccgcggcctcgcgctggacaccttgctgccgacactgccggtgcatgcgcgggcactggccgcgtggcgcctggaagaccagtgggtgacggccgtgcggctcaccaatacctcggcgcgctggctcgacctcgacccgcgcgccctgcaggggaacttcgtggcggcgaccttccagcatccgaacctggggccggccggcaccgcgtccgacaccacggtgctctacctggtcacgcgcggccacggcctggccgagtcgctgctgccggcgctgagcccgatcgacgccaccgtgaacctgccgccggccgctgcggccggttcgaccggaggagcgcgcgatgaagagtaa

SEQ ID NO: 250884 - DNA, 693 bp, Klebsiella pneumoniae
atgagccgtttcaggaacgaggttgcgcacctgcaggcgcatgtgaagacgctgcgtctgggggccggcgcactgttcgtggtggcgctgctgctcggcttcggttggtggagtgcgccgaagagtctgaccatccatgtgccgccggacctgcgctcgggcagcacgcgcaagtggtgggacgtgccgcccgagagcgtgtatgccttctcgttctacatctggcagcaggtgcagcgctggcccacgaacggcgaagaagactatccgcgcaacctgcgcgcgctgtcggcctacctgacgccgggctgccgggccttcctgcagcaggactacgagtaccggcgcgccagtggcgagctgcgtcagcgcgtgcgcggcatctacgagattcccggccgcggctacggcgatgatccggccacgcgcgtcaaggtggtctccgaccgcgactggatcgtcacgctcgacgtgagcgcggacgaatactacggctccgagcaggtcaagcgcgccctggtgcgctaccccatcaaggtcgtccggctggacatcgaccccgagcgcaaccccttcggcctggcgctggactgctacgccagcgcaccccagcgcatcgaaccgccgccgacgccgacccaggccggcgtgcccgccaacgcccccggccacctgcagggagactccccatga

SEQ ID NO: 250885 - DNA, 411 bp, Klebsiella pneumoniae
atggccgtcccctcggagaccccgcaagacacgctggtgagcttcctgccgcaccggctgaatcgccagccggtggtcgtgcgcgggctgaccgccgacgagttgtggatctgcgccggcctgtcggccgcagccggattcgcactcggcctgccgctggcctggctcacgcacagcatcgccatggtgccgacgctgatcgtcgccggcatcgcgctgggcgtctttgtcggcggtggcttcctgcgcgcgcagaagcgcggccggcccgacacctggctgtaccggcagctccagtggcggctggccctgcggcacccggcgctggcagcgctcctgggcggccggcgcctcatcacccgctcgggctactggacgacccggcgcaacgccgatcgaggggcgccatga

SEQ ID NO: 250886 - DNA, 369 bp, Klebsiella pneumoniae
atgaacatgccaccgacaccccatcgcatttcgtcccgcatcgccgcaccgctgctgccgctggcgctcgcaggcctgccgctgtcggccttcgcgcagggcctgccgaccatggaggacccttcgcgcggccagggcagcggcatcctgcagaccttgcagaactacggctacgacatcgtgctgctgatcgcgctgctggtggtcgcatcgatgttcgtcggtgtctgctatcacgcctacacgcgctactcggagatccacaccggccgcgccacctggggccagttcggcctgacggtcgccgtgggcgcgatcctgctggtggtcggcatctggctgctcaccaaggccaccggcgtgctgtga

SEQ ID NO: 250887 - DNA, 240 bp, Klebsiella pneumoniae
atgacgccctctgccgatcaggtcgccgccttccaggccaacggcggctttgcgccttcggccgtctctgccgtggtgctgggcttcgtgttcgccgtgttgctgctgtggggcgtgtgggccatgcgcaccgcctacgtcggctgggccgagcaccgcatcactgaacgtcagttcctcgccgtcgtcgtgcgcttcgtggcgatgtacctggtgctgaccttcttcctcctctcctga

SEQ ID NO: 250888 - DNA, 366 bp, Klebsiella pneumoniae
atgggacagaccaaacgccgcgcatccgcatggccttcgctggccgtgctgttggccgtgtcgttctcggccctgcagcctgccgtcgccgccgacggcgtcgccatggagcgtgagcagctcaccgcgctcgcccgccaactcgacctgatcgaccgcctcgccgagcacgccgccaataccgctccgcaggaacgcgcccgctaccacttcgactacgcccgactgcgcgccgacctgaagcgcgttcgcgccggcttgcaggactacctcgtgccccagcgcgcccagccgcgcgatcccgtcccgctggccggcgattacgtccaccgcgaccgcgccgacgacgaggagccgtcgccatga

SEQ ID NO: 250889 - DNA, 201 bp, Klebsiella pneumoniae
atgactgaagtcgagagcgagatcctcacgcttgaggaggtcgcggcctacctcaaagccgggaaacggacggtctatcgccttgcccagaaaggcgagattccggcgttcaagcttggaggtacctggcgcttccgccgctcggagctggatcggtggatcgccgaaagcatcagcaagaagaagccggaggcagagtga

SEQ ID NO: 250890 - DNA, 1620 bp, Klebsiella pneumoniae
gtgccagttcccataattgatctttttgctggcccaggagggctcggggaaggatttgcttccctgcagggccacaagcggcagccattcttcgagatcgccctttccattgaaaaggatgctgtcgcacatcgcacgctgacgctcagggcagtgttcaggcgtttgcgtggcaccaaggacgtcaagcactactacagctacatacggggcgagatcgatgaggccgctttccgcaggatccctgccgtggccagcgccttcgagcatgctgccgccgaggcgaggtgcctggagcttggcaagtccgacgaagccagtatcgacagggaaattcgtgctgcactgaaggggcaggaaacctgggtgctgatcggcggcccgccctgccaggcgtattcgctggcggggcgctccagacgcgccaacgacaaggactttcacaaggatgaaaagcacttcctctacagggagtacctgagaatcatccaggtgcacaagcccaccatcttcgtgatggagaatgtcaagggtctgctttcctcaaagcactccggcgacccgatgttcgagaagatcattgcggatctttcgatgccgaccgaggggctcgaatatgagatccgatccttcaccaagaagggcgacggcagttcgctggaacccaccgactaccttatccattctgagcgccatgggatcccgcaaagcaggcatcgcgtgattctgctcggagtgagaaaggggctggacatgcctcaacaccagttgctggcaccagtagcaaggcctgtcacggtcaaacaggccattgacgatcttccccgaatccgcagcaagctgtcgcgtggcgattcagtggaggcatggcgcaaggctgttcaggctgccccctcttacgtcaagggatggaggacagaaaacgagtccgtcatgatcgggacaatgcgtgcctttgccgctgcggcaaccagcaccacgaccggtggcgccttcatttcacgaggctatagaaggccgaagaagccgaccgagcttcagcaatggcttcacgaccgaagcctgggtggtgtctgtcagcatgaagcgcgcgcgcacatggcatccgatcttgctcgctatcttttctcggccagcttcgctcatttatggggatattgcccacggctggatgtgttccctcccaagctgcttcccgatcacatcaatgtgcatgtcgatcgggaatccgaagcgatcccgttcaaggatcggttccgcgtgcagtgcaggaacgaaccgtccaccacggtggtggctcacattgccaaggacgggcactactacatccactacgacccctcccaatgcagaagtctcacggtcagggaagcagcacggctccagacgtttcccgacaactacgtcttcgcgggcaaccgcacggagcagtacacccaggtcggcaatgcggtgcctccgttgcttgcccacaaactggccaagatcgttcgtagtcttctgaacgagatgagcaggaggaggcggaggcaggctggtgatgccgtacagaagaggccggcgggaagcgtgccgcgaaacctgccagaacagcttccggtgcttgccgaagcgggctag

SEQ ID NO: 250891 - DNA, 459 bp, Klebsiella pneumoniae
atgctcaagaccatgcgcgttcctaccactccgcagcgcagccgcatgatgtcgagcattcgcggaaagaacacccggccggaacggatacttcgctccctccttttcgccaggggttttcgatatcgacttcatgtgcgggggctgcccggctcccccgaccttgtgttcccgaagcgcagagcagtggtgttcgtccatggctgcttctggcaccgacatgaaggctgccgctacacaaccactcccaggaccaatgaagatttctggcggcagaaattccagggaaatgtcgctcgcgacaggcgccatgcggagatgctccatgctctcggctggcgcgtggcggtcgtctgggagtgcgccttgaagcactcggtcgaggagactgcgcaagcggttgaggagtggctgcatggcgatgaagatgtcctggtgattggtcagagcattgactag

SEQ ID NO: 250892 - DNA, 1479 bp, Klebsiella pneumoniae
atggctcgtgatcgcagtcatccgccgagcgcggcctgcctttccgaatcgatgcgggaccttgggtactcgctcgaaactgcgattgccgatctgatcgacaacagcatttccgctggcgcggacaccatcgacatcatttgcgatgtgtccggtgagcatcctgtgatggtcatcctcgacaacggcagggggatgacggaagacgagctgctcgatgcgatgcgtcatgggaccggcaaccccaggcagcatcggtcgccgaaggatcttgggcgcttcggccttggcctgaagacagcctcgttttcccaatgtcgctcgctgaccgttgtgagcacgcgcgatggaactgtctgcggagccgaatggaatctggatcgcatcgatgctgccgacgactggattctttccatcctggacgatgcggacatccatgggttgccttatgtcgaacggctcggcgcccggggcacggccgttatctggcgagagctcgaccgattgatggaggacgaggccggggatcgtcgagacgagatcgtcaatgagaagcttgaggcggtgggcagacatctgtcacttgtcttccaccggtttctctcgggtgagatcaagggacatgccaggatttctctcaccgtcaatggtcgtccgattacggcattcgaccccttctgcaggaagaatcctgccacccaggtgcttccggaggagatcgtccgcatcggcgaggccgaggtgcgcctgcagccttacgtgcttccacaccacagtcgtctgtccgcgtccgagtacgactactaccaggatcgcagtgacttcatctccaatcaggggggctacgtctatcgaaacggccgcctgatggcctggggcgactggttcagactcgtgccgaagggtgaggccaccaagttggcgcgggtacagatcgactttcccaacagtctggacgaagcctggaccatcgacatcaagaaatcgcgtgcccgcccgccgcatgcggtgcgggagcgcctgcgtcagatcatcaacaggatcactgcccgcagcgtgacggtgcatcggggacgcgggcagaggctttttcaggaaagccaggccccgttctgggagcgctacgccgatcacggcggcatccgtttcgcaatcaacgagcagcacccgctcatcgcatccctgggcacaagactctcgcccgagaatgcggatctgcttcgtgtcctgctggattcgattgccgcctccctgccggtggagatgatctattccgattactcgacccatccgcgcgagttcaaccagagggcggtggatgaaagtcagactttggagcgcctgaagagtctcaggaaggtgctctacggcgacgggccgggcgatccgaatgcctttctccagatcgtgcgctcgacgcaccttttcgatggccagatcgaactggccgaaaaattcatcagcgagacctttgcatga

SEQ ID NO: 250893 - DNA, 2661 bp, Klebsiella pneumoniae
atgagcctcacagtcatcacggaagaacggaacatcgccaacgcgctcatctcgggccttgccaacatggccgagacgccgacgcgcgagcaggtggaggagaaggcgagacagatcgccgcgatcttcggctatacgggtgatctccgcaatatcgtcaccgaggcgatgatctcggtcgacacgcgcatgggtgccggtgtttcgctggtggatgtcactgcgaagcatgatgatcagtgggtccacaagcgtgaggatgtcgcctggacctatgcggaatcctatggaaactttcttctcaaggaaggttggccaccgcagatggtccagtcgctgagcgatgtgacgacccgcattctcggccacctgcaggacccgttgagcgagggcacaacttggaaccgtcgcggacttgtcatcggtcatgtgcagtcgggcaagacggccaactacaccggcctgatagcacgcgccgccgacgctggctacaagttcatcatcgtcgtcgccggcattcacaacaatctgcgcaagcagacgcagcagcgcatcgatgaggctttcatcggccgatccagcgatcccgaggatcgtcgcaacatcggtgtcggcctcgcgccgggctatccgcatccggccaccctcaccaacatcaacgaggacttcaacaagaacacggcggaaaagagcggctggaagatcaacgacttcagcaagccgatcattctggtcatcaagaagaacgtcacgacgctcacggctcttcacaagtggctgaaggagctgaacgccgagggcgatggccggatttccgacgtgccgatgctgctgattgacgacgaggccgacaacgcgtcgatcaacacgaacaaggaggatctggatccgacccgaacgaatgcgatgatccggcgcatcctcgggctgttcgcgaaatcgtgctatgtcggctacacggcgacaccgttcgccaacatcttcatcaaccccgacgcctatggcgatgatgtgcgtgaggagctgttcccgcgcgacttcatctattgcctggacgcgccaacgacgtacttcggtgccgagaaggtgttcctcgacgaggcgaccagtcaatcgatcgtgaggccgatcgacgattgcgaggatctcatcccgtacgcccacaagcgtgacgatcccgtccacgagttgccccccagcctctatcgcgcactcgacgaattcatcgtcgcccgcgccatccggaacctgcgtgggcagaccagcaagcattgctcaatgatggtcaatgtgtcgcgcttcgtgcccgttcagaaggccgtgcgtgacttcctgagtctcagggagaagaagatcagggaagcggttctcgccaactacgcgatgccggaagaggtttcctcaagaaacgcgtacatgcagggcctgaagcatgccttcgatgccgagtatgccgatgctgggtttacctgggcggaagtgaagactgccctcagcggcgtcttcgagcacctccacctctatgtcatcaacagcaagagtgacgaggtgctcgactacgcccgctacgcgaaggaaggagtcgggttgaccgcggtcgcggtcggtggtctgagcctctcccgaggcttgaccatcgaggggttgaccgtcagctacatgtaccgcaatacgaagatgtacgacaccctcatgcagatgggccgctggttcggctaccggccgggcttcgaggacctctgccgcgtccatctctcgcgcgactcgatcaactggtactcccacatcgccgatgccgccgaagagcttgtacagcaggtcaagcgcatgcggcgcgatcgcctcagcccgaaggattttggcctgtacgtccgctcgcatccggacagcctgctgatcacggcggcgaacaagatgcgatcgggccaggaggtcacggtcgagcagagtttcagtggacgactgcgggagagctacattgtctccaccgaccctgacgtgaatgccaggaaccttgcgctgatcggcgatcactggcgaagtggattcggcgggcgaccggaggagtccaccgaaaagggcgtcatcttcagggacgtgcctgtcgaggtgatcgacgacttcctcacccggttcgaatgccattcgacctttgccggacagaagtcggacgtggtgagctatctcgaacggattgcgacgaagcgcccgctggccgatgttctgctgatttccccttcgggtggctcaggcggtgaaaacccgttcaccctgaggaatcaggtgcgcgtcgtcgggaaggatcagccgaacggcacttcgtggcgcctgaacaaggacagggttgcctcgcgtggcgacgagaagctcgggctcagcgacgcacaacgcaatgaggccaggacgctggctggcggcgaagatggctcaggagcggtatccgacacacattaccgtatggtccggaacaagccgctcctcatgattcacagcctggagcccaagggcgaggccgtgacgggaccgatcgccgccttcggcgtcagttttccctacggggactattcgacgaccatcaatgtcgtcgtgaacaaggtctggctccagcagatgcagggttacgccgacgatcctgacgaggaggatgactacgatgcctga

SEQ ID NO: 250894 - DNA, 966 bp, Klebsiella pneumoniae
atgcctgagtcctctccgtgggatgacatcgccgttccgggagcggacttcaatgtccgccaggttgcggtgggaacggccgtgccctgtttctggggacgcgatgccagtggcgcctgcctgttcatcgtggagcttcagggcgaccacgcagcccagtaccggaagaacgcggtcacggtgaacggcatcgatgtcgatcttcgtgccggagatcagggacagcagcacttggtcctcgcccttgaaaggcaggtcgaccgcgatctcttcgaaggactgtgccgcacccttgcatcctcgctggagcacgccaccgactcggcgagttctctcgcgatctctctggcacacatccgccgttggaagaccttcctgtcaggccggagtcagcacctgtccatcgaggaagtccgcggtctcttcgccgaaatcgtctttctgacggaactgatcgatcggcagatgtcgagcagtgacgccgtcgaggcctggctcggtccggaacgatcacatcaggatttcatctttggcaacacagccgtcgaggtcaaatcgctctctggcgcagagcggagcagcgtccgcatttcatcggaagaccagctcgaatccctgaacgatgcgctgttcctgcgcgtgtaccggctgagcagtctggccgacgcggcaggagctcgatcgctcaacgagatcgtcactgcagtccaggcacggctcggcgaggcggacgccgtcgaggcctttgaccggaagctggttgcgcacggctacgcgccgctccctgactacgatgagcctcgctttgtcgtcagcgacgtgcgcagctatcgtgttggtgacggatttccgcgtctgatgcggtcgcaactgccgccagggattgccaacgtggcctacgacatcaggctggaaacgattgctccgtacaagtgtgacgaagcatccatcttcggggaggattga

SEQ ID NO: 250895 - DNA, 2073 bp, Klebsiella pneumoniae
atggagcagaccgacgaagagttcttccacgacttccgacaggaacttttggcgggcgccgaggccaatggcagcttccagctctccgaattcatggaggccatcgcgaacgaccttgtcgagacaggcttcacggaagggttcgaactctgccatttccgggcgcagcgtggtatgcgcgtggacggctactggttcaatgacgaaggagttctggacctcttcatcgcggacttcgactcccgaaacgagctagcatcgctcaccagaacggaagtggccgcggcattcaagcgtgttgccaacttcttcgaggccagcgccaacaagggcctggccggcgaactggaggtcacatcgccggagtacggccttgccaggcagattgcggatcgcaaggacgccattcggcaggtcaacctggttctcttctccgagcgcacgctcagcgagaaaatccaggcccttcccgatacggaagtggcaggtgttccggttgctcaccacatctgggacatctcacgacttcatcgtcagcgaagctcccgcagccacaaggagccactcgacctcgacttcgagcagatgttcggcaagggcatcgcctgccttcccgcacacctggggaccgatgcctatcaatcctatctcatggtcatgcctgccgaggtgctggcgaccctgtacgaaagattcggagcgcggttgcttgagcagaacgtccgtacgttcctgcaggcgcgcggcaatgtgaaccagggaataagggcgacgatcctgaacgaacctgggatgttctttgcctacaacaacgggattacggctactgcacagagtgtcgagacagggatgacggattccggtctggcgatcacgagggttgtcgatctccagatcgtcaatggtggccagaccacggcatcgctgttccacacacggaagcgggacaaggccgatctttcccagatattcgtccagttgaagctgtccgtcatcgacagcctgcagagcgaaacggtcgttccaaggatatcggagtatgcgaacacccagaatcgggtgaatgccgccgacttcttctcgaaccacccgttccatgtgcggatggaagggttttcccgacggatctgggcacccgcgcagaagggcgccccgcgcgagacgaggtggttctatgagcgcgcgcgcggccagtatgccgatgcacagtcgaagctcacacccgcggagcagcgtcgcttcaaggcggagcatcccaagccacagatgttcacgaagacggacctcgcgaagttcgagaatgtctgggatgaccaccccaggtgggtgaatcttggctcccagaagaactttgcgcgctacgccgcccgaatcggcagcgagtgggagaaatcatccgacgcgttcaacgagttctatttcaagagggctgtcgcacgtggtctgatcttccgcgccacggagcgcatcgtttctgcgcagccttggtacaacggcgggtaccgagcaaacatcgtggcctacacgctggcggtactcggtgacatcacgaagcgcaggaaggagagcatcgactttctgggcatctggaatgcacagaaggtcgatccggtgctcgaaagtgccatcgctgtcgtgtcgggggtcgtgaacgacgacatcatcagaccaccgcaaggcatttccaacatttccgagtggtgcaagaaggaggcgtgctggacgaggatacaggctcgtaccgacgccattgccaatctcctcccgcccgagttctacgatcgacttgttccgcaggatgatcaggcagcgatcgtgaagactgcgaagcagacgcagaggatcgacaacggcatcgaggcgcagcgaaaagtgctggctgttcccgctgcggaatgggctcgcatccatcagtcgctgcttgagaaggatctgctcacgccgaaggaagacggcgtgcttagggtcgccatgcagattccctccaagctcccgacagaaaagcagagtgtggtgttgctggatattctcgacaaggggcgtctcgaaggcgtggttgtgagcgaaccctga

SEQ ID NO: 250896 - DNA, 750 bp, Klebsiella pneumoniae
atgagcgatccggccgtcgcggcacagcgccagcagcaacgacagcagggcctgatcgccagcctggtcacgctgccgttccgcttcttcggcgtgctgtgcggcgcgctgctgctgtgcatcctgatcgaatgcgtcggcatgcacttcttctggcccgagcagggctggcgccacgcgcagggcatgctgcactacgagctggatcagctctccacgcatttcacccgcagcgcgctggtgcaggagccggggcgcaccgcgcaccggctggtcgagcagggctacgactggctgttcgtgaaaagcggtctgctggactggatacgcgacgcctcggcgcaggccagcgccggcagccatcgcccgaccagggatttccactactaccttggcttggtctacgtgaacgtggagagctacctgatcgcggcggcctacacgacgctggtcttcctcgtgcggctgctggtgctttgcctgaccctgccgctgttcctgatggccgccttcgtcggactcgtggacgggctggtgcgccgggacatccgccgcttcggcgcgggacgcgagtcggggttcatctatcaccgcgccagggccagcctgatcccgctggccgtgctgccgtgggtgacttacctggcactgccggtcagcgtgaacccgctgctgatcctgctgcccagcgccgcgttgctcggcgtggcggtgtgcattgcggcggcgacgttcaagaagtatctgtag

SEQ ID NO: 250897 - DNA, 2157 bp, Klebsiella pneumoniae
atggcccaaccgcatgcggtcgaggtcttgctgcggccagcggtggagctttataccgtggcggtctgcaccggcgccgcgattctgtgcctggtggcaccgtggtcgctcgcgctgaacccgctgctcggcctgggctcggcgctggccttcctgaccttcggcgcgattcgcctgcgcgatgcctgggcgatcctgcgctatcgccgcaacatccgccgcctgccgcgctacgtgatgacaagtcgcgacgtgccggtgagtcagcaacggctgttcgtcggccggggctttcgctgggagcagcggcacacgcaccggctgatgcagacctaccggccggagttccgccgctatgtcgagccgacggcgacctaccgggccgcccggcggctggaggagcggcttgagttcgcgccgtttcccgtctcgacgctggcgcgcgcgctggcctgggacagcccgctcaacccggcgcggccgctgccgccggtcggcggactgccgcgcctgcatggcatcgagccgcacgaggtcgacgtcaccctgccgctgggcgagcgtgtcggccacaccctggtgctgggcaccacgcgcgtgggcaagacgcggctggccgagttgttcatcacccaggacatccgccgcaaggtccgcggcgagcacgaggtagtgatcgtcttcgaccccaagggcgatgcggacctgttgaagcgcatgtacgtcgaggccaagcgcgccgggcgcgaaggcgagttctacgtgttccatctgggctggccggacatctcggcgcgctacaacgccgtcggccggttcgggcggatctccgaggtggccacgcgcatcgccggacagctctcgggcgaaggcaacagcgccgcgttccgcgaattcgcctggcgcttcgtcaacatcatcgcgcgcgccctggtcgagctggggcagcggccggactacctgctgatccagcgccacgtcatcaacatcgacgcgctgttcatcgagtacgcccagcactacttcgccaagaacgagccgaaggcctgggaggtcatcgtccagctcgaagcgaagctgaacgagaagaacatcccgcgcaacatgatcgggcgcgagaagcgcgtggtggccctcgaacagtacctgtcccaagtgcgcatctatgacccggtgctcgacggcctgcgcagcgccgtgcgctacgaccggacctacttcgacaagatcgtcgcttcgctgctgccgctgctggagaagctcaccaccggcaagatcgcgcaactgctcgcaccgaactattccgacctgtccgacccgcgaccgatcttcgactggatgcaggtcatccgcaaacgcgcggtggtctacgtggggctggatgcgctgtccgacgccgaagtcgcggcggcggtgggcaactcgatgttcagcgatctggtctcggtcgccggccacatctacaagttcggcatcgacgacgggctacccggcgccgcggcgggcaccaagattccgatcaacgtccacgccgacgaattcaacgaactcatgggcgacgagttcattccgatggtcaacaagggcggcggtgccggcgtgcaggtgacggcctacacgcagaccttgagcgacatcgaggcccgcatcggcaatcgtgccaaggccggccaggtggtcggcaacttcaacaacctgttcatgctgcgcgtgcgcgagaccgccaccgccgagctgctgacgcgacaactgcccaaggtcgaggtgtacgccacggcgctgatgagcggcgccaccgacagctccgatccgcacggcaataccgcgttcacgtccaacacccaggaccgcatcagcagcaacagcgtgccgttgatcgagccggcgcatgtggtggcgctgcccaaggggcagtgcttcgcgctgaccgagggcggcaacctctggaaagtccgcatgccgctgccggcacccgaccccgacgaagccatgccgaaggatctgcaggagctggccggctacatgcgacagcactacgtcgaggcaggagactggtgggagaaccaaggcatccccggcctgcaggacaaggcgctgcccgacgacctgctggacgacttcaagcagatggccgcggctgaagaggccgaagcatga

SEQ ID NO: 250898 - DNA, 534 bp, Klebsiella pneumoniae
atgaaccacatcgtccttatcgccgccatcgggctgctgcccacgaccaccgtcttcgcgcagaccgcctccgcgccgttgatcgtcgtcgaagaccgcggcggcgactccgcgctgccgtactaccggtcgctgaatcctcagccggatcaggccacaccgccggccccgatgccggcccctcgcgtgggtaacgcagccgacgccgaagccgccatgctgccggtgcgctcggcgcaactgtcgccgggcgaggtgcagcgccgcgtcatccgggcgccgggcctgacggcgctgttcctgatcggcgacgacgagcggtcgcgcgcctggctgcggcagcggcaggcggcgctgcgagagctgcaggccgtgggcctggtggtcaacgtggagtcgatggctgcgctgacggcgctgcgcaggctggcgcccggcctgatcctgtcgccggcctccggcgatgacctggcccagcgcctgggcctgcgccactacccggtgctcatcacggccaccggtgtcgagcagtag

SEQ ID NO: 250899 - DNA, 618 bp, Klebsiella pneumoniae
atggcagcggcaataggtgctccgggccgggagcgtcggccgtcccgcatcgccatccgctgcgccagcgccatgctgctcaccaccggcggctgggcgctggccgccctggcgcgggaagtgccgccgccggcctatcaactggcggcgcatcgtgcagacgtgccggcggccgtgctgtacgcggtggccttgcaggagagcggcgccatgctgcgcgggcgcctgatcccctggccgtggacgctcaacgtcgctggctcgccacagcgctacgccacccgcgtcgaggcctgcgcggggctgcaccgtgcgctcgcccacacgccggccaatcgcatcgacgccggcctcggccaggtcaatctcggctaccacacgcatcgctacacgcagccctgcgagctgctggacccgtaccgcaacctcgccatcgctgcggaaatcctgcgcgaacagcacacgccgggcgaggactggctgcttgccatcggccgctatcaccggcccgccggcggagcacccgcggcgcgctaccggcgcagtgtgcatcggcacctgacccgcgtgctcgacgccggcgttcccgttccaaccctccaggccaccacgccatga

SEQ ID NO: 250900 - DNA, 720 bp, Klebsiella pneumoniae
atgaacctgcggccgttgctcgctgccgtcgtcctgttcgccactttcggcgcatccgcccaaccggccccggtgacgaactcgcgcatggtgcccgctcaagtgcagccgggcgctgatgccgcgctcgacgagaggcaggcgcgggagtgggggcttcgctccgaggagtgggcgcgttaccggcaactgatgcaggggccgctcggggtctattcgccccagctcgatccgctcacggcgctcggcatcgaggcccgcagcgacgaggagcgcaggcgctacgcggagttgcaggtgcaggccgaggcccagcgcgtcggcaagacgctggcctaccagcgggcctacgacgcggcgtggcagcgcctgtttcccggccagccgcgcgtgagcctgcccggcgccaaggcgcagggtgccggcaacaccggctccgggcgcctggcggtcttcgtcaaggccgactgcgcaccgtgcgcgcagcgcgtgcagcagttgcaggcggccggcacggccttcgatctctacatggtcggcagccgtcaggacgacgcgcgcatccggcagtgggccacccaggcgggcatcgacccggccagggtgcgcgcccgcaccatcacgctcaaccacgatgccgggcgctggctgtcgctgggcctgcccggcgagctgccagccgtggtgcgcgaggtgaacggccaatggcagcggcaatag

SEQ ID NO: 250901 - DNA, 648 bp, Klebsiella pneumoniae
atgacctttccccaggcgccatccgagcgcaattcccgcacgcgctggttcaagatcgccgcggccttctggctgctgctcatcagtgccgtggcactcatcaacagcgtcggcttgtcgcggctcgccgaacagacccagagcaccgcacaggatgcgcaggtcaaggcgctgggcctgcgcgtggccgatctcgaacaccaggccaatgcggacaagcgccggccggtgccgatcagccaggccgaattcgccaacgcgcggcaggcgctggacgaacggatgacgcgcctcgaagaggccgatgaggcgagggccttggccgtcgacctgcagacgctgctggcgcgcgtgaacgcaatcgaaacccgcctggagaaaacccggcaggtggcatccgccgctcgcccgcgcactccggttgcgacgaagcccaaggtgccggagccgccgttccgggtgctcggcgtggagctgcggggaggcgagcgctttctgtcgatcacctccaccgccgcggcctcgctcgcgggcgcccggctgctgcgcgagggcgacgccgagggcggctggcaactgcagtccatcgaggcgcaggcgggcgtgttccaggtgaacggccagacgcagcgcgttgcggtgccgtag

SEQ ID NO: 250902 - DNA, 570 bp, Klebsiella pneumoniae
atgcaaccatccatccgcgctgttcaccgcctggccctcgtcgctggcttgctggccggcagcctgttggccgccggctgcgccacgaccgctgcgccgtctgcgccagcggtgccggccgcatcgccaaccgccgtcgcgccggagccgggtttcgttccggtggcccgctacggccgctacaccctggtcgagctggtgccggaacctgcgcagcgtgatctcttgcagcaggcggtggaggtctcgattccgcccatgctcgatgccagcgtgggcgatgccatgcgccatgtgttgctgcgctcgggctaccggctctgcgatgcggccgaggccgctacgctctacgcgctgccgctgcctgccgcgcacctgcgcctgggcccgctgatgctgcgcgatgccttgctgacccttgccggccccgcctgggagctgtcggtcgatgacttgacccgccaggtctgcttcagccggcacggtgctcccaccttcctttccgccaacccgcccggcaccgccacgcccgtgccggacgccgaccggcccgaggagatgcagccatga

SEQ ID NO: 250903 - DNA, 306 bp, Klebsiella pneumoniae
atggcactcgcagtcctcaacctcgcgtcccaagcacgcttttcgcccgggcaggtggtcatgaccgccggcgtcgacgagctggtccgacaaggccggctcaaccccacgccgtacctgcgccgccatcttcatggcgaatggggcgacctgagcgacagcgatcggcggcagaacgacgccgcgctgaagtccggcgaggatcgtctgttctcgtcctaccaggtcacgcgcgacctgaagctctggatcatcaccgaatgggatcgcagcgtcacgacgctgctgctgcccagcgaatactga

SEQ ID NO: 250904 - DNA, 1110 bp, Klebsiella pneumoniae
atggcactcatgtttccgcgcctggcgcgcaatttcatccgtaacggctacttccccaccgacgagccgacgctggagcgggccttgtccgcactggcgccgtctcccggctccatgtccatcctcgatccctgcgccggcgaaggcgtggcgattgccgaagcggcccacgccctcgggcgcgagcaggtccaggccttcgccgtcgagtacgacgccgagcgggcccgtcacgcacggcaactggtcgatcgctgcatccacggcgacttgatggacatgctgatctcgcgccagtccttcgggctgttgtggctgaacccgccgtatggcgacctgagcaaggacgtgaacggcaacatcggctatcagggccagggccgtgcgcggctggaaaagctgttctatcagcgcgcgctgccgctgctgcagtacggcggcgtgctgatcttcgtcgtgccgtcctacgtgctcgacgccgagctggtcggatggctgacgcgccactttgccgacctgcgcatctaccgtgcggtcgaaacgcagttcaagcaggtggtgatcttcggtcgcaggattcgtcaacgcgaccaggcatcggattcggtcaaggccacccgcggtctgctgctgcagatcggacagggcgacgccgaagccgaggagctgccgctcgaatggccgttcctgccgtacaccgtccctgccagcccggccgagccggagcacttctatcgcgtgacgatggagcccgagcagttcgccgatgaagtcggccggctgcaaggactctggccggcgctcgatacccacctgggcgccgcgcagcaatcgctgcgtccgcccgcgcgggccttgtcgcactggcatctcgccctggccttggccgcaggcgcgatctccggcgtggtgacgtccaagagcgggcgcgtgctcgtcgtcaaaggtgatacccacaaggagaagaccctccagacggagtacaccgagcgcgacgacggctccgtggccgagacgcgcatcctcaccgacaagttcgtgccggtcattcgtgcatgggacttgacgctgggctcgcccacgtggggcgaagtgctgactatccgctga

SEQ ID NO: 250905 - DNA, 651 bp, Klebsiella pneumoniae
atgcctgcaccttcttccgcgaaaccgctgtaccgcatcgacgaatgccccgacctcatggccgacggttgcgtcggtgacgagcagggcaatctcgtctttctctcgatctgggcgcgcgacaccgccgttcaggagttcctcgcccgcctgaccctcggccgggatgaacagggactggatcagttccacgtcatcaccgagcagggcgcatccatcccggtcttcgtcggcaacgtcgagaacctggaaaagcgcatcacccgcgcctatcggcgaacgctgttcggttcgctgacgaatgtgtggctgttcgatcgtcgctgcgtgaagccagacaaggccaacgccagcgcgctggcgcttctgcccagggattccgctcaccggctcgaccggctgtggacgctggtgcaggacacctgcccgctgccactgctcgaccactggcgcgacaccgtgctggagctgttgcagacacggcggatgctgaccggtcttcccttggccctcgggccgctggaaggccatcggctggccctcgatgtcccggcactgacgaaggcgctgggcgagctgatccgcaacggcaccctcggtgccacgcagtacgaactggccgcgaacgcaccgcttcggcgtgtggcgtga

SEQ ID NO: 250906 - DNA, 366 bp, Klebsiella pneumoniae
atgggctggaccttcgttcgtcagacgcgcgatcagttgatccgcgagctgctcgctccgcaggcgtccgaacgcgcttgctgcgaagtcatcgaccacacactggacggcgacgttctgtggaccgtggttcgcgtcaccgccaggcaggcgggcgtcatgggcctcgcggccggtgagtccgtctgctacatcggctgccatctgctggaaagctcgggcggcgattggggctacaagtccctcgatgagtccgtgcatccgtactactactcgtgcccgctgcgctatctcgacatggcgccggtgcaaagctccgagtggcgcgagcgggttcaccgctttcacgcgggacgcgctgtctag

SEQ ID NO: 250907 - DNA, 612 bp, Klebsiella pneumoniae
atgatcaccatccccggccaactggccatcaagaccatccacggcaggaacggcgacttcaacgtcggccgcctggcgacctcgatcggcgagttcgtcgtgaagaacgccgaactcgatcagtaccgcgagggcaagtacgacggtgatttcgtcatcgtcgagattcgcccctccacgtacaacgccaacggccgcatggtcatcgagatccgcgcccatctgggcgggatgacactgtccaacatcgacgccctgagccgcgacgaggcccgccggctgagtccgcaggaagtcgatccgatcgacgaggaagcgcagacgcccgcgccggcaacgcccccggccaagccgaaggcgaagtcgcgcagtccgcgtgatcccctggtcgataccacgccgttcggcagcgaattggctcccgtgtccgctgcggcctcggccgaggcagacgacgcggtgctgtttggtgccttgtggcccctgggcgagaccgtgaagctcgatgcgaccgtggatcgtcgtgtgctgcgtcagcagcgcgaccgtctcgacaagctcggctacgagttcgctccgttgtcccaggactggcacctcaaagctgcctga

SEQ ID NO: 250908 - DNA, 552 bp, Klebsiella pneumoniae
atgaccacttccaccgaaaagtcctacttcgatctgcacatcaccggcctcgggtatctcaatcgcatccgcgaagtgaagcccaagaagggcgatgcgttcctggcctgcgacatcgcggctctgaacggtcccagcgacgacgtctcgtatgtgcgtttcgacacgcgcgtatcgggatcggaagcgcagcacctggtgcgccgctgcattcaggcggtcgacgccgagaagaaggtgatgatcggcttccgcttgggcgacctgtggaccgacaccttcacctactccaaggggaagcgtgccggcgagcagggtgtgagcctcaaggcccgtctgctgttcgtcagttggatcaaggtcgacggcaagctcgtctacaaggccgaacccaagccgaccgagaccgacgagcgcgacccggaagtccctgtgacgtccgacgcgcccgccgcgcagcaagcctcggcaccggagccttccaggcccgtcgccgatgctgccgacgacgctgccgatgcccccgcattggccgttgccgagtcgttctga

SEQ ID NO: 250909 - DNA, 366 bp, Klebsiella pneumoniae
atgactgttcgattcaaaggcacggagctgcggcccgtgctcgccgaagcggtggcgaatcaatgccgcgtcatcctggtcaaggatcagggcgtgtacttcctggccgagtgcggcgagcgccgacccgatggtcgccagaagaccatcgcctatgccgctggctgcaacccggatgtcgatgccttcgatgactggtgggagctggcgcgcgccgagttcggtggcgacgacttcggcgagttcttcgatccgcaggagggcgtgtttgcgcgcatcctgcgcagcgaggacgacctcgacgtgtccgcctccgcgacacacctatcgctgcaggcggttcctcccacgcccagcggtaactga

SEQ ID NO: 250910 - DNA, 798 bp, Klebsiella pneumoniae
atggatacccaagccatccgcgcacagatgccgacgctcgttgtcggtcatgtgccttccaacgtccgttcgttcaaattcaacatcttcgacggccagcccaaggtttcgacgctgggctttcacatcgacccgaagcctttcgagggcaaggtcatcgccaccaccgacgaggccatcgtcgtcaagacgggacgagccgagttcgcggtgctcgatcgcacgctcgtgaccgaagtgcccgacgagggcgccaaggtgcaggtcgaaccctatgtcagacgccgcttcgacggtcagcgggcggacacgcccgaggagcagaccgagttcaccgccgacggccagccctacacggtgaagcggttcgtgctcggggccgcaccggcgaagctgccgatccccgagccgcgctgccccgagctgcaggaactggtcgaccaactggagcagttgcccgctcccgacggtttccggcgcgtcacccacatgctggtggatgccggcgcgcgggacatcacctgggtcgatccgctgcccgccgacatcatccgcacgccgccggccatcggcttcaccgtcgccacgaagaagttccagggtcgcgtcaccgtgctgtatgagcgtggcctcgacctctacgcggtggagctgcaccgcgacggcgagctggtcgaacgggtcgatgaggtgttcttcgacaccctcggcgagacgctggaacggctgatcgacgacgggagttggcggcgcatccgcgtgcagtgcctgtcgtgtcgtaaggctatccggcactga

SEQ ID NO: 250911 - DNA, 1371 bp, Klebsiella pneumoniae
gtgtcgctcggacgtgcagtgcatcagaagcctggggaaccggggcgcaacgcgggagggcgaggtgaagccgagcccgaagcagtgcgtgatgaagcacggacggcgcggcatgcaaccggaagcccagggcgagacggcctgcttgcgcaggcgctcgcgaaagcgaacatggaggcggcgtggaaacgcgtcaaatccaatcgcggcagtgctggggtggatgggttgtcgatcgccgagacggcggagcacctgagaacgcactggccccggattcgggaatccttgctggatggcaactaccggcccctgccggtgcgccgcgtccagatcccgaagcccgaaggcggggtgcgcgaactggggattccgacggtgacggatcggctgatccagcaagccctgctgcaagtcttgcagcgcatcattgatccgacgttctccgaacacagctacggctttcgtccgggacgccgtgcgcacgacgcggtgctcgatgcacagcgctacgtgcaggacggttaccgggtggtggtcgatgtggatctggagaggttcttcgaccgggtcaatcacgacatcctgatggaacgcctggcgaggcgaatcgacgacaaggccgtgctacggctgatccgtcgttaccttgtggccgggatcatggatggcggcgtggtcatggcgcgctacgaggggacgccgcaaggcggaccgctgtcgccgctcttggccaacgtgctgctcgacgaggtggatcgggaactggagcgacggggccaccgctttgttcgttacgcggacgactgcaacgtatatgtgcgcagccgccgggtgggcgaacgggtgctggcgggcctgacgaagctctacgaacgactccatctgaaggtcaacgaggtcaagacggcggtagcgcctgcgaccggtcgcaagtttctgggctacgagctgtggcgcagtgcgggtgaccggatcaagtgtgctgtggcccgaaaggccctggcgaccttcaggcaacgtatccggcaactcacacgtcgctcgggcgggcgcaacctgtccgagatcgccgaacggctgcgggcctacatgcccggttggaaggcctacttccagcttgcgcagacacccaaggtgttccgcgaactcgacgagtggatcagacaccggctgcgtgccgtgcagctcaagcactggcggcgaggcacgacgatgtatcgggaattgaaagcgatggatgcgtcggataccgacgcctatcggattgcaacgaacagccgcaggtggtggcgtaacagccgcttcgcgctgaaccgagtaatgccgatcgcctacttcgaccgactcggcgtgcctcggctctcataa

SEQ ID NO: 250912 - DNA, 717 bp, Klebsiella pneumoniae
atgtcccattccaacaatcccttcgcccgcggctacgatggcctgtccgtgcagcggctgctggcgatttcctacgacgacgactgcccgctgagctacctgccgctgcacgtctcgcagtcgcacctgccggacagccaggtcgagcgccatgcctgcgtcttctgcgacgacttcgcgctgatcaccgagggccagaacgtgccgcccgagctggacgcgcagtgccccagccacggtatcgcccgaaacctcgtctacgccgtcatggccgaagaagccggccagccgctgcacgtcggcgatacctactccgaggaagccgcgcgcgaggtggtacgccgcctgcgcttcgagaccgggttctacagccgtgcctgggaaatcagttcggcgcacatcaccgaggaggccggtcgcttcctcgccgaactggcggacatcgccacgccgagcggttttctgttcgtggccttccgcattccctacagcccggcggtcggcgtgaagctgatcgccacgccctggacggatgcgaacctgcagcatgtcgagggcatcaccgccgaagagctgcggcaggagcaccgggccaagggcgtgccggagtccctcgtggaagtgttgcacctggctgcgctcgccgacgttcgcatgttggtgttcgatgccgacgcgccagtgctggacgggctgacgctctacgacgacgagtaa

SEQ ID NO: 250913 - DNA, 393 bp, Klebsiella pneumoniae
atgaatctgtctttacccgaagacgtgctcgatcagatggcgctggaacaggcgcacttcgacgctgcaccgcaggccttcttcgaggcctggaagcgcggcgcgcagatcgccggccacgagtggttcggcgacggcacacgcgaaggtctgcagcgtgccaccaccaagtgggacctgcggcccaacatgctgatgctcaacgacgccctgggcgtgctgagcagcggtcaacgcatgttcctgtccgcgatggtgagcttctacaactcccgcgagggcggcgcgatgctcaagcgttgcggcttcgaggggctgtccgacttcggcggcctcgatctggaacggcgccaggtcatcgctgacctcacgctgcactacaacggctggtga

SEQ ID NO: 250914 - DNA, 243 bp, Klebsiella pneumoniae
atgtctgaaccttccgcatcttcctctgcaaccgcagtgcgcagtggtgcgctggcgctggcgctgacctggaccggcaagcgtttgccgctacaggtgctgcgcagcgcggccggccactacatcggcacacaagacgacgaaggaccggtatcgcgggagtccgtcgagtatttcccgacccacctcgcagcacagcgcgccctggatacccatgcctggacacagcgcgctcacccctga

SEQ ID NO: 250915 - DNA, 645 bp, Klebsiella pneumoniae
atggctgccgtcgcagggaaaaccgaatcgcggacggcccgctttagggcaatggcccgcgtcacgggacaaggcaaagaccagggcgccgaaggccacacgggccttcggctgaagagaaaggaaaaccacctgtgggctgcgtcagcgcaggccgtcgtcaaagccgttcgctgcgtcagcaatcgcacccggcccgtttcgtggctggggccggaaacctctggcgtgcatccacacacaaagggagcccgttgttccgccggcgggcaccggcacggaataccctcggcccaagtggcctcctcacggctcgcgcggcggcaaggcgtcaggaagcccctcgtggccgaggcaaggcacaccgatcaagggaatggcggcgggcgcgattcgtggagcaatgaccttctcgccccgtcgcccgatgccgggcagacggggcgcgcacaccgttgcagaaggagacgcgcgctttggagtcccgcgcggtgcgggacgtttgcctcgccgccagtgaagtggccggcgcggcaggggaaaagcgaggatcaggacgccttggaggcagcgcgccgcttgcgcggtgcgctgcgccggcccgtcggggactcgatcggcagcgtgcccttgcagtccgggtag

SEQ ID NO: 250916 - DNA, 2016 bp, Klebsiella pneumoniae
atgcgcgtgttcctgtgcgagaagccgtcccagggcaaggacatcgcccgtgtgcagggtgccggtcaacgcggcaacggctgctacagcggcgcgggtgtcgttgtgacctggtgcatcggtcatctggtggaggcggttccgcccgaaggctacggcgagcaatacaagcgctgggccatcgagcaactgcccattcttcctgagcgttggcgtgtcgagcccaaggcggcgaccgcagcgcaattcaaagtcgtgcagcagctcgtcgccaaggcgggcgagctggtgattgcgaccgacgccgaccgcgagggcgagatgatcgcccgcgagatcatcgacctatgcggctaccgcgggccgattcagcgcctgtggctgtcggcgctcaacgatgcgtcgatccgcaaggcgctgggtgcgctcaagccgtccgccgagacgctgccgctgtactactcggccctggcccgctcgcgtgccgactggctgatcggcatgaacctgagccggctgtttacgcttctaggtcggcaggccggctacaccggcgtgctgtcggtggggcgcgtgcagacgccgacgctgaagttggtggtggatcgtgatcgcgagatcgcgcgcttcgtctctgtgccgtattgggccgtggacgtgctgctatcccatgccggccggtccttcaccgcgagctggataccgcccgaaggcagcaccgatgcagcgggtcgctgccttcagcagccggtggcgcagcaggctgcggattgcattcgcgccgcacgcgatgcgcaggtcgtgtcggtggacaccgagcgcgtgcgcgaggcaccgccgctgccgttcgacctgggcacgctgcaggaggtgtgctccaagcagttgggcctcgacgtgcaggagacgctggacatcgcgcagacgctgtacgagacgcacaaggcgacgacctatccgcgcagcgactcgggatacctgcccgaaagcatgctcgcggaagtgccggcggtgctcgatgcactgctcgccaccgatcccagcctgcggcccttgatcggccagctcgaccgcaaccagcgttcgcgcgcctggaacgacggcaaggtgacggctcaccacggcatcatcccgacgctggagcccgccaacctgtcggccatgaacgagaaggaactggccgtctaccggctgatccgcgctcattacctcgcgcagttcctcccgcaccatgagttcgaccggacggtagcgcagttctcgtgcggcagtcagtcgctggcggccgtgggcaagcagatcgccgtcaccggctggcgcgaggtgctggcgacgccggggccggacgatgccgacggcgaggatgcgcagcgcagccaggtgctgccggcgctgcatgcgggcctgtcctgcccggtcggcaaggtggatctcaaggcgctgaagacgctgccgcccaaaccctacacgcagggcgagctgatcaaggccatgaagaccgtcgccaagttcgtgaccgacccgcggctgaaacagaagctgcgagataccaccggcatcggcaccgaggcgacacgcgccaacatcatcaacggtctgatcggtcgcggctacctggtcaagaaaggccgcgccgtccgcgcttccgacgcggcattcacgctcatcgacgcggtgccctcggccatcgccgaccccggcaccacggcggtgtgggagcaggcactcgacatgatcgaggccggccagatggcgctggacaccttcatcgagaagcagtccgtgtgggtcggccagctcgtgcagcagtaccgcggcgcaacgctctcgctcaagctgccgccggcgccggcctgcccgcagtgcggcacaccgatgcagcagcgcacgggcaagagcggcgcgttctggtcctgctcgcgctacccggactgcaagggcacgctgccgatcgagtccccgacgggccggcgcagcgcaccgcgcaagcggcgcgctgcctccaaggcgtcctga

SEQ ID NO: 250917 - DNA, 384 bp, Klebsiella pneumoniae
atgagcacgcacttcgtcggcgagggcaacatcggttctgcgccggactaccgcgaatttccgaacggcaacgacgagccgcgccggctgcttcgcctgaacgtctacttcgacaacccgatcccgaagaaggacggcgagtacgaagatcgcggcggcttctgggcgcccgtggagctgtggcaccgcgacgccgagcactggaagacgctgtaccagaaaggtatgcgggtgctggtcgagggccgcaccgtgcgcgacgaatgggaggacgccgacgagaacgagcgcgtgacgttcaaggtcgaggcgcggcgcgtgggcatcctgccgtaccgcatcgagtcggtggcgctcagcgccaagccggccggcggacagtaa

SEQ ID NO: 250918 - DNA, 549 bp, Klebsiella pneumoniae
atgacagcatcgccccctatcagccactccacgcgcttcgtggcgctggaacaggcggacttccagcggctggaacacgcaggctacctaaaaggccttttacagccttttaagggtaaggggagtctggagacctgggccagccagtgcgcagcgctgcgcgacgacgtgattggcctggcgcagcggcgcgtgctgccccaggcgcgcgcctatccattcagtctgctcgacgtgcaactggcccagcaggccactggcgcagggacgaccttcctgcgctggcgcaacctcgaccgttcctccatgggcgtggcgttgtgggaggccctgctggccaaccccgcgacgccggcctcgctgatcgacgagctgtacgcgatcgaactgcagcgcatcgtgctgaacatgcagatcagtctgacccacagcatcgctcgccaagccctggaatgcgccaacaaggccgcgcaggccgaagcggcttacctgcggcgcgtccacgggcataccgcgtccgttccacccaccaccaaggagtcaccatga

SEQ ID NO: 250919 - DNA, 789 bp, Klebsiella pneumoniae
atggccaacgaacgcacagaacccctgcaactgaatctcggatcgctgcgcagcgcgatgtcgctgacgctgcacacgcaccacgcttcgcgcatctggcacggccgcgcgccgaccgaggggcgcccaggcatcatcggtctcaacggcttcatcggcgccatgaacaagatgaagcgcggcgccgagcaggacgacccgtactcggactggtggatgttgcggatcgaggacaagctcgccgacaccaagacccgtctgcagaccctgcgcgaccaggtggatcaggccttggccgacgtgccatcggcgctgtcgctgggcgagaacatgaacgtgcagccggtgaagctgccgctgttcgtgaacgcccagctcggcttcatggcggtgtatctgctggccgactacgacgacctggcacgcaaactcatcctggcgcaccacacggcgctgatcgaccgcagcaccttggagcgctggctcaatgatggtgcgcacgcgctgcgcagcctgttctcgctggcccagcagtaccgctactcgggcacgacgcgcgacgacttcgcggcgaagaacgcggcggcgcgagcggcgctggagaagttcggcgagttgccgcaggacgtgctggaaggcacgcgccgctcgcgcttcgcgccacccatcgcgcggcggacgaacaagcccggcacgccgcctgctgcgcctgccatcgtgcccgatgcgcaggcttccacgggtggcgcagccgatggtgcggcgggcgatgagggtgttggcgcatga

SEQ ID NO: 250920 - DNA, 753 bp, Klebsiella pneumoniae
atgaaagccatcgtggcccaccacgagatttcaggcccggcgcattcgctggaggccattcgcgcagcgcggattgaagatgccgcgaccaagaccctgggcacgttggtcggacaactgtttggttcgtatgtcgtcaccgatggaaatggcggcgaggaacgcgacgacgatcttcccggcgacgtgatttcctttcgcacgcgcgtgcaactgagcctgtctgcgcaggactacgccaacacccaggccgacctcaaagacctggtatcgctgcgcaacactctggtgcaccacttcatcgatcagcacgatctatggaccgtggacgggtgccgcgttgcacaggacgaactcggttccgcctacacgcgcatcgatcaacacttcgagcagctgcgcggctgggccgaacacatggatcaggcgcggcgcctggcagcggagttcgtccagtcggatgtgttccacgacctggtggtcaatggcatcgcgccggacggcacggtggactggccggccgccggcatcgtccgcgcgctgcgcgaggccgccgcgcagttggccgtcgagggctggacacccatcgccgccgctggccgctggatcgcggaccggcatcccgagcagcttccagccaagtacggctgcagcagttggcggcaggtggtgcatgagtgccgcctgttcgagcttcgctaccgtgaggtggaggggcaacgggccgcctggtacagacctcgcgaagcatag

SEQ ID NO: 250921 - DNA, 1194 bp, Klebsiella pneumoniae
atgaccacgggcggcgcaccacggcgcgaaggccccgttgcgctgtcggcgttgttcgacgaggcgctgcggtaccttgagccgaaggaaccggcgcagggcacggcgccggccgccgacggtttcctctacagcggcaaccgccatgagagcgtgccgcgccgactgttcctcgaccgacgcctgacgccgctggagcgcaacgcctggcaggtgttccgcctgcagctcaacgacgacggcgtgaccgcctttcccacctacgaccaattgcgcccctacctggcctcgatgccctgcgcggcgcaggcatcgcacgagaccgtggcgcgcgccctgacgctgctgcggctgacgcgctggctgagcctggtgcgacgacggcgcgacccgaagaccggccgtatccaaggcaacctctacgtgctgcacgacgaaccgctgtcgcccttcgaggcgatgcagctcgatgccgactacctcggtctggtcagccaggcgctgacccatgccgccaaggcggtgcagatcgtgggcatgaacacgctcaaggagattgccgaagacccgctgctcagcggccgcacgctgccgacccgcctgcaggtgctggcgcagcgcatggcgctgcatggctggacgacgccaggttatccacaggagggtgcggaccacgaatccgaagaaggccaggaagcccttcttcggaatgctgcgcgcccgtcttcggaatccgaagcagggccgaaacccgcgccggacggctctcttcggattccgaaggaggaccgtacagtacgtaatgatcgtataaatgaagtacgtacagtaccgcgcgcgagggccttgcagaacctgcggctgccggaccgtttcctgcgcttgaaggacgagcagcaggccggcgcgctggtggcgctgcagcaggtggacgaggcgctgaggcaggccgttctcgacgagtgggcggcacgctgccacaacagcgcggtacgcaacccggccggctacctgtttggcatcatccagaaggcgatccgcggggagttcaaggcctgggccggagaaagtgcatcggcaccgccagcgcccccgtcacctgcgccctcgtcaccgccggcatcccgtgcggctgaccccgaggtcgcacgtgcctacctggctcagctccgagaagccttgcgtgatcgctga

SEQ ID NO: 250922 - DNA, 561 bp, Klebsiella pneumoniae
atgtcggcaccgcacccgctcaaccaggccgtgatcgcccaggccctgcatgacctgcgcaacggccagttgcgccgctgcaaggccatgggcttcggcgaggaggagctggatgcgctgaaacaccccgagctcgtgagcatgctggtgaatgccacggtgtcgtggtgttcggtatcggtgaaccgggaagtgttgaagcggctgctgagccaggtgcacgacgtggagcgggagatcgccacggtggaccgcatgctgcgcttgggggcgagcacggagatggtcagcaagttctacggcctcacgcatcaggaagtggcgctgcgccgcgacatcctcgggctgcccaagcgcaagggccggcatccggtactcgacgaggcgcaggacgtggccttgtgggagcgctggaaggccggcgtcgccgagcgccatgtcgccctgaccgacgacatggcgatgctggcgctgaccatggacctggccgaggccatgaccctgcccatgtcggtgatctggtcggcgatacgcaactggatcgaccaggggctggtgtag

SEQ ID NO: 250923 - DNA, 1659 bp, Klebsiella pneumoniae
gtggctgagctgacgccgcaggacatggctgccaagcttctggccaccggcttcgagcgcagcggcccttcggccgcgaccttgagcgaccccatcgccgacacgccgatggtggtgacgctggaccagttgcggccctacgaccacgacccgcgcgtgacgcgcaacccggcctatgcggagatcaaggcgtccatccgcgaacgcgggctggacgcgccccccgcgatcacgcgcaggccgggcgaggcgcactacatcattcgcaacggcggcaacacgcggctggcgatcctgcgcgagttgtggagcgagaccaaggaggaacgcttcttccgcattgcgtgcctgttccgcccgtggccggcgcgcggcgaaatcgtggcgctgaccgggcatctggccgagaacgagctgcgcggcgggctgaccttcatcgagcgggcattgggcatcgagaaggcgcgcgagttctacgagcaggaaagcggccaggcgctgtcacagagcgaactcgcgcggcggctgacggccgacggctatccggtgccgcagtcacacatcagccgcatgaacgatgcggtgcgctatctgctgccggcgatcccgacgctgctgtacggcggattgggccggcatcaggtggaccggctcgcagtgctgcgcaaggcgtgcgagcgcacctgggagcggcgggcgctgggccgcactgtggccgtggacttcgccaccttgtttcaggacgtgctgacgcagttcgacacacagccggacgacttctcgccgcagcgagtacaggacgagctggtgggccagatggccgagctgctggaggcggactacgacacgctggcgctggagatcaacgacagcgaaagccgccagcgtgcgctgaccagcgaaccggcggcgccgacgccagcggcagcgcctgtcgtgcctgctgcacctcccccgccggtctccgcgcctcagcagccacccgcctcgtctgtgccgcgcgacaccacgccagccgcgcctccggcgccagcagcaacaccgcctgcaccgcccgaggcgccggaggagcagcacgggcagcgcgacgagcgcctgcaagggcacatcgtgacgccggcgccgaccaccgagcgcctgcagtccatccaacggatggtcgcggaccagctcggcgacaagctgcccgacttcgaggccgatgcgctgcgtgcgatccccgtgcaggcgggcggactctatcccatctcggacgtctggtacatcgagccgagcttggacgtgccggatcgcctgcgcgtgcacatcgcgcaattcgcgcgcgagatcgccggggacgcagcggtagccgaccacatcgaggccagcgacggcggcatcggcttcgtctgcgtggcgccggccgtgggccaggcgaaggcgctgccggtgttcgcgcgggcggtgctgaccctgctgcatgcgctgagtgcagcgccgcccgccgcgaacggattggaccgcgcgcggctggccgatgagctggcggcgctgctccatggccatggcggctcggccacacgcctgagcgatgctgcgctggtgaagctgttccgtctgctgcgcctggcgcgccggctgctggatctggaagccggcgtagcgagccaggattcctga

SEQ ID NO: 250924 - DNA, 237 bp, Klebsiella pneumoniae
atggcgagcgcacatgaactggcgcgcggccgtgaacggctgcgcgcgctgatcgagttcgcgctgggcgaaggctggcgcgtggtgcgcacgtccggcgggcacctgaaattcacgaagcaaggctgcgcgtcgatctacaccagttcgacggcgagcgaccaccgtgccgaccgcaatgcccgcgcgcaacttcgccgcgccgaccggcaggcgcaggagaacggccgtggctga

SEQ ID NO: 250925 - DNA, 867 bp, Klebsiella pneumoniae
atgcaggtggtgtccatcatttcgaccaagggcggcgtgggcaagaccacgacggcggccaacctgggcggctttatcgccgatgccgggctgcgcgtgctgctgctggacctggacgtgcagcccacgctgtcgagctacttcacgctggacgcgcgcgcgcccggcggcatctacgagatgctggccttcaacgagcggcgcatcgagcaactggtgtcacgcaccgcgatcgcgggcctggacctggtgctctccaacgacgaccgcggtgaactgaacacgctgctgctgcacgctccggatgggcgcctgcgactgcgccatttgctgcccgtcttccgcacgcactatgacctgctgttgatcgacacccagggcgcgcgcagcgtgctgctggagatggctgtgctggcgtccgacctggcgctgtcgccggtgacgccggaaatcctcgcggcgcgcgagctgcggcgcggcacgctgcaactgatcgaggacatcgcgccgtatcggcacctgggcatcgagccgccgccgctgcgcctgctcatcaaccgtgtgcatccggtgtcgtcgaacgcgcggctggtccagcaggcgctgcgacaggtgttccaggaacaggccggcgtgcaggtgctgggcaccgacgtgccggccatcgaagcctatccgcgcgctgcgacacgaggattgccagtgcaccgggtggagtaccggcagccggctgggcgcacggcgcccgcggcgctggagaccatgcgcacgctggccggcgagctgttccccgcgtggcgggagtgcttcgcgctggtcaccggccgggccgatgcgggaggggccagccatggcgagcgcacatga

SEQ ID NO: 250926 - DNA, 219 bp, Klebsiella pneumoniae
atgtcttcgcagaccaccgccacggcggcaccgaccgagcaccgcatcctgcgccgcgccgaggtcgaagccaagaccggcttcaagcgcgcgcacatctacagcctgatgaaggaaggcaagttccccaaggcgctgcgcctgggcgtgcgcgcggtgggctgggactcggtggagatcgaacagtggatcgccgatcgcctcaaagaacgcgcctga

SEQ ID NO: 250927 - DNA, 762 bp, Klebsiella pneumoniae
atgccgaagtcgagcagcctggccgatggcgccaagacctactaccgcccgatcgaggcggcaatccgctggagcggattgctgcgcttcgagcggcgcatcctggcgaccttgggacagcggcctctgccggaggcaacggagtttccgcgctggccgatgctgcggttgaacgccgaaagaatcttcgatgcgctggctcacggcgagctgccgtatggcaaggacggcttggcgcgggacacgcagggcctgacgatggacgacccgtcgctgaccgtgcggcacgtcgatctgaaagcctggatggcgcactactaccccggcgagaaaccggcgtttctgttcgatgagatcgagcgtgcgcttcacccggcgatcagcctggacacagtgggcgcattgatggccgagcgggaagcgatcaaggcgcggctggcggaacacttgggcgtgcacgagacgctgcgcgccgagcacgaggcgctgctgaagacgcacgccgcctacacggccgacgcggagcgtgcgagcacgcctgggccgcgcagcgaatcgacctacctgaacatcgttggcgggttactgacgctactgctgggcaagtcgcccagcggcatgccgtattccagcttcctgacgcaggaagccatcatcagcgcgatggtggcgcaccacggcaacgcgatgggcatcaccgagcgcacgctgcaggccaagttcgcactggctcggcgcaatctgcagagcacaaattcctga

SEQ ID NO: 250928 - DNA, 912 bp, Klebsiella pneumoniae
atgaacttacgccatcttcgctgtttcatcgccgtggccgaagagttgcactttggccgggcggcgcggcggctgcatgtggagcagtcgcccctgtcgcgcacgatccgccaactggaggccgacctgggcgtggcgctgctggagcgcacgccgcgcggcgtgcgcctgaccccggccgggcaggtgtttctggaggaggcccggcgcgtgctgctgacccttgagcaagcccagaccaagacgcgggcggtggcggtgggacaccggggcaccctgcgcatcgccctggccggcggcgtcgggcggacccggctgtcggcgctgctcgcgctgtgccgcgaggaggcgccggaagtgggcatccggctgttcgaggcgccgctgtcgcaggtggtgggcggcctgggcaacgacctgtacgacgcggcctttgcgatggccggcgagatggcggccggggtggtcgccaggccggtgtggcaagatccactggtggtggccatacccgcgcggcaccccttgctggcgcacaagcgggtaccgctggacgaggtggtgggctacccgctggtgctgtgtcacccgcaggtttgtcaggagtgcagccggcaatgcgagcgcctgctgcgcctggtggagacaccgctggtcgtggccgagtacgtgacgacccactcgttgatgctggccctggtggcggccggctatggcgtgggattttccaccgcggcgcacgcggtggcatgccggcaggcggacgtgatcgtccggccgctggacgaggactcggcggcgttgacgacctacctgctacatcccgagggcgcgatgtcggagccgctgcgccacttcatcgaccgtgctcagcgtgtcggccatatgccgttggatacgcaacggctcgcatga

SEQ ID NO: 250929 - DNA, 909 bp, Klebsiella pneumoniae
ttggatttcagattgctgcgttacttcatcgcagttgcggaagaactgcatctggcccatgcagccgagcgtctgggcatcgagcaatcgcctgtgtcgcgtgcgatgcgcgacctggaaagccagcttggcgtgcagttgttcgaccgcagcacacgcctgacgcggctgacctgggccggccaggtgttcctcggcgaatgccggcgcgtgcaggccaccgtggagcaggcagtcaagagcgccaaggcggcggcacagggctaccagggccatctgcgcatcgcgatctgcgacagcctggcgcaaccccgcatcgccaccttgctggcacgcagccgcgaggatgagcccgagctggagattcgcgtcttcgagctgccgttcgcgcagcagctcaagatgctgcacaacgatctgctggacatcggctttggcttgtcaaacgcggtgcatgatggcctcgtcgccgagccggtgtggaccgatccgctgtcggtgatcgtgcccgcacgccaccccttgctggcacacgtgcaggtgccgctgcccgaagccttgaagtttccgctggttctgtgccaccccgaggcgggctccggttgccgccaccagattcaggcggtgctgcaggacacgaacatgccgctcaagctggtggacgaagtgaccagcctgggcgtgatgctgaccctggtcggcgccggctacggcatcggcttcgccatcgcctcgcaggtgcagacgctacagcgcccggacatctccattcgtcccctggccggcatcccaccgatgctctccacctacctgctgcgccgccggggcgaaccctcggagcccatgaggcggttcatcgagcgggtgaaagacggggccgcgccggtcgatgatgagccggtcctttga

SEQ ID NO: 250930 - DNA, 498 bp, Klebsiella pneumoniae
atgccggtgaaacacacgcgccgcggccttccgggtggaacccgaggactgtatgaacttgccagaacatccagcgatggcggaacgcgcgttcattcagggttcttcaacggcctgctaactcatttattacgaacgttttttccgatccaggcgtcacggaatggactcgattgtggactcaagtcttcggcctggtcaacgcaggccgttgcgggtgatccaaagcgagccaagcacatccatcaacagccagagcatcggatttcattccgaagtctatctgtccaccggcacataacgccacaggccgcaacggacaggcgagctgcgtcctcaaaggaccggctcatcatcgaccggcgcggccccgtctttcacccgctcgatgaaccgcctcatgggctccgagggttcgccccggcggcgcagcaggtaggtggagagcatcggtgggatgccggccaggggacgaatggagatgtccgggcgctgtag

SEQ ID NO: 250931 - DNA, 1095 bp, Klebsiella pneumoniae
atgcgaggagcggacagctacaacgaggctctgttcagcacgatacggctggaggacttcgtgccggccgagcatccgttgcggccgattcgcgtctgggtcaacgacgcgctgggcaagatgggcgatacgttcgcggccatgtacgcagccgacgtcaagggcggtcgcccgagcatcgcgcccgagaagctcatccgcgcgatgctgctgcaggtgctctacagcgtgcgcagcgaacgccagctcgtcgagcagattcgctacaacctgctgttccgctggttcgtcgggctgtccatcgacgacgaggtgtggaaccactcggtgttcagcaagaaccgcgaccggctgatcgagcacgatgtggtgaccgagcttttcaacgccacggtggagatggcgcaccagcgcgggctgctgtcgggcgaacacttcagcgtggacgggaccttgatccaggcctgggccagccacaagagcatgcggcgcaaggacggttcggacgacgggcgcccacccgaggactggaaaggccagccccgcagcaacgacacgcacgaatcgacgtcggatcccgacgcgcggctgtaccacaagagcaacgccgcacctgcgctgccgagctacctggggcatgtgctgaccgacaaccgccatggcctggtggtcaacgtgcaggccagcaccgcggacggcacggccgagcgcgaggtcgccgcgcagatgctgggcgacgttgcaagaccgggcaagcgcgtgacggtgggtgccgacaaggcatatgacaccaaggggttcgtcaaggtgtgccgggagatcggagtgacgccgcacgttgcgcagaacacgagccgcaatggcggcagcgccattgacgggcgcaccacgagacattctggctacgctgtcagccagcgcaagaggaagcgcatcgagcagtgcttcgggtggggcaagctcatcgggccgatccgtcaggtgatggtgcaaggactggacaaggtggaccagcttctgaccctgacgatgacagcctacaacctcacacgactgcgcaacctggcgcagccatgcccggggtgcgtccaatga

SEQ ID NO: 250932 - DNA, 1080 bp, Klebsiella pneumoniae
atgcgcggccaagagaatccccaagcgtcgatgttcagctacgtgagcctggagcaacgcgtgccgaaggaccacccgctgcgcactctgcgtgcgctggtcgacggcattctcgccaacatgagtgcgctgttcgatgagcgttactcgcacaccgggcgcccgtcgattccgcccgagcagctgctgcgtgcgctgctcgtgcagatcctcttcacgatccgcagcgagcgccagctcgtcgagcagctcgactacaacctgctgttccgatggttcgttggcctgggcatggatgacgcggtgtgggaccgcaccgtcttcagcatcaatcgcgaccgtctgctcggcaccgacgtcgcacgccagttcttccgtcgcgtactgcatcttgccgagtggcagggcttcgtctccgacgagcacttcagcgtcgatggcacgatgatcgaggcctgggccagccacaagagcttcgttcccaaggacggcagtggcccggacaagcctgccgggcgcaacccggaggcggacttcaagggcaagacgcgcagcaacgccacacaccagagcacaaccgacccgcaggcgcggctctacaagaagggcgagttcgcggaagcgaagctgcgctacatggcgcacgcgctctccgagaaccgcaacgggctcgtcgtcgatgtcgagagcacgcaagccacgggacgcgccgagtgggaggcggcgatccggatgattgatcgcagcgtgcgcaagccgggcgcgacggtgggtgcggacaagggctatgacacggccgagttcgttgccgcactcgaacggcgcggcatcaaggcacacgtggcgcgcaaggtcagcggcagcgccgtcgatggacgcacggcgcgtggcaaaggctacgcgatgagtctgcgcaggcgaaagatgatcgaagaggccttcggctggatcaagacggtgggtggtttgcgcaagacgcggcacaaggggctggaaaagctctcgggccaggcactgttcgcgttcgcggcgtacaacctgacccgaatgctgagcctgatgcgagcggctgccgcgtag

SEQ ID NO: 250933 - DNA, 378 bp, Klebsiella pneumoniae
gtggatgcgcgcgtggtggttgccaaggcgctggccgctgacaagtttgcggcctggtgcgcggagctgcctcccggctgcctggtggccctggaggcctgcggcggtgcgcatcactgggcacgcaagctgcgcggctatgggctggatgcgcggctgattgcaggccacttcgtcacgccctaccgcatggccggcaagggacgcaagaacggtgcggccgatgccgcagcgatctgcgaggcggcaacccgcccgcacatgcgcttcgtgccggtgaagccgccggcgcagacgctgctggccagccatcagctacgcaaacctcccgattcactcacgcagcttattcctgcttgcctagggacgaccatgtaa

SEQ ID NO: 250934 - DNA, 495 bp, Klebsiella pneumoniae
atgaagtcaacaggccgcaatccatttcaggtcttccgtgaccaatgggccatcatgagtttttacgagcgcttcgagcaggtcgtcgcgctcgtgctgtcggcggtgattgccgtcatcatcgtggtgtcgctgttccagctcatctccatcgtcttcacgctgctggttctcgatgccttcaatcccctggatcacaaggtattccagagtgtgttcggcatgatcatgacgctcttgatcgcgatggagttcaagcattccatcgtgcgcgtggcgctgcgtcgggacagcatcatccaggtcaagaccgtgatcctcatcggcctgatcgcgctggcacgcaagttcgtggtcctcgaccccgacacgagtcccgccaaaatcgccgcgctggcaggcgccacactggcgcttggtaccacttactggctgctgcgcgatcgcgacgaccgcgtcgccgagaaatctgggcatgaatcgtcatcatcctag

SEQ ID NO: 250935 - DNA, 909 bp, Klebsiella pneumoniae
ttggaactcagactactgcgctatttcgttgcggtcgcggaagaactgcatttcgcgcgagcggccgagcgccttggcgtagaacaatcgcctgtgtcgcgcgcaatgcgcaatctcgaagccacgctcggcgtgcagttgttcgaccgcagcgcgcaccagacgcgactgacctgggccggtcaagtgttcctcggtgagtgccggcgtgtgctggccaccgtggagcaggcggtgagtgccgcaaaggcggcggcgcagggctatcagggttatctgcgcatcgccatctgcgacagcttggcgcagccccacattgccaccttgctggcgcgcagccgcgaggaagagcccgaactggagattcgcgtcttcgagctgcctttcgcgcagcagctcaagggcctgcacaacgatctgctggacatcggctttgcgctgtcggacgcggtgagcgaaggccttgtcgccgagcccgtgtggaccgatcctctgtcggtgatcgtgcccgtgcgccaccccttgttggcgcacgcggaagtgccattggatgaagccttgaagtttccgttggtactgtgccatccggacgcgggatcgggctgccaccaccagatccaggcggtgcttcaaggtgcgtccaagccgctcaagctggtagatcaggtgacgagcctaggcgtgatgctgactctggtcggtgccggttatggcctaggtttcgccattgcctcgcaggtgcagaccctgaaccgccccgacataaccgttcgccccttggccggcacgccgcccatgctgtccacctacctgctgcgccgcagcgccgaaccctctgagcccatgaagcggtttctgcagcgcgcccgcgaggagttcctgccaaagggagatgaaccggcctcgtga

SEQ ID NO: 250936 - DNA, 372 bp, Klebsiella pneumoniae
atgtttaatttaaggggaatagcaggcgattcccctttctccattcaacaagaagccgaattaatgataggtcacgttataagtcacggttgtctgaacggtacctttcgtcggatcggcatcacccgatttcaccattttaacggtgaacggaatggttgctgcacccgaagagatatcaacatcagaaccctattcgttattcttcatcacattgcccgcttcgtcgaaaagggccacagcgacgccggttgccggctcatcagttgcctggtttttaaaataatcgctgttcgcggtatcggaaacaccgccaaaagtgacgcgggcgatactgttgccaccttcttccgcggtcgggcaatcagctaa

SEQ ID NO: 250937 - DNA, 999 bp, Klebsiella pneumoniae
atgatggatgcgagagtgacaacaataatcaaaaatatagtaattaaaggtctttttaaacgaaaagatatagactggaatttaaaagacgtaaatgtcttggttgggaaaaatggttcaggtaagagtacaataattcagattattgctgctctgctgcgacaggaattaaataacagtttaagtagttgtgcattttctcaattgacattggaaaatgaaggtacagtcacacataaagttaattttcttgatgtcgatgctaatcaactattaactcttcttaacactatcaaaaagaacaacctaaaaggtagagtcaaaaataaagaagtaaaacaattgaatgaattgattcatttgttagagtcaaaaaatgaagattcggaaattaaagagtttggaatgggatctcttgaggtaagtgataacctcaaaggtactaagcagataaaagttgatctcatatctacaattaacatgagtgcaaattccatatatgaatttaaaaaaagtgatggtgaacgtactactatccttgatatggaaatagctagtgagttagaaaagttaaaaaacacattcaaaattagtgagggtgctggtgtttctatacaggggaaattagagtcagcaattaatagcttattcgctgaatgtaataaatgcgttagttttgataacggcaaaattcttattaaaatgaatgactctggtgaggaaattaagtacaaccttctttcatcaggtgagcgtcagttgttatatatcttaataaaatccgctaacgcttgtcttgaggatactgtcttattaatggatgagcccgaaatatctctccatctaacctggcaagaaaaactgataaccactataaaatctattaatgacaactgccagttgattattgtaacacatagccctgctatactaatgaaaggctggatggattcgttcgtagatataaagaatatttcgaaggaatcttctaatgactga

SEQ ID NO: 250938 - DNA, 981 bp, Klebsiella pneumoniae
atgactgaatttgaagatataagttttagcgaggaatatctacaggtttattgtgtaatggcaggacacaatggatttgtttttgttgagggtcttaaagacatatctttctggggaggaattctaaatgataaagataaaggcattcgttttgatatctgtaatcccacacataaaggaaccaaaggaaaaaccgtattaaggcaattcatgagtcgggcaaatcgttatgctatatttgcaatggatagtgactttgactatttatgcccaggtaatagcgctgactctgaaataatttgcagcaataaatacattttccatacattggtgtattcaaaagaaagcatcgaacttcagcctgaagtccttgagcactgcgtttcacaaataaagcttgcgacggatataaaatttaattttgaatcctatatgaatgaatactctcttctaatctacccattgcttaaaaaatatttgctgcttaaacaaaacaaagtacgacttgatgactcaaaattccacgaagctatcactccctcgttgctaaagatttcgcatgactttgtaattcagaatgcagtatttggaactatggagcaatcgatatcagtatttgaacaggaactcgatgcgcaaataaaagatacttatgatagtgaggggtattatagccagttgcacgaaaaaggactaagggaaaataatgcttatcagtacattaatggtcattttttagctgatagagtcgttatgcctgtcataaagtgccttattgagcagctaaatattaatgaaacggctttgattgttaaacaatgcaaagagaagccaactatgatttcagaaagaaaaaatgaattgaaaaatatccttgaaacagaattaaacataaatacattattacattgctgcaaagaaaaattccaaacctcaagtgctatggctgttaaggaaaaagtagccaaggcgttaatgtga

SEQ ID NO: 250939 - DNA, 156 bp, Klebsiella pneumoniae
atgggttggactgtccgctcctggcacgaagcggacgtgttaacgaagctgaaggtccgctgggagcgaggagcggaagttgcgtactatcttttatggcatagtagtttaggcatcccgctgaatatggcatattcatgtgtaggaaacatttga

SEQ ID NO: 250940 - DNA, 1101 bp, Klebsiella pneumoniae
atgttcgatgttgacgatactgcacccgatactcccgacccccgtgaactcagtcaggatgtacaggcgctgatcaacaatggtctggattttctggataaagcccgtgaagagttggaggcctcgaagccgaagttctccgtcgtcagtttctggactgcggtcgagattttactgaaagttccgctggcgcacgaacactggtcgttggtctgcagcccgaaaaagccaataaaaaagcaggcttacctagccggtgattttcagtcggtgacctacgaagaaacccgtgaaaggcttaaggacgtacttgaaagacccctagacagagaaacggacagtgcttttgataaggtcagaaagcaccgcaaccgcgtagttcatttctaccaccccactttcaccgaggctgaacaacgtcaaatactcaaagaacaagctgacgcctggtttgccctgaaccggttattaagggatgaatggaaagttatcttcggtgtcaaacataattggaagctggctttcggtgaaactcgtctgattaggggaaacgaattttatgccgaggtgcggtttaaacaggttaagcctgaactcgagcagctctctgaaaagaatattcaaatcggtaactgcaatgagtgccatcagcatgcgacggtaacaggaactgaaacgaccggtaatgaaaaccgcaagcttgaagttacgcggtgtaaggtttgcaccagtgctgtaaggcaaattaccctggtttgtccagactgcgaaatacctcaattgctacctgagggagatggtgattttgaatgcgaacactgcgactacacttcggataggtataaactgctggatgaggagttgttccacagtgtggatgaacagctactctccgtatttcctgctggatgtaccaattgcatgactcctgaaagcgtatgtaaatttggagacggctatctttgcactcagtgtttcatctattacaccgagcttcatgtatgtggttgttgcggtcacctgagcgatagcgttcctgaactgagccatatccgaggatgtgaattttgtgatggtgaccaacgttattttgatgactga

SEQ ID NO: 250941 - DNA, 1107 bp, Klebsiella pneumoniae
atgggccgggaaggcctgcagatcgctatcgaccgcctggagaccatagaacggcgcttccccgctcagcgccgcgctggcggcttcgaccgcgtcggcgccgtacatacggatgaaggcgttcaggtactgcagcggctgacgctcttcttcctggctcagcagcagcagggtttgcagacagcgatagtagttcgcgcgctccgcgctgaaaaccgaagcattgaattccatggtccactcggtccagatcagcgcctgttccagatcgccgccggccagggccagcatcgctttcagctcgccgacgcgcagggtataccagccgttgtcttttccggtggcgagccccagcagttcgcgaacgcgggtgaaatcatccagaccctcatcgtccatctgctcgatcagcgccaggtaatcttctttatcccactcgctgcccggcagggacagaatggtgtcccgcagatgagcgcccatgctgttgttcgccagccacaggtcttccgccgggtatatgtccgacatccccgggacgatgatacggcaggcgtaaacgcccaggtgctcgtagtcggcgatgtacacttctttatcttcggccttgaagatggccatcagggtggcgaactcttcttcggtagtaccagagaagctccagtcaacgaatggatagtcggcgtcctgcttgaacatatcccaggagatcaggccgctggagtcgataaagtgggtttcgaggttcgcgtgctcggcgacctcttcgtcatcgaaggttggcggcgtgaagacatcgaggtctttcaggctgcggccctgcagcagttcggtgacggttcgctccagcgccacgccaaagtccgggtgggcgccgaaggaggcgaagcaggtgccgttagccgggttaaacagcacgacgcagataaccggatatttgccgccgagcgagccatcataggcaaagatcgggaaaccttcagcttccagtttggcgatcgattccacgacgcccggatagcgcgccatgacttccgccgggatctccggcaggctgatgctttcagcgatgatgcggtttttaatgtgacgttcaaagacctctga

SEQ ID NO: 250942 - DNA, 204 bp, Klebsiella pneumoniae
atgcacggttatttccgtatcacccacaatctggttcttggaatacaccagagaaccagaatccaatttattcagaagataaccttcagtctgtcttttaaaatcttcgaactctgcaatttttgctttgagatgcattacctcttcatcacgaaggcgaatagcattgccaagagagaagcattcagcctgaagagtaattag

SEQ ID NO: 250943 - DNA, 228 bp, Klebsiella pneumoniae
gtgaacaacattgcttctgagcgtaaaaagctgggcatctctcaagcacagcttgcaaaaactctcaattggggtcgttcgcgtctatcaaattatgaggccaaccttcgcgaacctggattgacggagtgccgttctattgtggatgcacttaacaaactaggagctgaatgttcgcttgatagcgtcttcccgactgataaagaactgagtgggaggcaggcttaa

SEQ ID NO: 250944 - DNA, 903 bp, Klebsiella pneumoniae; identical to SEQ ID NO: 250124

SEQ ID NO: 250945 - DNA, 591 bp, Klebsiella pneumoniae
atgagtgatgaacgctaccgcgaacgccagcagcggctgaaagataaagttgacgcccgggtggcggcggcccaggacgagcgcggcattgtgatggtctttaccggcaacggcaaaggcaaaaccaccgccgcctttggcaccgcgacccgcgccgtcggccatggcaaaaaagtcggcgtgatccagtttatcaaggggacctggcctaacggcgagcgtaatctgctggagcctcacggcgtcgaatttcaggtgatggccacaggtttcacctggaacacccaggatcgcgacagcgacaccgccgcctgcctggcggtctgggagcatgcccgccgtatgctcgctgacgaccagctcgatctggtgctgctggacgagctgacctacatggtggcgtatgattacctgccgctggagtcggtgctgagcgccctgcgtgagcgccctgcccatcagtcggtgatcatcaccggccgcggctgtcatcgcgatattattgaactggccgataccgtcagcgaactgcgtccggtcaagcatgcatttgatgccgggattaaagcgcagatggggattgactactga

SEQ ID NO: 250946 - DNA, 801 bp, Klebsiella pneumoniae; identical to SEQ ID NO: 134911

SEQ ID NO: 250947 - DNA, 252 bp, Klebsiella pneumoniae
atgcaaggtacaacccaaccaatcgatcgccagacgctgctcgaaaaagccaacaaacttattcgcgaacatgaggatacgttagccggtatcgaagccaccgacgtcgttcagcgcaacaatgtcctggtgtttagcggtgagttttaccttgatgagcagggactaccgacgccaaagagtacagcggtatttaacatgtttaagtatcttgctcacgagctgtcggacaagtaccacctggtcgattaa

SEQ ID NO: 250948 - DNA, 2598 bp, Klebsiella pneumoniae
atgggtaaagctctcgttatcgttgagtccccggcaaaagccaaaacgatcaataagtatctgggtaatgactacgtggtgaaatccagcgtcggtcatatccgcgatttgccgaccagtggatcagcttccaaaaagagcgccgactctaccgccaccaaaggggctaaaaagcctaaaaaggacgaacgtagtgctctggttaaccgtatgggcgtggacccatggcatgactggaatgcgcactatgaagtacttcctggtaaagaaaaggtagtttcagaactcaaacagttggcggaaaaagctgaccacatctatctcgcaaccgaccttgaccgcgaaggggaagccattgcctggcacctgcgggaagtcatcggcggcgatgaacagcgttacagccgcgtggtgttcaatgagatcaccaaaaacgctattcgtcaggcctttgaaaagccgggcgaactgaatatcgatcgggttaacgcccagcaggcgcgtcgttttatggaccgcgtggtgggctatatggtttcgccgctgctgtggaaaaaaatcgcccgtggtctttctgccgggcgcgtgcagtccgtcgcggtccgcctggtggtggagcgtgaacgtgaaattaaagcgttcgtcccggaagagtactgggaagtcgacgccagcaccaccacgccgggcggtgacgccctgccgctgcaggtgacccataaggatgataagccgttccgtccggtcagccgtgatgagaccatggcggcggtatcgctgctggaaaaagccagctacagcgtactggagcgtgaagataagccgaccagcagcaagccgggcgcgccgttcatcacctccaccctgcagcaggcggccagcacccgtctgggcttcggcgtgaaaaagaccatgatgatggctcagcgactttatgaggcagggcacatcacctatatgcgtaccgactccaccaacctgagtcaggacgcgctgaacatggttcgcggctacatcagcgacaaatttggcaaaaaatatctgccggatagcgcgaaccagtacgccagcaaagaaaactcgcaggaagcgcacgaagcgattcgtccgtctgatgtgaacgtgctggcggaaacgctgaaagatatggaagcggatgcgcagaagctttatcagctgatctggcgccagtttgtcgcctgtcagatgacgccggcgcagtacgactccaccacgctgaccgtggctgcgggtgatttcaaactgaaagcgcgcggtcgcactttacgtttcgacggctggacaaaagtcatgccggcgctgcgcaagggcgatgaagaccgaacgctgccgctggtcaaacagggcgaccgcctgagcctggtggagctgacgcctgcgcagcactttaccaagccgccggcgcgtttcagcgaggcctcgctggtgaaagagctggaaaaacgcgggattggccgtccgtcgacctacgcgtcgatcatttcgaccattcaggatcgcggctacgtgcgggtggaaaatcgtcgtttttacgccgaaaaaatgggcgagatcgttaccgaccggctggaagaaaacttccgcgatctgatgaactacgattttaccgcgcagatggaggatcgcctcgaccaggttgcgaaccaccaggccgagtggaaagaggtgctgaaccacttcttcggcgattttaccacccagctggcgacggcagagaaagatccggaagagggcggcatgcagccgaacccgatggtgcttaccagcatcgactgcccgacctgcggccgtaaaatggggatccgtaccgccagcaccggcgttttcctcggctgttcgggctatgccttgccgccgaaagagcggtgcaaaaccaccatcaacctggtgccggagaacgaagtcctcaacgtgctggaaggcgatgacgcggaaaccaacgcgctgcgcgccaaacgtcgctgccagaagtgtgggacggcgatggacagctaccttatcgatcctaagcgtaagctgcatgtctgtggtaataacccgacctgcgacggctacgagattgaagagggcgaattccgcatcaagggctatgacggcccggtggtggagtgcgagaagtgcgggtctgaaatgcacctgaaaatggggcgtttcggtaaatacatggcctgtaccaacgacgagtgtaagaacacgcgtaagatcctgcgcaatggcgaagtggctccgccgaaggaagatccggtgccgctgccggagctgccgtgtgagaagtctgacgcctactttgtgctgcgcgacggggcggcgggcgtcttcctggcggccaacaccttcccgaaatcacgggaaacgcgtgcgccgctggtggaggagctgtaccgcttccgcgatcgtctgccggaaaaactgcgttatctcgccgatgcgccgcagcaggatccggaaggcaataaaacgctggtacgctttagccgtaaaaccaagcagcagtacgtggcgtccgaaaaagagggcaaagcgaccggctggtcagctttctttatcgacggtaagtggacggaagccaaaaagtaa

SEQ ID NO: 250949 - DNA, 975 bp, Klebsiella pneumoniae; identical to SEQ ID NO: 134907

SEQ ID NO: 250950 - DNA, 168 bp, Klebsiella pneumoniae; identical to SEQ ID NO: 134906

SEQ ID NO: 250951 - DNA, 471 bp, Klebsiella pneumoniae
atgcctacattgagagagtggaaggagcgccggccggcgagcgacatcaaacagacggtggagttttatcaccctgcgtttggttattaccgggtggtcaataatctgtttcgcccggcgacgttcggcggaaactcgtttgagcctgcgcggttcagcgtgaccgagccggcgcaggacgggacggcggtcatatccatgacgatcacttttgtcgccgcgacggagcatgtccggcagacgctgaaaagctggcgcggggcggcgcgcatgacgccgataaagtgcctgtatcagcagtggaatgcgattggtgatgcatcatccctgaaagactggacgctttacgtgaacgacatttcagccgatgccagcaacgtcaccgtgaccgccggaaagactaacccgctgacgctggccaactccatcatttacaccacgaaagactatcccgggctaatcaccgtatga

SEQ ID NO: 250952 - DNA, 477 bp, Klebsiella pneumoniae
gtggcaacagttcaataccctccgttcctgccactgccccagcgcgccgatcagaacatgacgcaggatacagcctggcagacgacgcagacggcaatcggtccattgataatcacgccgatcactacggaccttaaagcgacatggacgctgcagtggatattcacgctcgcgcaggccgagaggtttaagtcgtggcttcgctcgccgacgtactgcgaccgcgggcgtaactggttccagatgccgatcgacctgggtgacacgcagggtgtgcagcagcagacgctgcatttcgtcgatatgccggtgcagaccagcaaaaacggcaacgtagtcacctggaccgcaacggttatcagtaacggtatcgaggatattactgaagattacgacgactggattgtcgaggctcagcctggctatggatactggctggattacctgatcaccgaagtgatgccgagggccgactga

SEQ ID NO: 250953 - DNA, 261 bp, Klebsiella pneumoniae
atgtttacccactacggtcaacgtattgaactcaacgcgatgctttttgagaagtgcaatcgccgccatcactttatcgtgagtacctttaccggcacgattaacacggtactgattatggagatgtgctggcccatcaatggagatgccaaccagaaaatgctcctcggcaaagaaacgtgcccactcttcatcaacgagcataccgttggtttgcagcgcgtgttctatcttcttgcccctggcatattggttacttag

SEQ ID NO: 250954 - DNA, 237 bp, Klebsiella pneumoniae
atgatgaatgttacccagcttatgctcgggataaacatagtggtcgcagttgtagagatcgccattcgactccagggcaaaagcgtggccgcacgttggcgaatgaacacacaaaaccgggggctggcccatccacgccgccagagcgacctcaaacatctgcacaataacgcgctcgacatcgcgccggatccagatatcgaatatctgattcaggaaatcgccaaactgccatga

SEQ ID NO: 250955 - DNA, 177 bp, Klebsiella pneumoniae
atgcgcatcgtcgacaacaacacaaccgatcggaatcttcttctgtccgaccccaaaaaccgagcgtgcgttgaagagcttccacacgttggcaacaaggatggctcgacctgcaaggaagtcggggtccttctcgtcatctgtagcgggaataccaagctctttcgcctcatgtag

SEQ ID NO: 250956 - DNA, 1122 bp, Klebsiella pneumoniae
atgacgacgattttaattaaagacgcgctccgccagtcggtggaggccgccagcggcgggttacagacggtgctttatacggcaaaaggccagccgtcgtttatgaacattattgaaaaattcgacatgtcggttattgacccggccctgagcgggacacacccggcgtttattatcaatggtacggaagtcagtcagatcctggtgggtacctacacggcgtcgttaatcaacggggagttgctgtccctgccgaatcgccagccgtcaacccccgcgctggcggcggcggtagccgcagcgcgcgcgggtggggatggttttcacgtcatgaccaatgcggagtggtctgcggttcagatgcagtgttacgcgctggggttcaaccctaaaggaaataactattacgggcgggatgcaaccgacagcacgcaatacggccgccgggtggatggggtgagcgccacagacggtatcacaaccggcacgccggtgatttacacaggctcaggcccggtgtcattccggcacaataacgcgtacaacggtatcagcgatgtgaacggaaactacaacctgctgacaccagatgtccgtctgtgcggtgccaccggtgagctgcatatttttgcaaacaataacgctgctgcgggggcggtcgatttgtcagccacttcgtcagcctggaaagcgatcaacgcagtcaccggcgagttaatggagctgtcatatacgggcacaccaggcgtggattttgtttcgaatctggcgaacagcgtgaagatcctcaatgtatcagcggtgggtaataactacacgctcaccgccactgacggcgctgcgttttcatccatggccaatgctggcgcgatcccggtttcggcaacggcactggcggtactgaaaaagtacggcctttatccgctggtagccaatgccgccacgctgggcggcgacaaaattgtgatttccgccacccccgcaacggctgcgaccgaacgcatgttgcgccgccagggttcctatatggatggtgcgtctgccggtgtctggatggctggttttaacggtgttcgtgctgcgagcggagtatcggcgtttcgtgtggcgtattacgcataa

SEQ ID NO: 250957 - DNA, 396 bp, Klebsiella pneumoniae
atggcagttatcgacctgagccagctccccgcgcctgatgtggtggaaacgctggattttgaagccatcctcgccgagcgcaaagcgacgctgatttcactgtacccggaagacgagcaggaagcggtcgccaggacgctgacgctggagtcagatccactggtgaaatatctggaagagaatgcttatcgggaggtgattttacgccagcgtatcaacgaggcggcaaaagccggaatggtggcctatgccatcaaaaacgaccttgaccagctcgcggcaaataataacgttgagcgcctggtcattacccccgcagatgatacccaaatcccgccggtggtggcggtcatggaatccgacagcgatttacgccagcgcattccggccgcatga

SEQ ID NO: 250958 - DNA, 1080 bp, Klebsiella pneumoniae
gtgcagggggattcgtccgcagcctacgcgaaaaaaaatctcaatatcgggttatatattgacgacaaatacgatgatttatttacgctaaaaattggcgactgcctgccgcacgatgaatgggtgtttaaggccaactggattgaccacacaaacctacgcaacctgatgagttatcatctgtgggaacgaatgatggcatcccgcgacggctggccgaaacgtgatatcgataattattacgtcggaaaaaccgggctggatgaaatggatacgcgggcaacgggataccctgtcggctatccctgcgtcatgtatatcaatggtgatttctacggcaccggggcgctggctatcggcaaaaagaaagaaaattataatattccgaaaaataaagccgaacagataatgattatcatggggggatggaagtccatcacgaccatgtacgataacgctcaggttaccgatacggataccatagaaatcaaagcgccgaaaaccgtgtcggaagaaacgctgggctacctgcaaacatgggacgcctttgcgaatctggcgcaggctgattttacacaacaggccccggaacatctcgatacccgcaatattgttgatttttatttgttgctggccgccgtcggtgcgacagacctctttgccggtgataaggccaaaaacgcgattttttatacctgggacgggacaaagtggtatttcgggccgtatgacctcgataccacttacgggttgcattacaacggcacgcagattagttatgccgctgattcagcaccgaaaaccgacggcggtacgttctggaaaaaaatactggtcacgtatgctgacgagctggcggcccgttacgccgaactccgcgataaagatattttcagcgtgaattgcctctatgacattgccgccggactgtccgcgaaatatacccacgaactggataaagcggaaatcaataaatggccgacgaaaccgtcgctaaccgtcacgagtcgcgatcagatattcagctggtttaacgaccgtctggcgtatctcgacaataaatttaattacacccgataa

SEQ ID NO: 250959 - DNA, 1122 bp, Klebsiella pneumoniae; identical to SEQ ID NO: 250956

SEQ ID NO: 250960 - DNA, 492 bp, Klebsiella pneumoniae
atgaaacctgccggcgtttacatctgtccgaaatgtggttttaagcccttggttggtgaggacgtagaaaccgacaacacccgcaacctcaaaaaaatgagtaaaggcgagacggtttacaccaaaagccacaaacagtcctggtggagtcagatcaagttctatcagcgccatcgtgccgcgcagggaaaacctgtcagcgacggttggtgtgcgcatacctttcaggaaaagtttggtgaatggccgaacggcttaagcgacttcccgatggagatcacgccggaggtcagcaaccacattaaacacaaacttatcaaattcgctaaaggccgcgaacgggcgcagcagattgcgaaaaaaccagtaaatgatctgctcacacctcaggactacagcgcccactacgagccgcctgagggaagtgacggacagttaattatcgaagcaaaacgaaagctccagaaaaacgtaaatagcgtgagtcagtga

SEQ ID NO: 250961 - DNA, 963 bp, Klebsiella pneumoniae
atgaaaacagcagaagcagcaaaaggccggtgggcggaaatttttgaatattacggcttaccgccgatcaccgggaagcaccattacaagggcgagtgtccggtatgtaaggcgagggggaagtaccgcgtagatgaccgtgatggtcagggcacatggatttgtgtatgtggtagcggcgacggtatgaagctgctgaccctcacccagtcaaaaagcttttctgccatctgcgcagaagtggatcagttaatcgggaatgactatcagcgcatcaatgtaccagctaacagctcagcggctcgacaacgccagcgagtcatcagcaagttttccaagttgctcgatttacggggaaccagcgcggcgggttatctcctgcaacgggggataagccgcctgccggcagaaggcgttcgtttttgtgaccgtcagcgccatgctgggcgcgtatatcaggccctgtatgctctggctaccgatgacaaagccgagctttgttacctgcaccagacgctgctggacggcgacaggaaagctgatattgataacgcgaaacgtcttaagtcgcttcaagaggacagttatttggatcatgcccgctctgtggccattcgcatgtttccggtatcgacgacgatcggcatcgctgaaggcatcgagactgccctgtcgtgctatcaagtttatagcgtcaatacctgggcggtaatcaacagcgggtttatgaagaaattccgggtcccggcaggtgtgaagcatctgattatttttgccgatatggacaagcattctgcaactggacatgccgcggcgttcgagtgcgcccacgcaaatctgctggcgaaaaacgacctggtgaaagtcagcatacgctggccggataacggagatttcaatgatatgcttatgaacggcgatcaagttcgtgaacaagttttctataaaaaggtggcagcatga

SEQ ID NO: 250962 - DNA, 477 bp, Klebsiella pneumoniae
atgatgaacaataacaatctgcaacataaccaattcttcaccatcgaacaggacttttcgcctgagaaaattactgatgctgagcgtcttgttatggagcgcttcagttatatttatgcaaactgggccgatgaaaaaaacttaagtcgtgaggcggaagaacttcgagttaaagaaataaaaggttttaaaaacatcctcctctctccctggacattaagcgatgtaaccattgaatgggattactgggaatccatacttcatcacaggtataaaacacaaaatggcgatggctacgtccagattatctgggatcggcgcgggtggctcactgaccttttgtgcgtcataaaaccagttacccggactgaagcattaacagtctgcaagtggttactggcatgtgactattttgaggaacgggattcgctgtttgatcgcattattttgaacctggtcggggagtgcgaagtatga

SEQ ID NO: 250963 - DNA, 489 bp, Klebsiella pneumoniae
atgctgggctgcggcagaaaaccccgcgccgatcatccctcgcatcaccagcggagctctggctttgccaccaaacatgtagcggaacttagccgcctggttgtacagtgcatcgtggctcacgccaaaaaaatccatgaacatcaattccgcgaccggccgcaaacccgtcgctgcggcgccggccgccataccgatgatggccgactcggtaatgggcgtgtcgatcacccgatcggagccgaactgcgtccacagccctttagtgacacccagcacaccgccaaaggcttctattttagcctcttcgggcgcatttccgccatgaccgccacgcaagtcttcaccgatgagcaccacgcgttcatcgcgttccatttcctgagccagggcttccttgaccgcttcacgataggtttttattgtcatggttatcaccctcagtatgagacgtacacgtctgtcagcaggtcttccggagccgggtag

SEQ ID NO: 250964 - DNA, 960 bp, Klebsiella pneumoniae
atgctcagcaaacaggcgttattgcaggcttaccgcaagatgcgggagatcagaacatttgaagagcggttgcatcaggaaaataccagcggtgatattccgggcttcattcacctttacaccggtgaggaggccatcgcggtgggggtctgcgaaaatttaacgagcgcagattttattggttcaacacaccgtggacatggccactgtattgctaaaggttgcgacattcacggcatgatggccgaaatattcggtaaggacagcgggttatgtcgcggtaagggcgggtcgatgcacattgccgatctgtcgaaaggaatgctgggggcgaacgctatcgttgggggagcccctcccctggccatcggcgccgcgctaacggcaaagacgctaaaaaccggcaacgtcggtgtctcttttacgggcgatggtggttctaatcagggcctggtctttgaagccatcaatatggccgtcgtgctccagcttccagccgtctttattttcgagaataacggttacggcgaagggaccggccatgactacgccgtgggtgggcgtgatatcgcccggcgcgccgctggcttcggcctgccggcagtgaccgtcgatggcaccgatttctttgccgtttatgaggcaacctcagaggcggtcaagcgtgcgcgagaaggcggtggcccaagcgtcattgaggccaaagccttccgctggcatggtcattttgagggcgatcccgcgctatatcgtgcggaaggtgaagtgcaacgcctgcgtgaacaacatgatccgctgaagattttcaccgctaaggtcaagcaacatatcacccaggaagaactggcggcgattgacgaggaagtagaaggcctggtcaacgatgccgtattgaaggcccgcgccgctgcctacccggctccggaagacctgctgacagacgtgtacgtctcatactga

SEQ ID NO: 250965 - DNA, 288 bp, Klebsiella pneumoniae
atggctggccgtgacctcaattcccccgtcaacgcccagatggaacgtggcaaaatagatctcttccgtcccgctcaggccgatatccagcacatccgtccccgcgtccatcagccccctggccagcgccagcttcagggattcgctggtgaggcgcacatcgccccccaccacaatccgttctggcttcaggaattccccgtaagcgcgcccgatacggtaggcgatatcttcgttcagctcttcgcccagctcgccacgaatatcgtaggctttaaaacagtttaa

SEQ ID NO: 250966 - DNA, 213 bp, Klebsiella pneumoniae
atgctgttgaacctccagcgcgtcgtgatagcgctggttaacaacatggcaatagctgagaatattgcatatcagaccatcaacccaggtgtcgccgcagggcacttcggccagcaacggctgaacaatagccagactctccgggatgttttcagcaaaggcttcgcaaattgcccgcacaacgcgcaatttacaccaggtgctgcgggttaa

SEQ ID NO: 250967 - DNA, 204 bp, Klebsiella pneumoniae
atgaagcgtattaaagccaagggtattcctgtcgttatttatgaaccagctatgaatgaagaagagttcttcaattctcctgtcattcgcgatctggatgcatttaagcaagaatcggatgtcatcatctctaaccgtatggcggacgagctctctgatgtagcggataaggtgtatacccgcgatctgtttggtaacgattag

SEQ ID NO: 250968 - DNA, 771 bp, Klebsiella pneumoniae
atgcttaaccagaaaatttctccgattgtcgataaagaaattcaggaatatctggccgaaaaaccattgaattttcgcgcgacaacggataaacacgatgcatatcgtaatgccgattatgtcattatcgccactccgactgactatgatccgaaaactaactactttaatacgtcgacggttgaggctgtcattcgtgatgtaaccgaaattaacccaaatgccgttatgattattaaatcgacaattccggtcggttttactcgtgatattaaagagcgtctgggtatcgataatgtcatattctccccagagtttctgcgtgaaggacgtgcgttgtatgacaatcttcatccgtcccgtatcgttatcggtgaacgttctgaacgtgcagaacggtttgccaacctgctgaaagaaggggcgattaagcaggacattccgacgctgtttactgattcaacggaagccgaagcgatcaagctgttcgccaatacctatctcgcactgcgtgttgcctatttcaacgaactggatagctatgctgaaagccagggactgaacagcaagcagattattgaaggtgtttgcctgccttcggctatggtggctactgtttacctaaggataccaagcagctgctggcaaactacgagtctgtaccaaataatattatcggggccatcgttgatgccaaccgtactcgtaaagactttattgctgattctattcttgcccgtaaaccaaaagtggtcggtgtgtatcggctga

SEQ ID NO: 250969 - DNA, 876 bp, Klebsiella pneumoniae
atggggtctgtggtctatgccggaacgggaaattactggctttcggtcggtattacattcgctatttttgtgttgacgctattggcggcagatttaacggcgccgtatttacaaaaaaactataatcttaaagggatatcattcccccatcttacctgtatagcttacgtgccgtttggcattgcctgtaattacatcattgataagatcccgcttatcaataaaatcaatttcgacccggaaagtattaataaaaaattcggcgtttttggcgagcctgttaccctggggtttgtgctgggactgctgttggccttcctggctggatatgacgtttccgcggccgtttcactggccattaaggtttcagccgccatgctgctgctgcctaaaatgattgaaattctggtgcagggattgttgattgtccgtgatgccgctgaagcaaaactgaaggctaaattcccggggcgcgatttttacatcgggatggatacggcgttactgatcggtgaaccttcggtactggcgaccggtctgctgttaatccctatggctgtggtgctgtctatcattctgcccggcaaccgcgtactgccctttgtcgatctggcttccttaatgttcctgctggcaatggtcacgccgttctgtaaacgaaatatgttccgcatgttcataaccggaaccctgatcgtgacctgcatcctgtatgtcgggacggacatttcgcaagaatacactcaggcggcggtgaactcgcatattccggtgccggaagggatggccgagatcaccaatatcgtcggcggcgccacgacgcctgtcggctggctggccgtcaaatttggcgagttttttagcgccacaccttag

SEQ ID NO: 250970 - DNA, 474 bp, Klebsiella pneumoniae
atgcccggcatcgacgttcgccgcaccgatagaacgaattttcccctcttttttcagtgcgttcagcgtatctacagtttccgcaatcggcgtaaaacagggctctacggactgccagtgggtcatatagatatcaatggtgtcgatacccagcctttgcaggctggcttccacctcttcgcgaatcgactcaggcgtgagatttttgtacagctgacgatcgccaactttgttaaacaggctgcccgtccgctcccagacgatgccacatttggtttcgacaacgatatcgttacgcggcagctttttcagcgcctgcccgacaatcacttcactgttgccaaaattgtatcccggcgcggtatcaatcagattaatgccgcagcgatgcgcctcgacaatggtatcgatgcaaacctgcaaatcgagatcgccgttccatgccggaccgccgccaatagcccatgtccctaa

SEQ ID NO: 250971 - DNA, 567 bp, Klebsiella pneumoniae
  misc_feature (546)..(555): n is a, c, g, or t
gtgggtttagtcaccgccgatggtgaacgtacttttgtcaccaatcgcaacggcagcctgtggaaactaaatattaacgatgttgatttagaccgcttctcgcaggcaaaggtgctgtcgctggcgagtatttttaatagcccgctgctcgatggtaaagcgttaacggagatttttacgcaggcgaaagcgtatcggttaattatttgcgccgatatgattaagccccgccttaacgaaacgctggaagatattcgccatgcgctgagctacgtggattatctgtttcccaactttgaagaggcgagacttctcaccgggaaagagacgctggatgaaattgccgacagcttcctcgactgcggcgtgaaaacggtagtgatcaagaccggcaagagaggctgctttatcaagcgtgccgatatgaaaatggaggtccctgcggtgtcgggaattaccgccatcgacaccatcggcgcgggggataattttgcctcgggatttatctccgcgctgcttgaaggcaagccgctgcgcgagtgcgcnnnnnnnnnntatcggtactga

SEQ ID NO: 250972 - DNA, 252 bp, Klebsiella pneumoniae
atgggccggggcatcgggcgggctgccgacgctgcggcagctgaactgcaggtagccaacaaaatggctgccaaaatcaataatgatgctgtcgccgacgttgagcggttgctgataaaactgctccggcgtgcagacggtattcccccgccagccgttcagcgctcctggttcagcgacggcctcgacgatggcctgcggcgtctggcgcaggcgttgcagcgcgggcgtcaggtcggccgcacgctgtaa

SEQ ID NO: 250973 - DNA, 747 bp, Klebsiella pneumoniae
atgagcctctcggagtgcatagattgtgatgtgccagaggacgatctgatcagtagtgctaacgtcaaaaaacacctcaaaatttattcatcattctttaaagttttccttaaggatgaaaaggatatcttagaaaaggctcccactgaggggatcaaatatgaggtgacggagaacaagggcggacattactcgcggcctgagatgcaacggctcatagaacggttatatacgttcaccgattggcggcgcgattacttccttactttaatttacaccggtgctcgccggggtgaaatggcggctatacgcaaggagcacatacgcaaggatgaggaaacggggcgttactacatcttcattgaggacggtaaaacggaacacgcacagagacaaatcccgatcagtaaaagtattgaggcgctattgttagctcggattaagccccttaattctggtgatcttgtgtttaacgacttgccaacctacgaatataccgctattcaatggcatagcctgatggaacagtgtaaggttccgaaatataacgaatttgggcagaagcgcgttatccatgctttacgacactcattcatctctgaggccatagcgaagacccaaaacgccgcgctggtgcaatttgtagtagggcatagccgaactcaatcgttggggattactgcaagatatacgcatagaccagcgctaaaccaactactaaccgtagtagattgtgtaagttggtaa

SEQ ID NO: 250974 - DNA, 1002 bp, Klebsiella pneumoniae
atgcaggataacctcggcggcgacttcaaagagtttcagtctgcgtatgaggctgttggcacagacctgtttgaccagcaggaatcctcattacgcaaactggtgcagactgcgaccggttacgtgctcaaacttgataagtggatccagcgaaataaagagctcgcgcagacgcttggggtgattaccgccgtggcgcttggcgtggtgggtatgattggggccattgggctgattgcctggccggttataacgggagttaatgccatcatcgccgttgcgacggcgctcggtaccgtatttacaacggtggccggaggcatcattaccgctattggcgcgatttcctggccggttgtcgctgttgtggccgcgattgtcgccggggcattgctcatccgtaaatattgggagcccatcagcacatttttcggcggagtgattgaagggatgcgggccgcatttgcgccagtagctgaactgtttgcgccgcttaaaccgatgtttgactggctgggcggaaaactgaaagccgtgtgggactggtttaacaacctgattgcgccggtcaagtcatcgcaggaaaccttaaacagttttcgtgatgccggtgtgttgttcggtaaacggctggcggatgccttaacgctgccgctgacggcatttaataagctgcgcagcggtattgattgggtgcttgagaaactcggcattattaataaagagtccagcacgcttgaccagactgccgcaaaagcgaacgcagccacgcagggtaactcttatattccggcaaccggcacttacggtggctatcaggcatatcaacccgtcaccgcaccggcgggacgttcttatatagaccaaagtaaaaacgaatatcacattgacgttcaggggggcggcagcggtacgcagctcgatcgccagctacaggatgcgctcgaaaaatttgagcgtgaaaaacgcgcccgacagcgtgccagcatgaaccacgactga

SEQ ID NO: 250975 - DNA, 1407 bp, Klebsiella pneumoniae
atgtccaagcaacagatcggggttgtcggtatggccgtgatggggcgcaaccttgcgctcaacatcgaaagtcgtggttataccgtctctgttttcaaccgctcccgtgaaaagaccgaggaagtgattgccgagaaccctggcaagaaactggttccgcattataccgtcaaagagtttgttgaatcccttgaaactccacgccgcatcctgttaatggttaaagcaggcgcaggtactgatagcgcgatcgattccctgaaaccatatctggacaaaggcgatatcatcatcgatggcggcaacacctttttccaggataccatccgtcgcaaccgcgaattgtctgctgaaggctttaacttcatcggcaccggtgtttctggtggggaagagggcgctctcaagggcccctctatcatgcctggtggtcagaaagaagcttatgaactggttgcgccgatccttgaacagatcgctgctcgtgcagaagatggcgaaccgtgtgttacctatatcggtgctgatggtgctggtcattatgtcaagatggttcacaacggcattgaatacggcgacatgcagctcattgctgaagcatacgctttgctgaaaggcggccttgctctgtctaatgaagagctggcaacaacctttactgaatggaacgaaggtgagctcagtagctacctgattgatatcaccaaagatatctttactaagaaagatgaagaaggtaaatatcttgttgatgtgatccttgacgaagccgccaataaaggtactggtaaatggaccagccaaagttctcttgatcttggcgagccgctgtctctgatcactgaatctgtttttgcgcgttatatttcttctctgaaagatcagcgtgttgctgcttccaaagtactgacagggccacaagctcaaccggctggtaacaagtctgagttcatcgagaaagttcgtcgtgctctttacctgggcaaaattgtttcctatgcacaaggcttctctcaactgcgtgccgcatctgatgaatacaactggggtctgaattacggagagattgccaaaatcttccgtgctggttgcatcattcgtgctcagttcctgcagaaaatcacagatgcttatgaacagaatgcaggcatcgctaacctgcttctggcaccgtacttcaaacagattgctgatgagtatcagcaggctctgcgtgatgtcgttgcttatgctgtacagaatggtatcccggtaccaactttctctgcggctattgcctactacgacagctatcgctctgcagtcctgccggctaacctgattcaggcgcagcgtgattatttcggtgctcatacttataagcgcactgataaagaaggtatattccatacggagtggatggagtaa

SEQ ID NO: 250976 - DNA, 1338 bp, Klebsiella pneumoniae; identical to SEQ ID NO: 216199

SEQ ID NO: 250977 - DNA, 456 bp, Klebsiella pneumoniae
atggctgctcacacggtactgacagcctgctgtgacgacgatatcggcgatctggttggctggatgaaaccggggaaatcacgtaagcgtggctttgtatggcgcccgggcagcatgccgccggaaagtatggtcatcgtcgcgcaaaacctgatgatgcacggcatcatcggcaaagcgaaggtgcgcaagctgcagcgttacgaaacgaatgagacaacagcagaattccgcgcagccgactacatcatggcggcccgcaaccatttcggtataagccgggaagaggctgagaacctcacgatgacagagttcgccatgatgattaacgccaaatacccaaatcagaacggcttcacgcgcgaagagtacgacacggtcatggacgaagacgatcgccgctggcaggcgatgatggagcaggagcgctccaggacaacccccacgaagaattaa

SEQ ID NO: 250978 - DNA, 267 bp, Klebsiella pneumoniae
atgaaaaccgcaatggtgctgaaagcaaaagacgttatccgccgtggctgtctcgaatatgacgtcagcgccaccgacatcaccacctcgtttatggcaatccgtaagaccatgaccagcagcggacgcagcgccacctatgaggccagccgcaccgaggaagccagtcacgcggacgtcgcctgggcgaccatgcacgcgctgttaaacgaaccgcttaccgctggcagcggccaggtaacatcatccattctggagttcaactga

SEQ ID NO: 250979 - DNA, 672 bp, Klebsiella pneumoniae
atggcctcacaaagccacctgcgcagcacctacttttcgacaccttccaccctggcacacggcgcttacccgttctggtcgggggaattattcaaccggggccgcgccagcgccagcgagcgggttgacatcgatatcagtcatgatgcgctcgccgctggcgtggcgtgtcctgacggtcagtggcggcagattgtcaccattgaggatgcgctcgccgggggctgtacgctgttcaatctggagcaactcaagcgcgaaaacagcgtcgacgacttccgcaatctgtttatgtgcgagttcgttgacgacaaggcgtcggtgttcccgttcgaggatttgcaacgctgcatggtcgacagtctggaagagtgggaagactttgcgccgttcgccgacaacccgttcggctcccgcccggtctgggtgggatacgacccttcgcacagcggcgacagcgccgggtgtgtggtgctcgcaccgccggttgtcgccgggggcaagtttcgcattctggagcgccatcagtggaaaggtatggacttcgcgactcaggccgaatccatccgccagctcaccgaaaaatacaacgtcgagtacatcggtatcgatgcgagctggttcgctcgttttatcccgccgcccgcgatatccgctacacgccggaaatga

SEQ ID NO: 250980 - DNA, 501 bp, Klebsiella pneumoniae
atgcacctcgccgcgctggcagggcatcaagccgaccaggcctttaaacagctcggtgcgcccggcgcccagcaggccgtaaataccgatcacttcgcctttgctgagggtgaaggtgacgtcattgagcttgtaaccgccgctgggatgcagcgcggtcagccctttgacgtcaagcactgcgtcgccttttggcgccggttgataatcaaagtgttttttcttatcaccgaccatctgctcgatgatccacggtacgctggcgtcgctgacgtgacgctcgctgataaagcgaccgtcgcggaaaatggtgatgttgtcgccaatctccatcagctcttcgaggcgatgcgagatatagatgatggtcacgccgcggcgcttaagctgcgcgatcaccttgaacagcactttgacctcagactggctcagcgccgaggtgggctcgtccatgatcagcacgcgggtgtctttcgacagggcgcgggcaatctcgactaa

SEQ ID NO: 250981 - DNA, 876 bp, Klebsiella pneumoniae; identical to SEQ ID NO: 216208

SEQ ID NO: 250982 - DNA, 216 bp, Klebsiella pneumoniae
ttgcggatcaagctggcacaggcattcggagagaaaatccgcctgtttctggttattaccctcgatattgacgcgatcgaagcttcgaataacggcttccagcgcggcgacagtatctttggcgtcgataattttgccgtcacgaaaatacggggccagctgattcaggcgctgcgccgtatcgtccttgagttgatgccagttgtgctcttttag

SEQ ID NO: 250983 - DNA, 663 bp, Klebsiella pneumoniae; identical to SEQ ID NO: 212693

SEQ ID NO: 250984 - DNA, 345 bp, Klebsiella pneumoniae
atgctgcagcggcatgtcttcggtatcgaacagttcacgcagcgcagcggccaggtgccgggtatcgagcagttcgatatagagatctttctgctggcgatcgtcgcgtttaaacaggaaaccgttggccagccaggcgcagaaggttttattgctttcgtagagatcggaggcgggcagggtggtgagctgcttaatcagccgctggatctcctcttcggtgatgccgtcggcctgatagcgggcggcgaggtaatggcgaagatcgtcttcgataatcacctgatcgaggctggaacgcgggacatcatcgccgatcaggtgctgatagccctgatcctgtag

SEQ ID NO: 250985 - DNA, 315 bp, Klebsiella pneumoniae
atggctaaaatctaccaactggacaaaagctttacgatcgaacttagagtgatcgaccaacagcgccacttccgtcgcctggcgaatcatcgttttcttgatttccgcttctgcttcgttggagtcaagcgctccgttcttcatatccagccctttacagctcattaccataatatcaacgtgataacgactgataatttccttagtgattcttccctgcagcgacagcgtatttttattcagttcaccgccggtagaaacaacgttaatttccgactgcgccagctcgtgaaaagcttccgccgagttggttaa

SEQ ID NO: 250986 - DNA, 900 bp, Klebsiella pneumoniae
gtgttcgattttctgctgaaacggctggagaactaccttgacgtaacccagcgcaataccgctcgtccggtagatgccgagatgcagcggctggccagcgcccgccgcccggcgatggcgcgcagcgtcacccagagtcatgagccggcactgcaggcctctaagctgcataaggcctacaacaacgtcgaagtgctgggggcggtgagcctgcagatccagcccggcgaggtggtctcggtcatcggtccgtcaggctcggggaaaaccaccctcattcgcctgctgaacggtcttgagcagatcgataacggcgaaattcagattaacggccaaccctttattcacctcgaccgccaggggcagcagaagccgcgctttatggagaatgccgaacatcgcctgaacatcggcatggtgttccagagctttaacctgttcccgcatctgaccgtgttcggcaatctgctgctggccccgcgctatcaccatctggcaagtgacgcggagctgcgccagcacgcctgcgaactgctgcacaaagtgggcatgctggagcacgcctggaagtatccacaccagctctccggcggacagcagcagcgggtggcgatcgcccgcgccctgatgatgcgtccgcagatcatgctgttcgatgagcccacctcggcgctggatccggaaaaagtgaatgaagtgctgcaggttatcgaatccctggcccacgaaggcatcacgatggtcatcgtcacccacgagatgaacttcgccttcaaagtgtctgaccggatcgtgtttatggagaaaggccgggtggtgtgcgatgacacgccgcaggcgatgcgtagcgggcatcacccgcgggtcgaggcctttctgaaagatgtttctctggcttaa

SEQ ID NO: 250987 - DNA, 603 bp, Klebsiella pneumoniae
  misc_feature (534)..(543): n is a, c, g, or t
atgcacggtaccactgtgatcaaaaatcaggcaggcatctttcccgggtgcagttcgcagtccgcggccaatcgcctgcagccagcggatttcactctttgtcggccgggcgtagataatgcaccgaacatcgctatcaaaaccggctaccaaaacaccaacactgacgattatttttgtggcgccagtctcgaagcggtgaatcatcacctgccgttcttcgtggggtgtttctgcgaccatgacctcagcgttaatacccgccttgttaaactgcatggttacaaagtttgcgtgggccttgttaacgcagaacgccaccgtaggaaggtcacgaccatgacgaagccagttatcgacgatatcgcccaccaggtcagaaccgcacatgatttccgccagctgggactcgtcgtaatcagtaccgaactccatagatggcttcgtttctaccccgctaagatccggttttgttggggcgaaaaattcgtacttactgaggtcaccacgctggatcaattcgccaatcgtcgnnnnnnnnnntgggttaatcaggtgttgatagtaatggcccaggaacggcgcaaaaggggtaccagataa

SEQ ID NO: 250988 - DNA, 684 bp, Klebsiella pneumoniae
atgcgtcaccgccaccagttttttgtaaatgagcgaggaggcacctattacgatgatattgatcagcttggtgccagtattggtattagctcatcaacagcaacgcgtattgttgcaaagttgaagaaagttgggttagtggttgccacgctgtcagggcggtctaataaatggacaatactaccgctcacgccggataacttcctctttgaacgtgacattaatgcgatggaaagaggagcagcgccagaatgggtggattgtctaaaacatcccgtatttggtaacgtcaaagaagatacatctcaagaagtgaaggaagaaaagcagcaatctgtgccggaacccgatccgatgtgcgagtttgacgaattgccggaagatgaaacgccagcgccggaaaaagtgaagccaaaacccgcgaagaaaccagcgccaaagaaagcacccgccaaacagcaaaccgtttctccatttgagtttaaaaagcctcgtgatgaaacaagggattggttttatctaaagcactatcagggtgcagaacggtttaccacctttacagattttgatctcccgtatttggcactattcaaggcacagggcgcactcactaatgcttatgctctggattatctccagcttagaacagatcaaatacaacgacagttatcgaggaatacatga

SEQ ID NO: 250989 - DNA, 321 bp, Klebsiella pneumoniae
atggtcggcgaggatgacaacgtgtttgccctgacgacaattttttcaaccaaagcgcaggccatgcgagccgcccaggcaaaatgggacaaactgcaacgtggggttgctgagttttcaatcaggctggcgacggggcgagcagacctttaccctgagacgccggtgcaggtttcaggctttaagcgcgtcatagacgagcaaccgtggacaattactaaggttatgcactctctgagtaatagcggatttacgacgagcctagagcttgaggttagattgttggatgtagagtacgggactgaaggggaggaagaataa

SEQ ID NO: 250990 - DNA, 561 bp, Klebsiella pneumoniae
atgaaaaaatacagcaaaggaatggcatctttcgtggtgatgatgatgctttctccggtagcggcgcaggctgctgatggcaaagtcacctttaatggtgaagtcatcgacaatacctgtacggtaaagaataaagacaagacggtaaccctgccgacggtccagcgctcggcgctcagcagcgcgggcgagacggcgggcgtggttcccttcactatcgatctgacgagctgttccccggggaccaatgtctcggtgtacttcgagaaggatcaaaacgtttccacggagggccgactaaaaaacactctgactgacggcacgcaagcagaaaacgtcgatgtggagctgctgaacacccggtttacgccgattaacctcgcggagaccccggcggtcgctgcagacggcaaagttgctcgcctggaagcgatcccggtggcggtggctgagcaggatggttccgcctcgctgcctttctatgcccgctactatgcgactgatgccgccaaggctggaaaagtcgcagcctacgtcaactttacggtggtctatccgtaa

SEQ ID NO: 250991 - DNA, 195 bp, Klebsiella pneumoniae; identical to SEQ ID NO: 135304

SEQ ID NO: 250992 - DNA, 252 bp, Klebsiella pneumoniae
atggaagaagtacaccagggccccggtctgaaagaaaaaggcaccccacatcagaaagatattgctggcgaagacccaccacggacgattggcgcgcagactaatccaggcgcgtttcagggtcatgcgctccccggtaagggtgatcttttcttcgacgttgcgaaagctcaccagcaggaaaaaggccgccagtacgccaaaaatcaccgcggtatagaggaatccctgctgctggttgcctttgcctag

SEQ ID NO: 250993 - DNA, 441 bp, Klebsiella pneumoniae
ttgacgggcgatgccctgtttagcctgcgctgtgattgcggctttcagctggaagcggctctgtcgcatatcgctgaagaaggtcgggggatcctgctgtatcaccgccaggaaggacgcaacattggtttattgaataagatccgcgcctacgcgctgcaggatcagggctacgacactgtcgaagcgaaccatcagcttggcttcgccgccgatgagcgcgatttcaccttgtgcgccgacatgttcaaattgctcaacgttgagcaggtgcggttattaaccaataacccgaaaaaagtggaaattcttaccgaagccgggatcaacattgtggagcgggtgccgctgatcgtcgggcgtaacccgaaaaacgctcactatctggacaccaaagccgccaagatgggccatctgctgaacagcaagccgacggaataa

SEQ ID NO: 250994 - DNA, 297 bp, Klebsiella pneumoniae
gtgatcgccgagtccttcgagcgtatccatcgttccaacctgatcggaatgggcattttgccgctggagttcccgcagggcgtcacccgcaaaacgctgcggttgaccggggaagagcggattgatatcagtaatctgcagtcgcttcagcctggcgctacggtgccggtgaccctgactcgcgctgacggctcgcaggaagcgatcccttgtcggtgccgtatcgacactgcgaccgaactcacctactaccgcaacgacggcatcctgcactacgttattcgtaatatgctgtga

SEQ ID NO: 250995 - DNA, 627 bp, Klebsiella pneumoniae
gtgtacttcttccattattacgtcgggaataccgagctgacggcggttatcgccgggatctccaccttcgttcccctgctcggcaccctcaccgtcccgctgctggcccgacgcatgaaaaaacgtcatgtctatctggtggccagcgcggtcaatttgctcgggatggggattatgatggtgtctggcgcccacgttctgggactgatcgtcggggccgtgatcctctccctcggcgccggccaacgcacggctatctatttctcgatgcaggccgacccggtggattacggcgtgtggaaaaccgggattaataccgcagggatcctgacctcgataaacggttttctcggcaaggtggcgatggctggtgccggggctatcaccggcgtgctgctctcctccagcggctatatcgccaaccacacgcagagcgacagcgccctgttggccatcaaggcctgctatctatacattccggcgctattgatcctcgcctcgatgctgtggatgggccgcttctaccgcctcgacgatcagtatgagcagattcgtgccgaccttgatgccggacgcggcgcctcgccagccccggccccgaccgccggagaatctcccgccatgtaa

SEQ ID NO: 250996 - DNA, 402 bp, Klebsiella pneumoniae
gtgcaggacgtgaccggatgcagggaatcgggcaagttgagcctgaagcattgccaggcgcagatcgtcaataccgttctgctgttcaacggcaaatgccgcgctgtaagccgtggcctgcggcacgatgccatggaggtgagcgccagtgccatcaccaaacagaatctcctgttcttcgacgtacttaaggccgtaacgcatttccgcatcaatcatggactgcaactgggcgaagtcgtccagaatctgcttggatgccttgaacatgtgcgcgatggttgtcactggagtgattttcggcgtgaactcaatattgctgtacggcttggttgtgttctccggtaccgctgccgcagcattggtaaagccggtctgctgcacccagaaaatggccggtga

SEQ ID NO: 250997 - DNA, 315 bp, Klebsiella pneumoniae
  misc_feature (276)..(285): n is a, c, g, or t
atgaatttagaatcaataaatgactacttgaaaagtgataagagtcataacaacctaccactgattaaaattgaagcattcattgatggagttcctgaatacagagggaatataaattcagaaaattcagatacccaaggtgtgagcattacttttacattcgatatggagctgctcaacatatacaataaattccttaatgaaaacaaagataatatttcaagcatcccaattgagttttataaaattgattggttgagtttttccaatgagagnnnnnnnnnntccaacaagattacatcctacttatggtaa

SEQ ID NO: 250998 - DNA, 300 bp, Klebsiella pneumoniae
ttgtattaccggcatgtgctcggcctggagctgcatcacatcgccggctacaaatcgggcgcggatttcatcacctgctacgaacaggagcacgcgcactggcggcgtgtgccggtggccgccatcggctgcatcgcggttttttaccgaggcgacgtgccggcgcatatcggtgtgatgatcagcccggtgaaatgcctgcatgcccgcggggagtttggttttgtacgctgcgacagcccgctggcattactgaaggtttacagcaaagtggagtacatggtgcatggttcgatatga

SEQ ID NO: 250999 - DNA, 516 bp, Klebsiella pneumoniae
atggcgaatatggataaaacctggcagcagagcatcgtaccgcaggtggtgacgaaagcgcgtccggcggcggaactgatgagcgcgctcaaggcggcaaaagacattgatagcgcctgtaaaaccctcggctaccgtgcgcaggatgaaaacccctgcatcttctacgtcaaggtttcaggtaccgtcagcaaactcgataccgcctcgcgcagcggcaaaatgaccctgtccgacgccagcgtcgggaaggtgacggtgcagattggccctaccctgcgcggcacccagctgcgcgacggctacagcggcgccagctatcaggactttaatgaccaggtgctgttcggcgagtacagcaagaatatcaacagtcaggcggtcaaaatgattcagacagccaacgtcaaaaccggcgacagcgtggaggtgtacggcgtcttctcggcttgggatattccgcaaactctcccggaaattaccccggcgaaaatcattcatgcagggggacaataa

SEQ ID NO: 251000 - DNA, 411 bp, Klebsiella pneumoniae
atggcgcgcctcagccagcgccagttgataggcaccggtcgctttattcataccaattatctcttccagtttgcccggtccgttgccgggagtgtcaacaatcagcaccagcggacgtttctcgccgacgggcttgtctttatccatcgccagcgtgcgatacaccgccagcgccattttatatccctcttccagcccgataactccggcgtacaccaccggaaaacgcgggttaaaggtcatggcgtcgttagcaataacggtgcagatttcaccgttaatgcgggcgctgccgacgacggctcccggtccataatcttcataaggcagcttgagatccgccaacgcgttctcttcgaagctattttcgtcaacaagcagatcgatagcggcgcggccctggccgagtaa

SEQ ID NO: 251001 - DNA, 372 bp, Klebsiella pneumoniae; identical to SEQ ID NO: 212322

SEQ ID NO: 251002 - DNA, 411 bp, Klebsiella pneumoniae
atggtgaaacagaatcacggcagcctgatcaacacatcttccggccaggggcgacaggggtttatctacacgccgcactacgccgccagcaaaatgggcgtgatcggcattacccaaagcctggcgcacgagctggcaccgtggaatatcaccgtcaacgccttctgccccggcatcattgagagcgagatgtgggattacaacgaccgcgtgtggggcgaaattctcagcaccgagcagaagcgctacggcaagggcgaactgatggcggaatgggtcgaagggatcccaatgaaacgcgccggtaagccggaagacgtggccgggctggtggccttcctcgcctccgacgacgcgcgctatctcaccgggcagaccatcaatatcgatggcggtttgattatgtcgtaa

SEQ ID NO: 251003 - DNA, 396 bp, Klebsiella pneumoniae
atgggcgctattccgctgtcgagactgaaaaacagtcagtctgggaccgggccggcggtcggcatcgacattcgcgttaaagattgtgagaaaggcacttactatattgtggttgacggcccctcgcctgccggcacgcctgaaaaccgcgtgctggcgctcgacggcagcggcaagccggccagcaacgtaggtattctgctcacggaccgcacgggcaccccactcagcctcgatgaacgccttgatccgcaacacgatcctcgcatagagatctcggtggacggcggctccggaaccttcaggctgaacgccttctattacacctgggacaaagcccacgccgatcccggcgacggcaatgcgacggcccgatttaccattatgcaggaatag

SEQ ID NO: 251004 - DNA, 300 bp, Klebsiella pneumoniae
gtgctgctggtaccggaggtgctgaaactctccttctttacccgcgccattcgcctctccattaccgtggtggcggtcatcgccttctatgcccccttcttcagaagcactcggggcgcgaatgccggcctgatcggcgcctgtgtggtgacgtccgtctggtatttactcggcgacccgttcggcatcaataacatgtatgtcgccctggcgaccccggccatcatcatggtgattgaccgcctgatcccaaataaatcacaaccatcccccgccccagttgagcaacgtggagtataa

SEQ ID NO: 251005 - DNA, 450 bp, Klebsiella pneumoniae
gtgcgggtggtgctgcatctgcacccggtgtacaccaccagcctcgcctgtctggcgacgccgcagatcctgcccatcgaccagaacacggcccgctattttaaccgggtcgccgtcgataccctgtacggcgggatggcggacaccgcggcagaaggcgcccggctggcggggctgctggcagataaacgccgtctgctgatgggcaaccatggggtgctggtgaccgccccgaacatcggcgaagcgttcgacgatatctggaccctggagcgcgcctgtcagatcctgatcaccgcctggtcaaccggccagccgctgaaggtgctgtcagacgcggtggcggaaaaaaccgcccaggactgggagaagattgccgatttctccaggcagcactttgccgagatgaagcagttgatgatcgacctcgatccctccctggtggactaa

SEQ ID NO: 251006 - DNA, 150 bp, Klebsiella pneumoniae; identical to SEQ ID NO: 219560

SEQ ID NO: 251007 - DNA, 252 bp, Klebsiella pneumoniae
atgcgagaggtcgcttcccgcctctttcagcaactgttcaacattcttcattgcctgctccgcctgcgcccgcgggtcgccgaggccaatcagattgccggcgaagtcggtgccaacctggccgcgaacgtagacggtattgccggcccgcaccgcctggcacagatcgttgttcagcgcctggttcgggtaggtctctttggtgttaaacatgcgaatacgggtatgagttggcatcaaagtactccttaa

SEQ ID NO: 251008 - DNA, 174 bp, Klebsiella pneumoniae
atggtgatgatgggcgtcagcgacttctggcagatggtgattaaaggcgtggtgattgtcaccgctgtggtcgtcgaccagttccagcagaagctgcagagcaaggtcatcctgatgcgccgccacgaggaaaaactggccgccatcccccccaacggcgccacctccagctaa

SEQ ID NO: 251009 - DNA, 189 bp, Klebsiella pneumoniae
atgttccgtgattttgccattatcgccaccgcctttggcgtgaagcttgacgagctgaaaaaagcgggcctcgcgggcgcgctggcgctggtcgtctccaccgtgctctccttttacctgggagcgattgtcgcctgggccttcggctataccgatgcggtcagcatggcgactatcgctcccaggtaa

SEQ ID NO: 251010 - DNA, 204 bp, Klebsiella pneumoniae
atgcaggccatcgcgcaacagggcgacacgctcgacatgatttgcgcccggtattacgggcgcactgagggggtattcgagtcggtgctcgccgcaaatccggggctggccgagctcggcgcagtgctgccacatggcacggtggtcgaactgcccgacgtccagtcatcccccgtaactgaaacaattaatctgtgggagtaa

SEQ ID NO: 251011 - DNA, 585 bp, Klebsiella pneumoniae
atgcgtgacgattatgatcagcgagaggcgaatattgccaacttcctgtcgaacaaaataaaacgatgcattaaatgtgggtatgagctggactacaaagagaagttttattacatagatcgaatctgcaatctgtgccgagggcttcaaccgttcgacagtgaggacgttccggagatagaatctgagggtaagtcaccttttccaattattaatctcgatttatcaaagtatgaagacaaagggcagcaaaacaggtctgattttgagaaacaggtctatagccgttatcctgaatggcaattattacgagaaaaagcggaaagagattgggatagagctcatccacggcctgaaggaataaatgttgttactgaaatttctagttataatgtaattgttacagatgagcgtatagcatatttgattaatcagtatgatgcgaatggggcagtgagcattaaagttgaagagttaatttcattgctttgggaaataagtgaatacagggggggtaaatccgaatttgtgaatttaattttaaacaactggtttctagttgatgggctagaattatgctcttga

SEQ ID NO: 251012 - DNA, 834 bp, Klebsiella pneumoniae
atgaacctttcttttaagaaaagtttaacattaaaaatgacagcgttgtctgtcattttttttgttttcccaactgcatgctcagtttatgcgcaattacaaagcgactctgaaatggatgcaattgattcatcgattgattctgcatttaatttaacagatgctaggatggataatgtttcatccccaattataataggagtaagtaacgatgatggattaatgaaatgcaaaaatgaaggtttacttaattgcgaatctacacctaatcattttcataagtcattactcctaagaaaggaaacctcattagccagccattaccaacttcaagcatcccccacatcccaagaaatatttaatgttgtcaaagttcctgaaaatggccccgaatgggtatctattgttatttctataattgcactggtctcttcttttggtattccttactggcagcatcagaaagagcgtaaagaagcaatcaatgaaggatactggatccgagaagtaataatgccaaaaatcaatggattagcatttgatgttactgctgcttttaaaaatgcagttcctttaccgcaagatcaattcatagaagcactcagtaataatctattccctaaactaggtgagttacgtgattcattgtatttatttaacagtttcacattattaaatgaagacgttgagatacttgaaagcatttgcgatgacttagaagaaaaagtatctgatcatatcgatgagccaaatgaaataagaattgctgacatttcaaagtttcactctttgttgattaaaaagctaattgaaatgcatcgaaagattggttga

SEQ ID NO: 251013 - DNA, 1377 bp, Klebsiella pneumoniae
atgaagaaaaaaagcagaagtgagtcaaaggcgattttcttacgcggatggctaagatttatttcaagcgtagaaagaaaacgtaaaaaaccaagaaaaggaatcaacagtaatctccgtttcgcagacgagactacgcctatacaaaatcaagttgtatcctttgtcgaaaacatatcctctcttaaagagtatgattcatccattctgcgtagagacggagaaaaaatattaatacccaaacattttgatttgtatgacaacccagagaaatctcttctttttattagcgctgcgactaagttaatagcacgaggaaaaaggaaggcatatttatttaattataaaaaaaataaaacacactgcttagggctagagtgcttattgggtgttgcactaaccgctgcaaggcatcacaatatcaacttcaaggacaccatgattcaaattaatggtgtttatccaaaagatgaacaataccttgagataattcgcgatattggtttagtcaaagaaataaataatgctgaccatggtaaggttcatgatgtaactgaagcatcaaaaaaaaccaatccaaagcagagaatcttttcagctgatagtattggaaaagaaacagcatctgcctttgcacacgacaccaaaaacaatacagccgaaaaattcaccaaatacattaataagtgcttaaacgaccatgggttaaaacttattagtgacgctgaaaaacatttgacgtcctgtatgggggaactccttgataatgccgaaagacactgtggattagaacaacgaccacgctggcatctcagaggatttgtgaacaataatgtcagacaccctacttgtgaagtagcagtctttaacttcggacaaactatcggtgaatcttttgataatttaccggaagaccatttttcattgagcaaacaagttatcccttatgtaaataaacatataaacaaaaaaggtatgtttaaggagggattaactacagttgctgcattacaaggccgcgttagctgcaagaatgaaaaggaaacggatagttccggcacgggtacaatcgaactacttaaactattccaagatatgcatgataatttaaaaaaaatgggtcgtgatgtcaaaggtggtataaggatgacattgatatcaggtaacacacatatcaattttgatggctcatatcaattaaagcaaaagttagtaaatgatgctgaaagtgacatcttcacctacccatttaacaatatagggcttgaatctgaacctgatcgcacttatcttaaatgcatgaaggatgctcggttcccaggtgtaatgatcaatattcgttttcctctaccagaaaacgcaactcagcgaacttga

SEQ ID NO: 251014 - DNA, 927 bp, Klebsiella pneumoniae; identical to SEQ ID NO: 190447

SEQ ID NO: 251015 - DNA, 183 bp, Klebsiella pneumoniae
atgactgatatcaccgaaccagcgccggtagtaccggatttcaaaaaactggctcgcgaactggttgataatctcgtcgattgcggcggactggatgaaggggtgaaagagaagtatctggagtgggcggagaaaacctgccgcgccaccatgctagcagccgccccgcaggaggtgaagtga

SEQ ID NO: 251016 - DNA, 393 bp, Klebsiella pneumoniae
atgcttttgtctaaacaaaggatgctattgaatgaacttcagggggttttctctgaaagagatgtttatttgttcaataatgtactgagttacattaaaaataatgttgataaaagttattatccgattaaagtgcttcgtgaagcatctggatgtgaatctgatgcagatttattaaaactagttcgctatttctgtggagcgcattctaaattattcaacataaactattgttactatgattttgataatgaagaagttcctatttcagctgagtgttattacaaagcattaattaaaggcattgctccaatcagcttagattctggacgcgaaatagacgatttcgatgttaataacatttcattctattgtatattaaatgtcaaataa

SEQ ID NO: 251017 - DNA, 636 bp, Klebsiella pneumoniae
atgggcctcgcccctgcggggccaacgcaggcgttgttcaaaaacgctcccggcgtttttgtcggggcagcccgcttactgcgtgcgcggtctgtccaactggctgcgccagttgtcgaaccccggtcgggggttctcatcccccctgcggagaatataaaagaaaagagcccgtactttcgtacaggctctcatctcgaatatggcggtgagggggggattgactcgcttcgctcgccgttactcggcccatccatgggcctcgcccctgcggggccaacgcaggcgttgttcaaaaacgctcccggcgtttttgtcggggcagcccgcttactgcgtgcgcggtctgtccaactggctgcgccagttgtcgaaccccggtcgggggttctcatccccccagcggagaatataaaagaaaaaagcccgtacttgcgtacaggctctcatctcgaatatggcggtgagggggggattgactcgcttcgctcgcccctgcggggcagcccgcttactgcgtgcgcggtctgtccaactggcgttgccagttgtcgaaccccggtctggggttctcatccccccggtgagtgccacatgcgaaaaaaaagcccgcacttgcgtacgagctcttcttaa

SEQ ID NO: 251018 - DNA, 2850 bp, Klebsiella pneumoniae
atgcttgaggtatatgccattgctggcggcgactggttacggggcaacctgaacgcgattgcggcttttatggggaccggcacatggtcgactatagaaaagatgtgtatcgccatctcggtactcattgtggcggggagctgggtaaaaaaacacaacgtgatggaccttattggctgggtcttttccctcaccctggtctctatgctggttgtcattcgcacccctgtgcagatcatcgattacagtaacgtggcgcaggtctatgaagtcgataatgtacctattggtctggccattcctgcgtcgctgacaacgcgggtgggaaacgcgcttatccagagttatgagatggtcttcgcgctgccggacagcgtcacgtacagtaaaacggggatgttatttggcagtaatctggtcgcgaaaagtacggattttttatcacaaaatcctcagattacgacgctgttttccgattacgtacaaaactgcgtgatgggcgatattttcctcaatcataagtactcttttgaggaattactgaattcacctgatccgtatacactgatttttgcaaacccaagcccactgcgtggcgtgtttgataaaaacaaccagttccagacatgcgaggaggcctcacgggatctgaaatcggctcttgcgctggatactcagacagggggtaaaacctggaactactatgttcgtcagctgtttggtggcaaacctaatcccgatctgcttttcagccagatgattggcgacagctacaattacttctacagctcgggacagagcgccgggcagattatccgccagaacgtcacgatgaacgccctgcgcagcgggatccagagttatgcggcccgcagcggggacaccgccagtctggtcaatatggctaacacatcatcccttgaaaagcagcggctggcacaggccacaatggggcaccaggcgcttcgcgcacttccactgatgcagaccgtcattatgggtttaatgattgggatgttcccgatcatggtgatggctgccatgtttaacatgatgacgctgcaggtgcttaaggggtatgtgtttgcgcttatctggctgcagacgtggccattactgttcgccatcctgaacagcgcgatggcctactatgcgaagcaaaatggcgtgccggttgttctctctgagttgtcgcaggttcagctcaaaaactcggatattgcgaccaccgcgggttatattgccgtgatgataccgcccttgtcgtgggggatcgtgaagagcatgggggccgctttctccagtgcctacagccatttttcttcatcagggctcagtgcaacatcgcaggctgcctccggcgtggtggacggcaattactctttcgccaacatgcagatggagaacgtcagcggctacagctggggtaccaacagtacaaccagtttcggacagatgtcgcggcagctggcgaatgggggtatgagcacgcagacgcgggatggatcgatggtctgggacagtggtggtgcaatgtcaaaactgccggtggatattaacgtcggtcgtcagatagccagtgcgcagcaacagatggcccgtgaggctgatgtccaggccgaaagcgcgctgcatggctataacagcagtgtgacaagcgcctggaatagtctgcagcaatttggcaccaataaagggaacagcacatcaacaacgaccggggccgatactaccgagtcttcacaggattcgatggccagaagcaagatgtggaatgcggttgttgctaatgcgaaagccaacaacatcagtaatgaggagtctttccagcagttgatggatgattcatcgaaaagaactcaatcatttgatgcacatgtatctggtaaatggagttcaggggatcaactgtttggcaagttaggaaagtggggcagtggtttttctgctgaagttggtggtaaaggaagtgcaggctgggggcacagctcaggtaatacagataacgttggaacttccggtcgggaatcgaatgacagccgacatgataccagtagtcaggcggccaaagactttaaggaagcatccgattactttaccagccgcaaaaccaccacatcgggcaacattaccgataataatgccagctcgcgtgttgaccagtttgccgcgtcactctccagtgccaaaaacagctatgaccagtatacaagcagccggacacgcagccatgagtacagtgagatggcgtcacgcacagagagcatgactggccagatgaacgaaaacctgactcagcagtttgcgaactttgttcagcatcgtgctccacaggatgccgaggccattctgaccaataccagttctcctgaaattgcggcgcagcgtgaagccctggcgcgtgaattcgtcaaagagcaggtagaacccagggttgatgctgcgtatcaacagggtcgtgaaagcattggacagaatatggctggggtgtcaggtggtggtgacaatggttcggtagtggccgactacggacaaaattctggtcgtatcgatgctatgacacaagatgcgggtattaaggataatgtgggtcagaaagtggatgggatgattacagagaataaacaacagcatcaggaaacccgcgaaaacatacaacggcaaggcgtagaggtgaaaaatgagaatgctgaaatggaaaagagccataaaacaaaagcaaatgagtttaaaggtgattataatgaaagaaagagtaaggtgaaatctttaccaggggctgactcttcggctgagttagaggaaaaagcagcgaaaacgcaaaaggattttcttgatgggaaaagatga

SEQ ID NO: 251019 - DNA, 582 bp, Klebsiella pneumoniae
atgcaaaaaaatgatctattatctcatattgcttctgctggatataatgttggatttggtgccaagaaaaattttgctacattcgatattgtcagcaaaattcctggctggattggcatcatatcactagcagtttctattttaggcctttacatggacgaaatgagctctaagcatattgcagccatttttatcattttaagtattggcagtttgtacatcaatttctatgatggtgataaaaataaatatgaagaagcaggcaagaagcaaacagcaatcttcagaaatattgaaagattgtattacgatgcgaaatctgaaaacgaaccggattctgtcaaatatattggacaacttgacattctgatgaaacaatttgatgaaaccactatcaccaaacaaatttgtgggagcaattggtatgctcattataaattctttagtgaaatggaaaaaagatggattgaagatcagttgtcattgactttctggaaggataaatttcctaacacattgaaaattttcattctgatagttttctgcgtgcttttgctttcgataatttataggtttaattga

SEQ ID NO: 251020 - DNA, 1362 bp, Klebsiella pneumoniae
atgcaaacagcagagatgtttcgaatttttttgaacaatttgaaaatttcagacgaacgtatgcaggcaattgcgacacattataaaaatgccacaagaagacttaacatcgagttccgaggggtagcgaatggattcaacaatcgattgaaagtcggttcagcaggtcgtcgaacagcggttagtaaaacatcagatttggatatgctgtatattatgcccgcgagattgtgggaagattaccaatccggaattaatccacagcgccgtttgcttcgcgatgtaaaagaagcattaaaactatcctttacccagcaagagatcaaggttgatagattagttgttcagatcatttttgactctttccatatagaggtgcaaccagtctttgaaactgatgaagggcattttaaatatcctgatactaaggccaacgatggtaatggcgggtggcgagtaactaaacctcggatggaaattaccgagatgaggaattttcgtaataacaaaagtaggaaccttcataatctttgccgcatgttaagagcctggaaaaatagaaacaccgttgatatggggggacttctcattgacacattagcctggagatttctgaaacaaacagatgattatgataataccggaatggtcagttatgggcttatgtgtcgagacttctttgactttttgcatcaagaagatgcccatgaacattatgcagcgataggaagtggacagagagttaaggtctataggaattttcagcggcaagcaaaacgagcctttgagttatgtacaaaagcgattgaagcttatgataatggctcgacaaagaaatgccatgaacactggcgagaagttttcgggctaactttccctaaagcagttgtagaaatgcgtgactctcaggggttagagtcagctaatttcatcaatgagtcctatacggctaagacatggcgcaatacggaagagtttacagatgaaaagtttgatgatgttgatataagatatccactcgaagttaactgcattgtcaaagaaaacggatatagggaccgttcgattagggcttacctgtcggatatagctcgctattggttaccaccgaatagaactttatcattttcgatcaaccaggcaagtttggatctcatccctgaaccttatgatatttactggaaagtattgaatagaggtccagaagctgaacagcgtgatgaagttcgaggccaaatagtgttaggtcaagtaactcatactgaacatacaaaatttagaggtgctcacaaggtttggtgttacatagttaagaaccatatagtaattgcacaaaacgttatcgacataccaatcgagtaa

SEQ ID NO: 251021 - DNA, 1107 bp, Klebsiella pneumoniae
atgtctaaaacgcgcgatgatttcagctcaaaaactgtaagagctctagcactacgggcaggttataggtgctcatttcccggttgtaatcagcttactgttggccccagtgatgaatctttaacatctatcacaaatattggggtagctgcacacattcatgccgcagctcctgggccattagcaaggagatatgatcctaatcaaacacctgatgagaggagagatataaataatggcatctggatgtgtgttaatcacagcgttgaaatagatagagatgaaattagatatacagcagaaattcttaaagaaatgaaaaaagcccacgaagaagagattaaaaaagaggtaagcaatggctcttcatccaccaaacataatgacttcattgcaataggtatagacattatcgttttcggagagcttaccggaatctcaaccaatgagtggactataaaattttcgaacttctttactggagatttatctaagctaatatctttcaacgaaagattccattccattccccccgaagaaaaatttattctagttaatcaacttggtgaggggcgtttgttatcagcaccaataaaattaaataaattaccggatagctatgaagtaaccgtaccggttgaaatagacactccacgcatcaattgcaatagcctcccaatggatttagatattttcacgacaggcgatttgtttataaatagttctggtgatatagctacgatatcagggtttaatgctttacctcaaaaaatatatacctccctttctaccattagaggggagatttattctcagccaacatttggttccagaataagacagttcttccatgactttgacggaacaatgtggctagacaagttagttaaattagaagttatacgcttatcttgcataccatattttgactcaatcacaaaaaacaagtgtaccccattacattgtgtaagaaatgtcaaaaacattcgggtaataccaactgagtataaagacaggaaattacctattgagttcactcttgatattgaaggtttcggcatctggagcaaagaaataagtgttttctcacctaaatacgatgaataa

SEQ ID NO: 251022 - DNA, 897 bp, Klebsiella pneumoniae
atgaaaaataaatttttgtatgtagcacttgctgcgtctattactgctggctgcgatcagagttctccagctggagctagcgtcatctcgggggagagcagcacgcaggaacaaacgcaacaggttcagcgaaacaaacagatatctacggggcagggcgctaacaatattaccgaaactgctgctttccccttgattcaacgggcaattgctgatatctaccccaacctcccttatgaggttggggttaatttttgtggtcctgcgcgggaaggaaagaaaattgaagaggttaccgaatcattaaagagtgagattggcgctactgaatactctgaatatttgaaactagtcgacggtgtaaccaatataaatcttgcctgtgcagtttctttggttagattttctgttaaccctataaatggatgggtcatcggccagacatatactgaccaagcaaaggttttacttgcagtctctatcgcatcctccaaggtactatctccgatagctgtagaaatttcaaaaaaaccgggcatgaatgaaaaagaattaacgtcattaattcaaaacaggtttatggatgataatgaagctgttttttatgaaatgcgtaatgagttacagaaaaacagaaattatgtaatagatgcaactggtgtaaaggggattcatttcacaacttctgatggatatgatgtgattggtaacggcaatggtgtgacagtttctaactatggcaccacctggtatgggagcggatatatagaagggaacttctataaagtttccactatcagtagcagggcaataaacatgacaaaagacaacacaatcacctctggaagttctatttccagcggagaaagctcatccgcagatataagcactaaataa

SEQ ID NO: 251023 - DNA, 330 bp, Klebsiella pneumoniae
atgccgagtccattagcaatcatggctgtaattgcaccctccgcgcttctgggggcgtttttgtttttcttcgtctatgacgaacacagtacaaagaacgatatacagcgagacaagcaccaactcgaaaccatgaaattcgaccgcgatttctctaatgcatggaatggtgacagcgtcacaccaccaaaagaaaatgacatcgccagcatggaagaaaaaataaaaatgaaggaggagaaagcaaaaaaagaaaaagaagaaagagaacgtagaattaaaaaaattcaggacgacgttgagcacacaatagcaaaatctggggagtaa

SEQ ID NO: 251024 - DNA, 372 bp, Klebsiella pneumoniae
atgacagaccacaaaaaagaaaaatctaaaaaacctgccggatggctcgatgatatggagacttttgaaaaattgtctctggaaacggccttttccgatcccaatgctggcacatactgggcacatcgagaagaagacttaggagaactccagccgttcactacgtcatacgttcgttgcgactttaaagtagtagcggaagatgaaccccgcttaattggtttccgtgttcctaaagctctggaagagaagtttaagcttctttcccatgatgctttatcaaatactattcttgctcttgctgatttaaaagcagatgagttaatcagagaaaataaatctattcattttactaagaaaaagaaatcctga

SEQ ID NO: 251025 - DNA, 654 bp, Klebsiella pneumoniae
atgcttgctatctcgatttacaataaaaaaggtggtgttgggaaaagtctcttcagcatcgttatctcttcttggtttggacacaacggcaaaaagacaactctgttagacctcgatccacagggcgggagtttgctctttgcgagcatcgcagaacaggccggaacaaaactaacgtttaacgtagctcgtaagccaacctctaaagatgttgatgtgttcgtatttgaccacagccccggcattcatagcggtggtgatggtcagcttgccccgttcgtaatcattccaactatccttgatgccagctcatacagtgctacgctcaagagcgttcaggaactacgtgaacagggtaagacagacaatgattttatcgttgttcctaatcgtgttgagatccagaacaaagaacagctcgacctgttaatcaagctacaggaagaacacagggcagcaggccatgactacgatttgccatacatcaaaaagcgtgttgcctatcctcgttcatacaacaacggcgtcaccatctttgaagacaagacaggcttaccgctggtatctgatgcccgtaaagagtttgagttgttgatggaagctgtaggccagaaaatcaaagccggtgttgaggctcgacgcaataaaagttaa

SEQ ID NO: 251026 - DNA, 1104 bp, Klebsiella pneumoniae
atgagtaaagataacgatttaaatgattttgaacaggctttttcaatggatgctccaatgcctgatttccctgattatgagattgtggccgacaacgtagccccagctgcagctccggttaagaagccagaacctgaaccagaagttaaccttgagcatgacatgatggaagtaaaaagccgtatagatagcttcaaagacgtgctcaacattggtgacaagttcggtatgagtgacgagcaaaggaagatgattaagaaccagctttcagaactggaactcacttacgttaagctacagaagacgcttaaccttgaagagccagctcctaccgcttccctgatagaacctaagaaaccagaagaggccaaaccaaccgttccggctgctgttgtctccgctgctgatagcataccagctcaagacttcactgatctggacaagtttactcaaatgaagaatgaagaggctaaacatcctgttaaggctaagagtcttaaagaccgcatcaagtctgttcgttctaacatccgtgaagaagaagagggggagatcaagaaggataacagacctcagtatgtgaaagacttcgaaaaaaatctcatgcctgaaactgaattgaatgttaaaacaaacggcagaagccgctatttaaccaacgatgaattaaaaaatctttttggtgataactatcttcattcaagagataacatcgaggaaggaaaacttacttcaagaactcactacttcggggatggtcttttaattaaagaaacagaagatgctatagctattcgtggtagacgtaaagctaatgatattgctgttgacttgattgatgtggctaaacaaaaaggatggaacagtattgttttaactaaaggtaatcctgtctttatggaacaagcttatataagtgctataaaaaatggtatcagggttgaagctacttctcttaaacaagaagaagatttccagatgatacacaaagcctatgatttagatcgctacatgaagtttggcgaaccaaaaaaagaagagattaaaaaggaagaacttatgccggaatatcaggttaaacgtggtagaagtttgaaaatgtaa

SEQ ID NO: 251027 - DNA, 306 bp, Klebsiella pneumoniae
atgtttaaacgccgcgttggcggggtgtacttcgctattatcacccaggctatctccgcgatcctgacgattcttattatcggacaacagggttacaccgggggaattaacggcatcacggatttacgcacgcttttaggttgggatatccgtactgattctgcacgctatatcctctactttattaatgctgttttactgatgctggttgtgagcgcgggctattttattgtgaatagcaagctcggccgactgatggttgccattcgcgataaggaagaccgcgttcgttttctctggttatga

SEQ ID NO: 251028 - DNA, 258 bp, Klebsiella pneumoniae
gtgacggtcgaagaggtgaacaatgcttttcgcgaagccgccgcagcgggacctctgaaagggatcctgggttatagcgatgaaccgctcgtctccagcgattaccagggagacccacgctcgtcgattatcgacggtctatcaacgctggtgattggcggtaatatggtcaaaattctggcgtggtacgacaatgaatggggattctctaatcgtctcgttgatctggcattgatgatggcaaagcgtgaaagctaa

SEQ ID NO: 251029 - DNA, 291 bp, Klebsiella pneumoniae
  misc_feature (221)..(230): n is a, c, g, or t
gtgattatctctgccccgggtaaaaacgatgatttaaccattgtgatgggcgttaatgagagcctttactccccggataaacactacgtgatcagcaacggaagctgcaccaccaatggtcttgcacctgctgcacaggtcctgcaccagcatttcggtattaagcatggtctgatgaacaccacccatgcctacaccaacagccaggcgctgcacgatcnnnnnnnnnnctcgcgccgccgcattgtcgattgtgccttactccagcggcgcagcgaaggctttgggtaa

SEQ ID NO: 251030 - DNA, 672 bp, Klebsiella pneumoniae
atgagcagccccatcacgaaacactgcaatgaagaagttagcattgacccgttaagtcgccgagaaacgaaagctgagatgacaacacccaaattcgagttgttcggcgaaacctacatgttcgttgagaccttttctgcaactgtcattagtcccctcccaatcactgaccaggtttgggttaaaaccgatactggggatgagacacagattccagcctttggtatcgcatttagaaaatctcacaaaatgtgtaaatacgagcttcgccagtatagagttgatggttcatttagtgtcttcaaagatgctctcattgttaatgcaaccactggtgaatacgaagtcaacttagatagaaagacagttattatcccggcgtttctcaccgtacttttccctaacacttcgatggcatcttattttagggcgatgcctgttcctaattttttttcgaccatatttatcttgctttgttgcactgcagttgtttcattttttgtgttgccatggggttttaaatctggatatgtttttgatgaacacaaatatatgtggctaacctatttcgcctcacgaattggaagctttacctgcattaaatggataaagagaagaagccaaaagtttgataacgcactcagaagaattattaagtcattaaaattttaa

SEQ ID NO: 251031 - DNA, 261 bp, Klebsiella pneumoniae
atggttgccggttttcagggcattgatagcgtcgtctgcattaacaaaagtgaagcgcatggtcattgcaggccagcccacagcagggattgcttcgtgcgaaatggtaatctttttactattcatatcaatgtctttaacgacaccggtgcccttgataacctgctgtaccgaagcatcactggcagcattcatatcgccatgctgatgtgtttcagcatgaagaccggcagaaaacatgacagagaaggcaccaaataa

SEQ ID NO: 251032 - DNA, 246 bp, Klebsiella pneumoniae
atggaaaaggttaacatctatgatgccaaaactaacctgtccaagatcgttcaagaggtcgcccggactggtgagccagttgtgatagcaaagaacggtcacgcactggtgaaagtcatcgcctacagagaagagaagcctaaacgcaagctgggcttccttaaaggtaagggtagcgttcctgccaactttgacgacatgaacagcaatgagatcgtggatatgtttgaaggaaaatactcataa

SEQ ID NO: 251033 - DNA, 402 bp, Klebsiella pneumoniae
atggatttgctgttagataccaacattctcttgtttatggcatacgaaccggacaagctgaaacaagaggttgtagagctgctggaagacactgaaaagaccctttgctttagtgctgccagtgtgtgggaagtcgtcattaaaagcggtttgaacaagcctgatttcgatgtagatccagaacagtttagagatggcctgtttgaagctggtttgattgagatacctgttaaaagcgagcatacgcttgttgtagccgatttgccggagaagctacacaaagacccgtttgaccgtcttatcgtggctcaggcgaagcataacaagcttcctttgattaccagcgatagcaagctgattgagttcgtcagcgactacataaccatcatacctaaccgataa

SEQ ID NO: 251034 - DNA, 276 bp, Klebsiella pneumoniae
atgaatagaacaaactttaatgtaataatgaaagatatagtagcggagcgttttgatgatgaaagtgaagctttgacatttcttgtctctgaaatgagagctaatggatattatattaacccaaatgattattatctatgttgtgttagaggtggtttgaatatggctaaactaaatcgcattcaaaactacggtaaaagttttaaagcacatcagataaaagaagagttaaaatcagtttatgaacacattaaagaaaaatgtaaagaagactga

SEQ ID NO: 251035 - DNA, 2211 bp, Klebsiella pneumoniae
  misc_feature (2140)..(2140): n is a, c, g, or t
  misc_feature (2144)..(2144): n is a, c, g, or t
atgattaaaaaaatattgcttataatggcaatgctattgtatgcgacaaatgcgagtgccgatactatggattggttaactccattatcaacagactggtttatgaacaactttgtagacaaataccttaatccagaagctataggcgctttctctggaataatggcgttgtttcttcattttcttttagttttaggtggagtattagcagcttatgttttgattagtggaactatggtcacggctcatgatggtgagatgttaggtaaaaaatggtcttctatgtggcttcccatcagaacagctttaggaacggctatgcttcttcctatgccaacaggcttttgtgccattcatatggtgatttactcattgataaaaactggaattggtttagcaggaacaatgatcccaatcgctattgcgttcataaccatcttttttgattactcaagtgtaagctctaatcttgaaataaggaaacttgctaaagatacacttttaggtgcgacgtgcgttaaaatctataacgaagaaacagcaagagagtttgctcaatcatctaagtatttcagaggtaatattcaatatttcagcgttcaaaacttcgagtcaaaaagcgatggaaaaagaataataggttataactttggtggtttaaaagacgactggagcactggtgataaatctcaaatgtgcggctttcttagattagatgtatcaagctctggtgaacaacaaaatgctcttgcttctggttctggatataaacctttagttgatgttgcttcgatacaaaatgcggttcaacaagctcaggctaaagcacttaataaaatggttttagatgcgattgcttactcagagactttagctaatcctgatcctaccaacacgaaagcagtaaatgataagattgaagaaatgtcattggaatataaaaaatcaatgaatgaagctggaaaattagcaatggctcaagctattaaaattgactctatcgcagatataacggaaaaaggctgggcattttttggtgcttactacatgaaaattgttcaggcgataaatggaactaacgcagcaatgaatagtattccagcttcttctggtcaagcttctgaacgtttaaattatcttgctgatagatttgaacctcgctttagcaaagtcaaaactttaataaatggcactgacaagcttaacgctgatactactaacatagcgggtgaagacagttcattatttacaagcttattaagaggagcaaactcaaacggtggttggttcatgggggatggtaaagtagatcaattgttatctattacacagcaagtaaacgtaggtaatcacgttcttaatggtgtagcggcaatggggataggcgcaagctctgtttcattgttagcgttgatacctaaactctcagatgtgttgatagcagcaggtactgtgatcgggccgttcttctcgttcttgatgatcgtaggcttgataaacggcatcatgcttgcttacgtcatccctatgataccttacatcatctggatggggattgtgctctcatacatggctacgtgtatagaagcctatgtagccagccctatgtgggttttagctcacttagcgccggatgctgatgacgttgtaggtaaacaaggacagggctatatgcttacactggtgttaacactaaagccggggttagcaatatttggtttccttgcttctttcgtgatgatgtgtgcgggggctgccctcataaacgcaacgttcttgatagctacaagttttgttgactcaggttggttgggtattacttactcaatagcaatgattgctgtttatatgtgtttaaacttaaacaatacgatgaacgctacaagagttatgtctactcttccagacactgttttagaatggataggcgctagaggaacttcattaagcggtaaagtaatgggcggttcagaagaagctcttagtaatgcgaaaagcaatactactaatactgttgaaagagcagggcaagctacagcaagttctatgtcaaacatggcaagaaaccgtgagaaaaaaagagatattgaacctaaaggcggcaatgaaggtaatattggtaaaggtagtaatcaagagncaantaacaacacgccaacagataaaggaaatcatggtcagtctataacagaccttaatctaaaggaataa

SEQ ID NO: 251036 - DNA, 2172 bp, Klebsiella pneumoniae
atgaatagagaaaatacagaaatggaagctgaaaagcttcttgataatatggatttgtcattagatgatgaagaacaacaatctgatgaagatacaactttaacgcatcctgaaattgatgctttcgataatgctaaattatacgacgagcgtattactgatgaagctttctatgcttcaaataactacgctattcatcctaaaggcttctttaaaaggatttacccaaaagatggtaatccttactggaagcaaattcacaactattttgctattccatacttaaagctttccactgctaaacaaggttcaggcgtaaaaaccttagaagctaatactggttatacaggtgttcgatttctcaataacgatttagaagtaaatgaagttgctctttcttcatcggatcgagcagagtttaccagctctaaatcacgtcttaccttgaacgattggacgcctcctgcgggttctgatcgttcagaagtgtataaagctttcatggaggccgcacaagctggctatgagcctcatgtaaggccaaatggtaaagtctatcctgctttcatcaagcgcatgacaggctacacacaaagaggctgggtgactcctgaccttcatatccgctctaagcatgatctgtatgtcggcaaggttgctactcagagtgaaaagaaaggtgatcctgaaatccagaaggaaactacaagagagataattaaacactctccggcagttcgtattttcttagcgggcacatatgcgtcatacacaaaaggccgtatttgtatttcagatgagttttgcccgattgttaactacacgggtgaaggtgaaaagggtaaatctacaactcttaaaatatgtgcagctacagaaggttctccagctaaaggccgtatgattattgaagctataagttcagaggttggcgttgaaaactttgctactgcttataatcatggccctgtttttcttgatgagattgacgagctacttagaacaaatgacttaccacaaaggataatgcgccttactaacggcggtggtagagttattttcgataaagataatactttcaaacaacctaacgtttggaacggtatgttcttcacgacttccaaccaatcactaagacaaagtgttaaaggtgatggcaaagagtcggctattttaactcgtcttattgaaatagatattcatgatcctgaccttcatatcttcttccctgacaagaatgatggaggtaaagtttctcagtggatgtctaagctttcagagaactatggtcatatatatgatgaaattatcgcatatataacaaaaaacgctgatgaacttgagcaaaaacttgctgattttgaatctgagttattaactacagaagagttaagatatttcaaaaagaaccgccgttcagcgcatactttagctcttattatgcttggtgctgaaattatggaaagcgttttaggcaaagaaagtgctatgttaactcatgaagcaataaacatttataaaaataaatatgctcaggatattaacgaacaaattgattatgctgattataaatacatttctcatattgagcgtctttatgaatggattaatgctaacaaaggcatgatctcttggagtaagtttgcttatgctgaacaatcagatgatataaacgaaagtatcagcagaacgcagaaaaaagcggctcaaacgcttactaacaatgctactcatagaggttcggttttagcggaagttaagatcaatagagtcatggaacacgctgatgattttgacggaacaatagttttcaacgctatgggcatcaaacacctcaaacaacatgctcaacttgattttaacgagctttgccaatctcttgagaagttaggtatggttgaacatgacgcgaaatttacagataagaagaaggattatttaggtttatccactacaagaactgttcgcttaacattgaaacctatagatgagctaagttccaccatgttcactacaaagaatactgttcttgtgaacgatagtgagaaaacagaaggacaaaccgaaattcttaatcaaaacaatgctgatagtgagtttaacataaacaaaatacttgaagcttccgctcaatacgaagaagattattccgcttactttgatagaacataa

SEQ ID NO: 251037 - DNA, 912 bp, Klebsiella pneumoniae
atgactgtatctatccaaaacaccccatcttcaagcctaaagcccctttaccgttgggctggcggcaaatctaagctactcaaaagctacaatccacatctaccagatttgaacagcgtaagcgcatacgtagagccgttctttggagctggcgctctctttgcgtctgttaagtctacatacaaccagatccctacaatcatcaacgacattaaccctgagctggtaagtctactcaataccatcaaacacgattttaaagcgttctgtatcgagctgcaggagctggaagcggcttacctatctatacgctctcaggaggtcaggaactaccgtttctatcagcgtagagaacagtattggaaagaacagattggtagtgtccgggcatcggccttactcctgtttttgatgagcaccggctttaacgggatatggcaggtaaacaagaagacaggccgctatggaacaggcgcaggaatgcttaaccataagggcagtctgtttgattactcactcctgaacgagtggcacagagctttacaggcaacgtctatccattgcggttcttatgctgatctcgatgttccagcgggggcttttgtctactgtgatccgccttacagggatagctacgccgattatggccatgcgttcactgatgaagaccataaagccctaatcaaatggtgtcgccagcttcaggagcggggctgtgttgtgtggttagccaacagagaggcaaatgatagcttctttgaagaaaacgcctcagatgcttctgtgttgcgttttgacattacctataccgccggacggcgtaagaagaccgctgacgggtttcaggcggttaaagctactgacttgctcatgatctggagtaaggaaagtatcaaccaaaaagcagcgtaa

SEQ ID NO: 251038 - DNA, 456 bp, Klebsiella pneumoniae
atgagttatacagcattaaatgtattaagcattcagattaagaaaaaaaatagagaacagctcactgcgtgggttagcgatataaataatctgatagaacttgcaaaaaagcatgatcttcatgtcgtcaaaaaagaccatcttgaagatgatgagcattttacgcaggaaaaaagatatagaaaagaatggtacgatatttactttgaaacttatcaacctgtcgattcatatgaacaatatgaaatagcttgcgatattgctgaaatattcgatagttccgtatcttttaactctataaactcttggtgttgtccttatcacgagtcagtaagttcttttgttgataaatatggcattctttattatgaagacgaaacagaacgatatcatggaaaatggcctcgccatttgggtatgtatttttggaactgggtaaatcttgacgagatttaa

SEQ ID NO: 251039 - DNA, 294 bp, Klebsiella pneumoniae
atgaaaaagaagtttagacctgtagattttcaaacaagcaatatgggaaataactatataacaatagaaggtatgatgtcagcaccatataaagaacatagcccggagttattttcacaatgtctaaaagaagtaagcaatattaatagattacttatagataaaaggaagtgtgataacgaagagcattaccaaaaagttttaatggttgctgatatgtgtttatcaatgatgatgattgaacgccgtattggtatcgttaatgaagataatagttattttaatcaaaaataa

SEQ ID NO: 251040 - DNA, 558 bp, Klebsiella pneumoniae
atgataaatagttttagattattaaaaggcagaaaaagtaaaaaagggttttcactattagaattgcttttaacgttaggtgttatagctggaataataatagccgcttttatagtttttccaaaagttcaggcttcacaaaagatagataaagagagcagaaacataacagctattcaagcgggagtgaaatcactctatggcggcagggctaagatctcatcattgaatactgatagcttcattgcgtctaagaacgcccctgacaacatgatcttggatggtaagttggtgaacgagtggaaaggcaatgtaagcgttgaatacagcggcaatcacggtaaatacaacattatgtatgatgccgttccccctgatgcttgcgcaaaactcattacagcggtttcaggtaattttgtgagtatcactgtatacaacgacaacgggagcactgatgttaagaacttagaagaagggtatggaatagacataaccaaagctacagccgcttgcgcatcacaagaaagctcaactgttatgtttacatccatcatttaa

SEQ ID NO: 251041 - DNA, 546 bp, Klebsiella pneumoniae
atgacacacatattaagtaggaaaagaaagaaaggattttcattgttagagttgttgttggtttttggtgttatagcagcaatcatagtagcggtgttcatggtttatcctaaagtaagctcaggccaaaaaattgacagtgatataaaaatattaggcacattaaacgctggcattaaaaacctatatgctggacaagctgacttcacaggtttatcagtagacgcagtaatcaagtctaagatagttccagaagacatagttgatgatggtttaatctgggatagttggggcgcgaacgtcttaatagaaccctactacgatggaagcttttatattgggtttgagaacgtatctgtagatgcttgccctaagttcgtttcacaagccggagcaagttattttaaaatagttgttggatctacagaagttaaaaatatagaaaatggtttagagctaaatatggctactacaacatcggcttgcgctaatggtgaagatggatattcagacaaaccaattacagtttacttttacgataaataa

SEQ ID NO: 251042 - DNA, 207 bp, Klebsiella pneumoniae; identical to SEQ ID NO: 121370

SEQ ID NO: 251043 - DNA, 216 bp, Klebsiella pneumoniae; identical to SEQ ID NO: 121371

SEQ ID NO: 251044 - DNA, 435 bp, Klebsiella pneumoniae
atgagcgatctttctcacttatcaaacatccgctctctgcgtaaaatcgccaatgaaattggtgatgaagagttcttagtgttcgctgaaaaggttgaagctgtaaaagaagagatcaacaagcgcattgaagaagagaagcaaaagcagctactggttgaagacaagcttaaagctactactgaactactccagtcagaaggctttgaagtgagcttagacagcgtgagagcgttcctgttaggccaagagcttcctgcaccgggtaagggcgctaagggcgttaaacgtggttctgtagagcctaagtatgcttatacaaacgcagatggtgaagaggtcttatggtctggtcgtggtcgtccaccaaaacctattgaagaagccattaaaggcggggctaaaaaagacgatttcctgatcaaaaaagactaa

SEQ ID NO: 251045 - DNA, 189 bp, Klebsiella pneumoniae
atgccgtacttcttcctgatttttgtcatcagcagccaatcatcgaatatgcaggtggttcccatgcagagtatggagcagtgcaaagcagccattaaggcgatgaaagttgcagatgataagaggtcctgggacgatgtttcgccgagcgtagataatattcaatgcgtggaggtgaatggtgcctaa

SEQ ID NO: 251046 - DNA, 369 bp, Klebsiella pneumoniae
atggattacgcacaaagcaaagagatttcattacacattataagttctatgaagttgagtgttcactttaacaaatttgaagttgataacgaaaaagatatggatggtattaaatacataatcgaaagaaacaaagcaaacataaagatcagcacagcaaaaattaaagttgttgagccgggaagtttattattcttatcaagtaaaatgagggatacactaaaagccactgacctattcattatttatactgatgttgctgaaagtaatgatgaagagataacaaagaaactaagagactttgcctttagacataaagcatttgttgttcagataacgaaaagcagaggtagttatgataatagataa

SEQ ID NO: 251047 - DNA, 309 bp, Klebsiella pneumoniae
atgataatagataaaatacaatattgtgattatgactacacgttaaaacagattaaacatggaaattactatcactttaggatttataaaaaacaatcaaatcataaagtagtaagaggaacggaaccaaaatatttagtaaaaagtgaagttgatcttttaacagacaaaagagtatatgccggaaaagataaagcgaaaatagaacagtttgcagaatcaatgaaggatgagttaacaaacatagtttttgacgtgatgagtaaaaccaatagcgttgatacaaaaataagcataacaggagaataa

SEQ ID NO: 251048 - DNA, 303 bp, Klebsiella pneumoniae
atgatatttttaacattagttattatagtgaatttattgatattcgttaacatgggtagttttgttagttgggtttcagaacacaaggtttatgggatatggtataaaagaatattcaagatcggttttcttttcttattcgctatgtttattgccagtatcttgggtggtgaagcagttcagacagcagctaaatcattcttcttttatattgattgcgtcatcgggtttgtcttaatgactatagttcacgcctttttcgtcaaactaaaatccaaaaaggacacgtccaaacccgcctaa

SEQ ID NO: 251049 - DNA, 300 bp, Klebsiella pneumoniae
atgaagaagcagattttagcagcagcggctcttgtggcatcgctggcgctctccggttgtggtgatgatggtatctatggaacgtatgaaaacgcccagtacggcgctgttctcgacgttcaaaaggatgtgatcaagttcaggggtgaaagctttccggtgaagtcatgggatgaaagtcaaaaaccaacctacatagctaaaactcaacatagcgttgttggttcatggacgttcaagcttgagaagacaaaagacggcggcgtgatttatcaaggcacaaagtttaaaaaggattaa

SEQ ID NO: 251050 - DNA, 558 bp, Klebsiella pneumoniae
atgagcaaactaatagaaacaacaacagcacaaaagattttcaaatccatgattgatttaaatcttgataaagatgaagtcatttactttgaagagttcataaacttgctatatgaggcggggttattaaaccccgattttcaggagcatcaggaattcatagaaaacaacagaaactattttattgagttaaagaggattagaacagagggaaataagactttcgtaataagaaactatctaaatgatatgttcgcagagctaagaaggttaaacaaggatttaggctatacctataaagagaaggtagaagagcttatcaaggagtttgaaagcttctcagagacagcaaagcctcttggtgatggtaaaagccttgtttatcttgtaatgcttggaactcagtcaaagggaaaatcacacaaaaagattgtgtgtgtgtttataagagatgatgaaaacaaagaaatgttcaatcaatcaatgaactctaaaataattctcgctgaaaaagttattttctatgaattcctgatgctcctgaaaatcggggtttaa

SEQ ID NO: 251051 - DNA, 426 bp, Klebsiella pneumoniae; identical to SEQ ID NO: 121409

SEQ ID NO: 251052 - DNA, 681 bp, Klebsiella pneumoniae
atgaataacatacagcatttatcaatactcatcactgaaataaaaaatccttcaacagcattaaacgcagcaagcattttaaaagcaatagaactctttacagggttttgtctttatctggtttgtgatgcgctacatgccaaacaaaaaaccttccagatcacttccggtatcttcgacggcaatatcatagctaacatgccaaaaaacgagatagagaagtatagcaaggcggcagatgcggcttaccaatacgttcatatcatcaaacagaaagaagcgtttacagacgttctgtcagagctgtatgaagagatctatcttacaggtaagtgcggtgatggtttaggccagttcctgacacctgacgatgtgagcagccttatatcctctattggtatacgctcaagagctgatacagcgaaaatcaatgaagaatgctgtggtgctggctctatagtgctatcgacactgaaagaactacatcagaaaaatggaagctatcttgatacaacactaaatcttaatgacatagatccattaatggtaaaaatggcaatcatacagataatggctccaattgcttttaaagaaaatgtagatataaaagagataaatatttttaatcacaatgctttgttaaataaaaataagcaggtttttaaatacacttcgggttaa

SEQ ID NO: 251053 - DNA, 483 bp, Klebsiella pneumoniae
  misc_feature (419)..(428): n is a, c, g, or t
gtgaccatcgagcgcctcgacaacagcaatgacgccaacgtcgtgacgctgatggcgatccatgcggttaacgtacgcgaaaacgttgtttatccggaagacacgattgcccgcatcacgattaaagggtcgaatgacagcaacagcaaccgcgagcagaagtacaacatgcttgcgcagcggcataccatcagctacgacaggacaaccggcgcggtcgattacacgctgcgcccaagccgttcgtttgctgacgctatcctgaatgagtgggttgtcgtaggtaagcaggacgtggccagtatcgacgtcgccgctctgtatgccattgctgactcactgccagatgctcagcttgggtatttcgattacaccttctcggatgagaaacaaccgttgggtgagcgcatagctacgannnnnnnnnngctacgatcgccaatgtggcccgcgttgacggcaataacatcggcgatgtgctga

SEQ ID NO: 251054 - DNA, 498 bp, Klebsiella pneumoniae
atgcttgatttagatattaaaagagagttgctgtttgctgaaacagccgaagaagtagatatattggtaaaggccggagctgatgtaaacggtcttatgggtagtgtttttcctttagctttagctgaaaacttagaagtagcaaaggcattagttgctaatggtgctgatgttaactttaccaataagaaaggtgaaacagctatcttctataacaaaaacatcgctgttatcaaatttttgatttcacaaggcgcaaatattaaccatttaaacaacgatggtgaaacagcattgtttaaaacatccgacattgaaatgattaaagcgcttatcaagttgggttgtagtccattcctcaaaaacaagaatggagatcgccacgacacaaaaataaaaccagcagataaagaagaataccaaagctttatgaataagcttaaagaaatgatcaggaacgcacttgaacaaaaaaagcagatgctacaagtagcgtaa

SEQ ID NO: 251055 - DNA, 393 bp, Klebsiella pneumoniae
atgaaagcattaacagacatattaaaaaccaaaaatacaattgaaattgaaaaattcattaatgaaaaccgcgttattgaagaagatttttatattgatgaagtagccaatattttccatgttgttctacttacaaaacaatataagagctatgaagtagcaagaatgcttaccaaatactttgacattaacaagcaggataaagctggtaaaacagttctgttctatgccgttctcatggggaatactgaagctgttaagttctttatctccgcaggaggcgatgtatcaataaaagacaatcaaggcagaaaagcggcagaccagataacactacttgatcttcaaaatgcttcttcaatgtcaagagtattactatcagcagagaaataa

SEQ ID NO: 251056 - DNA, 186 bp, Klebsiella pneumoniae
atgagtgccttttcttttctgtatttcattaatcagactttgctcataccgcattatataggaaagaaacttttcattctcatctttgattattatttcatacgtggatttgtatttgctatttttcttttggggatctgctccattcaaaagaagatggatataaaacttaatgttattaattga

SEQ ID NO: 251057 - DNA, 159 bp, Klebsiella pneumoniae
atgttcagcttcggcttcaggcagcacaccattaatcaccagatattgatttttcaggccaatctcagccagttcctcatgagtgcgggcgacttcctgcagcgtagaattttgcagtcgtgcaaccagaaccaagcgggtacgttcagggtcggataa

SEQ ID NO: 251058 - DNA, 480 bp, Klebsiella pneumoniae
atgagatcccatttcgagtaccagaaccggaaacgccagcaacaaccccagccagaagcgtcttgtcatgtcgtgaagttcatcactcggccccgtggatgccgtagctacgagcggctccagtgccattccacagacaggacagcttccgggaccactgcggcgtatctccgggtgcatcggacatgtccacacaccttcagaattctctttttccgcctggttgtgaggctgttttatctgatcagggctgacttcgtgatgatcgtggtgatggtgatggtgatgggaatgttcactggcatcttcggtaagataacgatcgggatgggctttaaatttactctcacagctggcggagcagaaataaagttggtggtcctggtatcgaatgctgctgtgcgccctgtcgggcaggatggccatcccgcacacgggatctctcaccttatgcaatacgtggccctcgtccggggataa

SEQ ID NO: 251059 - DNA, 477 bp, Klebsiella pneumoniae; identical to SEQ ID NO: 250952

SEQ ID NO: 251060 - DNA, 324 bp, Klebsiella pneumoniae
  misc_feature (89)..(98): n is a, c, g, or t
atgtcagagaaattcagaatcaaactctcctgccctgattgcggcagtgagcaattcatatttagcaccgaaccgcacaccatagatannnnnnnnnngtgtgccgtccttcaagtagcccaacgacgccaccccctcctgtttatcgctgtcgcggtaccagataacctcaccattaacttcgattgctactttcataatgttcacccattaaaaaacccgccggagcgggtttggtttagtaagcaccttgcgcttttcttccgaggccataagcgctttgaattgcagaggacattggtccattgcgatcaacatcggtaa

SEQ ID NO: 251061 - DNA, 339 bp, Klebsiella pneumoniae
atgattgaggtgctgcatcaggattttatccgtaccgcgcgggccaaagggctgggccgaacccgcgtactgctgcgtcacgtgctgccgaatgccgtgctgccgctaattccgatgataggcattgatatcggcatttttatgggcggactggtggtagtcgaatcggtctttggctggccgggtatcggtcagctggcctggcaggcgattcaacaggtggatatcccggtgattgtcggggtaaccaccgtgtcagcggttgccattgttggcggcaaccttattgcggatctggtgctgccgtgggtcgatccgcgcattgatgtcaaaaagtag

SEQ ID NO: 251062 - DNA, 255 bp, Klebsiella pneumoniae; identical to SEQ ID NO: 121388

SEQ ID NO: 251063 - DNA, 312 bp, Klebsiella pneumoniae
atgaaaaaaacaaaaacattatttgagcaattaaaagatagagctaatcagctttcggcgggtgaagcaataatagtgcttgacgaaatcaataaaaaagaagggtttgaaaatgctgttatctttctcaacagtagaatgaaacatattagaaaggcaattcttaaagacacgttcacactacaggggtgtaggaacgtcaatcataagctggcaaacgagcttatcgctacagttcaaaaggaacagttatcagccatcatacaggccacaacaaccaacaatgaagctaccaccagaaagcgtatgtaa

SEQ ID NO: 251064 - DNA, 714 bp, Klebsiella pneumoniae
atgattgctgaactgaaaaatgttgttcctgagctgtttgatacaggtctcaccggggtccgcctgggtgtaaagacagttgaccatcctccccggatcctgatgttgtacggttccgttcgagagcggtcctacagccgtctggccaccgaagaggctgcccggcttcttaccgccatgggtgcggatgtccgcatctttaatccttccggtctccctctgccggatgatgcagcggatacgcatcccagggttatggaacttcgcgaaatggtgcgctggtctgaagggatggtatggtgctctcctgaacgtcatggtgcgatgaccggcattatgaaagcccagattgactggataccactatcagagggcgcagtacgcccttctcagggaaaaaccctggccgtcatgcaggtctgcggaggctcccagtctttcaatgcggtaaaccagatgcgtattcttggccgctggatgcgaatgattactatacctaatcaatcctcggtagcgaaagcctggcaggagtttgatgaagacggacggatgaaaccatccccgtactacgaccgtattgtggatgtaatggaagagctgatgaagtttaccctgctgacccgggagtatgcagcgtatctcgtcgatcgctacagtgaacgtaaagagtcggcagaagcactttcccggcgggtgaatcagagcaaaatctga

SEQ ID NO: 251065 - DNA, 435 bp, Klebsiella pneumoniae
atgaatccctacaagtttgagcatctggtcggccagttgctggaagcaatgggctatgagcaagtcgaagtgaccaaagcctccggcgataaaggcgtggatgtggtcggtaaagtgcaggttggcatcactaccattaccgaagtggtgcaggtgaagcggatgcaaaatactattacccgcccgtttatcgatcagctgcgcggcgcattgccctaccacaaagccattcgcggcacgcttatcaccaccggaaaatttgcagcgaaatgtgcagaggcggcgctatttcccggagccgcgccgattacgctaattgacggcgatcgcctgctggaactgttgattgaaaacaacgtcgggatcagacgcagtaatgccgttgaattgctcgacgtagacttacagctgtttgatgagctggatattgagtag

SEQ ID NO: 251066 - DNA, 375 bp, Klebsiella pneumoniae
atgctcaaatacaaaagcctgaaagattttcttgatgaacagaaacagcaagagctatataaaaaaaggcttgctgaaaagctctattacactattaaaaagggaacggcagaagagatattatcagttttcaagcagtgttctgaaagtggtttagatttcaaacaggttaaacatgactacttacttgaatactttgatacgttcagatctggatataacaaaccctcgatacttatcacccgcctgattatcagttatcaaaaaatcatttctgtaaaagctatccagtcattttataacaacatctattacaggcatcttctggatgatgaagagctaatagagttaacttctcttatcattaaagattaa

SEQ ID NO: 251067 - DNA, 282 bp, Klebsiella pneumoniae
atgaaaagtaatgataactggaatggaacaacaaaaaaagaagatgaaatatcattagatgactcgactatcacaatatctttatcaaaagaagatgaagaggcagaaaagaaacagtctttaaggaagagatttaatatcgaaaatcatttagagaatgcggcaatgtcaggaggtgttattgtagtgatcttaggcatgattatctaccttccggttatccttgtgatgatgacagggttgatgataagagagttgatagacacggtgagagaatggtga

SEQ ID NO: 251068 - DNA, 522 bp, Klebsiella pneumoniae
atgctgcctttcctcgacgggtggcaaatcatcagcgcactgagggagtccgggcacgaagaaccggtcctgtttttaaccgcaaaggacaacgtgcgggacaaagtgaaaggactggagcttggcgcagatgactacctgattaagccctttgattttacggagctggttgcacgtgtaagaaccctactgcgccgggcacgctcgcaggccgcaacagtctgcaccatcgccgatatgaccgttgatatggtgcgccggaccgtgatccgttcggggaagaagatccatctcaccggtaaagaatacgttctgcttgagttgctgctgcaacgcaccggagaagtgttacccaggagtcttatctcgtccctggtctggaacatgaattttgacagtgatacgaatgtgattgatgtcgccgtgagacgtctgagaagtaaaattgatgatgactttgagccaaaactgatccataccgttcgcggtgccggatatgtcctggagatcagagaagagtga

SEQ ID NO: 251069 - DNA, 303 bp, Klebsiella pneumoniae
atgtcgctagtctataacctgttttatggcatggtgctggtgatgtacctcctcatactcggcatgtcgctaaataacccatacaaaccagccaggggatttgggtggttaattcaggattcactggacatgctgtccctattattactcagtttcggcgggatcctggcggtactggagctgattggcccgacggcctggttattgtcacaccgggtggctgactggatgaagatgcgctcggcgatgcggcactacctgcagggagcggcccgccataccgcgctcgaggagatcatgtaa

SEQ ID NO: 251070 - DNA, 294 bp, Klebsiella pneumoniae; identical to SEQ ID NO: 121365

SEQ ID NO: 251071 - DNA, 129 bp, Klebsiella pneumoniae
atgctgatcaatataacggtacagatctgtcatattctgggtgaccgttatattcctgcgctgaagtactgcatcgacccgggctttcagctcgtcatcgatgcgggcattgaccatagccatacataa

SEQ ID NO: 251072 - DNA, 255 bp, Klebsiella pneumoniae
atgcgccagtatcactgctgccgcattgaagtacagggcgcgtttgaccacctcacggggatgtacctcggtactgctaatagaaccggcaaacagggtttcatgggcaatcaactggttctgctggttcagatacagcaccataaactcttcgcgctccagtcccgccattttcagtttcagccagtcacgggcagcctgagtggaagtgaatgccactcctgtttcgcgcaggtgtcggtcaagcagcgttaa

SEQ ID NO: 251073 - DNA, 126 bp, Klebsiella pneumoniae
atgctcatgctgcacggcgcgcaggttatcggcgtactgttgcacctggctgagctgcaggctaagggtattgatatcgtctttgctgcgaaagctgatcacccaaccctgtggctcattgtttaa

SEQ ID NO: 251074 - DNA, 243 bp, Klebsiella pneumoniae
atgcataccttcatggccggcaacattaacgccaacaatataagggtcaggatggttcataaaaagatcaacaaccgcagccgctcgctctattccatcatgcctgataagaacaacatgcaggcgtgtgatcgtaccatattgttcctcagcgtcttttattgcccgagtcacctcatacaaacaggcaagataattgctctcaccgttgccatcgccgaccctcatcatatggtccggtga

SEQ ID NO: 251075 - DNA, 345 bp, Klebsiella pneumoniae
atggtccgcgcaaagactatcgctcagactgagcaggttggcgcactgcgccaggcgcaatggaacgaaacggactgggcagcggatcggcttgggctgaataccggcctgctgtggctatctgcgctcaaaccgaccacgcgcagctggcatgccagccgtcacggaaaggtatacaccaccgagcaggtgcgagacttctacgctgagaacggcaaccggtacaactgctattgcagccagattccggtactgctcaatgatgacggcagcatcttcaacgaaggcctggcggataagctggcgaaagagcgtaagcagtggacaaaagcagaatcagcttaa

SEQ ID NO: 251076 - DNA, 225 bp, Klebsiella pneumoniae
gtgaaggttgagtttaatgatcaagggtcggtatcagtcatcacggtcaccagcactgtatttgagttccgccgacacaaccgggcgattgatgtggcgttgcttctcacgcctgaaatgaccagccagagcagcggttttttcattatgaaaacgattttaagtggcaagacaatgcacgccctccgggcttacaaacatctgatcagggaggctaagcgatga

SEQ ID NO: 251077 - DNA, 390 bp, Klebsiella pneumoniae
gtgaacgcggaaatccgcgagaaaggtgacacctatggcaatcaggtgacattctccccgaaacataaaggcacgctgggcgtggactacaagccgggcaactggacgttcaatctgaacagcgatttccagtccagccagtttgcggataacgccaatacggtgaaagagagcgccgacggcagtaccggccgcattcccggcttcatgctctggggcgcacgcgtggcgtatgactttggcccgcagatggcagatctgaacctggcgttcggtgtgaaaaacatcttcgaccaggactacttcatccgctcttatgacgacaacaacaaaggcatctacgcaggccagccgcgcacgctgtatatgcaggggtcgttgaagttctga

SEQ ID NO: 251078 - DNA, 513 bp, Klebsiella pneumoniae
  misc_feature (236)..(236): n is a, c, g, or t
gtggcactggaacaaattacccacaataacttccaggccggctctgaggtcgccaacgtcttcgtcgagaaaatggcggagaaaggcaaatacgccgagctgacctgcaacctcgccgataataactgcgtcacccgttctaaatctttccatcaggtcattgaccagtatccggatatggtcagcgtggcgaaacaggatgccaaaggcaccctgagtggcaacgggccggtagnccttggcgcgattgcggcgctgaaagcggccaaccgtagcgatgtgattgtcgtcggcatcgacggcagcaacgatgagcgcgacgccgtgaaagccggcaccctgcaggcaaccgtgatgctgcaggcgcaggccatcgccgctcagggcgtcaccgatctggataactacctgcaaaaaggcgagaagccggcgaagcagcgcgtgatgttccgcggcattctgataactcaggataacgccgataaagtccaggatttcaacattaagtcctga

SEQ ID NO: 251079 - DNA, 165 bp, Klebsiella pneumoniae
atgctcaagccgaggccgctgctgaagttcagaaatatacgtctctcgctcgacagatgggcgttcagaatgatcaaaataatggctacgtacagaacgctgctaaatatcagcgggaatataataaaatatcccgagatattgctgatactacatctcaattaa

SEQ ID NO: 251080 - DNA, 231 bp, Klebsiella pneumoniae
gtggccctgaccgacagcatccacgtgtttggcgaagggtatgtcgcgccggacggcctgaacaacagcgtaaaaaactatgtcgaagcgaacggcggcgtaagctggtccccgattggtccagtgaccctgaaagtgggttaccgtcacgtgagcgttgacggcaaagagggtcgcccaaaccacaccctgattgatggcgcctacgtgggcggcggagtcaccttctga

SEQ ID NO: 251081 - DNA, 150 bp, Klebsiella pneumoniae
atgaagtccttccagccttcagggctgttccagtgtggtgattcaggttcgcttctctggcgcccggaaagcggattaactctcgcgttcctgagccatacccggaatgccgagttccagtcgatcagctttgtgccgcgggcctggtga

SEQ ID NO: 251082 - DNA, 402 bp, Klebsiella pneumoniae; identical to SEQ ID NO: 16839

SEQ ID NO: 251083 - DNA, 363 bp, Klebsiella pneumoniae
atgctcaaggaacacctcacaccgctggaagaacagggcatcctcgaaacgctgcgccgggttatctcacggctcaatgaaatcttccgcttcgccatctctgaagagctcatcgagttcaatccggctgacaacctagtcgcccgcttcaagaaaccgaaaaagcagaacatgcccgcccttcaccccagtgaactgggcaggctaatgctggcactacagaacgcctctatccgcaaggaaacccgctgtctgattgaatgggagctactgacctgggtacgtcccggcgaagccgtcagcgctcgctggtgcgatatcgatatgaaaaagcggaatggcgcatacccgatacctttatga

SEQ ID NO: 251084 - DNA, 255 bp, Klebsiella pneumoniae
atgcagcagacggattgcctgggcgacccgcgggtcgctcagcccgcgcatcagaccgggggtcgcgagcgtgccggaggaacggatggcctcgataaaaagcagctcaaccattcgcgccagaacgaaagatttgcccgcgcgatccgcctgcgcttcctctttcagcagcccgacaaaggtggccagccgcggttgattgcggaccaccacaaaggctggcaacagcgaggccagcaggctggcgttcgttga

SEQ ID NO: 251085 - DNA, 180 bp, Klebsiella pneumoniae
atgagtaatcccggtgagatagcggcttttggcctgattagcatcgtcggcatcttcctttgcctgctgcaattgccggtccgtcgcttcatgggcaataatttctttcatcagacggtcgctttgcaggcgcaattcctcttgcgcaatctggcgacttttatttgtcaggacaaatag

SEQ ID NO: 251086 - DNA, 255 bp, Klebsiella pneumoniae
atgcagcagacagatttttcggctgatattttgtttctgctctgtagacaacttttcaccaccgcaggtgggttcaaccttgtcggactgactgataacaaacaacaccttatgccggtatgcctcaccaatcacctcccggtaaaaatgttcatccaccgccagcgctcgatcatcggccttgatcaaccacagcaccaggtcgagccggggaagttgttcacggtagagagcggcatattcagcatcccgtag

SEQ ID NO: 251087 - DNA, 270 bp, Klebsiella pneumoniae
atggatgccaaccagcagatcgtcgacagcaaacgtgtcatctaccgttttgcagcgcagataatcgaagtcagcaacatagataattgctgtctcgctaccatcaaccgacaccttgaagacgccagcatcgaagaagcccagggtgccgggcttgaccgcggtggcgcggccttcacggttgagcagcggattagggaatacgccaccggcgtgaattacgtgttttccgtctttagccattttttactccggcatttcgctgactga

SEQ ID NO: 251088 - DNA, 168 bp, Klebsiella pneumoniae
atgcgcgcagcggtaaaagccaaatttggcatgaccgatatcgctgtcaacgctctggacggcgagcctctgaaagagctgtttgctcaatgccagacttcaaccggcctgaatggcgctttccgccaggctaccaatacccaatcagtcagcgaaatgccggagtaa

SEQ ID NO: 251089 - DNA, 396 bp, Klebsiella pneumoniae
atggatatgggcacctcccgcggcgacggtactgaactgttctacgcccgctgcgctgtactgcatgccgcccgcgttgccggcatcgccgcctatgacgtggtgtggtcggatatcaataatgaagagggcttcctggcggaagcgaatctggccaaaaacctcggctttaacggcaaatcgttggttaacccacgacaaattgaactcctgcatcaggtctatgccccgacgcgcaaagaggtcgatcacgcgctggaagtgattgccgcggcggaagaagccgaaacgcgaggtctgggtgtggtatcgctgaacggcaagatgatcgatggaccgattatcgaccatgctcgcaaagtggtggcgctctcggcttccggtattcgtgattaa

SEQ ID NO: 251090 - DNA, 231 bp, Klebsiella pneumoniae
gtgatcattgagatcgccgaccagggatgcggcattgacgaggcgctgcgcgatcggatcttcgagcgcggcgtcaccagcagcgccagcaaagatcatggtatcggactctggctggtacgcagctacgtggaacaagcaggcggcagtatcgtcgtcgaaaataatattccttttggcaccatttttacgctttatatccccctgacccgagatgaacatcatggatag

SEQ ID NO: 251091 - DNA, 426 bp, Klebsiella pneumoniae
atgaagattgtcatacaacgcacgtccttcacgcagaaactctggggagaatatgacattatcgatacccagacgctctttaatatcacgagtaaaaccgaccggaattgtcgatttaataatcataacggcatttgggttaatttcggttacatcacgaatgacagcctcaaccgtcgacgtattaaagtagttagttttcggatcatagtcagtcggagtggcgataatgacataatcggcattacgatatgcatcgtgtttatccgttgtcgcgcgaaaattcaatggtttttcggccagatattcctgaatttctttatcgacaatcggagaaattttctggttaagcatatcaactttggattgtacgatatccagcgcaaccacttcgtggttctgcgcaatcaggatgccgttcgataa

SEQ ID NO: 251092 - DNA, 435 bp, Klebsiella pneumoniae
atgacgttctacgagcgctttgaacaggtgatcgcgctcgcgctgtccgcaatcattgccgttatcatcgtggtctcgctgctgcagctgatctcgatcgtcttcagcctgctgatcattgatgcattcaatccgctcgatcacaaggtcttccagaccgtgttcggcatgatcatgacgctgctcattgccatggagttcaagcattccatcgtgagggtggccttgcggcgcgacagcatcatccaggtcaagacggtgatcctgatcgggctgatcgccctggcgcgtaaattcgtgatcctcgacccggagaccggccccgccaaggtcgcggcgcttgcaggcgcgacactggccctcggggcgacttactggctgctgcgcgagcgcgatgaccggacagccggggaaagctcagatgatcagtcgtga

SEQ ID NO: 251093 - DNA, 204 bp, Klebsiella pneumoniae
atggccgatatcgtgggcaaggcagatagcctgcataaggcttgggtgaggcaggaattccgcctcagtcgctccaacgggatagagtatattcagctgagacaggatgccgctgccaatctgcgctacctccatagagtgagtcagccgtgtgcggtagaagtcgctctcgcccagccccagcacctgtgtcttcgactgtaa

SEQ ID NO: 251094 - DNA, 399 bp, Klebsiella pneumoniae
atgatgggcagcggcccctcattcggcgccgcgcatcaggaatccatctgtattctgttggagatgcagtggattaactccgccagcatccacagcggcgagtatttccacggcccctttgagattaccgaaacgggaacgccgtttattttattaaaaagcagcggccgcacccgcccgctggatgatcgcgcgatccgctttatcgaacgttaccagggaaaactgcagattattgacgtggaaaaggtgggaatcgacgcactgcacgccagcgtgcgcgaatatttctgcggcctgctgcacaactgcgtactggatgtttacaacctggcgctggccaccgctcgcaaccacccgctgaccacccgccgctatatgtggaaagtcgaatattga

SEQ ID NO: 251095 - DNA, 228 bp, Klebsiella pneumoniae
atgagcctttgtttagagttacctcgtaaatttgggaaaacatttttgaatgacctacttaatgaggtccgcaaagaagagcgtaaaggtcgcgctcttgctgtttctatccgccttgaggcgctggcaacccatatcgctaacaaaggtatgagcgccatagaagcggctgaactgctgcgccgggaagccacccgctacgaaaacgaatctcaggagctgcactaa

SEQ ID NO: 251096 - DNA, 282 bp, Klebsiella pneumoniae
ttgctcgccgccttccagcaggtaatcgtcgagaataacctgcactgcttcgagcaggtcggccagttcctgcgccgacatgtcgtagatgaacttgccggcgttgacctggtagagcgttggctcggcgccgttaacgtggcacaggaagtgccagttgtggctgtttacctcacgctcacgcccggtcaggcgctggtcgaagagcgttttcagagcgcgcttgatgccgagataccggtcctcgatatcccggaacatcgcgctgacctgcttcgctga

SEQ ID NO: 251097 - DNA, 294 bp, Klebsiella pneumoniae
atggaaatgaagattgacgccttggccggcacgctggagtccagcgatgtgatggtcaggattggaccggcggcgcagccgggcattcagctggaaatcgacagcattgtgaaacaacagtttggcgctgcgattgagcaggtagtgagagaaacgctggctcagcttggcgtgaaacaggccaacgtggtggtcgatgataaaggcgcgctggaatgtgttttgcgagctcgcgtacaggccgcggcgctgcgcgcggcgcaacagacccaattacaatggagccagctatga

SEQ ID NO: 251098 - DNA, 147 bp, Klebsiella pneumoniae; identical to SEQ ID NO: 185745

SEQ ID NO: 251099 - DNA, 252 bp, Klebsiella pneumoniae
atgaataccgatccgctggccgataaatggcgcgccttcggtatggaagtcagcgaatgccagggtaacgacatggcctcggtggtctcggtcatcgaggggttgaagcaggaaggtaaacccaacgttattattgccaacaccacgaaaggtgccggtatttcctttatccaggggcgcccggagtggcaccaccgggtgccgaaaggcgaagaaattgcactggcactggaggaactgaaagatgagtaa

SEQ ID NO: 251100 - DNA, 162 bp, Klebsiella pneumoniae
atgctgacttccgtaaatcagtcggtaaaggcattgtggtaccactgcagtcatctgtcccgcgccgggaaagtacagactgcccaccatcagatggtggctggcctggatattggggtgacacatgccatttatgatggccagttttgtaaacccgtttag

SEQ ID NO: 251101 - DNA, 150 bp, Klebsiella pneumoniae
atgctgaatgaacattacgatgtcaccacagcagcctatgcggtcggttacgaaagcctgtcccatttcagccgggaatatacgcggatgttcggggaatcgcccaagagggatattactgaactgagaaagtcagcgggtaagctttaa

SEQ ID NO: 251102 - DNA, 147 bp, Klebsiella pneumoniae
atgcaagatgcgacaatcgtcttccgtgggcatctcggcggtaataacatcctggaaactttcaatattttcattattattttccagcatgctgtaaaggccattcttcagtgcatcaagcgtaagatgttgcagacgcgtcgttag

SEQ ID NO: 251103 - DNA, 237 bp, Klebsiella pneumoniae
atgcggatgatcaccatcccgaatcagtcatccgtggcaaaagcctgggccgagtttgatgaggatggccgcatgaagccttcttcgtattatgaccgcatagtggacgtcatggaggaactgatgaagttcaccctgctgacgcgcggtcgcagtgattatctcaccgaccgctacagcgaaaggaaagagagtgccgcgcagctttctgagcgggtcaaccagcgcagcatataa

SEQ ID NO: 251104 - DNA, 204 bp, Klebsiella pneumoniae
atgcagcacattcatcagctggcgtttatattcgtggatccgtttaatttgcacatcaaacagcgcgttcgggttcaccaccacgcccagctgacgggcgatataatcggccagacgctgtttattcgccagtttggcggcgctgacggcctggttaaccagcggataatcctgatattcccccatttcgctcagctggcttaa

SEQ ID NO: 251105 - DNA, 207 bp, Klebsiella pneumoniae
atgcactccgaagcggtcaacgagggtgcgggtcgcgtcattcatacccttgatctccacttccgtgccttcgcgacggaacttgataaccacccggtccagcgcgctcacggaggtgatatcccagaagtgggcgtgcgttacgtcaatcaccacgcgctccaccgcttcacggaagtcgaagtggctcataaagcgatcggatga

SEQ ID NO: 251106 - DNA, 210 bp, Klebsiella pneumoniae
atgaatagcatcggaatgagggtggttgcgttttttggcgatcaaataaggaatatcgtgaataatgataatcccataaaaaatgaccagaaaaacgaagatcagaacgcccagcgcaaaataattgagaaacataattccctcggctttacgctaataatttatatgaattttattcacgacccactgacattcgggccgctattttga

SEQ ID NO: 251107 - DNA, 159 bp, Klebsiella pneumoniae
atgaccaataattcggagcagaagctgaaccgggagttctcctaccccagcatcaaacagggagcagacggtaatttgcatatcgcctacacctggtatcgccaggcgatcaagtatgttcgtgtctcgccacagtgggtaaaaggagaaagcgcatga

SEQ ID NO: 251108 - DNA, 204 bp, Klebsiella pneumoniae
atggggcactatgatgagatattcgcggagatgcacccgcagatagcgcagattatagggattgcggttatgcagctgctggtagagcaacgtgagccctcaagagaggcactgatagagatgattcagatattgtggcaggaagaccaggacgatctggctgtggagttggcaattgacgttctgtcgctaccaaaagagtag

SEQ ID NO: 251109 - DNA, 297 bp, Klebsiella pneumoniae
atgaaaacaacatacagctatgattttcagtacctccgtaaagggcaacagcgcccagatgatgatggagatgtagttgcgtgtaactcaaatgataatccattgttaatgttgcctaatgtaggtgactatatctcgatcacgaataaaggcgggcgcgcgcagttcgatggaaaagtgaaaacaaggttgttttcatatgtccgtattgatgatgaccatgtccactgctcaatttgtattgtggttgaagaggtagatatggatcagatatggggaacattaattaaagaataa

SEQ ID NO: 251110 - DNA, 972 bp, Klebsiella pneumoniae
atggctatttataaattttacaatgttcaacttctacctattgataagagtgttactgaagttggggtagatggctattgtcgccttttcgaaggggtgcaatcacttattaatgaatgtaagcagaataatagaaaactcagttctatcgcaatgaaaatgcgtggtgaaatgtatttcgctcctttttctgtgactatttacaaatttgatgaagttcagaatgaatctgttatttatggttcttttttaaaatttgatgatgtcaatgttttggtagatacaaatagcggccaaaccgaatatagatcgaaaggtaacaccagtagcagacgatacgatttagagttttttttcgacccaaaaactcatacacttgcaatccatgatacaaaaggtttaccagctcgaactcctctcatcgatgctttaaatgatatacttggtattcaagctacaaggctttttaaaaaacacagtttagaaatagaagaacttacatcggcagattcaataacagagtttcttgaattgccaaaaaaaggttacaaaagatatgatggggttgttacattttccaattcggatgcttatgatcagataatagagggtgaactgaaacgtcgagaggaagagttgaaggataaacgggtttcaaaatggtccgctagttataaaagcttcaataaagcggttatgactgacttaccggatgatgcaaaaattcaaatggcattggctactaagtatggcaatgcggaggtttcatacttagatgaacatggtgacagacaaaaataccaaatggaggattatccagtaagagagcagttaacaattaaggagtataaaggcgtaaaagggaaagctctggcagtattaaatttaattaaaaaagccttggcaaaaaccagagttactcctgggactatcaatagtaataaaaaattcttagatgaaattggagattaa

SEQ ID NO: 251111 - DNA, 645 bp, Klebsiella pneumoniae
atggatagcaatgcggacttcaataagcggctctattgtcgaataagacatatcccaatcattggagcagttttccgcattgttaatgcttatgcgtatcagggcgataaaagctgcaatgagaagatcgccccatttcgcaagtggtgggaaagaattttcaagaaggctgtatatatcttttttttaatagagttagttgtgctttattatggtggcgatgtttctaaggttccatgggaagcagctgattctattctttctgttttcccaagcgtattagggtttggaattggcgtttttgctcttcttttcgttatgcccgaaagctttcttgtttttatgtccactaacagagaaaaactaacatttggaccagagattgtaccagttgatatcgcctatccgcttgtggttttcactcttgcactttgttggtctgtgattaataaagctttcattaatgattttttctcatttgtaagtatgttctttttcttttatggaatggcgatggcatttgaattgatttcatttctctttaactcttcgttattaattcaaaagatatcttacgaggaatatttgaagaaaaaaaacactgataaggaaattaatagggttgatcgatggaataggaaatag

SEQ ID NO: 251112 - DNA, 474 bp, Klebsiella pneumoniae
atgaaccgactaatcgcatttatcagcgccgtactgatctgcctgatagtcagtctggcctttctggcaaatcactaccgcaccacctcgacagaattcaaaaggcagcgtgacgaaaagacgcaggcgctggagctggcgaacgccaccattaacgacatgcaaacccggcagcgagacgttgccgcactggatgctaaattcacaagggagttagcagatgcgcaaaaaactattagcgatttgcgtcgggatgtcgattctggcgctaagcggctgcgcgtcgccgcaacctgcagtcacatgcgtcaaaccacccagtcctccggcgtggataatgcaaccggccccgaacttactggaggcgctagccggaattatttcaccctcagagagcgaatcgaaaccagcggaaaaatgattgccggcctgcaggaatacatcaacacgcagtgtctgaaaggtcagaggtga

SEQ ID NO: 251113 - DNA, 213 bp, Klebsiella pneumoniae
atgattctgttctatacagtactggcacttacatcacttttggtgttcttcatgctgtgcatatatgcaatttatcagggatcagtgaaaggtgatgtgagtttctatgtgatgttcttcgctttggtatttctatttgtctcattctatggggctgtaggttttgcatacacaaagttaaaagaagccggtattaccgtagaaataatttga

SEQ ID NO: 251114 - DNA, 210 bp, Klebsiella pneumoniae
atggccggattaaccaaggagcagcgtgctgaacgtgctgcagcaaaacttgcgaccgtgcaggttaataccaatactcctgcaccgcaggagcagctggtggcgatgattaccgatttcccggcattccccggcggccccaataccgccaacgttcaccctgatgaagtggagaactggaaggcgcacggctggaaagaaatggagtga

SEQ ID NO: 251115 - DNA, 177 bp, Klebsiella pneumoniae
atgacccgacgcgccgaccgtttatttcagattgtgcagatcctgcgcggcaggcggctcactaccgccgcgctgctggcggagcggctgggcgtgtcggagcgtaccgtctatcgcgatattcgcgatctctccctctccggcgtaccggtggagggcgaagcgggcagcggctag

SEQ ID NO: 251116 - DNA, 915 bp, Klebsiella pneumoniae
atgagtttattttcttattttggcgtggattttcaaattttttatggactaactgttttatttatttattttagtgtatataaattctgtattaagacaaagtcaccagcaattgctttttttactttattttgttttttaggtttttatgttttttctgaaggtataagacagggtgtggctttttctatatgcctttttgccttaaatgcattaaggtctaatttacgattaagggctatagttattatatcagttgcgtcactttttcatgcatcatcattgtttacatttctttattttattttattaaatccaggacagaaaagtttttatcgatttaccattacttcaacaacatttgtagcactgtttctatttttcctatataacccttcttatctttctttcatacctgttgttggtccaaaatttgccatatatagttccatgtatgcatgggcagatggaggctttgttgattggttattgaagtctagggtttttttcttgtatatattcttcttgttaatgttgtttttattccaaatcttacagaagaagaaccgaatatacagtgcgataagtgttgtgtattttttaacactttcaaggatgactcccgtgttactgcgatttggatattacttacctccagttttagtcttatctatggacaattatcttgatagcaaagggcgcgatggtcatttttccttattcaaacttgcctatctctcaattttactaataatttcaaccatgccattttgggactatacttatatgaagggtgctgattatcatgttaatatcctatcatcaaaggctgatattgaaagtgtaataaatattaagtgtaatatattgaatcgcaatgagataaatggagtaattcggcgctgtatgtggtag

SEQ ID NO: 251117 - DNA, 972 bp, Klebsiella pneumoniae
gtggacccggcgcgtcgcgggaccctgcgccagatttcggtgctgaaggagtacgtcgaccacctgatgggctatgtggacctggcgaacttcacccgtccgctgaagctggtggtgaactccggcaacggggcggcggggcacgtgattgatgaagtggagaaacgcttcgcggcggccggggcgccggtgacctttatcaaggtgcatcaccagccggacggccatttcccgaacggtatcccgaacccgctgctgccggagtgccgccaggacaccgccgacgcggtgcgcgcgcatcaggcggatatggggatcgcctttgacggcgacttcgaccgctgcttcctgttcgatgacgaggcgtcgtttatcgaggggtactacattgtcggcctgctggcggaggcgttcctgcagaaacagccgggggcgaaaatcattcacgacccgcgtctgacgtggaacacggtggacatcgtgacccgcagcggcggccagccggtgatgtcgaagacggggcatgcgttcatcaaggagcggatgcgccaggaagacgccatctacggcggggagatgagcgcgcaccattacttccgcgacttcgcctactgcgacagcgggatgatcccgtggctgctggtggcggagctgctgtgcctgaagaacagttcgctgaaatcgctggtggcggaccgccaggcggcgttcccggcgtcgggggagatcaaccgcaagctggggaatgcggcggaggcgatcgcgcgcatccgggctcagtatgaaccggcggccgcacacatcgacacaacggacggtatcagtattgaataccctgagtggcgctttaacctgcgcacgtccaacacggagccggtggtgcgtctgaacgttgagtccagagcggatactgcgttaatgaatgagaaaaccgccgagctgctcaacctgttaaaagaggaatcgctttga

SEQ ID NO: 251118 - DNA, 624 bp, Klebsiella pneumoniae
atgaccattcaggaaatagttcaacaacggaatattactaagttatttcattttacacacagtgataatctagcctccattatagagagtgggcttttatcgcgttcagaccttgatgccgaaggggatgactacagtttcaatgattctgaaagaattgatgggcatcttgatgcgatatgtttgtcagtaagtttccctaatgcaaaaatgttctataaatgtaggatgttaaagcctgggaactgggttatattggaaattgacccttcagttctatgggataaggattgtgcattttatcctacgaatgcagcttcaaataatgttcgtctcaatgatcttgagttaatgaaaggagccgaagcatttagcgctttatttgcaaatgaagtatatgggactacgagagaagattatcttacggatcaatatacaacagatgttcaagctgaagtgttagtatttgaacaaatcgatccatcatatatagtgaaatatatacatcctaacaaagattcatataaaccatttaaagagaaatatccacagacaaatcaacgctactatgctaatcttaatggtaagacgctcttctcccagagacattattgtttaggataa

SEQ ID NO: 251119 - DNA, 690 bp, Klebsiella pneumoniae
atggccgttagacctgttttcatacctacaagcactggacaagtcttgtcaattacgaaagacgtagattttccttggtccccagggatgtctaagtcgcaaaagcaaaaatcgatcagggcattacattcagctgctagtggtctgggactgtactctctattagaaatttcgagtaaatccgaagatataataggagtgcagcttagtgcatttaatctcagaatcaaaaccaaaaaattaggtaaagaattttcagttgagtcagcatttcaggcaagtaaagtttttgaaaatggtgggccttttgttgatatattagataaaacttcgattgaagctaaaaaagatataagacttaaggagtcaggaggattagtaagttttaatttttacaatacaatatggccacttatccctagaacagctttttatgattggctgtatttgagtgcgctcaatcaaaataaagatctggctatgaatcttttaaattacgatggtttcactgatattgaatttaacccagctaaatctattaattgtcaagcaagaactgcagctctatttgtttctttggttaaaagaaatatgttagaaaaagttttatcttcgcaaagtgaatttcttgcggtgttggcatcacattatggggttgagaattacacagtgcaaaatgtattgatatga

SEQ ID NO: 251120 - DNA, 774 bp, Klebsiella pneumoniae
atgacgatgattcaacgaatggtgaacagcgaattcaaatacgctataggtatcgaaccggctgttccagacgggctggtcgggtttggctttatggggaataacgtaggcgtcaatatgtatggtgaagcacagtttgatgccgtgggaacaattcctaaagtgtcggacagaatatcaacgctcggtgtaaataagtacgttaaaacgcctttaatcgctacgcctgattttacttacatctcggtagcgaaatgctatctccctgctgccggggataataatctgcttatcggcgataacctgaatatcaacagtgcaggtacgctgattaactcaagcggcattcttttaacgacctcgggtgttataggagtggttggggtgaagaataaaacaacgggagcaaatacgacgtacaatgcatcggggacacttggccttccttcgggaaaggcaaacgccgcgtggaaatgcctggcgcaacgtgtcgctgttgatggaatcgccggaggtgctaactcggtaagtctaaaaaatattaccgataatctggaagcggtccgttcaaaaatcgactccacaacgctcgcccggcagacggatttaaccaaaacgatcaatgccgggtcgatggtggacagctcaacgcagagtaatgattacgaccatttcggcttcctcatctataaccgagccctgactgatgctgagttgctcagcgcctataaccagttgaaggtatttggtgtgatagaaagtctgccgttctga

SEQ ID NO: 251121 - DNA, 708 bp, Klebsiella pneumoniae
atgatcgctgatgctatggctgcatccgggcagaagacaaagcccattttcctgctcaaccagattggcagtagctttatctctggccgaaattttggcgttgtcgaggctcaacggcagtttgtcgagaataaccctctggcattcatgatgggaagttacgcaggtcttcctaaccccgtcgatcaccttttcgcgaactcatatcgttggtttggtgcgcagttcgccaaacttgctgaccgcgtgatgtggggaaatgacgaggcgaatttccagatggtggcagcgtactggtctggcaatacagcttacgctggattctcaacacgtgtccctccgctgaagtttgaatcggcgtatgtcgtgtttacagaaaccatgtatgcagacaaggggatcaccgtttcagatggcagcggagtattaaccggtacggatttaactgtgtccatcgtcagtgacaacgttataaaaattgtggccgggagaacactgtcgggcacggtaacaatcatgctgggcgatggtacgtcacacgccggagtacataacatcgctgacagtgacaccgagatttcagattacgtctgggagtcgggtcttccaaatcagcccgccacggaaaacatcacggccctgaataataagcattatccgctgagaaattttgcattaatccagaaaattactgcacaggaatattaa

SEQ ID NO: 251122 - DNA, 381 bp, Klebsiella pneumoniae
gtgtttaccggcatgctcaacgacgaagataaatacattctcttccagctctgccggggcgtggtcttcccctcgcatctgcgctcagaggcgtttggcattacgttactggaaggcgcgcgctttgccaggccgctgatctcctgcgagatcggcaccggtacctcgttcattaaccaggacaaagtaaatggctgcgtgatcccgccgaatgacagtcaggcgctggtggaggcgatgaatgagctctggcataacgatgaaaccgccagccgctatggcgaaaactcgcgtcgtcgttttgaagagatgtttacagccgaccatatgattgacgcttacgtcaatctctacactacgctgctggaaagcaaatcctga

SEQ ID NO: 251123 - DNA, 507 bp, Klebsiella pneumoniae
atggagccgcgtaaaaatatccgtggtctgctgcaggcctatcagctgctgccgatggagacccgcatgcgctacccgctgatcctcagcggttatcgcggatgggaagacgatgtgctgtggcagttagtcgagcgcggtacgcgtgaagggtggatccgttacctgggctatgtcccggatgaagacctgccttatctgtacgcggcggccagaacctttgtttatccctccttctatgagggattcggtttacctattcttgaagcgatgtcttgcggtgtgccggtagtatgttccaatgtcacttctttgcctgaggtggttggcgatgccggcctcgttgccgatcctaatgatgtagacgcgattagcgcgcatattttgcagagcctgcaggatgatagctggcgggaaatcgccaccgcgcgcggtcttgcccaggcgaaacagttttcgtgggagaactgtacgacccagaccattaacgcctataaattactctaa

SEQ ID NO: 251124 - DNA, 1074 bp, Klebsiella pneumoniae
gtggaatcgctctccatcgctcgctgtcagctggtggctatctgccgcgcgctggcgcaggatgcccggcttatcattatggatgaacccacggcctcattgacccatcaggaagtggagggactattgcatgtggcgcgccagctgcgtgagagggggatctgcatcgtcttcgtaagccaccgtctggaagaggtcatggccgtatcggaccgcatcagcgtgctgaaggatggcaatctggtcggcaccttgccggcggcagaggtaaccacccgccggctcggttttctgatgacgggccaggagtttgactatcaggtgcgcgatctgtggcaggggcagggcagtacgccggtgctggaggtgcgcaatctcagccgcaaaggggaatatcataacgtctccctgaaggtcgaagccggagaagtggtgtcgatagtcggcctgttgggcgccgggcgaacagagctgtgcctgagccttttcggcatgacccgccctgacagcggcgagatcctgataaatggccagccggtgcggttgcgtagcaatcaggacgctatccgccacggtatcggctatgtctccgaggaccgtatgtcgcgcggcctggtgatgagtcagtcgattgaaaacaacattatcagcaccgtgtttcataaagtgaaaggcgcttgcggactattgagtgatagtaaagctcagcagctggtcgcaagaatggtcaacgcgttgaccattaaggcgccggatacgcatctgccggtgaataccctctccggtggtaatgcccagcgcgtttctatcgccaaatggctggcgatctctcctaagctgctgatcctcgatagcccaaccgtgggggtggatatcgcaaacaaagccgggatctatcatatcatcagcgatttggctgcccatggtatcgccgtgctgatgatttgcgacgagattgaagaggcgtggtaccagagtcatcgcatcctggtgatgaagcagggcgagttgacccatagcttcctgccggacagcagtacccagcagcagatagcggaggtggtcaatggctaa

SEQ ID NO: 251125 - DNA, 1200 bp, Klebsiella pneumoniae
atgaaaggaagatacttatccactttctctaaactgcttattagtgccagcgtggggggggtgttatcttatctgttgatcgtcatcgctgaacaactggccagacgccctctgtcgcttcatcacctgacattagccaaaacaattgccctgtgctccgttgccgttttcatcagtatgtttctcatccgtgtcgtaaccagtcgctatttctttaagagcaaacgcagagtcgccattctggggataacgcctgcagggctggcgatccttcaggaactacataaagaattctcagctgagggtatcgatattcgtttcttcgaagaccgcaccgtgcaacgcgacagccgccttatcaatatcgagaagtcgggtaactcaagagatctactggcgctggcgaagaaaggcgaggtggatgaagtgtatattgcactaccgatggttgcccagcagcgtattcgccagttcctgaatgaattttccgataccacagtggatgtctttctggtacccgatctcttctcgtatagcgcacatatttcccagttacgcatgtttggcaacatccaaaccatcagtattttcacctcgccgtttgatggggaaggcgcggtactcaaacgtatcgaagacatcattcttggcctcttttttaccttactcagcctgccggcgatgctgattgtggccatagggattaaactcacctcgccgggtcccgtgttgtttaaacaaaaccgctacggtctgaacggtaaacagatacaagtgtggaaatttcgaaccatgcgcgtgatggagaacagcgctgtagtcacgcaagccacgcgtaacgatccacgaatcaccaaattcggcgcttttttgcgtaaaacctcactggatgaactgccacaatttattaatgtcctgcagggacgaatgtctattgtcggcccacgtccgcatgccgtcgcacataatgagcaatatcgcgtactcgtcgaaaactacatgattcgtcataaggtgaagcctggtatcaccgggctggcgcaaatcaatggttttcgcggcgaaacggatacgcttgataagatggaaaaacgtatccagtttgatctgcaatatattcagtcgtggtcactattactggatttaaaaattatttttctgactttcttccgtggttttgtgggcaaaaatgcgttctaa

SEQ ID NO: 251126 - DNA, 1323 bp, Klebsiella pneumoniae
  misc_feature (356)..(365): n is a, c, g, or t
atgagtaatttagaaaaaacatctaccgctgtacccgcacaaatagaaagacttcccttctctcaattaattcgccgcatcggtccggggattgtgcttaccggagtcgtgattggccccggcgctattaccaccgcgtcgatgttaggggcggactatggctattccctactatggctgctgatccccattgcctttatggggatcacgtttatgttgacgacctatcgtatctccatgctcaccgggatgccgtcaatagaggcgatacgtcactattacggtaaagtcgccgcggggtttgtaggcgtggccacttttttagcctgtcttttttttaccatgggggatatctnnnnnnnnnntttttttaccatggggaatatctcgggtaccggggccggcatgaaccttgttttcggcattgactggaagctcggtgcgttaattatgattgcagtgatgatctattgctatttctctaaaggcgtttattccaaagtcgaaaaagggatcactatttgtattgtggcaatgattatcgccttttatatcacactggtgggaacgggggggccagactggaaagccagcggggaaggattaacgcattggatctttcctgcggggagtttagtcaccgcgctgggctttatcagtaccaatgcctccctgacgaccgggatctacggtacttaccttggcaaagagaaaaaatggaaaaaagatgatctctttaatggcgtgatggtggcggataccgtagcccatattatcggtgtgctgctgatcagtggggctattattctggtaggggcgattgtgctttttcctcaaggaatatcaatcaatacgccgacgcagttggctgatttattaacgccaagcatgggacgcgcggcaaaatacattatggggatcgcattattgggcgcgggtttctcatctttactggggaatactcagcgtggggttgtcctgcttaactcggggttcaataaatctactgcgctggagagtaaagcggtccagtggggatccatggtagtgctggtgattgcggggttaatctgttttagcttcggcggatctccggtgcagttaatttacttagcgaatgtcgcaacggcggtgtcgacgcctgtcgcgggtctgtttatctgcctgctgctgtggcgaaaggatattaataaaggctataagacgccaaggttattacaaatatgtatggcggtcagctatctcttttgtttgttactcactctcgtcgccctgattaacaccttacctaaatttatgtcctctctttcttccatgttttga

SEQ ID NO: 251127 - DNA, 522 bp, Klebsiella pneumoniae
atgaagtgtcaatcactcgctagactacatgatagagagttttttaatgcggttagggatgtctccgagcctgaatattcgttcttacatggtttttattacaggatcacgcgacagcgtccaaaagcaattgagagttatatgcgagtattacgccaaaggccaagtgattatcgttcaaaaagtgaattggttttgttgtatttacaaaatgacgagcatgagcttgctttaggattagcaaaagaagtttatgaaagacagaaaaataatccgatcaatgctaataattacttgaattgcctgttttacaaagatgatgctaatattgagcccggtttggtagaggaaattcttgaacggttgcattcgaatcaggctcaacgtgctcaagagatgtattgctcagctaaggcgaaagctcttgcacaatttgagaataaagttgaagaggcttttgaactcatagagaaaggaattgtggatttcccggatattaaatatcccgttctgacactctga

SEQ ID NO: 251128 - DNA, 318 bp, Klebsiella pneumoniae
atgaaacgtggtcacggcgtgttccaggcgatgcggcaggtaaaaattgggaccatggtagatataatctttatagtcgcgcaatgcccacgcctggcgccgcggatgcagcaggcgatacgcctcaatcagcagcggctggcgacgcagaaacgccgacagacgaccatgattgctggctttgctatcgctcttattctccacctgggggatctgatcgataaacgacgcgccgtgaaacagcttcagctcttcgatttcgcgggcgaccgccagccgcttaaccagctccagggaataccgaccgatgcccgttaa

SEQ ID NO: 251129 - DNA, 663 bp, Klebsiella pneumoniae
gtgaaaccgaacccgctgctgaccgtcagcaacttccatctgggagccgacctcgatgccagcgtaccgtccactggcatgccggataatgcccaggcgctgttagcagcgatggccgcggctccatcatttatcatggtgggaacgatggaaccacgcaaaggacatgcgcagacgctagcggcatttgaagaattgtggttacagggcaagaactacaatctgtttatcattggtaaacaggggtggcatgttgatgatttatgtgaacgtttacgtcaccatccacagctaaataaaaaactattttggctacaaaacattagcgatgagttccttacgaagttgtattctcagtctagtgcgttaatcttcgcatctctcggagaaggctttggcctgccgttgattgaagcggcgcagaaaaagctgccggtgattatccgcgacattccggtgtttaaagagattgctcaggaacatgcgtggtatttctccggggaagcgccggccgacatcgcgaaggccgtcgaagactggttagccctgtatgagcaaaacgcgcatcctcgttccgaaaatatcaactggttaacctggaaacagagcgcggaatttctcctgaaaaacctgccgattatcgcgccagccgcgaagcaataa

SEQ ID NO: 251130 - DNA, 207 bp, Klebsiella pneumoniae
atggcgcatattgaagccgcagatcgcgcactcatagttataagcgcgcagcacctgctggcgaaaatgcgggtcacgctctttacggatctgcagcagatcaaaccccatctcttcagccagttcttcctgaatactctccggaaagtgcgcctcgaggatttgatgggcgagggtattgatcagcttcttatttctgttgagtag

SEQ ID NO: 251131 - DNA, 183 bp, Klebsiella pneumoniae
atgatcggtgttattttgctgccgggttcgctcgttatagcggcgtttaagctcatcagcgaacgctttcgcgatcgtctctccgtgactcccgctggtttcggagataacgccagcatcagtctgccgcacttctttgaggggataaaaaacgttaccgccgaccgcaccaaagtcatatga

SEQ ID NO: 251132 - DNA, 387 bp, Klebsiella pneumoniae
atgaacatgctgttcctgactcataccctgcgtcctctcctggtcaatattgagcaggaaatatcgcgttgtcttctgaacagtgatgaggatttgtttgctgagttctccgttgaagggcttctgcgcgccgatagcgctggtcgtgctgcttactataccagcgcactgcagaatggctggatgtctcgcaatgacgttcgccgtcttgagaacatgccgccaattgaaggcggtgatatttatacagtccagctcaacctgactcagttgaagaatctcgaaaacagcaacccggccattcaggcgctggctgtaagagaacttcataaccacgtattccctgatattcctttcgagcaatcgccacttaaacaggctgcttag

SEQ ID NO: 251133 - DNA, 684 bp, Klebsiella pneumoniae
atgaaaagagccgaattagacgttgtggttttaagtgaggatttgccgaatgaagggctggtaaaaggaacgcttggtaccattgttatggtttttaattcgccaacaactggctatctggtcgagttttgcgacgagaaaggaaaaacaatcgcaatgccagttttattccccgcccagctaaagcgctatttcacgattcgtaacctgaagtcactgatggttgaaggtaattatcccgtagccgaccctgtagacccagacgtcatggcagatttaatgcacaaagtcgcgcctgttgaatgggaggtcaagaaaagaagggtctatgaggatattcaacgactattgattagtcggccggactacgctgatatgttcaatattatggatgggggtgagtacaatggcatgacattgtacagcctggtgcaggcagagaacggtgaacctgcatggtcgaatatctttgttcgaaactttgatacgcgtattaacgaaatctttgtcgatccgaacctcatcggcaaagtagtcattggtgaagagggcatgtccgtgattgtctacagcttcacagatgaccgtttcgaaatccgcgataaagtctcctcggattatgtcattgagtcacatacccacttcaacggactgttgtccgccctcattgagccggtcagctga

SEQ ID NO: 251134 - DNA, 420 bp, Klebsiella pneumoniae
atggatgatcttgtctggacgactccagcagaacattccaagatgggtaacgttatccgtcgcccggtgttcgatcaggtgaaaccttttgttgaaaggcttctcaattctggcaacgacgttttgtttcccggccaggaactggacaaacctatagatcgctcttcagctaatctctatatgaaaaaactaagggataaaattgatatacctgagtggagaacacatgacttcaggcgctcgctggtgacgaatttatcaggggaaggggttatgccacacgtcaccgaaaagatgctggggcatgagctaggaggagtgatggcggtgtataacaaacacgattggctggtggaacagaaagaagcatatgaactttatgcagataaaatctattggtatattgatagagtaaagtaa

SEQ ID NO: 251135 - DNA, 231 bp, Klebsiella pneumoniae
atggtcttaacgctaagcttcaggacctcgcacgatgggatcaactggcggctgatacaccagttcattacagaacgtagctgtagaagaagcactctggcctttttgctgttcttcttttcctgcttatcaaagaaacgcacccatgcagaaataggaatgttaactaccggagcgtccgggaattctgtgtacatcgtgttgtacacaacggacttgtacagcgtctga

SEQ ID NO: 251136 - DNA, 396 bp, Klebsiella pneumoniae
atgcctaattcgaccttatttttcatcaccctttgtctctctcgcgtcctggtgaccttcttcttctggatggcaggcatctacggcgtctttcatttcgcggagatcgttcaggagatggtgaccgtcggcctgccgtggccggtcttgttcgcggcgggcacgattttttgccagctggcgggttcggcgctgatcgtttttaatcctgccggctacggctggattggatcggggatgctgattgtgtttacattactcactattccgctgggacacgccttctgggccttcagtgaaccccggcgcactgaggaattccatattgcgcttgaacacattaccgtggtcggaggattaattatgagcgcgctgtttgcaggctatcggcgatga

SEQ ID NO: 251137 - DNA, 396 bp, Klebsiella pneumoniae
atgcatttccagctgatcgcgcagggtcacgccttcgcgcaacacccgaagatcctgctcggtataaccctgacccagcgcggaaggaaagacatcagcggaggttttgcccagcagcgaggaaacgcttttgaaaccacagcggcgggccagcgtcaggttcgccagcagatagcgcgcctgacgatctttgataaaaaagaccacattagggatggcattgagcaggggcgcaatcagcgccagcgcattcagcagcgcgggcatattttccggccgctggcgcgccagcccttcgcagatctggctcagctcatcgacggccagctcaggttggttaaccgcccgcggcggcggcgcatcagaaacaccgatcataaggcctcctcatggtaa

SEQ ID NO: 251138 - DNA, 192 bp, Klebsiella pneumoniae
gtgctgctcatcgtcgagagcgatttgatactgctgacgcaggccgttaaacagctcgcccagtacctggccgagctgcacgttaacggcctgcaactgcgcctgggcttgcagatatttcggatgctgtggcccgtaatgcttagcggcttcagagagattacgccgggtctggatgagcgcaatgcgtaa

SEQ ID NO: 251139 - DNA, 639 bp, Klebsiella pneumoniae
gtgctgacggtccagaccgaccccagcccgctaagcggccaaacctcgggtgatattctcgcgcgggtgaaaccgcgcattgacgcactgccgctgccccacggctaccgtatcgaatggggcggcgatgccgagaactccagtgaggcgcagcagggactgtttacaaccctgccgcttggctatctggtgatgtttatcataacggtgctgatgttcagttcgctgaaaaacgccgtcgccatctggctgaccgttccgctggcgctgatcggggtcacacccggctttctgcttaccggcatccccttcggctttatggccttaatcggcttgctcagcctgagcggtatgctgatccgtaacggcattgtgctggtagaagagatagagcaacaaaaacaggagaaagatcaacgacaagctattattgatgcggcaacctctcgtctgcggccgatcctgctgaccgccttcaccaccgtacttggcctggccccgctgctgcgcgatgtctttttccagagtatggcggtggtgatcatgttcggcctcgcctttgccaccgtgctgacgctgctggttctgccggtgatttacgcctgctttcaccataaggatatgacgcctcaacgatga

SEQ ID NO: 251140 - DNA, 570 bp, Klebsiella pneumoniae
gtgccggtagcatggctgtgtggggtggatacggttggcgaagcgatgcgggacgaagccattcgccattatgtccagcagacgattgatgaagagattatcccggcgctcgatttaccggccgaggagcttcgtcagtttgccgatgcggtcaccgggcgctttcttaatccctatattcgccatcaattgctcgccatcgccctgaacggcatgactaagtttcgtacccggatcctgccgcagctgctgacgactatccgccagcacggcgcgatcccgccgcggctaacgtttgctctggcggcgctcatcgccttctatcgcggtcagcgtgacggacagacgtatccgctacaggatgacgaagtttggttaacccgctttgctgaaggatgggctcaggtggcgaacggcagcccgctgcatgaactggtcacagaagtcctgcaggatgctgcgcactggggtgaggatctgacggccattcacggccttgccgaccaggtcacgcgctatctggaaatgattttgcgcgcggggatgcgcgaggccctgtcgcggctgtag

SEQ ID NO: 251141 - DNA, 453 bp, Klebsiella pneumoniae
atgcatgtccgggtaatgttctttttgatatttcaccagcagatcggcccacaggttgtgctgcggtaccgtaaggctaccgacatagataacgtagccgcctttgccacccatccgcttggccatatgctccacgtattcagcagcgaacttctcgttatcgatgatctccacatcccagttggcgctcggctgcccgggcgattcgttggtcagtaccacgatgccggcgtcacgggcttttttgaataccggctccagcacgttggcatcgttaggcacgatagtgatggcatccactttacgtgcaatcaggtcctcaataattttcacctgctgcggcgcatcggtgctggacggccctacctgggaggcgttgaggttaaactctttcccggcctggactaccccttcacccatccggttaaaccatggcatgccgtccacttttga

SEQ ID NO: 251142 - DNA, 363 bp, Klebsiella pneumoniae
atgaaaacttacccggatctgaaagcggtggtctcttttggttcgaatggcccgattggcgcggggcgcgcggtgaaagagaagcgtgcgaaaaataaagtcgcggtctacgggatgatgatcccctcgcaggcggcttctcttattaagagcggcgatattaccgaagggatcacctacgatccggcgacagccggctatgccctcgcggccgtcgccagcaccctgctgaacggcaaaaccattgagccgggatttgaactgaaagagctcggtaaagcggaggtcgatagcgacaagcatattatccgcttccataaagtgctgctggtaaataaagacaatattgattcgctctactaa

SEQ ID NO: 251143 - DNA, 348 bp, Klebsiella pneumoniae
atgacagaggatgatctctatgacctgctgtcgacgctggcagacgggcgggtttatccgtatgtggtgccgctaggcagcgacggacttcctgcagtttccactccctatgtcattttctcgataccgactgatgttgccggggatgttttctgcggccaggcagagtcgacactgcgcattcaggttgatgtatgggctgaaacgaatgacgaagccagagcgttacgcctggacgccctggctcgcctgcaggttctttcacctgtcgaggtgacaaaaattcctggctacgacacgacaacccatcttcatcgggcaaccctcgaaataacggtcattgcctga

SEQ ID NO: 251144 - DNA, 483 bp, Klebsiella pneumoniae
gtgtaccacacgcgcccaggctaccgtccggaagagtaccgttgggggcaggggggtgcaaaaatcattgattatcacatccaaagcgccggggttgattttccgccttcactgacgggtaatcagcagaccgatttcctgatgaaagtcgtatttgaatatgactttgattgcgtggtaccgggtttgttaatcaaaactctggatggcttatttctatatggtaccaactctttcctggcctcggaaggccgggaaaacatttcggtatcacgtggggacgttagagtatttaaattcagttttccggttgatttaaatagcggtgactatcttctgtcgtttggtatttcagagggaagcccgcaaaccgaaatgacgccgctcgatcgtcgctatgactccatcattttgcatgtaactaagagcatggatttctggggagtgattgacctgaagtcgactttcaatagttaccaatga

SEQ ID NO: 251145 - DNA, 357 bp, Klebsiella pneumoniae
atgcccggcgccggagacgatcggccgcgccggatagcccagccgctgcgcggcatcggcaatggcctgctggcattcagcatcgaacggcgccgccggatagtggcttacctgcttcagggccacctgcagaccgctctcccgctcaacctccgcgataaacgcccgcagctggcgatccatctcgtccaccagcgcatcgctgagattgcgcatatcaatggagaaggtgacctccccgggcaccacgttgcggctgttgggccacacctgcacgctaccgaccgtgccgcgtccctcttcgctgcgcccggcaatggccaccacttcctgcataatgcgggtcgccacctgtag

SEQ ID NO: 251146 - DNA, 546 bp, Klebsiella pneumoniae
gtgtttggcgtcagcgtgccgcactactggctggggatgctgctggtgatcctctgcagcgtcaagttcgcgctgctgccggccaccggcggcgggccgataggcgaggtgggctggcaatgggactgggcgcacctgcagttcatgctgctgccggccctcaccctgtcggtgatcccgaccgggattatcgcccgcaccgtgcgctcgcaggtggccgatatcctcagccaggagtttatcgttggcctgcgcgcccgcgggctcaacgagtcgcgcatctttgtccatgtcatgaaaaatgccgcgcccaccgcgctggcggtgatggggctgcaggtgggctatctgatgggcggctcgatccttgtagagaccgttttctcctggccgggaaccggattgctgctcaataccgccatttttcagcgcgacctgcccctgctgcagggcaccatctgggtgctggcgctgtttttcgtgctgctcaacctgctggtggatattctgcagaccaccctcgacccgcgtattaagaggagctga

SEQ ID NO: 251147 - DNA, 267 bp, Klebsiella pneumoniae
atgctctttgtattccgcggtaaactcgcggcccggcagggtattgatcctgacgacgggacggtaggcggtattgcggatatccagggaggtgaacagattttcgggaatgctgaagaccacatccagcaggtcggtccgcgtcagggtgatcaccggttggccggcggcgaccacctgatggttgcggatatgcacgccggcggcaatcccgctaaagggcgcgatgaggctcatttgcgccagctcttcgcgagcgatttttaa

SEQ ID NO: 251148 - DNA, 279 bp, Klebsiella pneumoniae
gtgcgtcaccccgatctccccggccgcttttacgccgccgggccggggcgcgcgcagcagatgcttgaagcgatcatcgccgaggcgatcgaagccggtactttacgagcctgcgatccgcaggaggctgccgacgaactggccggtttatggctgggaatgaccagcctggcgataaaacttggcgcaagacctccgctgtccgacgacgaaatcaaacagcgggttgagcgcgccctggacgtctttctgcgcgcgtattccctggcgccgggctga

SEQ ID NO: 251149 - DNA, 225 bp, Klebsiella pneumoniae
atggataagatgaatttgcccggcagaatgttgggcgaggaatttcgcatgagagagcgctttgtcggccaggcccgcatcaaacacgtcaacgggaacaacgatatttttatacatgagataatccttttattaccaatacaatgcgtagtgatgaatagccccttacttggggaggaacgaaatctcaacaacagaagcggcgagcggaatagatgttattaa

SEQ ID NO: 251150 - DNA, 177 bp, Klebsiella pneumoniae
atggtcggggcgttgacggtcggggtattgtggatcaatctcgaggccacctccctgacgctcggcctggtgtgggcggcgcttggtctgctgtacctgacttatctgacccgacgcttccgcaaaccgccgccgcagtttgatgccgctaaagcggagcaggcctgggagtcatag

SEQ ID NO: 251151 - DNA, 573 bp, Klebsiella pneumoniae
atggcgatgagctacgcgtttgcgctcgcaacaattacacaacaaatgaaccaggttcaggaagccgtaaacggtgctttcaaacccctgatttcgaatgcttgtgaactgccacaacgattagatgctgaagaggcgttccgtcgttgtactgcgattgctgctcgctctcaagagatcgaaaactccgctaaagaaggcatgtcccatctcgaagcttttcgaaacgggggaatcgtcgttgataaactcccagagggttttatggctcatcttgaggggcttgctaaggcatgtcgaaatgctaaaggtcatttagtggacatgttctcagaagctgaaagatctcctatgtggcaaggccatatgcaaatgctgcgtccattaaaacgcaagtatgttcgtgcgttgacagctgttgaaaacactgcgattcaattggcggcagaagttagacaatcacaatcctttcgtgatgaaattttgtccgataatgtcactcgtgatgaggcaatcgaaataatctctgcatctcataagatgctgggtgctgactctcctaaatggatgtga

SEQ ID NO: 251152 - DNA, 225 bp, Klebsiella pneumoniae
atgaaaatacaatttcatgaagatggattagattccaccgtcactatcactagtacggtatttgaatttcgtcttcataaccggatggtcgatacggcattattcctttttccttctgtccgcgctaagcgtagcgggttctttattttaaaaacggttattaccggaagaccttctcacgtactgcgtgcgtataacgcgattaaagcggaggcatcacgatga

SEQ ID NO: 251153 - DNA, 867 bp, Klebsiella pneumoniae
atgaagtatgtcttcatcgaaaaacatcaggctgagttcagtatcaaagccatgtgccgtgtacttcaggttacccgtagtggctggtacatctggcatcagcgtcgttatcaggtaaaccggcgtcagcagttccgccttgtctgtgataacgtcgtccgggaagcattcagtgacgcaaaacaacgctatggagcgccacgcctgacggatgagcttcgtgtccagggttaccggttcaacgtgaaaaccgtggctgccagcctgcgtcgtcaggggctacgggcgaaagcttcacgaaagttcagtccggtcagttaccgcgaacatggtctgccagtctcagagaatctgctgaagcaggacttttaccccaccggcccgaatcagaagtgggtgggtgacatcacgtatcttcgcactggtgaaggctggctttatctggccgtggttatcgatctgtggtcgcggtcagtcattggctggtcgatgtcctcacggatgacagcacagcttgcctgcgatgcgttacagatggcgctgtggcggcgtaaacgtccggaaaacgtcatcgtgcatacagacagaggcggtcagtactgttcaacggattaccagagcttgctgaaacgccataatctgcgggggagtatgagcgccagaggttgttgttacgacaatgcctgtgcggaaagcttcttccatacgctgaaggtggaatgtatccacggagaggactttgtcagccgggaaatcatgcggacagcagtgtttaattatattgagtgtgattacaatcggtggcgtcgtcacagtgcctgtggcggtcttagtccggaacaatttgaaaaccagaacctcgcttag

SEQ ID NO: 251154 - DNA, 300 bp, Klebsiella pneumoniae; identical to SEQ ID NO: 219511

SEQ ID NO: 251155 - DNA, 393 bp, Klebsiella pneumoniae
atgaaaagaaaactcgcgatagttgttgttttacttgcctgcaaattccagtcagtgttcgcggctgaacatttaacaaaagcagttgcaagttgtgaaggaggttacacaacaacgatcctcgataccggaggagatgaaaataccattcagtattttgtggtaaaggacggtgttcctgtcgctcaggggatgggcctgtcggcgcaacacaaccggacagttcgaggtcttcaggttacaaatattagtatacctcctataagggcgattaatacgacagaaaacaatcgtaatgttatgatttatacatatataattgaatatccggtaacagaaacccaaaaaaaatatatgagcaaacagtatcgctccttgttaattataacgtaa

SEQ ID NO: 251156 - DNA, 345 bp, Klebsiella pneumoniae
atgtacacagcactagcgattattcttgatgcagttagcatctactatttcaagctgaacgcccccgtaactgtcgtaattacgacgtttttggcggtattcggtttaacgttcgaatacctgcatgcgacaaagagatcagagctgcgattcgctgagagacgtaaattacaggtggagtgcgcgaaattttccatgatgtgggatgtactagattcggacacgaaactacgtttttacaaaaaagtcgatggaaatagtgaatccagtgagtttaaccacagataccagctattgcagaacgaaattcgatattgggaaaaagaaatagaacggctacgttaa

SEQ ID NO: 251157 - DNA, 342 bp, Klebsiella pneumoniae
atgggcaaagtccaggagattcttattggtcaccgaacgtttgctgtagacatcgactggaaaagatgggaggaagagcgatgcaatcagttgcgatgccagaaatttgatgcatggtcagaaaaatggatcaccgtctaccaacttaagaactcccgtctgtggccagacgcccccatacgccgctggcctggcgtgccactgcagcagggcaaatataaggtattatctgttgaagccgtcaggatggcggaaacacgcccggacttacagacgtggcgacagacacgtatcgataaaaaacgaaccatggataaattttttgagatcccatctctctga

SEQ ID NO: 251158 - DNA, 2127 bp, Klebsiella pneumoniae
atgaaaaacaaatttagcatttgttatattataatagataaaaatgagggagagtctttttttctaagatcttctaattatctacttaaattatcacccttattagaaaagatcaataacttaccaataagcataccagaattactttgcgagaaagaagagaagataaaaataagaattagcggcatatatcccggaagaataatacatttcattgaagattataatgaaattgaaaacttaccttatgtttttaaagttgttttcatagatgaaaggttcaccaaggcagtgaaaaaatgtggtactatactatatatctcaataaataaagatattgcaattgagaacaccctttcacatgaagaaattaatattgatgtactgagaaactttttcttctccaaaattaaagaacaagattctgtttataccgacctacctgatacttataaacgagaacacatagaaaccgatattaaaatagacgagaatatttctaccttttgcaatataaaaacattagaatcaatcaatctcttttttaaccctaaagccatttgtaataaagataaaaatgaaaatattgaaacatcaatcaatcttataaataaaattaagaataaaataacaagcaacatgcacatagaattatcgataccaagtgtagactatttaatcactgactttaccattgatctagagtattctataaatgcaaagaaatactcaaagcatgcattaatgagaaaccaaaccatagattacgagctgatttccgactcaatctcatatgctaaaacatcaacagacattgatagttcacattataacaatcatattgctgaatatcagaatgagttatatttcaacagtctaatatcatccatttatgcttcatcgactttaactcctgaaataaaaataagaatatgtaataatgatctttttagcctggtttcagacataggtaaaaacattagaaatagtaatatatcaaaaatacaaaaaatgatgaagactttctcatctaaagtaattgataaatctgacactatgtttgattatttttctaaaacatcaaataagcaaataaaaataatatcaaacttccctttggaatggactaatgtaaatggcctaccgttgatgataaggcataacacaagtcgtatattcaacaccccgggatttataaaacaaaacattcttctcaataataacgaagtttcaataagcctagatagttttaaaaaaatattagtcatcagttcctttaaagctggggaacgtataagtaatgatataaaaaatgaattgcatcgggtaataaaagaatgcaacgaccctagtattaattcagtagtaaatgaaaaagtttctaaaaaagggtcttacatcccgaactttgaaatggaagtaatatttaaagatgtcacaaataaaaatgagctagtggattctttgaattcatttaaattcgctcttgtaatatttgatatgcacggtggccatgattatgatgggcatggattccttgagctatcaggtgaaattttgtatccttatgagttaatgggtttagctaatatcccaccaatagtcgtattaagtgcttgtgatacaagcccagccgatagaaatcattttaatgcagcaaatgcttttctatgtgcaggagcaaaaacggtactggctagtacataccccatattaagtagagatgcggctatctatataggccgattatataaacgcctaagatactatctacctgaaagaattttattcactaaaacaagtttaagatggtcagagttcattacgggacttaaccgccgagtttatttcgattattttttaatgtacattttcagaaaatataaaattaatgataagtccatattaatagagttacggaattatataaatattgcattagaaaatcaccctcacgattttttagatggagtttattatttctttgaaaatttaacagacctatctaaaaatcaaattagtgatgaacttaataatcacttcttgtttgctgaatgcctgaactatgtgcaaataggctctcctgaaaaagttttaatttatgcagaagatctaagcatagaataa

SEQ ID NO: 251159 - DNA, 705 bp, Klebsiella pneumoniae
atggaaacagtagataggtcaacaatagattttattagaaaaatcatccatgagctagaaataataggtgattggaacagaagatttcattggaactttctaagagaatttcctgacgaaaagaatatagaatcttatcttgaaataatatttaaacttgaatcgatgatcgaatttcatttggaaacgctcttgcaacgacaagaaaatgaaatactaataaatggaaaaaatactaaaataaattttaaaactccgttaccattttatcatgatgttattgatatcactcctatttacagtgatgctatcttacttgaagaacataaactgcttgtgcctcaagaatcaatacccaatatatgttatctcctacaaatcccaagtacaaaagaaggtgttgtggttgaaaaccataattttggatatcacttccactattgcaaggtaaaaaaaaggacattagaaagaaccaatcttttattgacttttgatcccgtttttaaaaaaacaaataagaaaccaaagcctgatctattcggtgaataccatgcggaagggaaaaacaagaaaatagatatggaaacaattggggacaataaacgatatcctatatatttagtttgtcatgatgcagggcaaaagagaggattgagtaattttaaaacgcctagcaacaagtcaaaattgtttattacaggttaa

SEQ ID NO: 251160 - DNA, 1980 bp, Klebsiella pneumoniae
atgaaatcctatttaagaattgaacgattaatccttgttggtgtacgtaagaattacattgtcaagtttgaagatggattaaatattatacatggtgattcagacacaggaaaatctagtattttagaatttattaactatttacttggcgccagtaaaatagagttggccgatgagattatatcatctgttaattatgcggcgttagaggttataataaatgattctgcctataccatagttagagatatttacaaaccacaaaatttcattgaggtctatcagtgtcctttcgagaggagggaggcattcatttctagaaaatatgctcctaacttctctaataacaatgccccagatggattcttttctgatttcttaatggatgcattaaatttccccaaattaaaattaaaagtgtcacccactcaggtgactagtcaatttaagcggttaagcttcagaaatatcattaaatattcctacgtcaatcaagatgatatgggaagcaagtctctcttgggaatgactgactgggctaaatatacgtatactaaagaagttttcaaatatatatataacgtactagacactgacatatccgatattgagcaacaaatatcagataaaagatctgaattaaacaacttgcgtaaaaagtatgaacatgtttcggagtttttgcgagagacaggttatgaaagcatcccatcaattgatgatgcaatagaagaatgtgatctaatctatgattcgttgaacattgagcttcactcattaaatagtagtatgatggcaaactctgacaattacaatcagtttaaatcgtaccattcagaattcaacctaaaaataaaaatgatcgtaagaagcattgaagaaataaatttaaaaaaagatcaatacattagacttaaaaacgattatattaatgacataaagaaaataaaagcaattcatttggctaatgaaaaaattggccttacccaagacattaaatgtaattgccctatttgtgataatataattaccattgagaacggtgaaggtggatttatcaaatccaaacctgagtctctcgatgaagaattattatcattagaaaaaagagaaaaatccattagcgatctaattattaacctgactcatgaacataggattttgctggatgataaaattcaacttgaagctgatctgaacaaagtcagtggaatgatagatacagaagcaaaacagtttattactccatttctcacccaacgtgattctttattaaaagaaataacatctgtaagtaaaaaaagagaggctttagtatcaagcttgaaagttagaaaccgtcaagaggaacttttaaccaagcaaaaaagccttacagataatatagaaactcttatagaaaaacttaacgacttaagagttaatgctcctagcatagatggtatattatcttctttaggggatgatttgatgatttttttaaccggtgtgaaaataaaaaatagaactgggataagtataagtaaaaaacatttctcgcccattgtaagagatagagactattttaatatcacatctggaggtttaagaactattatttccatagggtatatgtcatcaatattaaagagctctattgactcagacataaaccatcctcgttttttgatgcttgatactataggtaagtatctcggaaaaaacttgaagacgaaatatgcatccgataccaatataatagatgatattgatgaaggaatttctgatccagaaaaatatgaaaacatctataatgcactcatagaaataaccaattatgcgcagaaaaaaagtagcccgtgtcagataattgttgtagacaatgatgtccctgataagctttctgacagattaaaagctataactgttgctcactatagtgcaaataaggaaaacgggttacctgtcggactaattgatgatgtcatttacaaacattaa

SEQ ID NO: 251161 - DNA, 507 bp, Klebsiella pneumoniae
atgatttcattaccttatattcctcttgatgaagattttaatttgaatgttgctcttctgattattttaattcatacgctaagcaagaatagaaatgatgttctattgttggatagaaataaaattcaaatatttttatatttgattaaaaacccgtcaaaacttgaggctgtaatgattttggcaggtaaacaaaacacatccattgatatgacagaaacttatacaattaaaagtctatcattaaacgttgacattcttttcagcactccaaaaataaaaacacttttgaaaaaagtgtcgatactgggatggcttcgtgtaacaaagtctgatggtgcatcttattttagtttaacaactgagggtgaacgcgcttacgagcagtttggcggcgaatactttaactcagtgaaaacttataccaaatcactggataaaataaaatcactaacctccagtaaattaaattccattctgaatgaagtattcaaggtgtcaaaatga

SEQ ID NO: 251162 - DNA, 1209 bp, Klebsiella pneumoniae
atgagtatgttaatctggaagaaaaaaaataatgctaaacacttaatcttgtttatacatggtttaaaaggcggaagtgatacgtgggcagttgataagatcacatccttcccacagcttatatgtgaggatgaagatttttgtgatgcctttgatatagcttgttttgagtatttcactaattttacgaatacctacggtaaaagtagaaatctacttgccaggttgttcacatcactaacaaaaaaagaagtcaatcttcctgttgatgaattatcagagttacttgttggagaatgtcaaataaatttatccgattatagtaatataatatttgtcgctcacagcatgggaggtttaatagcaaaatcatgcattattaaaatgcatgaaagagatctttctcacaatataactggatttatttcacttgctgttcctcattcggggtcagaaactgcttcatgggctagtatggtttcatcaaatgtccagcttggtgatttaagtgtatttagtaaagaaacagattctctaaaccgcagatgggtaaaattgcctaaactccctgagttaaagtttttgtatggaagctacgatagtattgtagttaaagccagtgcaattcctgttcaagtttctgccaaagagtctatagctgttcaggaggatcattcgacaatttgcaaaccaaaggatagggattctaatgtttatcttatcgttaagaaactagctcttgaaatacataacaaaacggaactaatttcatcttcaccagaatttaaagatgataagcaatatgacaatgaattttttgtattgaaaatgatagtcgctgatgtacatagtgatatatcaaaacatgctaaggagtattattataatgcagaattggccagaaatattttcactagcgatcgagatagagaaaccttaagtgttttgtatagaaaaataagggagatatatcaaacacagtatcatgactctatagcaaatcataatacagcaaaccaactcttagctgcaatacacaaaaaaatagaagatgaagataaggttaaattatcatctcttcttgatacacttgatagtgtacataagaaaggaatgctgcatcagcttgctaataagctagatagagatataatttggtccccagacacatctcttgactctttggatagtttaagggggcaaaaatga

SEQ ID NO: 251163 - DNA, 402 bp, Klebsiella pneumoniae
  misc_feature (99)..(99): n is a, c, g, or t
  misc_feature (103)..(103): n is a, c, g, or t
atggccagagtgtctatttgtgaggctgcccgactgacgggtaagagtagaacaacactgcacaggttaattaaaacaggtgacctgtccacctgtagnggtnagcgcaatgcaaaaatggtagatacttcagagcttttacgtgtctttggtccctttgagcaaccgaagggtgaacaccattctggacaggtctccgaacagcgtgatacagcctctgctgaccagagtgaacaggtgattcgtcatctgaaacaggagattgaacacctgaataccttacttttgtccaaggattcgcacattgacagcctgaaacaggccatgctccttcttgaaaatcaccaggcaaaattaactgaatccccggcgccatggtggaaattctggaaaaaatcctga

SEQ ID NO: 251164 - DNA, 558 bp, Klebsiella pneumoniae; identical to SEQ ID NO: 7707

SEQ ID NO: 251165 - DNA, 1125 bp, Klebsiella pneumoniae
  misc_feature (156)..(156): n is a, c, g, or t
  misc_feature (160)..(160): n is a, c, g, or t
  misc_feature (627)..(627): n is a, c, g, or t
atggattttaaaataaaaaaaatgacggtgaaagattccagagaaataaaaaatgagattgaactgttagcaaaaaaagcaaatgctgaaagccagaacctgggagtgatacttgatcgccagatcaaagaagggttgaaagaaattaatttaaangtgnaaaaagaaacagcagaacaatatagaaaactgtttggtcacaagttaagtttaaacaacaatgacattgtttcacatttattagaatgcaacacaagaaacagttttgacaaaacaagatctgcttttaggttttgcattgctgaaaaaatacaagaattgaggaaagagtctgaacaagcaagaagagaaaaaaattttgatttaatgcagaaaaaaaccattgaagcatatcaaatgttttttttcttccaacgcgattttttgagtgaaaaccgggttacttggaatgatatttcttatcggaaaatagactcgaaaagcaaaaaaaagacaatgaatagtgtttcaagcattaaagcaatttttgaagatttaaagcaaaaaccggatctttttgacaaatatagtttgatcttggcaatttcaagtttgaccggctgccgtccggctgagatccaaaagggngttagcctggaagtaagccccccactattaaatatatgtattagcggggcgaaagtgggcgaagatcgagggcaggaaaaaagaatattgaaatttaatataaatgaatttgcacaaaatgagcagttcaacctaattatgtcaaaaatgaagcaaaataataaattaacatataaatgctcaaagcaagagtatgattcattgagacaatatttatatattaatcacaaaggattttctttatatacattaagacatagagcagcaagcgaattaaaaaaagacggcttttcagaagaaatgatcgctgctttcctgggtcacagggtaaccagatctctagagaactatggttatgctcgatctggtaaaggtggtccggctgtggcaggtgttgagcactcaaacgcgattaaaagcaatacaaagcgatatgagagcaaaacaacccctggagggggaaacccttctcgtactcgtaaacgagccttaaaatga

SEQ ID NO: 251166 - DNA, 165 bp, Klebsiella pneumoniae
atgcaattaatcgttccaaaagacattgaacaatggctggacaatacgcgcgaacaccgttcacgcgcagcacagattattaaacttttatacgacgcacaggagcacgacacctatgacacaagagacgaccacacacacagccacacccccacccccagttga

SEQ ID NO: 251167 - DNA, 1266 bp, Klebsiella pneumoniae
atgacacaagagacgaccacacacacagccacacccccacccccagttgaagccttctcgcttcacctgcgtagccagggatacgccctgatttcactgcctggtggcgttaagttgcgcaacatcaacacaggcaccgatcatagtctcgattcccttgcggtacattacgctcgtttttcagggaactcatggaatccactatggcagtccgttgtatttcgaacacttccatacattgcccaaagtatcttcaatccggcgttgccgtctggcctttctgacgatgggattcttaatacatttcgcaaattctccagtgacaagtctccagtagacatccttacaccatggtttgaatacttggtgaggatgttccctgatggagacgatcgcgccaacgtctgcgcttggttagctcactgtttccagcgcccagaagagcgtccaacatggcatcttgtgatcccatctgataccggcacgggcaaaggatttctcttccagaaaatactttcaccgctgctggcggggcaaacaaagcattattcgagctactcccaactaaccgaaaaacataacggcgcgttagccgataatctgataattgttttcgatgatcctccgaaagcaagccgccgagttgcagaatcactgaagtctatacagaccgaaccaacagtggacattagaccgttgtacgagaatgcccgtaaggtagcgacatacacgcgattcatgacgtttagcaacagtccaacgccaatagaagttgacgataacgaccgccggcactatgcgacacacttcattaagcaccaagtggatcacgatgaaacagcagcattcatcgcacgccttagcgactggttagaagctggcgggctggaggccgtctatcgttggttcatgcaatacgatctcagtgacttcaatccataccgaccaccacacagcgcagcgttggaacggatgaaacaggcaagtgtctccccggcagagtcagaagcggcagtattcaccgaaagccaccaagtgttctctttcaatgcttttcgtgaaggttgtccggcatttagtcgggacaatgaagcaacggattggctaagtaaacacggttataccagcgcaagattattcacactcactcgatttaaggacactccgttaacaaagggtgcgctttggtatcattctgacatggataagggacacgcccgtgaatggtatctgtcgaaatactaccctcagatcgaagctgcataa

SEQ ID NO: 251168 - DNA, 291 bp, Klebsiella pneumoniae
atggcaagacaaaaaaactctgaaattgatgctcagttaagagcgttgggtgcaccaacaggcgctataaacggtgtttacaacgaatgggagggattgcctttcgtagaggtagttcctggtttcttggttttgcagcaggatctgaacgatgtaatcctaccagcagaatcgcgtgagccgattaattacgatctggaagagttctatctgaacgtgagtggaaaccgagcgtggcgctggcgtattgaagatgggcggtttattgcctctacaggcacttgtgattga

SEQ ID NO: 251169 - DNA, 372 bp, Klebsiella pneumoniae
  misc_feature (344)..(353): n is a, c, g, or t
atgcgtttagcatcccgatttggacttactcattccattcgtcaggaacgcccactgactaacgatgaattagtcaaggttgtaccttctgtgttttcagaagaaaagcataattcacgtagtgatcgctatacctatattccaactattacactgctggataaattacgtgaagaaggtttccagccattttttgcctgtcagtcacgagtaagggatgaggataaacgggggcatactaagcatatggtaagacttcgccgtgaaggggccaataaaggaacagaagtacccgaaatcattcttcttaactcgcatgatggatcgtccagttatcaaataannnnnnnnnntcgtccagttatcaaatga

SEQ ID NO: 251170 - DNA, 483 bp, Klebsiella pneumoniae
atgatcccgggtatgttccgttttgtatgcacaaatggccttgtgtgcggtacgtcgtttggtgagattcgtgtacctcataaaggtgatattgttggaagggttatcgaaggtgcttacgaagttctgggaattttcgataaaataactgaaggcgttgatgtcatgaagtctattacattaaccagggaagaacagcgtctgtttggacaagctgcattaacctaccgatatgaagatgaaaataaatctccggtcagtattgaacagataattcatccgcgccgttatgaagataaaaaagatgacatctggactacatatcaaagggtccaggaaaatctgattaaaggcggtttgcctggccgaactgaaaaagggaaaagaacaacaacccggccagtaaaagcaatcgatggtgatgttaaactcaataaggcattgtggttaattgcggagaaattccgcactcttaaaggctaa

SEQ ID NO: 251171 - DNA, 1590 bp, Klebsiella pneumoniae
atgggcgcggatatgctggcatttcgtgacatgcttgggcgctcgtctacggtgggtgattatctgcgtgatgcgtatattcgagtgcactctcgctatgagttattgcaggccatagagcatattaataatgatttgcagcacccggcagaaatcaggctagcgcgaaattttgcctcatggaatgacgctaaaaccgatattgatattacctacgcgtcaattgttggtgagggcggaaatgttgttattgatgcacagggtatccctgatgccgcaggaaattatttcatgcgcatttttaacggcaaaaaatcagacattaataatctcgccaatatatttactgttaaacaacagggcctcactgttatcggccctggccgtaatagcaatgtcgcgttcaacgtattccatagccctgagggtcagggtgccgggtttatgacgctgggtattaccgcgcaggaatttggagtaggcgatacctatggtcaaaacgcatacatcatcaaacacattggccgagccattcagcgctgcgttaatcacgtctggatgccgtcggggtattcaaactacggcgagggaattgggtacacagacagtctgcttagcacctcgtcagggataggggtcaggaatgacaaccctaatggtgccattcggttcgttaattgcagtctcgattatatggggagaatcgccgttactaacggcggtcgaattgagttttcagagggccatatcgaggtaaacaacgcatcaaataaactgaccgggataccgtttgagacggcctcatctgagcgagctgaaattgttgtcagtggcggggaaattattggtttctctgctcctttgccagcggctgcgccgactatttttcggtgtggagccaatacaaacgggattaaactgacgaacgtcaacctgatgaatctggttctccccgccggaaactatgaaattaacgatggcactggaccgtttatcacccgcggcattacgactattggtggtggcgggaatacgctggtacctatgttgaaatctgacaggcagaatacgttatctgacccgctgtatacgcgcccgacgattatggactggtatataacccaggacatggccgagataaaaagccgaaccgcaggatacaacctcaatctaaccgtgtccgccgatacctcgatatctggcacaaaatccatgaaagtggttaaaagtttcggcgttggctcgctgtcagaaattaaactcagggtgaaggctgcgcctggttcactcagtcagtatgcgctttacctgaaaggggctgcgctgacggggcaaatcttcgtagagttctattacgctactacccagtatcaaaatcagtacggaacgccaatcaccggcagggatgagcaggtcggcccaacgcgtaccattgatgccgcaactctggcagactgggtgcgcgtagaccagcaattactgaggtcttatacccctgagtgggcagaatttatggtgataaaaatcacactcagcggcatgtctgccggctctctgtatgtcgataaggtgaaggtgaccaatttatga

SEQ ID NO: 251172 - DNA, 201 bp, Klebsiella pneumoniae
atgaggatatttgaatctgtcggctacgatgttgaaaatggcaacgttccgtttgttgccgggtattatgttgagggtgataacgggctctatgcatttacatacggcgacccgcgcacaatcaatgtagatattgcacccgctgattacagtatcgttattgatccgggatggccgtttatcagtctggtatccgagtga

SEQ ID NO: 251173 - DNA, 1113 bp, Klebsiella pneumoniae; identical to SEQ ID NO: 188185

SEQ ID NO: 251174 - DNA, 1389 bp, Klebsiella pneumoniae
atgtcatcatttattaatgcccaatggcaaaagggattactgcagcatttactaaaattgcctctagagtattttgaacgccgaaaatttggtgatatacagagccgatttggttcactgaacacccttcaggagacgtttacaaccagtattgtcggtgcaataattgactccattatgatcatcggattattgattatgttggtactctatggcgggtggcttacctggtttgttatcctttttacctgtctatatgtatttatccgggtactaacctacaacagatatcgtcagttatctgaagagtccttaataaaggatgcaagagctaattccttctttatggagacactttatggtattgccactgtaaaggtacaggggctgaataaacggagagaggaaaactggtttaatcttgaagttgactcgattaataccggaataaaagtatccagattaaacctgttctttggaggcattaatacactgattgcgacgatggagcagatactcatcctctggcttggagccagtttagtgatatcgggaaatatgacaattggcatgtttgttgcttttagttcctatcgaggtcagttttctgatcgaattgcatcatttatagattttttactcagacttcagatcatgagccttcataacgaaagggtttcggatatagcacttactgaagtttccccatttaaagatgatattccggtaaaaaatgacatgtgccctgtctcactgtcggcaaagaatatcagttataaatatgatagttatgcatcatatactctaagacatctaaatatagagatacaacctggtgagcatgtagcaattacaggtgcttccgggacagggaaaacgacgctattgaaggtactgtgcggattattcccggcaagtgaaggaaatatacttgtagatggtattgacataaaagaattgggtattaacaactatcaaaaattaatcgcctgcgttttacaggatgacaggcttttctccggaacattaagggataatatctgttccttttctactcaaattgatgataactggctgattgagtgtgccagatttgcacagatacacgatgatatagaaagaatgccgatgggttatgatacattaatcggagagctgggtgaaggtttatcaggtggacaaaaacagcgtatttttatcgcaagggcaatttataaaaaaccatccattctcttcatggatgaagcaaccagttctctggataatacaaatgaacaatacatcaacgatgcgataaaatcgctgaatatcacacgcattgtgatcgcgcacagaaaatccactattaactcagctgatcgcatcatcactttacaggaaaatttataa

SEQ ID NO: 251175 - DNA, 720 bp, Klebsiella pneumoniae
atggttgatagcgaaactaactatctattatttctatatgacgatgcgcaatcattttatcagaaaaaaagctcacttgattttacgctttccagcgttggtatcaaagctcaagggcgtacaactattcttgacatcaattatcgaaatacacagcagattctccactttgctaccagcattgcatttgattatttaaatgatcatattgaggataactttaaatatcataaaccagatgctggtggacttcaaggccaggttccaaacatgcttgtttttgataaccaccaacaagaaatcatccatataattaaatggctaaagcaacaacatcatactggtgttagctggaatgacatggctatattatgtccctcgaccgcacatctttctgcaatattagtaaaagagttaagggattcaaaaatcccgcactactttatagcaagctcggaagataaaaaacgctactcaccacaaagcgattttttgtctattatacctttgcctagtagcaaaggtctcgagtttcattcagtcgcagtgatagatagttcaaacataatgggtaatagcgatgatctcagcgacgagatcaagcgactatatgttggtttcactcgggcaaccaataatttgcttgtgactttacatcaaaaaaatgtgctcagcagacatttaacctcaacttataatcaaatctataacaatgcatag

SEQ ID NO: 251176 - DNA, 429 bp, Klebsiella pneumoniae; identical to SEQ ID NO: 152584

SEQ ID NO: 251177 - DNA, 861 bp, Klebsiella pneumoniae
atgccccttccggcgctgatttatgccacgcagagggcaatggatgactacggcgcaaaggacatgcaccacggtgatctgagcgaggaagcactgaaagagcgctttggtctgacggatgtctcggcgaaagtgaacccgtatacgctgacccttgtcccaccagcgcccgccagttcgtatggtgtattttatccgggcagcctgacgggaagtacgccggtcgtggtcagccgggaggaaagtgtccggctgatgtttgatgagttccggggacttgccaaggtattctccttccatggcccatataaaaacatcatcaccgaaatgattaatcatatgcaggggaacagcggcacaccgtacagcagcccattactggacagggcgctgaaagagcagatcctgaatgaccattcgagtgatagctcgttgttggggattaaaagggccttggatgatgctgttagctacgaatatggatttcttcctctcggtaaaaaggacgatttattcgacggaaagggcaactttaaggaagttaataaagctgttctacctaaatttgatcgtcagatcgataagactaacgggctggtgattaccgtccatgatacgtggtcgacgcatatcacgctcgagtcactggaggtgacgggcgacagctaccgggcgaaagtacactaccgggtacaggaccacttcgggcttgatgacgcggatatcctgaaccctgtttttcatcagggccgaattttccggatctggtttgtgctgcagcgctatgtgaaatacggctataggccgttcatcaccgagatgaatgcgaccgtggaaatcagcgggaggcggggtgaataa

SEQ ID NO: 251178 - DNA, 921 bp, Klebsiella pneumoniae
atgacaggtgatttgaatatgggaggaaataatatcaacaatgctaaaaatataacagcatcaggaacaggaacgtttggtggagatgtcaactcagcaggtaatataatagcagcaaaagaaataacagcacataatggatatggtgatacaataactataggtggagacaattatccgggttctttaggaccggattatgaaataagattaggagctaataaaccattaactttacattctcctacttcaagtagaggaggtgatattatatttgatatagatggtaatacaagagtacagaccagattaggtacaatgggatacaaccctaatgatttaccctctggttggggaggtggattaagaacgcttgatgtatatgccgcgggcactctggcaacaggaagtgggggtaatctgacatcatatatgaatgctacgggtgttcatacacagtccaatattacagcctctggaaacatagaggccgccaaaaatgtcaaaggcgctacattagaatccacaggacgcgctacggtgggtgaatttgttcaggttaatggaacagtaagcgagggggattcttgctcaactaatggacttatgggaagaacaggtaatggaactccaatgtattgtgttaacgggtattggtctaatattgtatcaagtaaaacagataatggaggtttaatattgccgggaggtataaagattatgtggggtaaagtatcggggagcctttataaatttcagaataatacttatgaatccgatttcattagaattaaccctacatttattgccaatggaataacgtatagttttaccaagattttaaatgtccagcttactccttttgataagccaaaccagaatcaagaaattatgtggacaacagatacttataataggtga

SEQ ID NO: 251179 - DNA, 594 bp, Klebsiella pneumoniae; identical to SEQ ID NO: 217784

SEQ ID NO: 251180 - DNA, 291 bp, Klebsiella pneumoniae
atgggtggcgaccgatccagtcggattgctgggataattcagcagcagccatttggtcttcggcgtgatcgctgcttcgacgtcctgcggcagtggtttaaaaccgtactcttcatgacagggtactggcaccggtatgccgccagcgaatttaacgatgtcggcgtagctaatccaggatggcatggggatgagtacctcatcgccggggttaatggtcgccatcatagcgttgaagataatctgtcgggcgccaccagcggtcaggatctggctgatatcgtagcgtag

SEQ ID NO: 251181 - DNA, 294 bp, Klebsiella pneumoniae
atgtcaaattactgttactatgcagatgatgcccttgagctagtcgaaaaatctgaattaaagaaaattatagatgaatatgctgagcataatacaaagcaaacatttgtccttcgcagaccactgtctaaagatgattcacattatgactataacaatgcaatcgtcatcttctctgctggcatcaaaccttgcttcataaatctagatgacgatgaagaaaactttgaagaatatatcgacgaatttttggaagatgtagcctatttaatgatttttctttcgatgatttaa

SEQ ID NO: 251182 - DNA, 219 bp, Klebsiella pneumoniae
atgactatcggccttgatggcattaacaggctcataagacccctctatttccctgaattttcttctgaactgctcgattgggctgaagcactcatgctcgtacccttcacgcaggtatataacgcgttgtgtttggggctcccagcgaatgacccggacgggcacaccgtagtgatctctgaaccatcggttaagttctcgcatacgctccccgcctga

SEQ ID NO: 251183 - DNA, 834 bp, Klebsiella pneumoniae
atggacggccgggtaacgggcagtaatagtgacggcatcagcaacctgatgagccggaaccggccgcatggagaccaccagttcgcctttcagcctgccagcttcacggcaggggcgattggttcggtacatcggcacattgcaatcttcgctgatatggcggacatcaatgcctgcctgcatcagtggtgtttcgaatgtgaagctgcagccaatcaaaaaagtgaccaggtccgggtggctttgccagatttcccgggcatcggtcacttctttagccagttcaccatcacgccatacccggtaacgcggtatgtccgtatccacacggcctccagctgccagcatagtgtggcattgcccggcttcgaggacatcaagcaccgggcaactttgtgggttgcgctgcgcgtagagcagaaaatcaaatgcccagtcgcgtggcagggctatcatattcacttgggtcatgcctggcgccatcccggcggtgggtttgtcgtaacccttacgaatacgcaggcgagcctgtgccgcctcttccagtgcttgtggtgttgcagggtaattaatgttcattgctgttctcccgggcaaaaaggcgcaatttggataccttcctgctccagtgcagcccgcactttgattgccatctcgacggcaccaggggaatcaccatgcacgcagatactttgggcagagatgggcgtgaacacactttcaactgacactacaccgccttcgcgcaccagttgcaccatacggctggcaatggcctgtgtatcgtgcaacacagcaccggcttcccggcgtgaaactagcgtaccgtcctga

SEQ ID NO: 251184 - DNA, 384 bp, Klebsiella pneumoniae
atgggcattcgtgacgagctgcaaaccgaagtcgccgcagccttcgataccgatctgcaggatgccgttaaggatttcactgggtcatacaccgttcgggatgcctgggacccggtgacggaaaccggcactgaaacacaggtgacttactcggggcgtggagtgctggcgcgctataaactgcgccgtatcgatggcgttaacattctgcatggtgatgtgaagctaaccgccctggttaacgaggtgactgataagccggcggtctggcatatcatcaccgcaccggatccggttacgggtgagcttcagcgctacgaggtcatcaccgcttctgccgactctgcaggcgctgcgtactccattcaactgcggagagcgtga

SEQ ID NO: 251185 - DNA, 213 bp, Klebsiella pneumoniae
atgctggtcgcgtatctggcgagcggctgcgagtgtaagggcagggtaagagccgagactcaggttggttcggctattacttaccggacgttggtatcggaagcgccagagctttttaccagatgttttgacgagcaagaacaggccattaccatcatgaagggtgaagtctttttcacggggtttagctttgaggatttcgttgttagttag

SEQ ID NO: 251186 - DNA, 717 bp, Klebsiella pneumoniae
gtgcgtatactggggtgggaggcgccctttaataccgccggggttgtcggcgaggcaaaccttcccggaaaggggatcctgcatcttcaggatcgcgccgggcagagtgcgacagacgaacaatatgcttttgaccgcgattggtttacccgtcattcatatagtgacgatctgctggattccagcaactttttagccagcacaatcaataagcagttcaatcagtggactgtcaatcccctatttgtgggccgcgggtttaataaagtagaacgtgcggaaatcgcctggcgggcgagatatcaggctctcgataaagggctcagtgccagcgcggtggggataatgacgctagcgccgtcccaccatcagaaaacggtgctggtggattatgaattacctgaaagcgccatcggttttgtcatgggacataatatgctcgatgagtattgggataccgatgcgcactcttcccagaatcggttcgggggcccggccccctggggacctgatcaaggcgctcgcggctttttaccccggcaggatatttccagtcaggtgacgggaaccattcttgaacatctgcacgaaaattttgccaaagcatggcgtaaggaaaccggggaggaccttatcaaaaagcgtcaggcccgtgagatggcgaaacgccttaaaccgcggaaagagtgtggtaccctgatacccgggcccgaatga

SEQ ID NO: 251187 - DNA, 246 bp, Klebsiella pneumoniae
atgggagatgtgcttctctatcgccacgcgcagccggcgccggtagtgccggatggttacgtgatggtgccgaaggttccaagtcaagcccacctgaacagcatagctatgcgctaccgtcacgatttctatttgcttaacgatgcgcagaaagatagcgcccttgctaccgccaggcagatgtatgaggaatgcagtgggcagggattctatacgctgccagccgccccgcaggaggtgaagtga

SEQ ID NO: 251188 - DNA, 192 bp, Klebsiella pneumoniae
  misc_feature (84)..(93): n is a, c, g, or t
atgccagaaatcattgatcaggccaacgagttagaggaactccagcgggaagccgccattgcgaaatgtcgcatcaaccatgcnnnnnnnnnngaagagatacccgagcggcgccgggaactggtggcgggttgtcagcgctgtgctgactgtcaggaaaaatttgaagaacgtggcaagcaccagaggtga

SEQ ID NO: 251189 - DNA, 273 bp, Klebsiella pneumoniae
gtgatcgtgaatgattcaaacccgccagtaaaagatcgcatcaactccatgaacgccatgttctgcaatggcaatggtgagcgtcgttacaaagtgaatgtgaagcgatgcccggtctacacggaatcgcttgaacagcaggtatggggtgacaacggcgagcctgacaaaaaagctgataacgaccaccctaacgatgctggcggctacttcattgtgaaacagttcccaatcatcaagccgactggaaaagtcaccaaactgcggatgtaa

SEQ ID NO: 251190 - DNA, 483 bp, Klebsiella pneumoniae
atgtcaaatccagcatatttatggttaactgatgagaatgattcgcctattataggttcttgcctgatgcccacacgcacgggttccatcgaattgcgcgcagtgaatcatcatgtttggttacctaccgataataatacaggaaagctgacgggaacccgtcttcatacaccggttaaaattgaaaaagagtttgacagaacaacacctttgctatttagggctctttgtgaaggtcgaacattaagatcggcaacgctaaaaatgtacagaataaatgaggcgggactggaagttgaatattttaacatagcgatggcgaatattaagattacggcaatcacaccaaatttacatccggccggaatgacaagtactcaccttgaagacattgatttccgttatgagacgatcacctggatatacacagaagggaacatcatgtatcgtgattcatggaacgatcgctgttgtgcatggtag

SEQ ID NO: 251191 - DNA, 309 bp, Klebsiella pneumoniae
  misc_feature (225)..(234): n is a, c, g, or t
gtgtgggatgtgaaaacgatatggctgatccgttttgatgttattgattaccatgtgcgcaatgtcgcgcaggtctgcatcctcttctttctcgtaataagctggatagaacgcaacaggggcgattttaagcgcattagccaccttcatcgccttcatgttcaactgatcgtagagaggcgtaggaatcggatacacgacgctgtagaagttgtcacgaccacnnnnnnnnnncaggattttaacgaagtcctgccgatgaaatatgctatcgcgatcagacgtcagcagaaggatgttgccctttga

SEQ ID NO: 251192 - DNA, 372 bp, Klebsiella pneumoniae
atgcatatgcgcctaaaagacctctttgtggctgaggggcttaccgcggggtttaaggtgcaatggcggcaatggcgcgataccgggaaagataccgatcagttcatcgtgttcaggccttcaggcggcaccgatatcacctttgacctcggcggagactggtatgtgatggttgatgtgatctcctcgaaggtcaatcccgatgctgctgacgccgcggtaaacgccattgtcgagtatatcagcgcgcaatccggcgccgatgattgcgttggcgcgctacggcttgtcggcaatgtaccggcgccgatccccaccgaagagggccgattagtaacccggctactcgtctcctgcacatacggcgaataa

SEQ ID NO: 251193 - DNA, 552 bp, Klebsiella pneumoniae
atgcgtccgctccgcgaaggcgcgccaggccgggaagatgaaataggaagggttaaggttcaggtgatcattgaggttgaaccctttcacgcccgggagcatcacctggcgaccggcgaaagtcaccaccgtagacttcagcagggcggcggtgatggcgtcagaggcaatcgcatagcgcttatcctgccactgtttttgcgcgcgcagcagcgcccaggcgatcagggtatcgccatcggaggcgttgtttttatcggcgatagggtccggcgccaccgggttatagcgccagtaaaacagcccgttagacttgttgcgcagggtgttgtccgtccactgccacagcttgtcgaacgccggacgatcgttattcgccaccgccaggagcatggcgaagccctgaccttccgtatgcgacacattgccattggcggtatcaatgatacgaccatccggcatcataaaacgggccttatagcgctcccaggccgtatccgcccacgccctgggcaccagcatcactaccgttgtcactatcaccgccactaa

SEQ ID NO: 251194 - DNA, 456 bp, Klebsiella pneumoniae
atgagaaagaaaaccattgacgccgttgagcgcgaagcagctaaacgccttcgtgaaatctggaacgaaaaaaaagtaactttacgtctgactcaggagaaggcagcggaggtgcttggcttcagcacacaggcgtcagtaagccattacttaaatggcaccacaccactgaataccgacgccaccttaaaattcgcttcacttcttggagtgaaaccagaagagattcgacccgatctggctgaaatgatgaattacgttagaaagtcaggtgagtatttagaagatcggtcagtaccaggctggaagctacttagcccagaacatgcagaactcattgatttgtatgaaagactgccacagagcgaaaaggaacggcatttatctgatttaaaagagaaagtggaaggatttgaccgtttatttagagagttactagccacacgaaagcaataa

SEQ ID NO: 251195 - DNA, 213 bp, Klebsiella pneumoniae
gtgaagacgattttcgatgctgaaaccggcgagttgctgggcgcgcatatggttggcgcacaggtcacggaacagatccagggctttggcatcgcccgtcacctggaggccacagacgaaagtctcctgtcgatgatctttgcgcatccgacactttccgaagcgatgcatgaatcaatcctcgcggcctgcgaccaaccgttgcatcaataa

SEQ ID NO: 251196 - DNA, 327 bp, Klebsiella pneumoniae
  misc_feature (265)..(274): n is a, c, g, or t
atgtcaagacgtaagtacacctttgaacagcgcctcgaagtggttatgcactatttagctactgatgaaggctatcgcttaacatcagctcgctttaacgttcccagaacccaggtaagattatgggttgcagcctatgatgtttatggagaagaaggtctgaagcccagagataagggcgtttcaatcgatcccgaaatcagagtagaagccgtgaaggctgtgctgacggggcagatttcccagacgcaggcagctgcgaaannnnnnnnnncaagggcttcgttctcttcgtgtgggcaaaaaaagggcacttcatatgattga

SEQ ID NO: 251197 - DNA, 138 bp, Klebsiella pneumoniae
atgattgatgatcctgttgcgcttgaagtggcattggaacgttcgaaagataaacatattcaggagctggaaagaaaagttcggtcccttgaattacgggtactttatctaaaaaagctgaaagccttagttcggtaa

SEQ ID NO: 251198 - DNA, 480 bp, Klebsiella pneumoniae
atgggttcactggtgcctctggttaaggatttaggaacgggaaccgctcagactgttaaaggatttaaagatttgctcgatgtgttgtctattatcacagaatggaaaaataaactcctcggaactgataaaccagaggaacagaatattttccagcaaggtgcaacatttgttggggaatcactgttgccaccgagtgttttagatatggcaagtcggattaaaattatagttagtcctggttctgattcttctgttgcatcacaggtgcaaaatggtggttggtataatcaaattatgccagcaacgccatctatgcagtaccaaccagtcatcccggatttaaaagcggattttaaccttaccgtaaatccatctcctgaatttggaatgatggtagaggcggtcgctgataaacggatagagtgggcattcgatgaccagaatttccaaataaatcaaagtattcttggtcagtaa

SEQ ID NO: 251199 - DNA, 285 bp, Klebsiella pneumoniae; identical to SEQ ID NO: 241230

SEQ ID NO: 251200 - DNA, 252 bp, Klebsiella pneumoniae
gtgcgtctggcttgtgcgctggctcttcaggatatggtcgcgaaccgggccagcaaaagcattcagttgtttatcggcgatgagatcgatgatgcactggattcggcgggacttgagcgtctgatggggattctggaagcgaaggcgcgtgagcgtggtacggtgatgatcgtctcgcacaaggagatgaagtcgtggttccgcgaaacggtgacgctggaagtcaaagagggccgcagctatgtcgtttaa

SEQ ID NO: 251201 - DNA, 405 bp, Klebsiella pneumoniae
atggcagtcaagaaatcaccagcttcggacccgaaggaacaagcgacttctttagaatcactgacattagggcgtaacccgtgcatcgtgaatctgccgttatcagttgtagcagtgatatctaccagcggaacgattgatgatgattgctttgtcatcgcgaagcatattcccttcagatttacatccctgtccatcccgagaaacatcagtgcgtttttgtcgctgctggcgacacccattgattttgcctctggcaagaaatacacggtactggaggcggtggttaaacctgaaacgaaaacaacacctgacgccatgatttttaacgttttaataagaattgtcattctggataccttctttctttcgcactccatcgtggacagagtattcattccgtga

SEQ ID NO: 251202 - DNA, 306 bp, Klebsiella pneumoniae
atgcccagccccggcaaaattacccgttttcatgcgccaggtggcttcggcgtacgctgggaatctcatatctacgcaggttactgcgtcccaccgtactacgactcaatgattggcaaattgatcgtcatcggcgacagccggaatgaggccattgcgagaatggaacatgccctgagcgaactggtgatcgatggcatcaaaaccaacgctgaactacagcggcggatcatggcggatgaccattttcgcgctggcggctgcaacatccattatctggaaaagaaactggagctcaatcgctga

SEQ ID NO: 251203 - DNA, 138 bp, Klebsiella pneumoniae
atgtgggttattgaatttgtgaccactaaacagtttagctgtcactggctcgacaacactcagctttctcatttctttaagaatggcgaggcttgcatctacatcttgcttagtggcgtcaactgtcttgccttctag

SEQ ID NO: 251204 - DNA, 345 bp, Klebsiella pneumoniae
gtgttcaacctgcaaacgggtattgacttcaagaaacgacaacacaccattggcacccagcaaaaactctaccgtgcctgcgctgcggtaaccggcacgctggcaaatggactgcgcggcactggcaatttgtgcttcgatttcagcactgagaaaaggcgccggggcttcttctaccagtttttggttgcggcgttgcagagagcagtcgcgggtacccaccacgactacgtggccctgctcgtcggcgataacctgcgcttcaatatggcgcgggcggtcgagatactgttcaacataacactccccgcgcccgaaggctgtcagcgcttcactgacggctga

SEQ ID NO: 251205 - DNA, 126 bp, Klebsiella pneumoniae
atggaaaacaacatgagaaattatgaacagtaccggaaaaatggattaattaacaacgatcagctaacaaaccaaatgtcgctctactatcagcaagaaaattcagtcttgtccatgagcgaataa

SEQ ID NO: 251206 - DNA, 351 bp, Klebsiella pneumoniae
ttgtccgaagtcagcaccaccatcgtcttcaacgaggtattcccgctggtcatcactaaggcggctgcttatctggacaacggttacatcctcaatcctcaagcctgcaaccattatcaatcttcgcctttcttcgaggtgagcatgtttaaaccggagattctgctggtacaggaacgccaggaggctgtagcggcggcatctgaacgtctgaagtcggatatcgccgcagaagtgttggaaatcgtccgtcaacaacgccagcgaaagcaggaagcagcagcagccgaacagtcagccaaagacgctatcactactgaacaagcgatcttcgcagcattcgaggtgtga

SEQ ID NO: 251207 - DNA, 198 bp, Klebsiella pneumoniae
gtgagcaatgggtttgccaaggaagcctactactccgcgacctcgaagagcggcatagggtataccctgcgcgccggggcggattacaaggtcaacaaacaaatgaccctggggggccagattggctatgacaccttcggggattataacgaaagcaccgccgggctctatattcgctatatgttaggagatcattga

SEQ ID NO: 251208 - DNA, 201 bp, Klebsiella pneumoniae
gtgctggagggggcgcatactgaatttctcggcgagcagcgaggggcgctgggctttaccggtttgacctccttgggggttggcctcgagctggacagcagtaaatacccggtctttatcacccgcacccggctggtggcgcgctatatgttcggcaataacaccacaggctatggtgtaggcctggcaatgagtttttga

SEQ ID NO: 251209 - DNA, 126 bp, Klebsiella pneumoniae
atgcgctacaagcggaggttgaccggcttatttttcctgacagcgaaagtgcggaaaaatatctccgacagtatgttgaaccccaactcgctcaaccatgccctcatcctgaaatctggatgttaa

SEQ ID NO: 251210 - DNA, 183 bp, Klebsiella pneumoniae
atgatcgaaatactcacctctcggggtccagtaggtggactccagcatgttgatggtagccatgtcgatctgatcgtcccgatagcccagactatgagcaagatgataaaacgcaccgctgatagtccggtcgccgccgccgtcatagttccgtgttgccactacgctgacgcgcttgtctga

SEQ ID NO: 251211 - DNA, 189 bp, Klebsiella pneumoniae
  misc_feature (170)..(170): n is a, c, g, or t
  misc_feature (174)..(174): n is a, c, g, or t
atggatcagattgttcagaccttccacgtgcatatgtttcactggttcgttattgtgcagggcgcaaagcacattgaaattaaaacggtcatcctcttctatggattcgtcgtggttatccagatcatcaagataatctacaacctgcgaatagagctggccgtttatcnctantttgctgaagagtaa

SEQ ID NO: 251212 - DNA, 126 bp, Klebsiella pneumoniae
atggcggcggtgcaggagaatcagaatcagcctttcctgcacgttgagcgcgaggtccgcaaagcggttaaagtgcgcgctatggagaaaatcaaactgtttggctctgacggtaaagcggaatga

SEQ ID NO: 251213 - DNA, 135 bp, Klebsiella pneumoniae
atgacgctggctgtctcgcgaggattcaccccgcgcgctaccgcatcggtgatgatattggtcagatcgccgcgggcggtgtcgctgatgaccttccagtcgctgaacgttgtaagcgtggccgccgctatctga

SEQ ID NO: 251214 - DNA, 261 bp, Klebsiella pneumoniae
gtgatccgaacctcgttgcttgatgcggtcgagcacgacctgaatgtgagcagttgtgagttcttcgagttccagcttcccgatgatgggaatgatgtccttctcgataacgcgagtgatgttgcgcggatcgcggttacttttttcaacgatatcggtcagccagcgtttggcgaatgttttgactgtcgtcgggtctttctgtttaagcttttcttcctgctttttctgcgcgggattgatgccatgggccaccattga

SEQ ID NO: 251215 - DNA, 207 bp, Klebsiella pneumoniae
atgccggagtccgcggcgcgcaccatgctccagcccgccaatgcctggatggcgagaattgtcgaacccaatgtactcacctcgctctcgttctgtatgtccgatcatctgccgctttcgcagcccgcagaggcggtgaaggggattttgctctccctgatggcgcagcggactgaggacaaccggccgctaaccctggtgggataa

SEQ ID NO: 251216 - DNA, 150 bp, Klebsiella pneumoniae
atggccggtcccttcgccgtaaccgttattctcgaaaataaagacggctggaagctggagcacgacggccatattgatggcttcaaagaccaggccctgattagaaccaccatcgcccgtaaaagagacaccgacgttgccggtttttag

SEQ ID NO: 251217 - DNA, 213 bp, Klebsiella pneumoniae
atgctgttgaacctccagcgcatcgtgatagcgctggttaacaacatggcaatagctgagaatattgcatatcagaccatcaacccaggtgtcgccgctgggcacttcggccagcaacggctgaacaatagccagactctccgggatgttttccgcaaaggcttcgcaaattgcccgcacaacgcgcaatttacaccaggtgctgcgggttaa

SEQ ID NO: 251218 - DNA, 198 bp, Klebsiella pneumoniae
atgcaggacgccgcagatgccgcaaaacgcgcgcatgatgtacaaaccatgcttattggtatggatgagggctgtggcaaagtaccggttaatcttattctggtacatgcccaggatcatataatgacctctatgctcgcgcgggagttgatcgcggagcttattgaggttcagcgccagctgcaacatcgcaactga

SEQ ID NO: 251219 - DNA, 129 bp, Klebsiella pneumoniae
atgcaaatccccatgggctacgtgtatctgatcctgccgctaaccgggatcattatgatgttctacgcgttgtgttttatcagcaccggactgaaaaacatgaagcactctgcagcgggggcaaattga

SEQ ID NO: 251220 - DNA, 162 bp, Klebsiella pneumoniae
gtgtttgagcgagtcgaaggcgtgcaccatcttaacgagtctcagcaaaacaaactgaaagcacacatcaatcagctgtggcttgagcgtacgcccagtaccgaaatcataactattgccagcgggctggtcagcagcatgcagggggttagccatgcgtga

SEQ ID NO: 251221 - DNA, 225 bp, Klebsiella pneumoniae
atgggtatgcagcgccgccaagatattcagtgcgtcaccattaaggctgagcaacttaacttccttatgcagacaatttttacacatcataaggactttgactgccatcaacttgatggggttttaggtcttgcatatggccttgctggcgaggtctattcatggatggaaaaagaggaaaagattgtacagcaaaatgaagaacacaaaagaaggggtaattag

SEQ ID NO: 251222 - DNA, 669 bp, Klebsiella pneumoniae
atggcaccgccccacgacgatggcactggcgaccagctgatggtggatagcctgatagatatcagcctgactgctgccttcaggcaggcccactccggtcagcggcgcgtgcagggacatgttgatttcgttgaaggtcagccacagcttgaccttctctctgtagcgcccgaaaaccgtgacggcgtagtcagtgaaaaaaccaatcagtctgcggtcagcccagccgttatagcgggtcaccagattccagggcatctcatagtgggagagcgtcaccatcggcgtaattccgtgctgcagaagctcgtcaaacagcctgtcgtagtaggccagaccggcttcattcggggtctgctcatcaccctgtggatagatgcgtgcccaggcgatggaaacgcgcaggcaggtaaaccccatctcgctgaagagtttaatgtcctccgggtagcggtggtaaaagtcgatggccacgtccttaatgctgctgacgctcccgtcacgctccaccacctcgccgaagatacctgcgggctgaacgtccgaggtggacacccctttgccgtccttgtcccatgcaccctcgacctggtttgcggcaattgccccgccccagtaaaaattatccgggaacactgttattgtgaagtgtttattcgctgtatctga

SEQ ID NO: 251223 - DNA, 1119 bp, Klebsiella pneumoniae
atgttctttgatgctgcagttggaggaggacgtagagagctttattctaccgaagaagatctttctggtttaaaagacaacacccttattaatacttgccgaaaacttgaattaatatctgacgttgtttacaccaagctcaatcatatattgactatgaggaatgacattggtgcttcgcacccaaattcatactccataaatgcttttgaacttcttggctggctccaaacatgcgttcaagatattttgaacgacaaaccgtccgcgtctgccatacaaataaaatcattccttgagaatctaaaaagatccactgatgttcttgatgaagccacaattcatagcatggaaagacctttgaatgatctgtcgcttcagaatactgacaatctactcaatagtattttcggcatatatacagctgattcaacaggaaatgttgtcagaaaaaacatcgctctttttgctccgcatatctggaataaaagcagtgataacgtaaaatacaagctcggcgtgacgctagacggatacaagaacaatcttcacaacgagaaacatgctttaggtattgagttttttacgttttgtgatggtaatcgttatcaatcattagactctagaattatatcactggacggccatgccgacgatctcttagaggctagatatgcttgggataacttttataatgaaccccctcatatgcggaagattctttcgtatttaaagactgaaaatgacatacctttagagagggttcataagcttataaaaacagttttgatttgccgtgttggtaaaggaataccatataatactggtgtttctccggcgggacgacctttgtatgatcagttttttggcatgcttggcgatcaaaacattatcaatacaattatagcaatgcactctaatgaagtgcgagtgaatttagacaacaaatactgccagcaacatatggtaagcgttttgactttgttaagagccaatgctcgtagcgaaagaattcaagaaattatagattttttgatcgccaaccaaacgatcctccataaagtacacaacgataagagatatagagatctaactaaaaatcacatcagttttggctaa

SEQ ID NO: 251224 - DNA, 723 bp, Klebsiella pneumoniae
ttgctgcacaaacactacgcaaccatagctaatttcaccagctacgctgatacaggaattggccttgctgctgatcctgttggaaaatactttgagagtatcgaaaaaatactcagagagattcaagaaacgtataagaatacctacataacgagaggctcgttgataggagaacaattttacgttcaacgtagccagttgtttaaagagcttgaatcaatacttaaagtcagattcctgaataaggctatgaaattcggagagtatacaaaaataaaaaaagcacttggcctatccagcagttctattacccacaaatggaatgaaacggggatcagtgacattgaaggctatgctacccacatcgaacgggcagctaaatacgtaaaagcaatgcgttacactggttatttaggcattggtattagcggacttcattcactaaatgaaataaatgaggcttgttctgttggtcgcgaagctgaatgtaccaagaaaaagtatactgagattggtagctttgctgtaggtacgggggttggtgttgctggtggctatttagcaatacctctttgtatcgctatcggtgttggtactgctggtgtcggagggcttgcttgctctgtgattgctggggctggtttaggctatgtcggtagtagtgcaggtggcgcattcggtgaatggggtggagagcagctgtatgaaactttcggtaattaa

SEQ ID NO: 251225 - DNA, 570 bp, Klebsiella pneumoniae
  misc_feature (544)..(553): n is a, c, g, or t
atgggcgttaagggatactatttattcagaggtgataagacacgatgtggtggcgttatcactgaaggatggagcgaccaccagcattttgacagagatatgtcctgtgaagggcataaagtaacttgtggtaaacatccagggctttaccgtatttgtggtgggcttgatgatgacatacacggcaaaaggattgccggaacactacacagttatagctcctgcccctgtaaatccaaattcatcaattcaaactgggatgatgattacgaacttggtggagaagcaacggtaacgcacactgatctacctcacctcgtcaagatgcctgaacttccagggccgattgagtcagaaccggaacagaacgcccaaacagcaaaaaagaaaacaggtatagatgcaggttttgccgttatcacttatggcggtactacggaagcgtggcaacgcctgttattcactgaaaacccaccagcaggggcaaaagagctattctctattctgaacggcccggatgaaagatacaaagctggttcgattnnnnnnnnnnagttgatgcggcgttag

SEQ ID NO: 251226 - DNA, 1011 bp, Klebsiella pneumoniae; identical to SEQ ID NO: 221997

SEQ ID NO: 251227 - DNA, 747 bp, Klebsiella pneumoniae; identical to SEQ ID NO: 94297

SEQ ID NO: 251228 - DNA, 270 bp, Klebsiella pneumoniae
atgcagcaagctcgtatacacgatgcgctttacacaattttttacagcagcacggattacattttcgtgctgcaccgcacgttgcccgatttcattgccggagataagcagcagggtatcaactcctttcaatgctacatccagcgtatcctggcgagtgtaatcagcttcgcgtgtagctacacccaggccagctgctttcgcaggggttcttaccagagcgacaatttcagaagcgtcaactttttgtttaagtttttcaataactaa

SEQ ID NO: 251229 - DNA, 255 bp, Klebsiella pneumoniae
atgaatagcggtcaccacccgttcacccacccggtagcgggtgacatccttgccgattttcaccacttcccccgacacttcatgaccgaggatcaccgggccggtcactgtctggtgctgagctttatgaatgtcggtaccgcacaggccacaggagtgcattttgatgagcatgtcgccgtcgccaatttctggcacttcaacatcttcataccggatatcatttttactgtagtaaacgctggctttcattag

SEQ ID NO: 251230 - DNA, 405 bp, Klebsiella pneumoniae
gtgaaagcgtactatatacttggacataacgttgcatggcttaacggtatatgcctgattctttttgttattggtgtggtcggtgcgctggcaatggttgccatccctgaaaaattcaatcttcgagttaacagaggcgatacattcatatactgtgcgcttatagcggtggttgggttttccgggatgttcgttatctccattcactcattttcaatggatgaacttgaagcaggtagacactggaaagacgactgcaagacacttgaggtaaacatgccgacaggcgcttttaccagccctgttaataaactggactgtgatggcatcatcattaatgtgcctggcgggcagtattattcgtatatccatcagtgggaattatataaagctaactcaaaatga

SEQ ID NO: 251231 - DNA, 480 bp, Klebsiella pneumoniae
atgcacgacgcgttggtctgcggcagacgcttccggaccttcaatgtggtggatgattttaaccgtgaagcactggcgatagaaatcaaccggaatatcccggctcagcgaatcatccgggtgctggacaggatcgtggcaaaccgcggctatccgctgaaaatgcggatggacaacgggccagaactggtctcgcgggcactggcacaatgggccgaagaacatggcgtgcagctcgaatttattaaaccgggtaaacctacacaaaatgcttttatcgaacggttcaaccggacataccggacaggaattctggatttttacctgttcagaacactgaatgaagcacgggaaattaccgagcgctggctgatagaatataacaacgagcggcctcatgagtccctgaacaacctgacgccggaagagtaccggctgatggctgaaaaaccggaactctcaaaaagtgcgtggaactaa

SEQ ID NO: 251232 - DNA, 243 bp, Klebsiella pneumoniae
atgatatatgcggccgctattatcctgataatgcagtcggttagtgcgtgggatcctctgtggcggctgggaaaaactcaggccacgagaagccaaatgttcctggagaaaggggcgaaaacagaaaccgtgaagaaattcaaaccaagtcattacacggattccttcaggcataaacccaaacaaatttatgatcttggatcgcagatgcgtctcgttattgatggtatgcgtcagaattag

SEQ ID NO: 251233 - DNA, 666 bp, Klebsiella pneumoniae
gtgcagaagcctaaattagggaaaattaagcttctttccgcgaaggagcaggtggcggcggtgttgcgtaaagcgatcctgtcgcgggatttagtggaagggcaggagattacccttgaagggattgcccgactggttggcgtttccagcatgccggtacgcgaagcgtttcaaattttagccgccgacggtctgattcaagtgcggccgaataaaggcgcggtggtgctggggattaatgagcagaccatccgcgaacattatgaaattcgcgccgtactggaaagtgaagccgtggcgaaagcttctcgtccagggaccgatatttcacgcatcgcccaggttcactatgccgcagagaaggcgctggcagacaataattctgctgaatattccgacctgaaccaggctttccatatggagatctggagcgcggcgggcaatgaaaaaatgaagatgctactctgcaacatgtggaacggcctgtcgatgggacataaagtcaccgaagaagagtatgccgttatctcaattcgcgaacataaagcgattttacaagcgcttgagcaacataacgaagcactggcccgccagcgaatgcatgaacatattattcgctcgatggaaaatatgctcactcgatacctgcccgataccaccacctga

SEQ ID NO: 251234 - DNA, 630 bp, Klebsiella pneumoniae
gtgcatcgcctcggcttccctgactccatcgaatacgacgatctgccatccacaaacgacggcatgaaagcggccgctgccggcgcaactaaggagcgcgaagaaaaacttccgaaagaatgccccgaatgtcatttcatgaagccatccggcgtttacgtctgcccaaagtgcggatttaaaccgctcgttggtcaggacgtcgagactgacggcacccgcaacatcaaaaaaatgagcaagcacgaaacggtttataccaaaagcgacaagcagtcctggtggagtcagatcaagttttaccagcgtcatcgtgcggcgcaggggaaacctgtcagcgatggctggtgtgctcatacctttcaggagaaattcggcgaatggcccaacggcttaagcgactttccaatggagatcacaccggaggtcagcaatcacatcaaacacaaacttatcaaatttgctaaacgccgcgaacgcctgcagcagatggggaagaaacctgaccaggatctatttccacctccgagcgccagtatcaactatgagcctcctgagggcagcgacgggcaattaattatcgaagcaaaacgaaaactccagaaaaacgtaaatagtgcgagtcagtga

SEQ ID NO: 251235 - DNA, 402 bp, Klebsiella pneumoniae
atgagcggccaggcgattcagcaggcgctggaatccattcagttcgaccagttagtcctcgagaccgccggtacgccgcagaccgtcgcgctggcgattgaggccgccggtccgcgggcgcagctggcgctggttggcacgcttcatcacgatttaaccctcccggcagccaccttcgggcagattctgcgtaaggagttgaatattgtgggtagctggatgaactactctggcccgtggccgggagaagagtggcaaacggccacccgtctgctgactgaaaaacgcctgcagctggcgccgctgatcgcccatcgtggcgacgcagaaagcttcgctcgtgcagtgcaggcgctcaacggcgcgccaatgcaaggcaaaatcctgctcaaactctcttga

SEQ ID NO: 251236 - DNA, 150 bp, Klebsiella pneumoniae
atgaacgccgaggcggtgacaatgatcggtaaacagatccgcggaaagctaagctttttaagaatgttggcgttggtcagaaaaacgttgaccagattgccgagcgtttccgtaaacagcccccaggttaacaccccggaacagaggtag

SEQ ID NO: 251237 - DNA, 681 bp, Klebsiella pneumoniae
  misc_feature (578)..(578): n is a, c, g, or t
  misc_feature (585)..(593): n is a, c, g, or t
atgaagcgaggtacctgttcggtcaccgttacgacgactaatggcgtcagtgcggtgatcagcataaaagtggtcgcggtaatgaagttcattacccgcatcgacagtgcaaccaggccaatattctttgctcatatggacgagggtttcacggttgactatggcgacggcattgacagccgggactaccgtttcgatcccgccagtgaagcttcaggttgggttattcctacacgtgaattagtacagggaaaggaatacaccatcacggttaagaacacggaaaccgcctgtctgcgcagccgtttatctaactattcttcgaaactgaaccctgttgtggaattgattagtgttacaggggaaagaggtcatctttcagggttcgctttggataccaccggattaatggctattcgtcccggagcatttgacgatttgccaaacgtgaataactgcaaaaatatttttaccaactgctcgtcgcttacaggtattccggcatcgttgttttctcgcatgaagatagaggatttttcagacgcatttagagggtgtacatcgcttactgaggttcnatccggnnnnnnnnncatcggggctatttgcaaaccagcccgatgcgatcgacttctcatcggtatttgcaggctgcaccggcctgatcagtatcggcaataa

SEQ ID NO: 251238 - DNA, 195 bp, Klebsiella pneumoniae
atgatgtttgtgagtgcccagccagttgcactggtcagcagcaataccatagccagcattgaggcggatgaaggactgccagccaggaagaacacgcctgataatgaaattgcaatgcccattacctgtataaaactcaacttttccttaagcacaacggcggccatgatcattgcgaagggcgtaccaagctga

SEQ ID NO: 251239 - DNA, 285 bp, Klebsiella pneumoniae
atgacacggacctccggttttctgaaaatcattcttcctcaggcctccattgtcgcgttgcgccctttgggaaatgagctggtactgatgatgaagtcatcagcaatcgccagcaccatcacggttatggaagtgatgggaaccaccgcgcttgccttttcacgctctttcgatttccaggtttatttatgggcagcaattatttacctggccattgtagaaatcattcgccgcctggtattgaaaatcagtaaccgtctgacaagacacatggtcagggcctga

SEQ ID NO: 251240 - DNA, 231 bp, Klebsiella pneumoniae
atgacatttgatgaaaaagagctaaattacgccctgaacaaaatcgtgatgacctctttgttcaacagtcttaccgatcagcagcagcaaaatttttacaagtctgctttcgacatgattgatcggtgctgttattgcgatgctgatgacatgcctgacaaagttcgcatgcaactctcagaggcgcttcgagagcgacttgtcgagcaacttgctgaaattgcttgctag

SEQ ID NO: 251241 - DNA, 645 bp, Klebsiella pneumoniae
atgagcggggtgatagagcgtccgaaagaggctgcgaccattaaaagccaggatgctattgatcgcctgctggcgaaatggaccgagcgccattccggtattcacaatatgttctctgtggcattgctgcaggagggcatgagctacaaacaactgtcgcaggataacgaaaaggcgcagctgctacagtcgcggcagtggggcgtggaagaggtctgccggctctataaaatcccgccacatatggtgcagatgctggcgaaagcaaccaacaacaacatcgagcaccagggcctgcagttcgtgatgtatacgctgctggcctggctgaaacgccatgagggtgcgctgcagcgcgatctgcttctgcccagcgaacgccgcgatttgtacatcgagttcaatgtttccgggctgctgcgaggcgatcagaaatcacgctatgaatcttatgcgctgggccgccagtggggatggctatccactaacgatatccggcgtatggagaatctgccgccaattgccggcggggataaatacctgacgccgctcaatatggtcgacagcgcgaagatccttcctggcgataaatcgccgacagcaaaacagctggccgaaatcgaaacccttctggccagagcctga

SEQ ID NO: 251242 - DNA, 189 bp, Klebsiella pneumoniae
atgaactggtgtatttccaatatcgtcggccagtaccttcccggaagtgacgatattgtgcgtcccgggaaagaagggcggcagaacaagatagatggtgcggttggtttaatgatggggctggggcgcgccatgctcaacagttcagtgatgacatccgtatacgatgaggaagatatagcatgctaa

SEQ ID NO: 251243 - DNA, 282 bp, Klebsiella pneumoniae
atgggaaccggcgagcgcttgcttgatggcgctctcgcctaccttcgaggctacatagcacaggttccgcttcaggaagaggagatcaacattatgttcgatctgttcctcacccgcatgtttgtccgaattgtcattaccgaatggcgtgcacgtcagtttccggataaccgtgaatatattctgagaaacaccgcaaccagctgggcacagctggaacagttattgtctctgccgtttgaagaaactcgctccctcattgaatcagcctgtaaggaataa

SEQ ID NO: 251244 - DNA, 678 bp, Klebsiella pneumoniae
atggctcagggcattcgctctgtcctaatagatgtttttaaagaagctcagcatgcgggagaagtacctcctggttataaccctgcactagcaactaaacaacctcgtagaaagatcactcgtcagcgcctcactcttgaggaatggcaaaagatttttgatatagccgatgaaaatcacaaatacatggggaacgccatgcttttagccatagtaacaggacagcgactaggtgatatatcccgtatgaaattctcggacatctgggacgatcatctacacgttgagcaagagaaaaccggaagcaaaatcgctataccattagctctgcgttgcaacgcaatcaactggagcctccgagatgtaatcagtcgttgccgggattatgcagtaagcccttatttggttcatttctttagaaccacctcacaggctgagcgaggagcacaggtgaaacccagaacactgaccatgaatttcagcaaggcaagagacagtgcagatattgactggggacaaggtacaccggcaactttccatgaacaaagatcgctttccgagcggttatataaagcccagggtataaacacgaaagatttacttggacataaaactcaacaacaaacggataggtaccatgatgatcgagggaaggggtggacaactgtggccttatga

SEQ ID NO: 251245 - DNA, 339 bp, Klebsiella pneumoniae
atgagcctgaaaccgggtgatatgaactgtcgcattgcgattagctacgttcagtccggtcgggggccgctgggcgaaccgctaccggaaaagcaggttgaatcgggaaaagcgtgggcaaaacgggagctggtatcggggcggaaagtccgcacgctggatcagcagcaggtggtggaaacctgcctgtttacggtctatccgggtgtgctggttgatatcgactggaaaatcacgacgaaaaatctggtttataccgtccgtaatatcgaccgcaaaacggaccggatcattatcacgggggaggctgacggtcggcatgatagagctggcgattaa

SEQ ID NO: 251246 - DNA, 435 bp, Klebsiella pneumoniae
  misc_feature (387)..(387): n is a, c, g, or t
atggccggaggaattcgatcgtccggtggtggccgaaaacccactttaccgaccgggcaaaaaagcaaattaacacgtattgcgcctcccgctgagttaatgggggaggcggcaataagaatgtggaagacgcaaagcaaaatactcatcgaccgagggatgtttgagctggaggacgcacctttgttgctggcttactgcaatgcttttcatctgatgctcgaagccgaaaaaatgctggccagcggactgacctcagaaagtgaaatgggaggcttgaaaaaacaccctgcagttaatgtccggaatgactcggtttcccagcttgcccgcctcggctctctgttggggttagatccgctcagtcgtcttcgcatgaccagcggncaaaaggatccggacgatgacgggaatgaattcgatgagtttgactga

SEQ ID NO: 251247 - DNA, 471 bp, Klebsiella pneumoniae
atggcaattgattacgctaagatcttcatctctcatgttcgtaatgtttccaaagccaataagtggttaacagaaggtgaagcagtccctacctatcggtcctggatccgtgctgagcagttgctgcgccttgacgttgttctgattaagcacagagagcgctattccgctccttgggagcctcttttcggaaggaatggaattactcatcttcttgcgacccgttacggctggtcacctgagcaagtgaggatgctttctttcgctgatgttcttctttcgcttcagcaagatctggcagaagtggatatcccaccggaagtactggcccttcctgaatacgttcgccagtctgacgaattcgaaattctctcccgaggtcaatatcgaactgaattgccaccttgtcaggagcatgaatgggatcatacgattgcagagagagaccaaggccagcgtaagccacaataa

SEQ ID NO: 251248 - DNA, 156 bp, Klebsiella pneumoniae
atgaaagaagcgattgagattgtggaaaaagacaaaatcaatacgaaggacatgatcactcatacctggccgctgtcccgtattcctgaagcgattgagtttgcttccaatccggataatgacgttctgaaagtcattattaaagctgacgcatga

SEQ ID NO: 251249 - DNA, 669 bp, Klebsiella pneumoniae
ttgggggcggatctcgatcaggtctcgggtaattttgacactgaacgtctgctgattactgaagccaccgacgaggcggacgccgtatacgaaagcgacgaagagctgcgcgcccgcacgctgctctcatgggcgcgcctgagcacggcgggcgcccgtaatgcctatcactattttgcgcgaggcgcagatgcggatgtgctcgacgtgcgcgcctatggtcctgaaactcataatcaggaaggccgcgttttcctctacgtgctgtcacgcgccggggatggatccgccccgcaggcgctgctcgataaagtcctagcggcggtaaacccggaagacgtgcgcccgattacggattatgtggctgattacgtccgttccgctgtgatagtgaattatcaggtggttgctgacatttacgtcccttacggcgtggacaccgccacggtgctggaaaaagccaccgcagcactgaacgaatacactgcctctgtgcatcttatcaacgccaccgctgcacggtcaggcatagacggggcgctgcatcaggacggcgttgtcaccgtcgatttgcattcacccgtcgccgatgtcgttgcgacgatgggcgaagccccgcattgcaccgccgttaaaatcaatcttgtggtgatggaccatgaccgctaa

SEQ ID NO: 251250 - DNA, 537 bp, Klebsiella pneumoniae
atgctgatgcgttctctcgtcatgtcaaatttgcctgttccgactcgctgcctcattgagtggcaactcctgactctagttcgtccttctgaggcttccggtgctaggtgggctgagctcgatctcgatgcaaagctctggactattccagccgaacggatgaaggctaagcgtgagcacattgtaccgttatccccccaggcaatagagattctggaagtcatgaagccaatcagtgctcaccgagaatacgtttttccgagtagaaatgatcccaaaatgccaatgaatagccagactgcgaatgcagctttgaaacgtattggttatagtggaaaattagttgctcatggtttacgttctattgcaagtacagcaatgaatgaagctgggttaaatgcagatgtgatagaagctgctctagcacatacttacaagaatgaagttcgtaaagcttataaccgctcaatctatttagatgcgagaatagaattaatgaattggtgggggcaagctgtccaccaacaatacaaataa

SEQ ID NO: 251251 - DNA, 312 bp, Klebsiella pneumoniae
atgcgctgggataccggttatttcatatatatgctcaatatccatagccgaaataatgttttccaactgctgtttcggacgggtgtcataccaggtcagtaccgggccaatgacattatcattatcatccagcaaaacaccggcttcccccacactggcgaccgctactgcgctgatcttccctgcattatccaaaatattcgttatcgttctgagaccatggagaaccccgtcccagataaggcgaacatcaaaatctgtatcttctccgtccacaattttgggcgttctgaaactatactgattaattaa

SEQ ID NO: 251252 - DNA, 435 bp, Klebsiella pneumoniae
gtgcggttaccgaacggcgtgtttaacccgtacaccggcatcaaaaccaatattctgttcttcaccaaaggtcagccaaccaaagaggtatggttctatgagcacccgtacccagacggcgtaaagaactacagcaaaaccaaaccgatgaaatttgaagagttccaggcggaaatcgactggtggggtaacgaagctgatggttttgccagccgtgaagagaacaatcaggcgtggaaaatcagcatcgacgacatcatcgcccgcaacttcaaccttgatatcaagaatccgtaccagggtgaaaccatcagccacgatccggatgagctgctggcgcagtaccagaaacagcaggcagaaatcagcgagcttcgtaaccagctacgcgatattctcggtgccgcactggcgggtaacaaggaggcgaactga

SEQ ID NO: 251253 - DNA, 507 bp, Klebsiella pneumoniae
atggagccgcgtaaaaatatccgtggtctgctgcaggcctatcagctgctgccgatggagacccgcatgcgctacccgctgatcctcagcggctatcgcggctgggaagatgatgtgctgtggcagttagtcgagcgtggtacgcgtgaagggtggatccgttacctgggctatgtcccggatgaggacctgccttatctgtacgcggcggccagaacctttgtttatccctccttctatgagggattcggtttacctattcttgaagcgatgtcttgcggtgtgccggtagtatgttccaatgtcacttctttgcctgaggtggttggcgatgccggcctcgttgccgatcctaatgatgtagacgcgattagcgcgcatattttgcagagcctgcaggatgatagctggcgggaaatcgccaccgcgcgcggtcttgcccaggcgaaacagttttcgtgggagaactgtacgacccagaccattaacgcctataaattactctaa

SEQ ID NO: 251254 - DNA, 495 bp, Klebsiella pneumoniae
atgcgtggagctgtaccccggcctggtttattcgccagtacggactttaacaacaacgataagcgagtgatttatggcagaaacaacgtttaccctgtggcggcagcgccttggctatggcattgccgatctctcctgcaaccttgtgtggcagatgatctctctgtatctgatgttcttttacaccgacgtcatgggtctcccggcctattatgtcggcctgatgttcctggtcacccggctggtagacggcgtggccgacgtgctgatggggctggtgatcgacaataccaccacccgctgggggcgctgccgcccctggctgctgatcggcgccctgccttttggcctgctgtgtattctggccttttatgtgccggattccggcaccaccggcaaactgctgtacgcctttgtcacctatctgtgtctgtcgttcctctacaccctggtgaatattccgttctgcgccatgctgccgtttttaaccagtga

SEQ ID NO: 251255 - DNA, 420 bp, Klebsiella pneumoniae; identical to SEQ ID NO: 249357

SEQ ID NO: 251256 - DNA, 420 bp, Klebsiella pneumoniae
atgcagttttacacgcccgttgagttacgtgagatcatgctgatcccgttgtacagtgaccttgtgcaatgtggttttccaagccctgcacaggattacgttgagcaacgcatcgatctgaacgagttgctcgttaaccaccccagtgcgacgtattttgtcaaagccgccggcgacagcatgaaggatgccggcataggagaaggtgatcttcttgttgtggatagctcaaggacagcagttcatggcgatatcgttatcgctgcagtggatggggaattcaccgttaagaagctgcagctgcatccgcgggttcagcttaacccaatgaaccctgcatattcgccgatagtcgtcggtagtgaggacactctcgacgtgttcggggtggttacgtacatcatcaaatcagctggctga

SEQ ID NO: 251257 - DNA, 255 bp, Klebsiella pneumoniae
atgacgaagccagttatcgacgatatcgcccaccaggtcagaaccgcacatgatttccgccagctgggactcgtcgtaatcagtaccgaactctatagatggcttcgtttctaccccgctaagatccggttttgttggggcgaaaaattcgtacttactgaggtcaccacgctggatcaattcgccaatcgtcgttggcttaatcaggtgttgatagtaatggcccaggaacggcgcaaaaggggtaccagataa

SEQ ID NO: 251258 - DNA, 225 bp, Klebsiella pneumoniae; identical to SEQ ID NO: 182833

SEQ ID NO: 251259 - DNA, 504 bp, Klebsiella pneumoniae
atggtgacgtgccgacaatcaccgccacgggatggggaagatcatgtgcattttgcctcgcgaatctcgcaaaactggcaatgtcagtccctgagatgtgaggaactgcctgcggatgcgtatgccagtatccaaccaagcgcaatcccttcctgtttgcgttctcgatttcaatgcggcagcgatcgctgctcagttcgagccacgttctgccagcgcggtccgcaggatgtggcgctgaagcatgacacagtacaatgccgccgggatgggcgggatcgacaaacagctgcccgcctcgctcattttctccctgtgactgccggtagtgaccgaacatctcggagacctgccgcccaacctgcagctccgcattcatatccggccaggcccagcgccatgctatttcattcatgcgttttgcccgggtttcggccagttacgttcaaaaatactctggacaactccttcaggaagtacaggtcccgtatagcgtcctcctaa

SEQ ID NO: 251260 - DNA, 390 bp, Klebsiella pneumoniae
gtgtttgttgaagagggtggcattgaaactaccggtgaaacgccgtcgttcatgtatcgctattctctggtgctgttcgtcatgaactacgcagggagcattgacgacttcacgctgccgctgatggcctggctctggtttaatcagcccgatctgctgctgaaccccgataaaaaccagcagattaaattcaccacactgattaacaacgatgacaccgccgatctgatgtttgagttgccggtgcgtcagcgggtactggtacaactggatgaaaacggtgtgccgtatgccgagcatttgccagagccgcgcccgcgcgtgctggcaccccacgccgcaggctgggggctggtatttgaaggcatgcttcaggaggccggaacgtga

SEQ ID NO: 251261 - DNA, 204 bp, Klebsiella pneumoniae
ttgccagagttgttcaggtgttgggaagtcactgagggcaatttcggattcgagctgctgcggattggttttatcgtggaagataaatccatcaccgttggaggcaaatacaaagggaacatcgagcaggcttgcgtagtccagtccctgctgcatccctttactgatggcgtgcttgttagccttggcttcgataactgctaa

SEQ ID NO: 251262 - DNA, 294 bp, Klebsiella pneumoniae
atgtataaaaccgtcgacgatgccaacatggatcttgctaacggtcgaatcgatctcgtgttttccgatgctgcaatcctctctgactggatgaagtctcctgaaggggcatgctgcaaatttgtgggtggtgatgttcgcgatgaaaaatactttggcgtaggaaaaggcgtaggcgtgcgtaaatccgatgcggacctgcgcgatcagttcaatgcggcaattaaagccattattgctgacggaaccttcgaccgaatcaacaagaaatatttcgacttttcgattaagtaa

SEQ ID NO: 251263 - DNA, 204 bp, Klebsiella pneumoniae
atgaaaggcgaaacgcgccggaggcgtggttttatcgctcagcaggctgaaaaagctgatgatctgtatactttcctcggcatcgagcaggagatcgatggcgaaaaattcagagtgatgaatgtggattacacggcaatcatcgccgatttggtgaccgtggtacaggatttgcttaggcgagttgacgccctagaaagttga

SEQ ID NO: 251264 - DNA, 438 bp, Klebsiella pneumoniae
gtggtggagttcgacgagaactttaaggcgctgtccatcgaagagaaaccgctgaagccgaaatcggactgggcggtgaccgggctctacttctacgacaacaatgtggtggagatggcgaaggacgtcaagccttctgaacgcggagagctggagatcaccaccctgaaccagatgtatctggagcgcggcgatttgcaggtggaactgctggggcgcggatttgcctggctggatacgggtacccatgacagcctgattgaagcttctcagtttattcataccattgagaagcgccaggggatgaaagtagcctgcctggaagagattggttaccggaataaatggctgtcggcggaaggggtggcggctcaggcggagcgtctgaagaaaaccgagtacggtgcctacctgaaacgtctgctcagtgaagactga

SEQ ID NO: 251265 - DNA, 225 bp, Klebsiella pneumoniae
atgtggcctgcacaaacactgcctcttcccctgcaacaggcggtggaagcgctgacgcagggagaaacgcccgaccagattatcgcccggatgaatttgcagggctttcaggcatggcgcgaagctacatcgccgcaaggcgaacacgacatttttcagatacgactggatgaggcacacgaggcacggttcctctgccgctacattactctgccgctgcactga

SEQ ID NO: 251266 - DNA, 180 bp, Klebsiella pneumoniae
atgacgaagccagttatcgacgatatcgcccaccaggtcagaaccgcacatgatttccgccagctgggactcgtcgtaatcagtaccgaactctatagatggcttcgtttctaccccgctaagatccggttttgttggggcgaaaaattcgtacttactgaggtcgccacgctggattaa

SEQ ID NO: 251267 - DNA, 243 bp, Klebsiella pneumoniae
atgagtattgtggccaataaagtccccggggtccgcgccgcacagtgtcacgataccttctccgccgagcgagcgcgtaaaagtaacaacgcgcagattattacccttggcgcgcgggtgattggcgctgagctgggcaaaaaaattattcaggcgtggcttgagtccgaatatgagggcggcggatccgcgcccaaagtggaacgtattgattattacgaacaccagcatgccagagattaa

SEQ ID NO: 251268 - DNA, 285 bp, Klebsiella pneumoniae
atgggaatgactctggatcgtattaacgaatattttgcgtttgcaacatccgccctggtgaccggcgtgggcgtgatgaccgtcagcgaaaagctggcgctggctggacttcttctggggattgtttccgccgtccggctggcgattcaccgccgccgcattgagcaggccagccagcgccgtaacgatttgatcgagcagattctccgccaggcggaaactcgcaatctgtcggaccgcgagcggcagttgctggagcaactgcacggagacaaacctgcatga

SEQ ID NO: 251269 - DNA, 180 bp, Klebsiella pneumoniae
atggctgccagcggagtccagcccaggtcaacaaccggtaaatcgatcccggtgtggctgaccatttctttggcagccggccccaagctgtcgaccagtaaaccaaagaccagaaagatgccgatgaaacccataccgatggtcagcgccgagcgtaatgcccggctgaaacctgtctga

SEQ ID NO: 251270 - DNA, 300 bp, Klebsiella pneumoniae; identical to SEQ ID NO: 215461

SEQ ID NO: 251271 - DNA, 156 bp, Klebsiella pneumoniae
atggttcgtcgcttgaatgccggggaagtgattcccgagccggttaaacagatcccaaagcttggcggacgtccgctgagtaacgagcagggcttaaacaaaatcgctgaaatccgcgcgaaattcggtttaggcagagggcggaatcatggctag

SEQ ID NO: 251272 - DNA, 198 bp, Klebsiella pneumoniae
gtggttttcggtaaggggagcaagcttaatatgccgatcctgacccggcgtaaaccagatcacttcttctatttccatcgtcggtgtaaagcttaccctgttcgttgctatcagaaagacatccgcagagacaagatgacctggctcgtttgccgccgcatcagtgaaacggcctacctggaccagttcttctggtga

SEQ ID NO: 251273 - DNA, 204 bp, Klebsiella pneumoniae; identical to SEQ ID NO: 235788

SEQ ID NO: 251274 - DNA, 204 bp, Klebsiella pneumoniae
atgatgcttacccttgagcgctgcgaaccctgcgaaggggccggggtggcctgttattccgggtcgactgtcacccacgttgggatcgtggtcagtatcgatggtctgctgcatgtggcggaatgcaatccgggaacgaacgtcacctttctgccgttgccgcggtttaagcggcgatttgtcaaagtggagttctggcaatga

SEQ ID NO: 251275 - DNA, 165 bp, Klebsiella pneumoniae
atgctcaatctactgatggcggcaatgatgggcgtcattatcccaatggttatggtcaagctgggacgcgacccggcggtcggctccagcgtaatgattaccgcgattaccgacaccggcggattctttatttttcttgggctggcgacgctttttctgatgtag

SEQ ID NO: 251276 - DNA, 801 bp, Klebsiella pneumoniae
atgtttgggaaaaaatgtattttctgcaaaaaagacagtagcacaaacaaaataaccaaggaacatgtattccctaagtggttaaaaaaagaactaaaagaaaccagaggcctagtatatacttcgcaatatattgaacatagaaagcctattgacaattccaaattcaaaaaaggactgcatccgtatgatcaagttgtaaatgatgtatgtatggtatgcaacaatggttggatgagtgctttggaaagtagaataaaggacttattgacaaagctaattcatgggcatgatatagttttaaatgaagaacaatgcaataattttgccttatggtcaataaaaaccgcattaatattatcacatttagaaaaggggcgttccacagtaccaccccagcattacacaacaataatgaatggtaacatacctgataatgtatctgtctttataggatattacagacacgacaccgacttcacatcaagattccttagaggccatattaattttgattcaacatccccggatgactctcagacattttatttatcaactttcacaatcggacatctttatgtccatatatcttatttttccgaaatagaaatcttcaaaaaccttcattcctttgacctaggcaaacatttcaaaggcagcattctccgtattacacctgagttccatggcggccgcttagagtatccaacaaaaaacccgataaattacacaaaagaagatatgagcgctctttctatctatatgctaaccggagaagtatctcaaccttatggcacttag

SEQ ID NO: 251277 - DNA, 192 bp, Klebsiella pneumoniae
atgggctgggtacgaacaaaagcattgaccatggagcagccatcggctccttcactgacccgatggctgtttgccggtgtactgatggcgattatcggtgtcctgctctttatcctccatgcctccggcaccgtaaaaattatctcagtgataaatatctggtgggtatccctgatgcctgcaggatgctag

SEQ ID NO: 251278 - DNA, 687 bp, Klebsiella pneumoniae
atggcttggcaaggaattccatatccgtcatttatttcaaatacaattgatgctgggttaacggtcactaaaatacctgagattattgttgatacagggattgggtgggatactatttttgggtctgtacttgccgcttttatcggtgcagccctaccaacagctgtggcatggtacacaattaaaaagaatgatgatttagctgcaacagatagagacaatcaacgtcatatagcagaaatggcttttgattctcaggttttgtctacaaatagacaacaatggattaatacccttcgaagttactgctcagagttcattatgagctgtgaaaaaaataaacgttttcgtagattgcactcagctgaaagagatgaagctaggtggaacaatggaacgaatgaaaaagcaaacgaatactttgctgtggtcgttgattctgagcatcgtatccttgagttggcaactaatatacagttaatgctaaacccccatgaatggacgtcaaaggcaatattgaagtgccaggaaaacatgatctttttgttagaaaatgaaaatatctatatgttttatgaagatgattcagaggtggaaaaagcttaccgaagactaaagaggctgtatattaaatcaactcaaagatgcttaaaaacagaatggaagcgagttaaattaagacaataa

SEQ ID NO: 251279 - DNA, 321 bp, Klebsiella pneumoniae
gtgcatcgcaagctgagcaatcagcttagagacatgctgaggtgtgaagaactccccgccagacttaccggcattcgccgcatagttagaaatcaggaactcgtaggcatcaccaaacagatcaatctggtgctcgttaaaattccccagcttcagcccctccacgcctttcagaacggcggcaagacggctgtttttatcttttacggtgttccccagtcgattgctggtcgtatcgaaatcggcgaacaggcctttgatgtcggcctcagacgggtagccgtaggcagagctttcaatagcaacgaagatactgtttaa

SEQ ID NO: 251280 - DNA, 681 bp, Klebsiella pneumoniae
atgaaacactcccagactcggattaagcagcctgtttccgtggtcttttttcctgatcactttggcaggatcgtaaccacccagacttttcatcaccgtcagcgggactttattcatgaagtgaccagcgttctgacagaatccgcggaagaccaccagcatacttccgcctgggttgatattgacctcaaccaaacccaatgtgacgtctggttccatgaacgctacgcggccgccagacagaactaccgtctggtttgcgcactcggtggcgcgctcataccacatcgtgtcgagcgattgcggaatgagcataacggtggttacaccacgcgcttgctctcggatagccgcctctatccagggggttattttggagtagggcgggttgagaaaggccaccgtaccaggatcaccccagctggacttaagagcatctcgttccacacctatgtagctcggaagaagcgcgttttctttgttacaggcgacatcaacatcaaacgtaatgccgagatatcgctgaatggcgacaaacaaccatttcggtgtgcgccaaaggtctcgaagagaggcatctcgctctcgctttttgattttttttttcggctgctatcattttacaacccaataggtaagtacttacctattttttcatgtcatcttacgaatggcaaataa

SEQ ID NO: 251281 - DNA, 1251 bp, Klebsiella pneumoniae
atgagtgggttgaactttctgaacaaattgctggatggagttgatgttgaatggttgtcactgggagagcttggcgatttcatacgtggcaatggactacagaaaaaagatttcgttgaaagtggttttccagcaatacattacggtcagatttatacaaggtatgggttatcagctgataaaacatttacttacgtgcttccagaactagccaataagctgagaaaggctcaaaaaaatgacttattgctagcaacaacatcagaaaacgatgaagatgtagtaaaacctttagcctggcttggcgataacgttgctatttccggagatatgatgttatttcgccacgagcaaaatgttaaatatctcgcctattttttccagtccgaaatatttcaaacacaaaaaatgaaatatattactggagctaaagtccgacgggtttccagtgacgatttatctaaaattaaaattccaatccccagttcaaacaatccagaaaagtctctgaccatccagtctgaaatcgtccggattctggataagtttactgcacttacagctgaacttacagctgaacttaccatgcgcaaaaagcagtacaactactatcgtgataaattgctgagttttgaagagggtgaggttgagtggaagacgctgggagatattggtgatgtaaggatgtgcaagcgcatcctcaagaatgagactcagcctgaaggggatgtgccattctataaaattggcacgtttggaaagaaagcgaatgcatttatttccagggatgtatttgaggcttacaagaacaagtactcctttccaaaaaaaggtgatattctaatttctgcatcagggaccatagggcgtacggttatatatgacggagagcctgcttattttcaggatagcaatattgtctggctagaaaacgacgaaagtattgttactaataagtatctctggcacttctataaaatcgccaagtgggctgtttcagaaggtggaacaatagacagactctataatgacaacatcaggaaaacgaagattatcgtaccgtacccgagcgattccagtaaatcgctcgcggagcaaaaccgtgtggttgccatcctcgacaaattcgatgctctgaccagttcaatcagtgaaggcctacctcgcgaaatcgagctacgacaaaaacagtacgaatactatcgtgacttgctgttcagcttcccgagaccagaaaccgccagcaactga

SEQ ID NO: 251282 - DNA, 2082 bp, Klebsiella pneumoniae
atgaccccatttctgatttgtaagtttgaaaaaccaacgctcaccaatcttgtaaaagaatcgttcggttctgaatttcctgaaatctacaataaaaaacaaatcgattatatctggcgctacctaagggatttgagttgccagaccgtgctgctggaatcagaatatatcgatcatgattacctcgaagactatacacgatattatgtcagaggatttaataactcaggctataaatgcgcgaggttacacttctttagttctgagtttgaccatgaaaacatcgatctgatgttgcaatttggcaagactcaagtgcatgagatgctcagacaacattatcttgggtttgtcatcattaagcccctgcctaaaacctttattggcagaacctgcctgaaaatctatgactcgctgcaaaacagtgaagaaaagaccctgctgacacgccagtatgaagccagcctctttggcatcaatttggtggtggaaagcatcgcgtttcaggagcaggataaagttgtcgcagcctgctcatcaacctcggtgtggtctgctctgcatgccattccctggaagaaaaccagagatattccttcacgcagtgaaatcacctcaaatgcgataaaccacattgacggttctagcaatagttttcccaacaaagaactgactaataaacagatcctcagagccatcgattctgaaaagctccgccacaatttttcggacctgcgcaatttcagctgggatgagttgctgaagttaatcaaaatccacatcgacagtgcgctgccgctgattctgggcgctcaggtctacagtattgatgacgataagaccctgatacatcaagggggccatgcagtcactgtgctagggtataaagaacagcgggaaaaacccgccctgtacgttcatgatgaccgactgggtccctttgtccgtgcaagctttatgatgctcgacgatttcattcgcccggacgatttatcagctgtctggggcgttataattcaggaaaaaaatgatcaagggggctggaaatcgccgcatgaagtgctgatccccaacagcctgatctcgctgaaacatccaaaggtgagaatcccctacacctacccactgaacacctgtgaactcatcaaaagcatgttccagcagttcgtggagaccgcaataaataatcccgaggaaaagcttgaaacggaattaatctattcaattaaattacaagaactgtcaagcatcaaagagtcgtatagcacttttaatttcagcgctgagggccggaatttatcagaaaacatttccgacctgcaaaaagatcgagctgattttcttagtaaaaataatgcccgattccagtgggtgtgttcattttcatttacggataagacacctgtttttgatctgctttttgatgcgacagatattccccagggcagtgctgtcacggcgattttggagaaaaacaagcaggcatccacgttgctttaccaggcccttgacgttgcttcgcctgaaattgcggtaaactttctcaacaatgagcatttttacagcccattgaaaaacatgctcagtgtaaaaaatacccacatcagtatgctcactgcaaaagacattggcattgaggtatggcttgatcaaacttatggaaaaatacgtgctcctaaatacctcaaggtagaagagtttaatgcggatggcatcgcggacaatgcttctgtccaaaaattttatggtgtggccaacatcaccttatcagagtttataaaaacagccccgttaaacaaagagggccatccacagctcatctgggctatcgcccatgatggagctttgctcatgggcattgagtttgagaatcagggtcaccccttgctgaccggctttaaacctgctcgtattgccggcgaactcttcttaaaggacggcgaatactatatcaactcaaaatctggccgatatagccgaggttatgccaacactgataccttgctgtgtaatgccatcaaaaaattcaggtctacattcagcgaagaaaaaattcaaatgatccctatccctcatacgtaa

SEQ ID NO: 251283 - DNA, 159 bp, Klebsiella pneumoniae
atgagcctgtccgaactttatgaagtagccgaaaacgttacttttgggcctgcagaaaaccgggcgcttgaagaaaagctgcgtgaaattgagcatgaagccaatgcccgtagtaaaatcatgacggaagaatttctgtctcgctcatacagtctttaa

SEQ ID NO: 251284 - DNA, 480 bp, Klebsiella pneumoniae
ttgaataagattattgttgaaaatcaatatgtgacggtgttttttaatgaatccgggcacttgcgtataagccaaaagcatggcggtgttgttgttattcctgaatgtaatgggaagtacgcattaatccaacactcaagaaatggtgttgtgcttattgagtttccaagagggtttattgaaaatggcgaatctcatatagatggcgccgaacgcgaacttagagaagaattgaatctcgtttcggtcaatagctatttgttaggtgaattagttactgactcaggattgattgctgacaatgttcgggctgttatttgtgaagtgaaagatacatctcaattatcattgcaatcaagcgagggtgttataggttgtgattattatacttatgatgaagttattgcgcttgtaaaaaatgggaaggttaaagataatttcaccctggcctcattaatgctattacaggctaacaggtaa

SEQ ID NO: 251285 - DNA, 1605 bp, Klebsiella pneumoniae
atgaagattaaactctcaatatataaagcaaaaagattcaatgatgatattgaaaaagttttgaatttggagagagtgagaaatccgattgagttcaacatagatgaggctagggtgtatttgtatgcaaaacaattcttagatcccaagcctcctgagtggacaactttatttacaagccaaaagccagaattggatcataatttcttcgggaaaaatagtagcactggtgcagtcttggttgttgaaatgaataactcaagatatctaattcctttcgggacagggcatcacttaattaatgataatagtattgtcaaaggttttggtcttaaaactacacttaattgtattgaacataacaaaattcgtagtttggataaaggcagccataatgaaacaaatctattaactcgtagtcaaagtagtaaagaggttgatatttttaaccttaaaattgattccgagatggatatacttaccactctgacagggacttccactgaagatgttttaggtaataaaataacgggtaaagatgcatttgtaattatgcctgatattgacctgaaatccatcccggagttgttaaataaaatagactccatttattctcagcctctccctgaagagtttgaatgggttaataatataaaagaggcagatgaagcagaagttgagatacttgattcaattctggtcgatttaataaaagcaaaagattttaatgacatatggctgggtgaacctgaaattgtagattgggagaatcagataggctattgttttgagaagcggcaaagaagcatgatttatgaaagtttgtcggttagtcatatttgtgagtattttgaaagcaaaaagattgaaattactttaaatgatctcaaaggaagcagtttgcatgttttagatgcagattatcagtctttaaaaaaatggtctctttatagatgtctgtatgctgagataaaggaaggtgatcaaaactatatcctgagagattcaatttggtacgtggctgatagaaagtttgtttccaccattgataatgaaattaaacgaattaagctgtatgaggaagccgacaaattcccgatttattcttataaaagagaagagcaatacaataaagaaacttgtcttgctgatcaaagctttactcatatggatcaaaagttcatatatcatggtggtgggcgaagtaaaattgaattttgcgatattattagaggtgcaactgattttattcatgtgaaatattatagcggtgcgcaaagcatgagccatctattttcacaaggatttataagctctgaacttttcataagcgattctgaatttcgatggaagcttaatgaaaaattgccagcgcatataaaattagctgaccatacattaaggccagaggctcagaaatacaaaatagttttcgcgattgccacaagtaaaaacctcccagatgacttgcctttgttttctaagataaatttgaagaattttaataaaactatttctaatttcggatacgaagttaggatctgcaagatagatgtagaccccacaatttataaaaagaaaatttgtaaaccccaaataaaataa

SEQ ID NO: 251286 - DNA, 321 bp, Klebsiella pneumoniae
atgtctttatggaaccaacaggaacccgtaattcttatacaggttgaagatggtgctaatacgatagggctaagcctgtataattttctaaatgttttaaacattaaccagatttggttgtatggcactagttgtcagtttggtaagcggtggcttgaaatgattacacgacacgtgacgggaaatccgtttgatccggctgatactatcaaaaagaacgcaacacggattgagtttggccagttaacgcgtcagcagcaaatcatgggtatcgcctggctgtatgttgaagaaagcctcgccgctttcagggcttgttaa

SEQ ID NO: 251287 - DNA, 1380 bp, Klebsiella pneumoniae
atgaatacaacgcatagcatgagttataagttgtccctcattgcgtcagtcgcgggtttattatatggctttgattcagcagtcattgcgggtgcaataacgcatctgagccactatttttctctcgacgcgatgggcaccggctgggccgtgtcatcggtggtgctgggctttatgattggcgcctttagcggtcagtttatcaccaactctctgggcagaaaaaaagcgctaatccttaccggcgtactggtgtttctcgccgggatcttcaccgccttcccttacaattttacgatgtttatctttttccggatcgtcggcggtattggcgtagggctgggttcagcgacagcacctgtttatatcggtgaaattgccgcgcaaaaaattcgtggcaagacgctgggcttttaccagatgatgatcgcttttggcatccttttggtttatatggtgaacgccctggtcgccagctggggcagcgatccgcaatgggctacgcagtatgcctggcgctatatgctgggagccatgtcggtgcccggcttgctgtttatgatactggctttctggttacccgaatcaccacggtggttaataaaaaatcatcgtgaagcgcaggctggcgacattatgaaaaccctgtatggccagaattttgacagcccgacggccattcaagagataaaaagtacctttcaccaacacgccgctctcgctccccgcgaaagtattctgtccaaaaaatacagacgagtatcactgaccatattggcaatggcattgctggcaaatttatgcggtatcaatgccgttttatattacggtaacgtgctcttggaaaatatcggtatcgccagcgaaaaaacagcctattaccaacaggtcatcatcggtattgccttctttgccgctgcggtctgggccgtttatcgggtcgaaaagtatggtcgtcgtaagctgctcattgtgggatcgttaatgtgctttctttcgatcacgttgctgggaatattaatctggatggggatgacaagcatctttatgctggtcatcatgatcgtttatatcctattcttcggcggcaccattggccccattttatggattattattcccgaactggcccccaacatgattcgcgataagctgatgtcatgggccacgctgcttatctggagcggcagttttattgtctcgcaaacctttcccatgttgacccataacgaaacgctgaacaggttatttaacggtagtttcccgttctttttgtatggcctgtgttgctttatgtggtttttgctgaatctcttttgcgtcgcagagacgaaagacaaatcgctggaacaaatcagcgctgatatgagtaaagcctga

SEQ ID NO: 251288 - DNA, 516 bp, Klebsiella pneumoniae
atgagacctggtaaaatcctacatccgcaggttgccgaagccttagccagtttagggcacggcgatattattttagtcactgatgccggcgcacctattcctccaggcataaaaagaatcgatttggcattttgtgctggcagcgtcgatctaattgaaattctgcgcgtgctaagaggcgaaatttttattgaaaatgttatctttgctgaggaagtacctgagaataaccctaacctcttacagcgcgtaaccgacatatttaccggttccggtgctgactttttgctcatacctcatcagaaacttgtgacagaaatctaccacagcgccagggtgattattcgctctggttcgttaatgccgtggggaaatttcgcactggtcgccagtaccgatcctgatgcgtggttcgacgactccatgaaaattattcctgaatacgttgaacgctcagcgaagataaaaaatggagccgtacctgtcattaaaaaatattcaacggtgacaaaatga

SEQ ID NO: 251289 - DNA, 1383 bp, Klebsiella pneumoniae
atggttagtcattcacaagtcacagccagaaacacctggatgcgtaatgttctgttaattgcagtcgttaccgccgtcggaggctttctgtttggttttgataacggcagcatttcaggttcggtaggatttttacagagtaaatttgaactggatgcagatagcatcggctgggttacatcgtccatcattgtcggctgtattattggggtggcgcttgccggcccactttctgatgcaataggaagaaaaaaggtcctgctgctgaccgcgctgatttttatctttggtgtgctgggagaggcgctcgctacctcgccggagatgctggtctggtttcgaatcatcgtgggcatcggtatcggggtagagacgaccatcgccccgctctatatcgccgaggtttcaccggcgcatattcgcggacggctggtctcgctgaaccagctttttaactgtattggcaacctggcgatattctccgtttccgccattatcgccagttacgccagtgaaatgtggaatatcgaatacggctggcgggtgattttcgcaagcggcatcttgcctgccattctttttctgatgctgctggtctgggtaccggaaagcccgcgctggctggtgcgcaaggggcgtacagaacagggtttaaatattctgcgtaaaataaatcctgacgaagcgacagccagagagcaaattgaagcgattaaacataccctgcaaaatgaaggtacttcccgactgcgcgaactgttttcccctcgcctgcgccgggcgctgatagtcggtttctgcgttgccctcttccagcaaattaccggtattaacgccattttttactacgcgccggaaatttttaaaacggcaggcatggatatcagcggagcaatgtcgtttaccgttcttatcggtatgacgctggtgatcgcaacgctggtctccatgtggatcattgataaagttggacggcgttcgttgcttatttttggttcggcaggaatggccgtcacccttagctgtacgggtatactgtttcgagccagtgaaacccagacgacgctgttactgatttgcatcctggcctatgtcgctatcttcgccgtctcttatggcaccgtagcctacgtaattatttccgagatcttccctattcacatgcgcggtattgcagtctcgattgcaacctttgccctctggggcggtaacttttttgtttcccgcttctttccggtactggtggaaaatattagcgccgcgaacaccttttttatcttcgcgggcatttcagtcattgcctttattttcgttgtagcaatggtgccggagacgaaaggaaaaacactggaggagattgaagtggagctgcatgctaaataa

SEQ ID NO: 251290 - DNA, 966 bp, Klebsiella pneumoniae
atgaacgtcatcatcgcctcacttaatacggctattgaacggctgctgctggtggataaacagcagcccggcgaggttcaccgcatgctggatgataaaacgctggctgggggaaaaggggtcaatgtcgcgcgcgttatgcgccagttgggtacctttctgccggatgcgccgacgccgcggctgctagggtttctcggcggcgcaacggggcggctgtgccgcgaactgctggcggaggaagcgctggaaggatgctggtgtgaaatcgcgggcagcacgcgcatttgcgaagtcgtaaccgaggtacaggcaccggaacgagcaagtgtctataacgccctcggcccggccatcacaccggtcgagcatcaggcgctgcactgcatgctggtacaggagttgcctcatgccagcgcgcttgtctgtaccggttcactggcaaaaaacctgctgccggacgagtacggtcgctggataaccctcgcccgcgccgctggcgtgctgtcgttgctggatacccacggcacggcgctgttgcagtctgccgtttcactgccggatatcatcaaaatcaaccgtgatgaactgcgtcaggccagtgcggcctcctcctcagcattgccgcaggcctggctggaccaaggcgtgcgctgcgtgattatcaccgatggtcagcggcctacccttgcgctgacgcctgatggtgattatgagatctcctctccggaagtgacgacggtcagcccggtcggctcaggagatgcctattgcgccggtctcgtcagcagccttctggcccgtccgcaagcccgatggacagaacatctcacgctggctgcagcctgtggcgcagccaatgccgccagcccgacagccggcctcgccgccggtctgaatttgactgaattagaacaacgttgcgcggtacgcgctgtttcgacgtcgccacgctcacccgcctga

SEQ ID NO: 251291 - DNA, 1344 bp, Klebsiella pneumoniae
atgtggtttctcggtatagatatcggcacaacacatataaaaatcatcggcatcagcgaggaaggaacgtttttgccggtgaaaaaatgccgcacgccggtgatgcagcatgacggactgacatttcacgatgcatccgtgttctggcagagcctgaatacacttatcgaaaattactcgcgcgaagaagcacgacactgcggccccctggccgcagtgtcggtgggcacgttcggccaggaggagtccgtcgcggtaaactccagtggggaaattatctatccttccctagcgtggtgggaaaattaccccgtcgcggcgctggatacagacctccaccagtggctggacagccatgagcattacgccatttcaggtatgcggtcgcgccctaatcagagccctgctcgtctgaactggatacgtacacaccacccggatatctggcggcagatcgatcgctgggtggatttcggcagctacgttatgtggcaactgaccggcgaatggcgcgcggcaacctcgcagatcacccattcacaatgcttcgatcttaaaagcatgcggccccaccagccaacgttagagcggctgggtttccctgcaacgctcttcccgcagttggcggacactggcgaatgctgcggggagatccgcccggaatcgctatcgggcgtggcgctctgccagggcgccagcgtctttgtgggcggacacgatcagatcgtcggcgcttgggcggtgcaaaatcaccagccgaccaacgtattcgactcgatagggacatcggaatatctcatggtattaacaccgcatttccccgataccgccgccgcatggcgactcggcgtggatatcgaacgcacctggaaagccggggagtttgtcatgggctgtgccaccccttccggcaagattatccagacacttgcggagctgctctatcaggggaattacgatcggctgtttcaggatcttcttgccgaagcggttccggcagccgtctcggtttctgttaacgaagatgaaacacaggggctgttttccctgacccaactgcatgccggcgtcaggccagccgacatagtgcaggccacgctgaaccatatcgccgaccgcgcatttcgtctgctgactcatatgggggaaattggcgggatactcccgcaggatgcggtgctgatgggatcgttgttccagcgccaggagatgctgcagcaccgtaaacagcgctggaacatgccgctttttgtcagtcaactggctgaacctgtcgccacgggcgccgccatgatcgcccgtgaaagctggctgattgcaacccatcaggagagtcaactatga

SEQ ID NO: 251292 - DNA, 1398 bp, Klebsiella pneumoniae
atgtctgacatctctcatctcgtcgccgccctgaaagctgccgttccggaatcgcagattctgaccgaccgcgatacactacaggcgtccagccatgatacctggcccctgtccaccaaactcaggcgcttaggatgccatgattatcaggccgatattgtggtaaaagtcactgacgagcaccagatccagcaggtactggcgctggcgacggcacatgacacgccggtcacgccacgggcgctcgcctcctccgtgactgggcagccgctaccgacgcgtggtgggatcgtactggatttaaccggcatgacgcatcaccgggatatcaataccacgaacctgaccgtggaagtgtccgcaggctataacggcggtcagcttgaagatgaactgcagcagatggggtggacgcttggccattcgccgcagtccctgtaccagtccagcgtgggcggctggctctctacccttgcgaccggtcaattttcctcttattacggcggtattgaggatctgattaccgcctatacggtcatcctcgccacgggtgaaaagatacgccttaaggcttccccgcgcgccgccatgggccccgatctccgccagcttttcatcggcgcggaaggtacactgggtatcgtcacctcggtacagttaaaaatgtttcctctgccgcaaacgcgacttttcgattcgcttgagctcccctccgtcgaagcgggcctgaccattatgcgcgaacaggcgatggccgggcttcgtcccttcctgctgcgtctgtatgatacaaatgaagcccgccacgccatgcaaaatccgcggcaggataaaccggtgatgttcctgggcacccaaggcgttgagactgttgcccacgcagaaatggacgcctttatggcgattgtccaccgccacggcggcaaatccgtgggcagcgaaggggtactgaaatggatggatcgccgttttgacttctccaccgtcgagaacctgcttgactccaccggcggctttgccgaaaccatcgaaattgcgcacacttgggacggcatcgccagcctttatcacgacctgaataaaatgctgacgccgctggcgggtgaagtcttgtcgcatttctcccacgtctatccccagggcacctccatgtacatgatcctgctcgggcgagaagagtccgatgccgcagcagtggagaaattacggaccatctggcgcgaaacaatgcgcgtctgcctcgaacacaatgcggaactgtcgcaccatcatggcggcggactggttcgctcgccgtatgcccgtgaatcgctgggatcggcgcatctgctgctgcgccgattaaaacaggcgctcgatccgaacggcgttcttaatccaggcaaactggggttataa

SEQ ID NO: 251293 - DNA, 852 bp, Klebsiella pneumoniae
atggatacccggactggcaaggctattcgtttaggacgtattttacgcccggaaaccggacgtgcggtggtggtggcggcgtcacatggggtaatggcgggtccgccgtcaggattaaagacacgcagcgaaatcgaaaatgtgtttgcgcagctccgtcttgctgatggcgtgatggtgtcacccggcatgatcccgctggttgagcagacatatgttggccgtgaccggcccggttttgtgctgcatctggactggaaaaaccacgcacgctccatctacacgcctggtaaggatggcaggggcgagggcgtgctggcgcagctggcggaaatcagtgacgtggccgccagtggtattgatgccgtgatgacctatatgtacctgggacagaaagacacggcgctggagcaggcagagatagcgcgtaatacgcatatcgtgcgtgaatgtgagcggcacggtattgcggtgattattgagccgcgctcagcactggaaggggtggatcctgatgcgctcagtgcgaaggtgatgagcatgtactgccgtatcgcagcggatatcggagcggatttagtgaaagcgctgtggcctggttcggtggaggattttgctgcagtaacaagcacctgttatactccggttctgctggcgggtggagcgggaggagaagatcctcattcgacactgaagctggcggcagatgccatgcaggcgggggcaagcggggtaatgtttggtcgacgtattttccgggcgcagcagccagcagaagtgctgcgcgcgcttaatgcagtagtgcatgaggggcagagcgtggagcaggcgttgcagtttataaatcagtaa

SEQ ID NO: 251294 - DNA, 963 bp, Klebsiella pneumoniae
atgacggttattgcgcataatatgaagcaagtctctccggtagcatttattgcccgtacaattattacgcttggtctctccgggcggcttcctacaacctcttggtttcaggaagtactggaaataggttctggtacggtacagaaagcgctgcaagagttaaagaagtctggcgcagtaacacttgtttcccgcggtcaccagggaactttcgtggtctcctggaactttcccctgctatggagcgccgcgcgtatccccccggttcatatgttattaccccccagaggctcccttgaggcaacgcaggtggcttccgccctggttgagcagtgtggtcactggggggcagtgaccaccgtcggttatctgcgcggtgcgcgttcgcgtctgcaggcctttgatgaagatgaggctgatattgttcttttatcgtcagggtcagcgcaggtgctgatggcaaacgctgctgaagaggggtttgagctctttgaagtgggtaatggcagctattatcgacctggcagccttgttgtggttgaaaaatcagaaggagccgttacaacgcgcccgcgcgtcggtattgactttcattccagcgatcatcaaagactgacctatgctcagtttcctgaagcgcagtatgattatgtcgaggtggattttacccttttgccccgagctgtatttctgggcgagattgacactggcgtctggcaccaggagccttctcttatccccctggataaaattggcctgacagtcaggccactggatgagcctgctgcgctcagcatggcggaaactatttccactgcggttctggtggtgcgtgcctcctcgccagtggcccaactcctgcgacaaattgattttcaggaaatcaaaaagcaggccgttctgccgttaaatgtctctgaaacgagtttaggccggcttcctgatatcttgcgttttcgataa

SEQ ID NO: 251295 - DNA, 732 bp, Klebsiella pneumoniae
atgttttcaaaatcaaatcgaacatacaagtatggcgaccaaccgataagaatcactactgtgcgagtggttgaggaacagttcggaggggcggcaactgctaagcaagtggatgattaccttagaggaatattcccacactataaagatgatacccgtcttaacctaatagttaacacggttaattgcaatcggagctattggagtttcaacaaaacagccagacgcacagatgatgtgactcatcgccatcatcaatatgatcgattattcaagcgcggaaacatttttgaaatctatcaaccctctattcatggcatatgggagttatatcaggatcagcaaggaaaatggtgttaccgtcaagtgaagtcggagtttgaagaagcagtagaggctgctgctaaattaccctcatctacacgggaacagattttagcaacggaaagtaaaactccagtgctaaccgaagtaacaacacgagtttataagcgaagcccgtatgtagttgccgaagttcttttaagggctaagggtaagtgccaaagctgtaagcgtgatgcgcctttcttgaaagaagatggtacaccatttctcgaagttcaccacattgagtggctttctaaaggcggggaagattccgtggaaaatgctatagcattgtgtcctaattgccataggcaagctcattatggtgctttagaattagtggcggttaacaagcaaggttga

SEQ ID NO: 251296 - DNA, 153 bp, Klebsiella pneumoniae
atgttccagatctatataaatatcacccgaaatttcatcatctggattttcgaagagccgtccgtaactcgtaaggcctcctattatatcgccactgagcgtggcgaggttatcgggaagttatgttcaaccttgcttgttaaccgccactaa

SEQ ID NO: 251297 - DNA, 462 bp, Klebsiella pneumoniae; identical to SEQ ID NO: 195657

SEQ ID NO: 251298 - DNA, 126 bp, Klebsiella pneumoniae
atgtccgagcatcacgccgtcgaaaccatcgtggtcctcaaatcgatacaagatttccagcccgaggccgtctccataaaaacgaataagcgcttctatatcgtcggtgggacgggcgacgcgtag

SEQ ID NO: 251299 - DNA, 438 bp, Klebsiella pneumoniae; identical to SEQ ID NO: 195659

SEQ ID NO: 251300 - DNA, 885 bp, Klebsiella pneumoniae; identical to SEQ ID NO: 195660

SEQ ID NO: 251301 - DNA, 789 bp, Klebsiella pneumoniae; identical to SEQ ID NO: 195661

SEQ ID NO: 251302 - DNA, 426 bp, Klebsiella pneumoniae; identical to SEQ ID NO: 195662

SEQ ID NO: 251303 - DNA, 900 bp, Klebsiella pneumoniae; identical to SEQ ID NO: 195663

SEQ ID NO: 251304 - DNA, 549 bp, Klebsiella pneumoniae; identical to SEQ ID NO: 195664

SEQ ID NO: 251305 - DNA, 327 bp, Klebsiella pneumoniae; identical to SEQ ID NO: 195665

SEQ ID NO: 251306 - DNA, 840 bp, Klebsiella pneumoniae; identical to SEQ ID NO: 195666

SEQ ID NO: 251307 - DNA, 363 bp, Klebsiella pneumoniae; identical to SEQ ID NO: 195667

SEQ ID NO: 251308 - DNA, 852 bp, Klebsiella pneumoniae; identical to SEQ ID NO: 195668

SEQ ID NO: 251309 - DNA, 420 bp, Klebsiella pneumoniae; identical to SEQ ID NO: 195669

SEQ ID NO: 251310 - DNA, 963 bp, Klebsiella pneumoniae
atgattgccagcgcaacattcattggcgctatcagcatcgttggctggctcgattgggcaacgccgccagttctgcttttcctggtaatcctgttctctctggccggcccgttgggcgcggcgggtacgcgaacgctgttgcctcgcctggtgccctcccatgcgctcgatcgtgcgaatgcgctcgatacagcgatctatgccgtcgtcgatgtcgtcgggcccgcgatggccggcatcatcgtcgcttggctcgggcctgaaagcgcgatgtcggtgatctccttctcttacgccgctgccgccatctgcctgtcctttgtaccgctccttcccggattggcgtccagacagatttcgttcatgcaacagacagtggaaggtattcagatcgtcgccagacaaccgacgctgcgcggcctcgccatctcctattcgatgtaccaggtcacctggggcgtgctctatgttgtggtcccagttttcgtcgccagccattatgacgcctcggttggtagctcagtgacaggcttcctgtgggctgcgatggggattgctggcggaattggcgcacttctcgcaggacacctgcgaacgaccggtcgcgagcgtcacattatggcgatcggaatggtcattacggccttggcggcatggccggtggctgcaaagtttggttttggcggacttgccatcggccttatgcttgccggcgtcatgtccggtccgatcgatgttgctcttctgacgcttcgccagcgtcgaaccgatccgcaacagctcggccgcgtcatgtcgatttcgatgagcctgaatctggccggtttccctctcggttccgccttggccggcatggtaattacgtcgtccttgtccgcaactttcgttctggcaggcatcgcctctatcgttgcggctatcgcaacgatatcgatcccgtccgatataaaatccgttgcctga

SEQ ID NO: 251311 - DNA, 210 bp, Klebsiella pneumoniae; identical to SEQ ID NO: 195671

SEQ ID NO: 251312 - DNA, 465 bp, Klebsiella pneumoniae; identical to SEQ ID NO: 195672

SEQ ID NO: 251313 - DNA, 615 bp, Klebsiella pneumoniae; identical to SEQ ID NO: 195673

SEQ ID NO: 251314 - DNA, 843 bp, Klebsiella pneumoniae
atgagcctgttggtagttatcgccgcgctgttgctggctggcgcgctggggctgctgtacttcccgtggtcgggcaaaggggcggtagaccgcgatgccctcaaccgcgccctgtaccagtcgcgcctgcaggagctggcgcaggagcgcggcgaggacaacccggcgctggtcgtcgaactgcagcgcaccctgctgacggatattccgccccaggcacagtctggcgaacggccgctacgccgctgggcgctgcttccgggcgcgctgctgctggtggtcctgagtctgggcctgtatctgaaaaccagcgatattggtcaggtgctgctctggcagcaggctgaacgacattttcctgcgctgttgcagcaggttaaggacccgacggcggcgccgctgcgaatggatgaactggcggagctgcggcttggcctgcgcagccacctgcaggatacgccgaacgacctcgccggctggcagctgcttgggcggctgggcctgttgttaaacgatggcgagacggcgatcggcgcctttggccgggcgcatgctctgtcgggggatgacccggcggcggctttcgattacgccagcgcgctggtgcgggcgggggatagcggtcaggttcggatgggcgagctgctgctgcgtgacctgcatcagcggcagccgaacagcctgccggtgctggagatgctggccctgagcgcggtgcgcaatgaagattaccccgaggccgtggcggccctgcaggcgttgctggcccggctaccgaaaggggatgcgcggcgcgcggcgatcgtccgccagctggcgcaagcgcagcagcaggcgcagtaa

SEQ ID NO: 251315 - DNA, 459 bp, Klebsiella pneumoniae
atgagaggggtaatggtcatcctgctggcgctgatgctgaccggccaggcgtgggccgccatcgatacctggcagtttaaggatgaggcccaggagcaggccttccgcgagatcacctcccaactacgctgccctaaatgccagaacaacagcatcgccgactcaaacgcgatgattgccgctgatatgcggcagaaggtgtacgagctgatgcagcagggtaaaacgaaagggcagatcgttgactatatggtggcccgctacggtcattttgtcagctatgagccgccgctgaccgcgggcacggtgctgctgtggctggggccggggctgttcgtgctggcgggcgcgggagtgattatcgcccgcgcgcgccgtcgcgacattcctgacgcggcgctcagcgtcgaagagcgccagcggctggcggcattattgcaagaaggaaaagaacgatga

SEQ ID NO: 251316 - DNA, 555 bp, Klebsiella pneumoniae
atgaaccggaagctactgtttatcccgctggtgctgtttctggcgctggccgccgcgctgttctggcaactgatgcgcaacgccgagggcgatgacccgacgaccctcgagtcggcgctgattggcaaaccgctgccggaatttcgccttgaagcgctgaatatccccggtcagacgctggaccgacggacgctgattgacggcaagccgctgctgctcaacgtctgggccacctggtgtccaacctgtcgcgccgagcatcagtttctcaacggcctggcgcagcagggcgtgcgggtggtggggatgaactacaaagacgatcgccagaaggcgatgagctggctgcagcgcctgggtaatccctacaggctgagcctctacgacggcaacggcatgcttggcctggatctcggggtctatggcgcgccggagacgtttctcatcgacggtcagggcattatccgctggcggcacgccggcgacctgaacgaacgggtgtggcgcgaggagctccagccgctgtgggatcaatacaaccggagggcgggttga

SEQ ID NO: 251317 - DNA, 1953 bp, Klebsiella pneumoniae
atgatgccggagctgggcaactttttattgtgtctggcggcggggctggcgctgctcctgagcgtctatcccctgtggggcgcggcgcggcaggatcggcggctgatggccctggcgcggccgctggcctgtgggctattcgcctgtatcggcggcgccttcctgctgctggtgcacgcctttgtggtcaatgactttaccgtccgctacgtggcggaaaactccaacagcgcgctgccggtgtggtatcgggtggcggcaacctggggggcgcacgagggctcgctgctgctgtgggttctgctgctcagcgtctggaccttcgccgtcgccatcttcagccgccggatgccgctcgacgccgtcgcccgggtgctggcggtgatggggatgatcgcctttggtttcctgctgtttatcctcttcacctccaatccgttcagccgcggcctgccgcagtaccccattgatggccgcgaccttaatccactgctgcaggatatcggcatgattttccatccgccgatcctctatatgggttatgtcggcttctcggtggctttcgccttcgccatcgcctcgctgctggcgggccggctggatactgcctgggcgcgctggtcgcgtccctggacccaggcggcatggatgttcctcaccctcggcatcgtgctgggctcggcgtgggcatactacgaactgggctggggcggctggtggttctgggacccggtggaaaacgcctcgtttatgccgtggctggtgggaaccgcgctgctgcactccctggcggtaaccgagaagcggggcagcttccgcgcctggacggtgctgctggccatcgccgccttctccctgtgcctgctgggcaccttcctggtgcgctccggggtgctggtttcggtgcatgccttcgcctcggatccgtcgcgcgggctgtttattctggtactgctgattgtcgccatcggcgggtcgctgctgctgtacgccctgaagggcggccgggtgcgggcgcgggtggaacatacgctgtggtcgcgcgagtcgttcctgcttggcaacaatatcttgctgatggccgcgatgctggtggtgctcctcgggacgctgctgccgctggtgcataaagagctgggcctcggcagcatctccatcggcgagccgttctttaacaccatgttcaccgccctgatggcgccgtttgcgctgctgctggggctgggaccgctgatccgctggcggcgcgatgacgtcgccaggcagattaagcgcctgattatcgctctgctggtgacgttgtcactttctctggcgctgccgtggctgctgcaggaccgtatcaccgccatggcggtcataggcctgatgatggccctgtgggtgctgatcttcgccctgatggaggttcacgaacgggccacccatcgccacggcttctggcgcggcctgcgcacgctgacccgcagccagtgggggatggtgctcggtcacgtcggcgtggcggtgaccgttatcggcatcaccttcagccagaactacagcgtggagcgcgatgtacggatgcgccccggcgacagcatcgatatccaccgctatcactttgtgtttaacggcgtgcgcaatatcgtcggccccaactggaccggcggcgaaggcattatcgccgtgacccgcaacggccgcccggaagcgacgctgtatgccgagaaacgcttttacaccgccagccggatgatgatgaccgaggcggcgatcagcggcgggctgacccgcgatctgtacgccgcgctgggggaagagctgagcgacggcagctgggcggtgcgtctgtactataaaccgttcgttcgctggatctggtacggcggggtgctgatggccctcggcggtctgtgctgcatgctcgatccgcgctaccggatgcgtaagaagctgcaggaggcctcatga

SEQ ID NO: 251318 - DNA, 459 bp, Klebsiella pneumoniae
atgcaagcgcgtcgtaaaacccggctgtatatcgtgctggcggtgctcgccggcctcgggctaaccgtcagcctgacgctgtacgccctgagcagcaatatcgatctgttctacaccccgggggaaattatctacggtaaaacggaaacccgggcgctaccccataccgggcagcgcctgcgggtggggggctacgttcagccgggctccctgcagcgcgacccgcaaaccctcgacgtgcgctttaagctgtatgacgcccgcggggtggtggacgtcagctataagggcattctgccggacctgtttcgtgaagggcagggcgtggtggcccagggcgtgctggacggcgagcggcatattaccgcccagcaggtgctggccaaacatgatgaaaattacacgccgccggaggtgaaaaacgccatgacgccggagaaaacggggacgcagccatga

SEQ ID NO: 251319 - DNA, 231 bp, Klebsiella pneumoniae
atgagccccgccttttcgtctttcgccgccttcctgaatatgggcggctatgccgtgtacgtctggctggcggtggccgtgaccgtcgccgcctttggcctgctgacggtgcacactctgtgggcgcggcgggcgctgttccatgaggtgcgacgccagcaggcgcgcgagcggcggatcgctgccgcccgcgaacatgacaaggaggccgcggatgcaagcgcgtcgtaa

SEQ ID NO: 251320 - DNA, 738 bp, Klebsiella pneumoniae
atgtggaaagcgttacatcaactggcgatccccgagcggctgtaccgcctgtgcggatgctggatcccctggctggcggcgttgagcgcgctgttgctggtcatcggcctggggtggggctttggcttcgcccccgcggactatcagcagggggaaagctaccggatcatgtaccttcacgtcccggcggcgatgtggtcgatggggctgtacctggcgatggccgtcgcggccttcgtcggggtggtctggcagatcaaaatggccgatctggcgatcgccgccctggcgccggtgggggcggtctgcaccctggtggcgctggtcagcggcgcggcatggggcaagccgatgtgggggacctggtggatctgggacgcccgcctgacctcagagctggtgctactgtttctgtatgccggggtcatcgccctgtggcacgcctttgacgaccggcggctggccgggcgcgcggccgggatcctcgtgctggtcggggtggtcaatctgcccatcattcattactcggtctactggtggaacaccctgcaccagggctcgaccaacctgcagcaaaccatcgacccaagcatgcgtctgccgctgcggatctgcatctttgccttcctcacgctgtcggtcaccctgaccctgatgcgcctgcgtaacctgatcctgcaactggagcgccgtcgaccgtgggtggtggcgctggtgaataaaggagccgcccgatga

SEQ ID NO: 251321 - DNA, 660 bp, Klebsiella pneumoniae
atgatgcgtgcgctgttggcccgggaactgcgcctggcgtggcgcagcggggcggagatcctcaatccgctctggttctttctgatcgtcatcaccctgtttccgttcggcgtcggcgccgcgccgcagctgctggcgcagattgcgccgggcgtggtgtgggtcgccgcgctgctggcggcgctgctggtgatggatcggttgtttcgcgacgactggcaggacggttccctggagcaactgatgctcctgccgacgccgctggtggcggtggtgctggtgaaggtggttgcccactggatgatgagcggcctgccgctgctgatcgtctcgccgctggcggcgctgctgctggggatgagtctgcatgacgccggtgtgctggcgctgaccttgctgctcggcaccccgacgctcagttttctcggcgcggtgggggttggcctgacggtcggcctgaagcgcggcggcgtcctgctgagcctgctggtgctgccgctggcggtgccgctgctgattttcgccaccgcggcctgccaggcggcggccgccgggctcccggtcagcggctatctggcgatgctggcggcgttcttaaccgccagcgccaccctgtgtccgttcgccaccgccgctgcgctgcggctgaccgtacgataa

SEQ ID NO: 251322 - DNA, 1341 bp, Klebsiella pneumoniae
atgatgaaaatgcaatggttatcggccctggtgcttggggcattgagctgcgcggccttcgccgaagaggcgcctgcggacagcaatctgattaagcagggggagtatctggcgcgggcgggggactgtgtcgcctgccacaccaacggcaaagcggggaaacctttcgccggcggtttgccgatggagacgccgatcggcaccatctactccaccaatatcacgccggataaagaacacggcattggcgggtacaccttcgaagagttcgacgacgcggtgcgcaagggcgtgcggaaagacggttccacgctctatccggcgatgccgtatccctcgttcgcgcggatcagcgaagcggacatgcgcgccatgtacgcctactttatgcacggcgtggagccggtgaatgtcgccaacaaggacaccgacatcccatggccgctgtcgatgcgctggccgctggcgttctggcgcggcatcttcgccccgacgccgagcgactttgtcgccaacccgcaggttgacccggtgctggagcgcggccgctatctggtggaaggtctgggccactgcggcgcctgtcataccccgcgtagcctgacgatgcaggaaaaagcgctcagcgaaagcgaaggcgatgattacctggcgggcagcaatgcgccgattgacggctgggtcgcctccagcctgcgcggcgaaaaccgcgacggcctggggacctggagcgaagccgagctggccgagttcctcaaaaccggacgcaacgataaatccgtggtcttcggcggcatgagcgatgtggtggagcatagtctgcagtatctctctgatgacgacatcaccgccatcgcccgctacctgaagtcgctcccgccgcgcggcggcaaacagaccccagccccggtggaagacagcgtggcgaaagatctgtggaagggtaacgacagtaaaaccggcgccgcgctgtacgtcgataactgcgccgcctgccaccgcaccgacggcgtaggctataagcgcgccttcccgtcgctgaagggcaatccggtggtccagaccgaagatgccacttcgcttatccacatcgttctgaccgggagcaccacgccggcggtgaaagatgcggtctccaacctgaccatgccgtcgttcggctggcgcctggacgaccagcaggtggcggatgtggtcaatttcatccgcaccagctggggcaacaacgcgccggcggtcagcgccagcgatgtggcgaaggtgcgtaaggagaccgcggcgcacgatgagaaggcgttaggcaacgccgatatctcgaagctgccgggggccggacagtaa

SEQ ID NO: 251323 - DNA, 1785 bp, Klebsiella pneumoniae
atggccaccgtattgaaaaaaaccgatgtcgcgatcgtcggcttcggctgggttggggcgatcatggccaaagagctgaccgaagcggggctcaacgtcgtcgcgctggagcgcggcccgatgcgcgacacctggccggacggcgcctatccgcaggtgattgatgagctgacctacaacatccgccgcaagctgttccaggatctatcgaaaagcaccgtcaccatccggcataacaccagccaacaggcggtgccctatcgccagctggcggccttcctgccgggtaccggcgtgggcggcgccgggctgcactggtccggcgtccatttccgcgtcgatcccattgagctgcggatgcgcagccactatgaagaacgctacggcaaaaacttcatcccccaggatatgatcatccaggatttcggcgtcacctacgacgagctggaaccattcttcgataaagcggaaaaagtattcggtacttccgggaccgcctggtcgatcaaaggcaaggtcgtcggcaaaggccgcggcggcaacgccttcgccccggaccgctcggacgacttcccgctgccggcgcagaaaaacacctggtcggcgcagctgtttgaaaaagcggcgctggaagtggggtatcatccctataacctgccgtcggccaacacctccgactcctataccaacccctacggcgcgcagatgggcccgtgcaacttctgcggtttctgcagcggctacgcctgctacatgtactctaaagcctcgccgaacgtgaacattctgccggcgctgcgccaggaaaaacgctttgagctgcggactaacgccaacgtgctgaaggtcaacctgaccgacgacaaatcccgcgccaccggcgtgacctacgtcgacggccaggggcgcgaaatggaacagccggcggacctggtgattatcggcgccttccagttccacaacgtgcacctgatgctgctctccgggatcggcaaaccgtacaatccggagaccggcgaaggggtggtagggcgtaacttcgcctaccagaacatgaccaccatcaaggccattttcgacaaagacacctataccaatccgtttatcggcgcgggcggcaacggcgtcggcgtcgacgacttcaacgccgacaatttcgaccacggcgcggcgggctttgtcggcggttcgccgttctgggtcaaccaggccgggaccaagcccatctccggtttcccggtaccgccgggcaccccggcgtggggcagcaagtggaaagcggcggtggccgacacctacacccatcacctgtcgatggatgcccacggcgcgcaccagtcctatcggcagaactacctcgatcttgatccgaactacaaaaacgtcttcggccagccgctgctgcgcatgaccttcgactggcaggaaaacgacatcaagatggcgcagtttatgttcgataagatggcgccgatcgccaaagcgatgaagccgaaatatatcctcggcagcccaaaaaacgccaacagccactttgataccaccacctaccagaccacccatatgaacggtggggcggtgatgggggaagatccgaaaaccagcgccgttaaccgttatctgcaaagctgggacgtgcataacgtcttcgtcatcggcgcctccgcgttcccgcaggggctgggctacaacccaaccggcacggtggccgcgctggcctactggtcagcgaaggcgatccgtgagcagtatctgaaaaatccgggtcccctggtgcaggcataa

SEQ ID NO: 251324 - DNA, 756 bp, Klebsiella pneumoniae
atgatgtcgagcgagaaaaccaacaattccaggcgtgatttcctggtgaaatcgatggcgctgatcccgacggtggtgatcggcggcgcgggagcaggggctattggcgtggccaccagcgcgaccgcgcaggcggcccccacttcagagccagcctccgggaacaccgcggcggccagcgactggaagccgcagttcttcaacgatcgtgagtgggcgtttatcaacgccgccgtcgctcgcttaatcccggcggatgaactcggtcccggcgccaaagaggccggcgtgccggagtttatcgaccgccagctcaataccccttacgccaccggctccatctggtatatgcaggggcccttcaatcccgacgtgccgaaagagatgggttatcagctgccgttggtgcccaaacagatctataacctcgggatcgccgacgccgaggcgtggtgtcaggacaaatatcataaaaccttcgctgaactgagcagcgagcagcaggacgaggcgctcggcctgtgggaatcgggtaaagccgagttcaaacagctgccggcctcgctgttcttcacctatctgctgcaaaacacccgcgaagggttcttcagcgacccgatccatggcggcaataaaggcatggtcggctggacgctgattaattttcccggcgcgcgcgccgactttatggactgggttgaacggggcgaacgctaccccttcccgccggtatcaattaatggggagagggcgtaa

SEQ ID NO: 251325 - DNA, 372 bp, Klebsiella pneumoniae
atgttcgatcatgtgaaattcggcgttagcgactatgccgccagcaaagcgttctttttgcaggccctggccccgcttggcgtaacgttggttggcgaaggcgaaccgagctacggcgcagagctggccggcagcggcgatgcttctctatgcctctatcaaagtgcggaaaaaccggcgccgctgcacattgcctttcgcgccgacagccgcgagcaggtcgatgccttctggcaggcggcgctggccgccggaggaaaggacaacggcgcgccggggctacggccaaactaccacgccagttactacgccgcgtttgtgattgcgccagacgggcacaatattgaagccgtgtgccatctggcggggtaa

SEQ ID NO: 251326 - DNA, 1254 bp, Klebsiella pneumoniae
atgattgaatggattatccggcgctctgtcgccaaccgtttcctggtcatgatgggggccctgtttctcagcatctggggtacatggacgattattaacacgccggtcgatgccttgcctgacctgtcagatgtgcaggtcattatcaaaaccagctatcccggccaggccccgcagattgtagaaaaccaggtcacctatccacttaccaccaccatgctgtccgtacctggcgcaaaaaccgtgcgtggtttttcacagttcggggattcgtatgtgtatgtcatttttgaagacggcaccgatctgtactgggcccgttcccgcgtgctggaatatctgaatcaggttcagggaaaactgcctgccggtgtgagttctgaaatcggtcctgatgccacgggtgtgggctggatttttgaatatgcccttgtcgatcgcaacggaaaacacgacctttcagaactgcgctctctgcaggactggttcctgaaatttgagctgaaaaccatcccgaacgtggctgaggtcgcttcggttggcggcgtggtgaaacagtaccagattcaggtcaatccggtaaaactgtcccagtacggtatcagcctgcccgaagtgaaacaggcacttgaatcgtctaaccaggaggccggtggctcatccgttgaaatggccgaagcggagtatatggtccgtgccagcggttatcttcagagcattgatgattttaataacatcgtcctgaaaacaggtgagaacggcgtgccggtttatctgcgggatgttgcccgcgtgcagaccgggcccgaaatgaggcgtggtattgccgagctgaacggccagggagaagtcgctggcggcgtggtgatcctgcggtcgggtaaaaatgcgcgcgacgttatcacggcagtgagggataaactggagacgctgaaggccagcctgccggaaggcgttgaaatcgtgaccacctacgatcgcagccagttaatcgaccgggcgattgataacctcagttacaagcttcttgaagagtttatcgttgttgctgtcgtttgcgcactgttcctctggcatgtccgttctgccctggtggcgattatttctctgccacttggcctgtgtatcgcctttatgccggtgtatcgcctttatcgtcatgcacttccagggactgaacgccaatatcatgtcgctgggagggatagcgattgccgtcggtgcgatggtggatgccgccattgtgatgattga

SEQ ID NO: 251327 - DNA, 204 bp, Klebsiella pneumoniae
atgattaaaaaaatcccgattaaattattaaccatatgtatgattgttttgtactttatattaattgttgctttgattatctttttgaaaataacctcttatttccaatttaaagatgtattggctgccattgttatgttggccgtcatactttccccttgggttataataagcgcaagggttatgtatgataaaaaagattaa

SEQ ID NO: 251328 - DNA, 444 bp, Klebsiella pneumoniae
atgtctgagtcagaacttgaaaaaaaaccaaaaagatcgttgttgagcatatatgtttggggatttattctttcctgtttagctctaatagctagtgtattcgaatatattaataacccattctatcttattctccccatagctccgattgcatacattctttatagaattattaaatccacgaacaaaacagagcgagatgttataaaatcatggaacgatagcattcttttcttaattagttttataacaacttgccttctgacttttaaaacaattgaccatctgaacttcgatgtgtttgatgaagtcatgaaagaacaacgcggctattatttaatatgtatttatgccattctattttcgataaaaacatcaatttcaatatgtgaagctattgaaaatagtaagaccttaaaagaaatttcaaagccgaagctttaa

SEQ ID NO: 251329 - DNA, 1023 bp, Klebsiella pneumoniae
atgaccttgtttagcctgggaggcgcgacttttggtatgagcgaggaggtgatccccctgtatgcgatctttatctccctgatgttcgcgctgggttatgactcaatgactgcgatcctgattctttttctgggaacccagattggctacgttggcgcaatgaccaatccgttctctgtactcattgcccagggcgtagcgggtattcagggaaatccgcagctttggctacgtgctattgcatggctggtcttcacgctactggcgattgcttacaccatgtggtacgcgcaccgtgttaaacgcactccgcaaaagtcgccggtatatgaaaatgattgtcgcaaccgcgagcagtttttgtcgatacaggatacgtcggtccatttttccatcgccgatcgggtaattatcatcgcctttgtgctggcgctggccgtcatctcatgggggttaatcacgcgtggctggtacatggttgagatcggctctgtgttcctggctctggggctgttttccgggatcgtcgggcgcatgggcattagcgggatggccgacagctttgtcgaagggtgcaaagagtttgtctacgccgccgtagtgataggtcttgcgcgcggtattctggtggtggcggagaacggacgaattatcgatacgttgctatttggtttgtctgaaatgctggaagggttgccgcagtatgcgtttaccactctgatgctattagggcataacgtcatcaccttttttgtgccctcatcttcgggcgaggccgcgctcactatgcccgtgctggcgccgctaggcgatttggttggtatcaataaagaggcgatggtgatggcttatcaatttggcaatggcctgacgaacctggtctctcctaccggcggtgtattgctggctgggttgtctattgcgcgcattgggtttggtcagtggttaaaggccattgcgccgctgtttccggtgctgtggatagttagcgctgcttttgctgcgatttcggcctgggtctga

SEQ ID NO: 251330 - DNA, 297 bp, Klebsiella pneumoniae
  misc_feature (260)..(269): n is a, c, g, or t
atgcgtattgcaaaaataaagtgggcgatgccacactgctacgctctgattttcttcattattatattagtagcgctgctgacatggtgtattcccagcggcagttttgattatcactcagtgaccttacccggcggtgaaactaaaacattagtgatcccagggtcttatcatctgctggacaaagtcagcagcgagggcgatttacgtcagggtattaccgccgtactggccgcgccgatggaggggattatcaaggnnnnnnnnnnggaattttggttatccctatcgcaatga

SEQ ID NO: 251331 - DNA, 390 bp, Klebsiella pneumoniae
  misc_feature (376)..(385): n is a, c, g, or t
atgaaagtgattgctgccgggtgtgacctctccgggtgtacctcagtttccggtattatccgcgaaaaaaccactgccattaaaaacatcagcgggtgtctcggcacccctgatatctgtaattccggactggcgcagtgtgaggatggccatgaatatatcggtcctccacttaaaaaaggcattctcactgcgaatggaactctggtctacacacatacgcaaaaggctcttgaatcatggcagtcccccgttttcaggatactgaaaatacaggttcgccgtccgtttgacggtaataccgagtattaccgggtgccgatgagttttaaatacgaaagcactgccgtggcaatgactgtcatttcatctgagnnnnnnnnnntctaa

SEQ ID NO: 251332 - DNA, 627 bp, Klebsiella pneumoniae
atgcttctggaaaaacgtggcggtaaagtctttcaggtctttaatcaacgtgttatcggacttcgcccagttcatggagaaatcaaaactgtttttatcccgcttggtggtgttggcaaagtaacgggtatcggtaccgttggaaatgacaaacagttgcaggtatttaaacagagaattatcgctgttaaagctttccttgctgtaacggtgaatctggttaaaagcttcacgaatcgctacaccgcgttttttcaactcgatttgaaccagcggcaggccattgaccagaatggtgacatcgtagcgattggcgtgagtgccggtttgctcgaactgcttgatcacctgcactttattgcgaaggatgttttttctatccagcagatagatattctgaatacggccatcgtcgaagacgaaatcatgaacataatcatcatgaattttgcgggccttttcgacaacaccatcgctgggcttgtccatccaggtttccacaaaacgacgccattcagcctccaggaactccacattgttaagggtttgcaactgttccctgacattagcgagcatagccttggtattgttcagcgttggcaggtattcatagccctggttaactaa

SEQ ID NO: 251333 - DNA, 480 bp, Klebsiella pneumoniae
atgcaactctcgccgttcagctcacgtaccgtgcgctccagcactacgttgaagtttttccagataaatgtagggttcgtcagcgacagctgcagggcggtggtgatccccataacgtgcagctttttcgctatccggtttcccacgccccagatttcttccaccggctgtaggctgagtaattttgccgttctgcgtggattttcgggcgacagcgccagcaccccactgaattgtggccattcctttgacgcccactgcgccgatttggccagtgtttttgtggcgccgaagccgacaccgatcgtcagtccggttccactgagaacatgcccacgcagctgcctgccaaaatcctccagatccatacagtggctaattccccgggcatccaggaaacattcgtcaattgagtattgttcgacgcggggcgacagctcttccagcagggcgaccacacggttactcaggctcgcgtag

SEQ ID NO: 251334 - DNA, 1359 bp, Klebsiella pneumoniae; identical to SEQ ID NO: 219750

SEQ ID NO: 251335 - DNA, 321 bp, Klebsiella pneumoniae
atgcttgtatctgacggtgggcgtaagatttttatctgggattttgataaaggggtggcaattttctctgagggtataacaggtaagcagtctaaatacatagtacaaggtgaaaagcatgcagggcatatcaatcttatcagagataacacgattgagcgcactatttatggggttaaggagctcacctgtggaaatgatgattccggtaaatcctctcctgtgttttgctcattgtgcgaggggcagatactcataatcgaatgccaaaaggcttttataagaaaaccattaaggcttgatgaactcacctttgaatag

SEQ ID NO: 251336 - DNA, 435 bp, Klebsiella pneumoniae
atgctggcgacgaataaaggccgacagttcgcgatgattaaagaatccataattgaactggatcacgatgacattgagtcgcagagcatcaatttgtggctggaggttttccagatagttgctctctttacctacaatccagttgcgcagtacaaactcttcgtctgcacacacaagctcttcagcactgacctggggagcaaaaacaacatccgcgccatgcggtgcactctccaccagatgctgagaataggttgcgatcccacatttcgtgttccaggtcgtcaaccagccaatgcgcgcccgatgctgagcaatatcaatatgcgcgcgcagagtcttgaccgcctgacaagaacgatcggccacagctttccaggtaaaatgctgcagaataagctcgcgtccagaatcggccatgccacgcagcactga

SEQ ID NO: 251337 - DNA, 516 bp, Klebsiella pneumoniae
atgcgtgatatgatccttcaactcagcaaaagttcgatttattcaacaaagccacctggagatgaaaacaggagttttaacatgtatttaagagtgttgtcagcgcccatactcaccctttttctacttataactgcctgttcaaaccatactcaaaaaacaaacgtcagggttatgcccgacagcgataaatctgcggaagttgatgatcttttaggtggcctacgatctccaacagttcccccggagcattcaaaaatactcggatatgcgacacaaataaggaatgccattgttgccgaaatgtatgaacccgatgcgcataaaggaaaaacctgctctatccgtatctctcttcagcctgatggttcagtgaacagtgcgacagcaaaagagggtgatgcaaaattgtgtaaagcagccatttcagcgattacacgagcaaaaatacccgccgcaccagatgacgaaacatatcagagggtcaaaaatgccgatcttgatttcagactatag

SEQ ID NO: 251338 - DNA, 264 bp, Klebsiella pneumoniae; identical to SEQ ID NO: 235985

SEQ ID NO: 251339 - DNA, 195 bp, Klebsiella pneumoniae
atgcgaggggaagaccacgccccggcagagctggaagagaatgtatttatcttcgtcgttgagcatgccggtaaacaccacattgctcagtccgcgctgctgcgcctcacgccgcacctccgcctccagcggcccgcccccgacgatcaccactggcagccggctacgctcggcggcatccagcagaatgtgtag

SEQ ID NO: 251340 - DNA, 1290 bp, Klebsiella pneumoniae; identical to SEQ ID NO: 216724

SEQ ID NO: 251341 - DNA, 393 bp, Klebsiella pneumoniae
atgtggattggcgataaaaaacaactgctgacgccgctgcgcgatcagttcacccgcgcaccgctggataacgacattggcgtaagtgaagcgacccgcattgaccctaacgcctgggtcgaacgctggaaggcggcgggccattaccaggccgaagcagcgttgttgcagtgcacggcagatacgcttgccgacgcggtgctgattaccacggtccacgcgtggcagcatcaggggaaaaccttatttatcagccggaaaacctaccggattgatggaagtggtcaaatggcgattaccgttgatgttgaagtggcgagcaatacgccacatccggcgcggattagggccgcaagaaaactatcccgaccgccttactgcggcctgttttga

SEQ ID NO: 251342 - DNA, 300 bp, Klebsiella pneumoniae
atgtataccccgtacgtcttcccgagcgaaaacggtctgcgctgcgggacgcgcgaattgaattatggcccacaccagtggcgcggcgacttccagttcaacatcagccgctacagtcaacagcaactgatggaaaccagccatcgccatctgctgcacgcggaagaaggcacatggctgaatatcgacggtttccatatggggattggtggcgacgactcctggagcccgtcagtgtcggcggaattccaccttagcgccggtagctaccattaccagttgctctggtgtcaaaaataa

SEQ ID NO: 251343 - DNA, 345 bp, Klebsiella pneumoniae
atgctgaaaaataaaatccatcgaagttgtcttgcgaatacccccggcgttcgaaccaagaaatatccgttctccctcttcgattttcagctgtgcgcagccgttctctcctgccacctgcagacagtgtggccacttgacgccaactttatccagcacctgcataacgtgttccgcagcggcatcattaccaaaaatccccagataggccgcattgtgccccagcatggccgcataagcggcaaagttcagcgcatttccaccgggatacatagtctgagtatgaacatatttatcgacgacgttatcgccaattccaatcacattcatcataattccccttag

SEQ ID NO: 251344 - DNA, 975 bp, Klebsiella pneumoniae
atgaatactaaagaaataattaatgccgttgctaaagagatagaagacaaaggcggaatccgccaagtgttccttgttgcctgcggcgggtcattagtggatatgtatccggctaagtacttcctggatagcgaggcgacgaagcttcatgtcggcatgtataccgccaatgagtttgtctacgcgacgccgaaaacgttaggggagaattcgctggttatcgtctgttcgcacgggggcaacacgccggaatccgtcgctgcggctaagcttgctcaacagcatcaagcgcatactattacgctgactcacaacgctcaggcacagttgatcgaatacgccagtcacaacattctctatgcttggggtaacgataccaatgtggtcgataatccgatggcgattatcctcaacctgtgcgttgatacgttgcagcaggtggaaggtttcaataattacgctgatttccaacagggaatgacccaaattaatggcgtcattgctcatggccgtcagcaggttgcggatcgctgccagcgttttgcccaaaaatatcaagatgaaaagctcttctatatcctctccagcggagcttcttatggccatgcttatggttttgctatctgctcactaatggaaatgcaatggctacatgccgcacctattcactccggggagtacttccacggaccttttgaagttacgaataaagagacgccgtttattttattgatgaacgaaggccgtacgcgggcgatggatgagcgagctttggccttcctcaccaagtatgcagaaaaagtggaagtcgttgatgctaaagaactgggcatcggggttcttcctccgtcagtcgtggagtttttcaacccggtactgttttacagcatcatgtgtgaatatcgttctgcgcttgccgacattcgccagcatccattggatacccgccgctatatggggctggtggaatactaa

SEQ ID NO: 251345 - DNA, 738 bp, Klebsiella pneumoniae; identical to SEQ ID NO: 237647

SEQ ID NO: 251346 - DNA, 1173 bp, Klebsiella pneumoniae; identical to SEQ ID NO: 226888

SEQ ID NO: 251347 - DNA, 624 bp, Klebsiella pneumoniae
atgcaggctatgcacgctgcagccgatactctccatatgccatggctgattccggtgatggctatctgcatgtttttcggcgcgttgggccagattaactcatggctggttggccctatctacatgcttcaggaagcttctcgtgaggataacctgttaggcgataaaattgcgcaattgcatcctgtctggaaaacgcctgcttttgcgctaatggttcaggcgattattgttacggtattgtgcttctcaacctttatctcgccaagcgttgcggcggcctactggatgctgactgcgctcaccacaataacctattttatcccctacctggtgatgttccccgcgttctggcgcctgcgcaaaacgcagcctgacacaccacgaagtttcaaaattccggggaaagtgctacctgccgtactacctgcattaggttttatttctatcgcctttgccgttgtgttgctgtttattccgccatcacaaatcgatatgggcgggtatttccagtatgccggcaagattattggtggggcattactggcgattgttgtcgctgaatggatttaccatcgcgctttaaaacgcaatacacgtctgggtatggtgaaggggaaataa

SEQ ID NO: 251348 - DNA, 1683 bp, Klebsiella pneumoniae
  misc_feature (1320)..(1320): n is a, c, g, or t
atgtgtataagagacagcgcaaaagttattattaaacaaagtggatatgttatttatcaatctttcgttcctccaggggcctttgagatcactgatctgtattcgacaggtggcaatggggacctcaatgtcacgatcgaagaagctgacggcactcaacaaaattttgttgtagcttatgcttcacttccagtattacgtcgtgaaggtagcttaaaatacagcattacatccggccaataccgctcctccgacggtagcgttgattatactccgttttcacaagcaacggccagctatggtttaccatacaacaccaccctatacgggggattccaggctgcttcgaaatatcaatcagtggccattggcgtcggtaacaacctgggcgtacttggcgctgtttctttagacgtaacacaggcctggtcgacgaagcaagatcaagataagatatcgggtcaatccgtgcgtatacgctacagcaaaaacctgaacgatataggcacaaatatagctattgcaggctatcgttactcaacgagcggctttaataccctttcagatgttcttgaaacatatcgtgatgactataaatactactacaacgatcgcgttaaaaatagaactgaaattaccgtaagtcaaagcctcggtgataagttaggctattttaacatcggcggtgtaatggaggattactggaatcagcgtcgcaggaataactcacttaacgtaggttacagcaatagctggagcggtattacatataatttaaactattcccactcccgctcctcaactgactatgagggttacggtagaaactattctactgataatatcttttcgttcaatatcaatgtgccattgaatttctggatgcctaacacctgggctacttatggtttaaataccagcgatcctggttcgacaagcaacagtgttgggctttcaggtcttgcattggccgataataatttaagctggaaccttcagcaacaatacgataatcgcgattatagtagcggaaccgctggtgttgattataaaggcacctatggagagatttttggtagttataattatgatcataactggcagcgccttaattatggtataaacggtggaattgtcgctcatcgtgatggtatcaccgcagggcaatcattcagcgataccagtgctctcgttaaagcccctggtgttaatggtactcgagtagtgggtaacaccggcgtaaaaactgactatcgtggctacgctatcgtacctaatattacaatgtatcgtagaaatgatgtggtattagatactganacgatgcctaatgatgttgaccttgacactacggtagccaccgttgtcccaacccgaggtgcgatcgtacgagcagaatattcagggaaaaaagggatacgcgcgctgctgcagctagtggatacacataataagtttataccttttggtgcaatggtaaatcttgcttccgaaaattcgacgaataataacagcgggatcgttagcgacaatggtcaagtttatctggctgggttaccgacaacgggagtactgcttgtcaaatggggaaatagtatatctaaacagtgtacggtaaattatcagttccctgggtctgaaaaggtcaatggtatcaaacagggccagtttatctgccgctaa

SEQ ID NO: 251349 - DNA, 864 bp, Klebsiella pneumoniae; identical to SEQ ID NO: 217112

SEQ ID NO: 251350 - DNA, 228 bp, Klebsiella pneumoniae
gtgaaagagagcgccgacggcagtaccggccgcattcccggcttcatgctctggggcgcacgcgtggcgtatgactttggcccgcagatggcagatctgaacctggcgttcggtgtgaaaaacatcttcgaccaggactacttcatccgctcttatgacgacaacaacaaaggcatctacgcaggccagccgcgcacgctgtatatgcaggggtcgttgaagttctga

SEQ ID NO: 251351 - DNA, 1062 bp, Klebsiella pneumoniae
  misc_feature (1018)..(1027): n is a, c, g, or t
atgcccggcggcctgtcccgcgcggattacgacgccgatcgctggcaatccacccgcccgtatgaccgcttctggggccgtcgcaagctggcgagcctggtctaccagttccagccggacagccagcataaattcaacattcaggggttctacacccaaaccctgcgcagcggctacctggagcaaggcaaacgcatcaccctctcgccgcgtaactactgggtgcgcggtattgagccacgctacagccagagctttatgatcggcccttccgcgcacgaagtgggcgtgggctatcgctatgtgaatgaatcaacgcatgaaatgcgttactacaccgccaccagcagcgggcagttgccgtccggctcaagcccttacgaccgcgacacgcgttccggcaccgaggcgcacgtctggtatctggatgacaaaatcgacatcggcaactggaccatcacgccgggtatgcgtttcgaacatatcgagtcataccagaacaacgccatcaaaggcacgcacgaagaggtgagctataacgcaccgcttccggcgttgaacgtgctctatcacctgactgatagctggaatctttatgcaaacactgaaggctcgttcggcaccgtacagtacagccagattggcaaggctgtgcaaagcggcaatgtggaaccggaaaaagcgcgaacctgggaactcggtacccgctacgacgacggcgcgctgacggcggaaatggggctgttcctaattaactttaacaatcagtacgactccaaccagaccaacgacaccgtcactgcacgtggcaaaacgcgccataccgggctggaaacgcaggcacgttacgacctgggtacgctaacgccaacgcttgataacgtttccgtctacgccagctatgcgtatgtgaacgcggaaatccgcgagaaaggcgacacctatggcaatcaggtgccattctccccgaaacataaaggcacgctgggcgtggactacatgccgggcaactggacgnnnnnnnnnnggactacaagccgggcaactggacgttcaatctga

SEQ ID NO: 251352 - DNA, 600 bp, Klebsiella pneumoniae
gtgggctacgatcagggaaaagactatcgtcaggtggcgctaggctcctccggaaccgtggtgttgcattccggtggcgtgacgttcggcccctacgccagcgacacgtttgcattaattcacgccgatggcgcacagggcgccgtcgtacagaacggtcagggggcggtaatcgaccgttttgggtatgccattttgccctcgctatctccctatcgtcgcaacaacgtctcactcgatacccggcagatgcgcagcgatgctgagctgaccgggggaagtcaacaggtggttccctatgctggcgcgatcgcacgggtgaacttctcaacgattaccggcaaagcggtgctcatcgcggtgaaaatggcagatggcggcataccgccaatgggcgccgaggtcatgaacagcgaaggggccatcattgggatggtcgggcaaggcgggcaggtgtatgcccggatcagcacaccctctggctcattactggtgcgttggggaaaaggagccaaccgacgttgccgtgtgccttaccagttcgatatgcattctcctgaaaacgtgatttatctcacgactacctgcgagaggaaatag

SEQ ID NO: 251353 - DNA, 240 bp, Klebsiella pneumoniae
atgatgttaccgatacttattccctttatcggcgcgacagccaggctcatataccacggggtcggattggttatcgtgatgccctgcgaagcgatactgaagcgtaatttccgctcatcgttgctggtgggggcctttaagccgtgcggacgaataaatacctttaaccgtaatcgcaggggtaacactaatttgcgagtgacgctgtctgttgcattctgctcgggggggatctggtaa

SEQ ID NO: 251354 - DNA, 528 bp, Klebsiella pneumoniae
atgaaatccggctcctgcagggcagcgcggtggaaaggaagaacgcttgccagcccttctattttgaattcagcaagagcgcgtcgagctcgcgcaagcgccatttcgcgcgatggcgcccagacgataagttttgccagcagagaatcaaaagtgggcggcactgtcgaaccggtccggactccgctgtccagacggataccaatgccggacggcggtgaaaagtcactgatcgtgccggaaacaggaagaaatccacgcgcaggatcttcggcattgatacgaaactcaaaagcatggccgtgcggaggcggagtttcggtattgtccagccgtttgccccgggcgatctccagttgggcgatgacaaggtcaatgccagtggtttcttccgtcacagtgtgttcaacctgcaggcgggtattgacctcaaggaaggagaactccccttccgggctaagcagaaactcgacggtaccagcgccgcagtacgctgcttcgcgacacaactctctggctgcatcatga

SEQ ID NO: 251355 - DNA, 669 bp, Klebsiella pneumoniae
atggtctattcgccctatgtgttatgccgcagtctggaggtctggcaagcgatcccgtccctctcattgccaggggatattcgccccctgatcgatcaaacctataccgagcgcgctgaagaggggacatgggccaccctattgcatgagctgaagaatggcagccgctttcgttcaggagaacaggcgctgcagtcgctggcgaagctcacgttatctaccggcgggaaaacgctgcctgagcataaagcggagactcgctatagcgatcgtgacacccatgacctgttgctgctgcgtggtctgcgtacgcaagacggcatcacgtatatgcgcctgctagatggtgctgaattaacccttccgcatgggcgccatcgtttaagccgggcgcagtggcgacagctggcggtggtgcttaatcagcagctggtgcgagttagcccggctttttgtccgcccacaatagctaaaagtgagctggaaaaattacacctgcaggaggtgttctatcttggtcgccccgaagatgacgaggcgttactgcgggttgcgattgtcagcccggcgggtgagttgaagacactggatggccggcccgcaggcgataaatacactctcgaatatagtgaatatcttggcttccgggccatttccaaaaaggaataa

SEQ ID NO: 251356 - DNA, 291 bp, Klebsiella pneumoniae
gtgcgggagtttgtctataaccccaacgtcaaaaacgccctggtgctcaaggcatacgacattatcagccaccgccgtctggagtttgacgccgggcataccgacattgcgcagtcatttatggctatccgccgcgccaccaccgccagcggaaaccgccctacctacgaagccagccgcagcgaagaagccagccacgcagatttggcttgggcaacgatgcacgcactgtttaacgaaccgctgcagggcgaagccgccaataccagcaacattgtggagattttttaa

SEQ ID NO: 251357 - DNA, 435 bp, Klebsiella pneumoniae
  misc_feature (109)..(118): n is a, c, g, or t
atgcttagtggtaaagaattgggccgagcgatcgagcaggccatagacaagaagctttcaataggttctgccaagagtaaggcggaaatcgcacgtcatttcaaaatannnnnnnnnnagctaccagagctttggaactacttttctgatgttgtgggccccgagcactggggactaaaaggatacccgctaactgatacatgtgagcccgcaacagatcccatagttaaaaatggttctattgacgaactctataataaggcttcgagagagaaaaaggctatcattgattttgtcctcttagagcaaggacagcgtatacctggctgggtagatagcgacgctaaagcatatttagactcactagagatgaagataaggagatgggcagagcaggaggaagatggaaaaaaacaaacgaaagccagagcttaa

SEQ ID NO: 251358 - DNA, 180 bp, Klebsiella pneumoniae
atgcgagagctcaaccgatggttcagagatcactacggcgtcccggtcagggtcatacgctgggagccccagacacagcgcgttatatacctgcgtaaagggtacgagcatgaatgctttagtccccttgagcagttcagacgtaaattcagagaaataaaggacgatcatgagcactaa

SEQ ID NO: 251359 - DNA, 324 bp, Klebsiella pneumoniae
  misc_feature (211)..(220): n is a, c, g, or t
atgtccaatttagtcgcaacaactgaaaaccagacccagaagatcgacaacgtttctatcctgacgaacggtgaattgttcaaccgcctgcgcacgctctcggaagtaatggccaatagtggaaacttcgtacctgagcattatcgcgggaaaccagatgcgtgcatggctgtagtgatgcaagcagcgcgttggggtatggatccgtttnnnnnnnnnncgactacatcgcgccgggctgggatttgcaagatgaagctggcgtgggcgtccgcgcctgggcaacgctcaaaggagaatcagaacctcgtgagcttgtgctga

SEQ ID NO: 251360 - DNA, 504 bp, Klebsiella pneumoniae; identical to SEQ ID NO: 216687

SEQ ID NO: 251361 - DNA, 639 bp, Klebsiella pneumoniae
gtgcccagcggggtcgtcaacgccttcgccaccggttcgaagcatcacgcggccatcgcgctgaccgacggcctgctgcgtagcctcacgccccgcgagttgaccggcgtgctcggccacgaaatcgcgcatattgcgaacgaggatttgcgtgtcatgggcttggccgattccatcagccggctcacccatcttctggccttgttggggcagcttgcgatcgtgctcagcttgccaacgctattgcttggagtcacggaagtcaattggcccgcgttgcttctacttgcggtcgcgccacagctggccttgctggctcagttgggcttgtccagggtgcgcgaattcgacgccgaccggctcgctgccgaattgaccggcgacccgcacgggctggcctcagcgctcgccaagatcgagcgggtgagccgctcctggcgcgcctggctgctgcccggatggggcaatccggaaccctcctggttgcgcacgcatccagcgacggctgaacgcattgagcgcttgctggaacttgctccgccgcccgcgatgccgccgtttccatcggcccgtttcgaccccgaagtgaccgtatcaccacgtccgccacgctggcgcactggcggcctttggcgctga

SEQ ID NO: 251362 - DNA, 768 bp, Klebsiella pneumoniae
atgaatgaagatgaagcggcgaaaatggcggcgctgctgctgcgcccgaacggcaccatcaacccgaaagtggtcggcaaaaccgcgctgtacctcagccagatggcgggcttctgtgtcccggccagcactaaagtactgatcgccgaacagaccaccgtatcgccgaaaaacccctactcgcgggaaaaactgtgcccggtgctcggcctgtacgtggcagaagactggaaagccgcctgccaccgcgtggtggagctgctgaccaacgaaggactcggccatacgctggtgatccacacccgtaatcaggacgtcatccgccagttcagcctcgaaaaaccggtcaatcgcattctgattaatactccggcggcgctcggcggtatcggcgcgactaccaacatctctccagcgctgaccctcggctgcggcgcggtcggcggcggctccagctccgacaacgtcggcccgatgaacctgctcaatatccgcaaagtcggctacggcgtgcggtcgattgacgagcttcgcgccccgggcagccgccctgaaccacagccgaccatcgtctcaccggcgagcgatccgcagcgcagcattcttgatgacgtgcgtttcaatgccccgaccagcgccgcgccagcgcgctctgcaggcagcgatgaccgttttgccagcgcaggcgccgccagcatggaaggcgaaatcaacgagcaaaacgtggaacgcgttatccgccaggtgctggagcgcctcgctaagtaa

SEQ ID NO: 251363 - DNA, 819 bp, Klebsiella pneumoniae
atggatccaacgcataatcatcctctgccgccaccattgcttgagtttttacctattcattatggttttaaccgggcaattaccgttcgtctccaggaaaaagagattcttaaatctccggatgctgccgtcaatttggtcgatgtactaaaaggggttagcccagactacagcatcattgctcagaaaaccgcacctgaagatattcttgaacgctttgaaatcctgtttactcaacagtacggcctgacgctagatgccctgagcaaccgttacgatgagattttgcgcgaacagttttcgtcctatgcctcacagctggagacgttgaaccatacctatacgcgccagataagcaaaatgtcggagactattcagacgttgcaaggtcaggttgacgaactgagccatgtcatcggtcagaattatcagcttcatcagcaaatggcggacttacataacagtcgttcatggcgtatcactcaacctctacgctggttgtctttgcaacgtcaattattacgtcaggaaggggcaaaagtgagagcccgtagggcggcgaaaaaaatattgcgcaaaggaatggcgctctcgctggtctttttccatcgctatcctaagtcaaaggtttatctgtttaaggttttgagaaaaacaggctgctacaaattgctacaacgtttgttccagcgggtcatgctggtgcactctgacacgatgatgatgcagtccagaagatatgatgtgggtactgaagaaatgacaagccgcgcgttgagtatttataacgaattaaaaaataaaaatacggagaaataa

SEQ ID NO: 251364 - DNA, 357 bp, Klebsiella pneumoniae
  misc_feature (276)..(285): n is a, c, g, or t
atggggatcaccgcagaaaacgttgctaaggaatacggcatcagccgggaaatgcaggatgagctggcgctgctttcacagcgtaaagcgcttgccgccatcgattccggcgcattccgggccgaaattgtgccggtcagcgtcacctcccgtaaaaaaacgaccatttttgaacgtgatgagtttcctaaagccgactctacgacagaagggcttgccgctttgcgtccggccttcgacaagtctggcacagtaacggcagggaatgcttccggnnnnnnnnnnggcgttaatggggatggggccggttcccgctacgcagagagcgctgcaactgagcggactgacactttctga

SEQ ID NO: 251365 - DNA, 315 bp, Klebsiella pneumoniae
atggggccggttcccgctacgcagagagcgctgcaactgagcggactgacactttctgatatcgatctgatcgaagccaacgaagcgtttgccgcacagttccttgccgtgggtaagacgctgggtttcgatccgcagaaggtgaacgtcaacggcggggcaatcgcccttggacaccctatcggcgccagcggtgcgcgtattcttgtgaccctgctgcatgccttgtcagcgcacgataaaacgctcggtctggccacgctgtgcatcggcggcggtcagggcatcgcgatgattgtggaaaggataaattaa

SEQ ID NO: 251366 - DNA, 627 bp, Klebsiella pneumoniae
atgctggggttgctacaccgattgaagcttatttgcgcacaccctgcagttgtcaatccagagccgcgttttcgtgataactcacccaagcttaactggttgctgaaaatactcgcagaaataaaaagcactacgaaagataaagtcattatttttactgagcttcgagacttacagcgtgaacttcagcatgcgatccatcaaaagtttggtatccgccctgtcattattaacggtgataccagcactaaaagtaatagtcagaatagccgccagaggctgatcgatgatttccaggttcatcctggatttggggtgattattctctctacggttgcagtcggtttcggtgttaacgtacagaaagccaatcatgttattcatttcactcgttgctggaacccagccaaagaagatcaagcaacagatcgggcgtaccggattgggcaaattaaagatgtgtatgtttattatccgacggtgagggatcccgaaatcaccacatttgaagaaactctggatgaccttctgctgcggcggcgttcattagcaagagatatgctgtgtgcaactcctgacttgagtggcgctggttttgaggacattttgaaaggggcgttggactga

SEQ ID NO: 251367 - DNA, 177 bp, Klebsiella pneumoniae
atgcaggctgtcgacgtccgggtcagcatagaccgcgacactggcaaaaccgtattcatggcaggcccggataatgcgaaccgcaatttcgccccggttcgcgacgagcactttgtgtgggggaacggtagcaacagcgctcattatttatactcctcaaaaacagtaaaagggtga

SEQ ID NO: 251368 - DNA, 159 bp, Klebsiella pneumoniae
atggtagtgccaataattctcttccttatagccatcagcgccagggatgtcttcatggttatcataaacccaagactctttgttttttccgataataaaatctttctctgcaatttcttttatgaaattaatgatttcagttctttcttctttggttaa

SEQ ID NO: 251369 - DNA, 387 bp, Klebsiella pneumoniae
atgaaagtcctcaatatcctgatccgtcgatgcgtgctgattgcccgctttgaagagaccgtttcgttctacgaaaatctcatcgcgcagaaggcaaggttgtgtttcgactatcccgaatacgatctcaaactggcgcaggtgggttccgtgcttttaattggcggaaccgagcaaagcctggctccgtttcgcgccaccgaggccactttcctggtaaacgacattaccgcctgggagaaacatctgccttccaccggggcaacgattatcaacccggtgaaggccgtgcccaccggctggaacatgctggttcggcatccggatggcatgattgccgaatacgttgagcatcatgataaaaacccggcggatgagatcttctga

SEQ ID NO: 251370 - DNA, 477 bp, Klebsiella pneumoniae
atggatacgatagtgatcattctggcgctgtgcggcggcgcattgcttagcgtccaggcggcgataaatggccgtcttggcagccaggtgggggtgctgcgcagcgcctttttaaccttcgccaccggcgcgctggtgacgggattgctgatcctgttttttgctccagcgacgtcggtaaacctgctacaggtgcctaagtggcagctgctgggcgctttttgcggcgtgccctacatcgtcattatggtgctggcggtgcagcggataggcaccgctacggccaccgtggcggtgatctttggccagctgacgatgagcctgctgatcgacaactttggctggctgggcaatagcacgatggcgttctcgccggcgcgactggcggcggtgatatgtctggccctcgcgctgtacttaatctacacctcaggaaagtcggctacctcccacgaggcggcccgcgcagaacagtga

SEQ ID NO: 251371 - DNA, 558 bp, Klebsiella pneumoniae
gtggatatccgtatcgttgccgccaccaaccgcgatctggcggcgatggtaaaagagggaacctttcgtgaagatctgttttaccggctgaacgtgatccatctgctgcttccgcccctgcgcgagcggcgggaggatatcgccctgttagccaaccactttctacagaaattcagcgcggaaaatcagcgcgatatgattgagatcgatcccgccgccatgtcgcggcttaccgcctggccgtggccgggcaacatccgcgaattatccaatgtgattgagcgcgcggtggtaatgagcaccggcgcagtaattttcgctgaagatctgcccgccccattccgccagccggtgagcaaaggcggcgaagtaaaagccgcgcagccaggggagcgcaacctgaaagaggagattaagcgtgaagagcggcgaattattatggaagtgctggaacagcaggagggaaaccgcacgcgcagcgcattaatgttaggcatcagccgacgcgcgttgatgtacaaactgcaagagtacggtatcgatccggccggcctttag

SEQ ID NO: 251372 - DNA, 591 bp, Klebsiella pneumoniae
gtgcatggagcaggttccttcccggaagcggaaccccaggccgagtacattgttgagaaaatcaacgggggcgccatagcccggatcaggcaccagaatgtgaccattacagaacggcaactcaaactgatcgaactcgcctgccggcagcgcctgcgtattctctgtgcgaagggtcagcagcacctgactgtgtcctttctggccgctttcatcctgaaacactgcgacccggctgtaaacgcccaccgcatgcgcctcgctgagaccattcgccggcgccttgcccatgactccgcgcagctggttgatctgctgataataatcctgccgacgataccaggctccccagaaacgcgcgatactggcccagaaggcttcaatcgtctgttcatcacgaccggcgacatcgcagaacagggcaaaatacagcgcagtcccggcgtagaactgctgtccccgtggcagaacctggctggttcgcatgcggaggtactgtgcattacgcagcaaaatccgggtcagatcatcttctgtacggatggaaagcaggtcgcggtaggccgcttcaaactgagggggccagtctaa

SEQ ID NO: 251373 - DNA, 354 bp, Klebsiella pneumoniae
gtgagtgtccgtcagctccgggttggacagatagcgcaaataggcgcgggtaaagcgcccgtaagcgatgttatcggcggccatcagttcgctaatcgccttttccatgatcgccagcagccgggcgaacagggcgaaaatcagcgcctgcttattgggaaagtgatgcaggaggccacctttgctcacgccagcctcgcgggcgacggcgttcagcgacagggcggcgataccatcccggccggcaatcatcgctgccgattcaagcaactgacggtggagacggacgggatcttttttacgatgctgggcttccatattcatggccggaatcataccgaccagacggtatga

SEQ ID NO: 251374 - DNA, 363 bp, Klebsiella pneumoniae
ttgacgctctatatcgggatgagccgcgataccggcagagccataacggaaactgaccacctgcgccagtcggtgcgtgacattttgctgaccccgcaagggagccggcttgcgcgccgggagtatggttccctgctttcagcgctcattgaccagccgcaaaacccggcgctgcgcctgcagatcatggctgcggtgtatgtggcgctgcgacgctgggagccgcggctgcaactggacaccatcacggttaacagcagcagcatggatggcgcaatggttattgagctggcaggccagcgtaatgacggcgtgcccgtgtccctttccgtatcgacaggagcagacaatggccgttattga

SEQ ID NO: 251375 - DNA, 495 bp, Klebsiella pneumoniae
gtgcaggcgacgattcttacccagaccctcgcccagcgcctgaattgcgacgcctggctgctgccgtcacagagcatcgaaggatccatggaggagcgcaaccggctgctggccagcaaagacgtcgctgacgtggtgtcgcgctttgatgaagtggatatcgccatcgtcggcatcggcattctcgaaccctctcaactgctgaaaacctccggtaactactatcacgaagatatgctgcaggtgctggcggcgcgcggcgcggtgggtgatatctgcctgcactactacgacaaaaacggccatccggtgttacgcgatgatgaagatccggtgatcggtatggcgctggagaaggtcaaaaaatgcccgaacgtggtcgcgctggccggcggtaccgacaaagtcgcggccatcaaaggcgccctcaccggcggctacattgatgttttaatcaccgattaccctaccgctcgcatgctggttagcgactaa

SEQ ID NO: 251376 - DNA, 294 bp, Klebsiella pneumoniae
atgggcaaagccacggtggacggcgtgcagctgcgctttaccgggtctattcagcgcgacgacaccggcgaagtgcaggccgttgagctggtcgtccgtgggcgccacaaagaggtggattccggcgagtggaaaaccggcgagagcaattccaccaaagtcagcagcgttaactgttacgcgaagctgaccattaacggtgaagtgctctatgaggtcgatgcgatcaacatgattgaagttgttgatggtgttgacctgatggaagaacaccgtaacgccatcggtctgtaa

SEQ ID NO: 251377 - DNA, 471 bp, Klebsiella pneumoniae
gtggtgacgaaagcgcgtccggcggcggaactgatgagcgcgctcaaggcggcaaaagacattgatagcgcctgtaaaaccctcggctaccgtgcgcaggatgaaaacccctgcatcttctacgtcaaggtttcaggtaccgtcagcaaactcgataccgcctcgcgcagcggcaaaatgaccttgaccgacgccagcgtcgggaaggtgacggtgcagattggccctaccctgcgcggcacccagctgcgcgacggctacagcggcgccagctatcaggactttaatgaccaggtgctgttcggcgagtacagcaagaatatcaacagtcaggcggtcaaaatgattcagacagccaacgtcaaaaccggcgacagcgtggaggtgtacggcgtcttctcggcttgggatattccgcaaactctcccggaaattaccccggcgaaaatcattcatgcagggggacaataa

SEQ ID NO: 251378 - DNA, 210 bp, Klebsiella pneumoniae
atgagaagcgatgactttgctcacccgaccattaacgatcagcgggccgacgccggtatcgacaaatgcggtatcgttggcgatgagcgtcaggtctctgacgccggattcaagcagggcttccacaaggcggggcggggtgcctacccccataaaaccgccaaccatgatggtcatgccgtcacgaaagaagccagaggcgttctgtaa

SEQ ID NO: 251379 - DNA, 294 bp, Klebsiella pneumoniae
atgcgaccacggccatttttcattcggattcaggttctggctgaaaaagcgcgtggtgccaacggggttatcctgctcccaggcgtcccgcaacacctgccggatggcctcctgcgtcgtggcgtccagcgcctgcaactgctcatcggcatagtcttttgcgttatcttcggcgcgactgacgtcctccgcggtggcaatcaccaccgacggattatcagtgatagtgacagcatcggtactgctgaccgctatattcatccgcactatctggtgtttcgcggccccctgtga

SEQ ID NO: 251380 - DNA, 288 bp, Klebsiella pneumoniae
ttgctgggactcttcgctgcaggacttaatgctgcggccgccgccctcaaccacgccattgacgccaatgaccgggagacatggcgccgcgccgcccacaagctgcgcggcgaggcggccacccttggttttcaataccttgccagtgtgctccagcggctggagagccaggcggcctcgccagaccaaagcgtgccgggcgacctgcgcgacgcgctgaccgaggcgatcgcgggctgccacctgtggctgcgccgcagaacgcaggaggttccccatgatcgctag

SEQ ID NO: 251381 - DNA, 309 bp, Klebsiella pneumoniae
atgcgctccatcgcccgcgattacggcccacagggcgtccgcgccaatgcgatttgtcccggctgggtcaccactccgatggcggatgaagagatgatcccactgatgcaggaacacgggctgtcgcttaccgaagcctatcaacgggtgtgccgcgacgttccgctacgccgccccgccagccccgaggagatagcccaggcctgtcagtttctctgctctccgcaggccgccatcatcagcggcgcgacgctggtcgccgatggcggttccagcatcgtcgatgttccaacgctggcgtttacttaa

SEQ ID NO: 251382 - DNA, 267 bp, Klebsiella pneumoniae
gtgatccatctgtcgaaaagcctggcgatggagtgggtgggcaaagggatccgcgtcaattccatcagtccgggatataccgccacgccgatgaatacccgtccggagatggtgcaccagacccgcgagtttgaaagccagacgccgatgcagcggatggcgaaggtggaagagatggccggcccggcgctgttcctcgccagcgacgccgcctcgttctgcaccggcgtagacctggtggtcgacggcgggtttgtctgctggtga

SEQ ID NO: 251383 - DNA, 279 bp, Klebsiella pneumoniae
atgttcgatagcgcgatgtcgttcgcgctgattcgcggcggtcacgtcgacgcctgcgtcctcggcgggctgcaggtggatgaacaagccaacctcgccaactgggtagtgcccggcaaaatggtgcccggcatgggcggcgcgatggatctggtgaccggctcgcgcaaagtaattatcgccatggaacactgcgccaaagacgggttccgcgaagatcctgcgccagtgcaccatgccgctgaccgcccagcatgcggttcatgtgctggtcactga

SEQ ID NO: 251384 - DNA, 183 bp, Klebsiella pneumoniae
gtggataccctctcgctggtgaccacccgccggtttgaagacgtggaaacctgcgttcggcagcggcagatcgatttaattattgccgggcaccataaccggctgctgggcgtcctctcctcacactcgctggagtacatcaaccacttaaacctggacgtactgatcaagcacctgccctag

SEQ ID NO: 251385 - DNA, 153 bp, Klebsiella pneumoniae
atggtgaaaggcgacgtcggcgcggtgaaagcagcggtggattccggtgtggaatcggcgcagcgcatcggcgaagtggtgacctcgctggttatcgcccgtccgcataacgacatcaacaaaatcgtctcgcattacaaaattgcggactaa

SEQ ID NO: 251386 - DNA, 291 bp, Klebsiella pneumoniae
atgaatacggattatcacctacaccgtcagctacacgaaacattttaccatcaggagttgcggcacgacctgctatcgttccgtcagggtcttctggcgagggataaaacgtatattcacgataatcagatattgactccagggattcctttaggcatttggttctgtttgccagttgttgagcctgaatgttatcaggcccgccgggcccagcaagaaccggtgtgtctctttcaagttgataaatactgggttcccacttgctttcttccggaagcgaactggacataa

SEQ ID NO: 251387 - DNA, 612 bp, Klebsiella pneumoniae
  misc_feature (38)..(61): n is a, c, g, or t
atggggggcgcctttcccactgcaaatgcgttgtctgnnnnnnnnnnnnnnnnnnnnnnnnggcgcctttcacgctgcaaatgcgttgtctgcggccctcaaccccggtcacttactgatgtaagctcccggggatttcgggtcttgacgcctttttgcaacgcgaaatgctgggttaaatggggggcgccttcacgctgcaaatgcgttgtctgcggccctcaaccccggtcacttactgatgtaagctcccggggatttcgggtcttgacgcctttttgcaacgcgaaatgctgggttaaatggggggcgccttcacgctgcaaatgcgttgtctgcggccctcaaccccggtcacttactgatgtaagctcccggggatttcgggtcttgacgcctttttgcaacgcgaaatgctgggttaaatggggggcgccttcacgctgcaaatgcgttgtctgcggccctcaaccccggtcacttactgatgtaagctcccggggatttcgggtcttgacgcctttttgcaacgcgaaatgctgggttaaatggggggcgcctttcacgctgccgatgcgttgtttgcggccctcaatcccggtcactcactga

SEQ ID NO: 251388 - DNA, 762 bp, Klebsiella pneumoniae
atgactgagcgcggaatgatttttaacggggaaatgacgcgagcaattctcgacggccggaagacgcagacgcggcggattatgaaggttcagccggaaccatcgaaatcacgacctggggatttttggttttcatcgaaaaaattagaaagcatggtgcacgtttctgaccttgtaccgggtaactcgcctattgctgattgtcaccttttctttcaggagcactgctgcccgttcggcgcagtcggcgaccgcatctgggtgcgggagacgtggggagtcgtcagtcacgaacttgatgaggatggtcgggtccaaccatggacgccagaccgtccggctacagctattcacgaaatgccgtttggcaatggctattactctggccacgccatttatgcagctgatggtgattttacctggggtgatgacgatggttatgaagatggccgttcgtgctggaaaccttccattcatatgccgagagcagccagccgcattctgctggaaatcaccaatgttggtgtgcagcgcctgcaagatatcagctcaggcgatgctgtccgcgagggtatttgtcagttaccggcatctggtcgctactgcataagcccaggtgaccagtatttcggaggagcaagccatagcgctaaagaggtttattcctggctgtggtcatccatctacggcgacgaaagctggaaagctaatccctgggtttgggtcatttcgtttaagcgcgttgaaggcggtgcagcatga

SEQ ID NO: 251389 - DNA, 2148 bp, Klebsiella pneumoniae
atgaacgttattgcaatcatgaatcacatgggggtttacttcaaagaagaacccatccgtgaactgcatcgtgctctcgaacgcctggacttccgtattgtctacccgaacgaccgtgacgacttattaaaacttattgaaaacaactctcgtctgtgcggcgtgatcttcgactgggataaatacaatctcgaactgtgcgaagaaatcagcaaaatgaacgagtacatgccgctgtatgcgttcgctaacacctactccactctggacgttagcctgaacgatctgcgcatgcaggttcgcttcttcgaatatgcgctgggcgctgcggaagatatcgcgaacaaaatcaaacagaacactgacgaatacatcgacaccattctgccgccgctgaccaaagcgctgttcaaatatgtccgtgaaggtaaatacaccttctgtaccccaggccacatgggcggtaccgcgttccagaaaagcccggtaggcagcatcttctacgatttctttggctccaacaccatgaaatccgatatctccatttcggtttctgaactgggttccctgctggaccacagcggcccgcacaaagaagcggaagagtatatcgctcgcgtgtttaacgcagaacgcagctacatggtgaccaacggtacttctactgctaacaaaatcgtcggcatgtactccgcgccggccggcagcactgtgctgattgaccgtaactgccacaaatcgctgactcacctgatgatgatgagcgacattacgccgatctatttccgtccgacccgtaacgcctacggtatcctcggcggtattccgcagagcgaattccagcacgcgactatcgccaagcgtgtgaaagagacgccgaatgcgacctggccggtacacgcggttatcaccaactcaacctatgatggtctgctgtataacaccgacttcatcaagaaaaccctggatgtgaaatccatccactttgactccgcgtgggtgccttacaccaacttctcgccgatctatgaaggcaaatgcgggatgagcggcggccgcgtcgaagggaaagtgatttatgaaacccagtccacgcacaaactgctggcggcgttctcccaggcgtcgatgatccacgtgaaaggcgacgttaacgaagagaccttcaacgaagcctacatgatgcacaccaccacctctccacactacgggatcgtggcctccaccgaaaccgcggcggcgatgatgaaggggaacgctggtaagcgtctgatcgacggctctattgaacgttccatcaagttccgtaaagagatcaaacgtctgaaaggcgagtctgacggctggttcttcgacgtctggcagccggagcatatcgatggtcctgaatgctggccgctgcgttccgacagcgcatggcacggtttcaaaaacatcgataacgaacacatgtacctcgacccgatcaaagtcacgctgctgactccggggatgaagaaagacggcaccatggatgacttcggtattccggcaagcatcgtggcgaaatacctcgacgaacacggcatcgtggtagagaaaaccggtccgtacaacctgctgttcctgttcagtatcggtatcgataagactaaagcgctgagcctgctgcgtgcgctgaccgacttcaaacgcgcgttcgacctgaacctgcgggtgaaaaacatgctgccgtcgctgtaccgtgaagatcctgaattctatgaaaacatgcgtattcaggacctcgcgcagaacattcacaaactgattgagcatcacaacctgccggatctgatgttccgcgcgtttgaagtgctgccatcgatggtgatgaccccgtatgccgcgttccagaaagagctgcacggtcagacggaagaagtgtatctcgaagagatggtcggccgcgtcaacgccaacatgatcctgccgtatcctccgggagtgccgctggtgatgccgggtgagatgatcaccgaagagagccgtccggtgctggagttcctgcagatgctgtgcgaaatcggcgcccactatccaggcttcgaaaccgatatccacggcgcctatcgtcaggcggatggtcgttacaccgttaaagtgctgaaagaagagaataacaagtaa

SEQ ID NO: 251390 - DNA, 3798 bp, Klebsiella pneumoniae
gtgaccggtaaatccgccctgcaggacgggacggcgtttattccaggcggaacactcatcgtggatcaggcggagaagctgagcctgaaggaaacgatttccctgctcgatggcgcgatgcgccataacgtgcaggtcctgctctccgacagcgggaagcgcagcgggaccggcagcgcgctgacggtgctgaaggacagcggcgtgaatacgtatcgctggcagggtggccatcagaccacagccgacatcatcagtgaaccggataaaggagcacgctacagccggctggcacaggagtttgccgtcagcgtgcgtgaagggcaggaaagcgtggcccaaatcagcgggacgcgtgaacagagcgtactcaacggcctcatccgtgactccctcagacaggagggggtgctgggtgagaaagacacgaccattacagccctgacgccggtgtggctggacagcaaaagccggggcgtgcgggattattaccgggaggggatggtgatggaacgctgggatccggagacccggacgcacgatcgctttgtcattgaccgggtgaccgcgagcagcaatatgctgaccctgaaagaccgggaagggggccgtctggatctgaaggtttccgcggtcgacagccagtggacgctgttccgggcagaaacactgccggtggcagagggggaacgtctggcggtgctcgggaagataccggacacacgcctgaaaggcggggaaagcatcacggtgatgaaagtggaggaagggcagctgacggtacagcggccggggcagaaaaccacgcagaccctggccgtgggcgcgggtgtgtttgacggtattaaaatcggccacggctgggtggaaagtcccggcaggtcggttagcgagacggcaacggtctttgcgtcggtgacgcagcgtgagctggataacgccaccctcaaccagctggcgcagagcggaagtcatctccggctgtactcggcgcaggatgcggcgcgcacgacggagaagctgtcgcggcataccgccttcagcgtggtctcagagcagctgaagacccgatccggcgagacggacctggatgcggccattgcgcagcagaaggccggactgcgtaccccggcagaacaggccattcacctggccatcccgctgcttgaaagtgagaaactgaccttctcccggccccagctgctggcgacggcgctggaaaccgggggcgggaaggttccgatggcggacatcgacacgaccattcagacacaaatcaggtcggggcagttgctgaatgtaccggtggcgcacggctacggcaatgacctgctgatttcccgtcagacctgggacgccgaaaaaagcatcctgacccacgtgctggaaggtaaaggcgcggtggcccccctgatggaccgcgtgccggccagtctgatgacggacctgaccgccggacagcgggcggcgacccggatgattctggaaagcacggatcggttcacggtggttcaggggtatgccggggtggggaaaaccacccagttccgggcagtcatgagtgccatcagtctgctgccggaagagacccgtccgcgcgtcatcggtctggcgccgacgcatcgcgcggtcggggaaatgcagagtgccggcgtggaggcgcgcacgacggcgtcgttcctccacgacacgcagctgctgcagcgcaatggccagacacccgatttcagcaacaccctgtttctgctcgacgagagctcgatggtggggctggccgatatggcaaaagcccactccctcatcgtagccggcggtggacgggcggtgtccagtggggataacgaccagctgcagcccatcgcgccgggccagccgttcaggctgatgcagcagcgcagcgccgccgacgttgccatcatgaaagagattgtgcgccaggtgcctgagctgcgaccggcggtctacagcctgattgagcgggatgtgcaccgcgccctgatcaccattgagcaggtcacgccggaacaggtgccgagaaaagaaggcgtctgggcgccgggcagttctgtggtggaattcacgccaaagcaggaaaaggcgatagaaaaggcgctgagcgaggggaaaaccctgccggcaggtcagcccgcgacgctctacgaggcgctggtgaaggactataccggacggaccccggaggcacagtcacagacgctggtgatcacccatctgaataaggaccggcggacgctgaacggtatgatccatgacgcacggcgggagaacggggaaaccggcaaagaggaaatcaccctgccggtgctggtcacgagcaacatccgtgacggtgaactgcgcaaactgtcgacctggacggctcataaggaggcggtggcgctggttgataacgtataccaccgtatcagcaaagtggataaggctaatcagctgatcaccctgacagacagtgacggaaaggagcgatatatttcaccccgggaggcatcggcagaaggcgtcacgctctatcgtcaggaaaagatcaccgtgtctcagggggaccgaatgcgcttcagcaaaagtgacccggagcgcggctatgtggccaacagtatctgggaggtgcagtctgtttcgggtgacagtgtcacgctgtctgatggcaaactcacccgcacgctgaccccgaaggcggatcaggcgcagcagcatatcgacctcgcctacgccatcacggctcacggcgcccagggggccagcgaacggtatgccatcgcgctggaaggggtggccggtggtcgggaacagatggccagctttgagtctgcctatgtggcgttatcccgcatgaaacagcatgttcaggtctacaccgacagccgtgagggctggataaaggccatccagcattcacctgagaaagcgacggcgcacgatattctggaaccccgtaacgaccgggcggtgaaaaccgccgatctgctgttcgggcgggcaaggccactggatgaaaccgccgctggccgggcagccctgcagcagtccggtctggcacagggaaattcaccgggaaaattcatttctccggggaaaaagtaccctcaaccacatgtggcgctgccggcatttgataaaaacgggaaagccgccggtatctggctcagcccgctgaccgacagggacggacggctggaggccatcggcggagagggacggattatgggcaatgacgccgcccggttcgtggcgctgcagaacagccgcaacggtgaaagcctgctggccgggaatatgggggagggcgtcagaatggcccgcgacaatcccgataccggggtggtggtgcggctggccggtgatgaccgcccctggaaccccggggccatgaccggcgggcggatatgggctgatccggcgccggtggccccggtaccgcaggccggggctgacattatcctcccgccagaggttctggcgcagcgggcggcagaagaacagcagcgccgggaaatggaaaaacaggcggaacagactgcccgggaagtggccggggaggcgcgtaaagccggcgagccggcggaccgggtgaaagaggttatcggggacgtcattcgcggactggagcgtgaccggccgggtacggagaaaacgacgctaccggatgatcctcagttccggcgccaggaggcggcgattcagcaggtggcctcagaaagtctgcagcgtgaacgtctgcaggctgtggagcgggacatggtgcgcgacctgaaccgcgagaaaaccctcgggggcgactga

SEQ ID NO: 251391 - DNA, 273 bp, Klebsiella pneumoniae
atgttggtgaatcttctccttgctgtccccggcggcttgtttggctgcctgatagacataatctggaagtgcgacaccgtacacccatcgagcggtgatctgaccgaacagcgccgggcaaccgccaacatgaccaaagtaaggaaggccggacattttcgacagcgcctggtagaatgggtctttaaagcgcttctcccagggcgttggttgctggcacaccatcaggccgacaatctgatcttcggtgatctggaagtttttactcagtag

SEQ ID NO: 251392 - DNA, 768 bp, Klebsiella pneumoniae
atggagtggttatgtaaagctctggggttaaccagcgatacgatttcaatcaggaaaatattctccccagacgtctatggctcaatgaagctgaccatcgccggtgctgattttccaaaggtgttcgatgacccgaaagaacagatattttcaggtcaatggttaaaggcagtagttgaacaattgtcctgtattcacgggccagctctggtattaactgccagccattatgaaacccggatgattgccaatcagctgggtgaggtctcgcaaccagtttatattcagaaagcaggtcaggccctgtccgaaattattaaacagtatcaggagaaaccaggaattctgatttctgccggtgcttctgttggtgtgagcccacgaggcgagaatggggaacagattttccaggatttaatcatcacccggatacctttcttacctccggacagaatgaaggctgaaagcctttatgggtatctgaaggaacgaggctatagtcgtacctttgaggcagttaaccggaacatctacctggaaaatttgcggaaagttattcgcaaagcaaagcagtctgtagggggggggattcgtagtgaaaatgatactgtcaggataattatcctcgatccgcgttttccggaaccgactgacctttcgtctaaacatcggtcgctggaacacattattcccgttcgatttcgtcgtgaatatcgtttgtgtgaaattttatcaccggcgtattttgaagaggatatccagtgttaa

SEQ ID NO: 251393 - DNA, 174 bp, Klebsiella pneumoniae
gtgaaacagcgcgaattccagcgctggttggaatctcagggggtcgaaatcactgacggtgcaaaacatctgaagttgagactgaacgggaagcgtagcgtcatgcctcgccacccgggatccgagattgtagaacagcttcgtaaagctattctcaaacaactaggcctgtag

SEQ ID NO: 251394 - DNA, 747 bp, Klebsiella pneumoniae
  misc_feature (11)..(20): n is a, c, g, or t
  misc_feature (309)..(309): n is a, c, g, or t
atgacggacannnnnnnnnnacatggcggacaagaaaccgtcaaattgatggttacaacacccgcagccgaaggctcaatcggcgttgtttattcaatgatggaattggtccctaatgccataaatgttgctaaagtaatcggtttagcagcagcaggcggagcttttataggcgcccctgcactttcactgatacgccagttagggagtaaaaaagttatatcgatcaccaaaaggcctcaaacacaggaagctgttcttgagcttgaagatgaggaaattgtttgtaatgaggctgttgcaaaattngtaactgaccctgtgatacgtcaggctttggttgacgtggtccgggctccgctggatggcaagaccaatcctgtttttaaaattcttgatcaagaaggtaatgaggtcttacggcttgagaatgaggaaacagaagaggtaaaaccattacctcgtggtacacttcttgaaaaagaagtgtctgtcgatgaggtgaatgttcgtttcgtacaggtcaattttgaagggaacaaaggatggagaattgattacctaggggatgaacattcagttagcttagatgacaatgcattcctttctcaggtccaagctgcaacagtgcaattttcaaaagaagatctttatgttgttgatcttgaaacaattaaaacatataccgcccgtggtgtaacacatcgttatactataaaaaaggttaagcgtaagcgcccagcgtaa

SEQ ID NO: 251395 - DNA, 366 bp, Klebsiella pneumoniae
atgcgtgatatttctttggtactggaacgatggggggcttgggctgcaatggatagtagtggtgttgattattcgcatatcgctgcagggttcaaaggactactccctcaaatgggcaaaacacgactatgttgtaccgacgatgatgcgcttatcatcgaaggctgcatggcacggctccgcgataaaaagccatatgagcaccgattacttgttgctcactacctgtattgtatctcgaagcggaagatagctaagtcactaaagaaagacgaaaaagtgattcgcatcgagatacagatagccgaaggtttcattgacggatgtcttgcaatgctagacatccgtcttgatttggattgttaa

SEQ ID NO: 251396 - DNA, 1341 bp, Klebsiella pneumoniae
gtgaccagcacccgggaaaacgacacctacgggcatatcgataaacacggacgctaccgggtgaatatgctgtttgaccgggcgcgctgggaaaccgggttcgagagcctgtgggtccgtcagtcgcggccgtatgccggagacacctacggcctgcacctgccgctgctggccgggacggaggtggcgattggctttgaggatggtaaccctgaccggccgtatatcgcgggcgtgctgcacgactcggcgcacggcgaccacgtcaccattcgcaatgacaaacgtaacgtcctgcgcaccccggccaacaacaaaatccgcctcgacgacgagcgcgggaaagagcatatcaagctctcgacggagtacggcggcaagagccagctgaacctcggccatctcgtggatgctgaaaagcggccgcgcggcgaaggctttgagctgagaaccgacagccggggcgctatccgggcacagaaagggatatttatcagcgcggacggacaggcgcaggcccggggacaggtgctggatatggagccggcggtcagcaatctggccgaagcccgggagcagatgatgtccatctccggtgacgcgcagaaggcgaccgcgaacccggccgatctccaggcgcaaattaccctgctggagcagcagctgacggacctcaaaaaatcggtactgctgctcagcgcgccggaggggatagcgctgaccagcggggagcatctgcaggtctcagccgggcataacctgattgccacggccggaaagaatgcggatgtcagcgtggtgaaaaatctgttcatcggggtgggcagtgccctgagcgtgtttgtgcgaaagcttgggatcaggctgatagcgaaccagggaccggtacagatgcaggcgcagaatgacctgatggcgctgcttgcccggaaggaaatcagcattgtcagcacggaagacagtatcgaaattattgcgaaaaaacgggtcacaataaacggcgggggaagctatatcacgctcaatgccagtggcattgaatcagcgacggcaggtgagtacagaacaagggccgggtattacgtcaggcgggaaaaagcgcagcataagcctgacattgcacctttagctaatgcgataaatgacggcagccataatattcgctacctgtgtacagatgataatgggatgccgatgctgaatacaccttacagggcctttctggctgatggctcggtattagagggtgtcagtgatggcgaggggtatacgaagttgtttacttctgcacaggtacaggatgttctgctgcatatgataccggaggccatcaatgcctaa

SEQ ID NO: 251397 - DNA, 750 bp, Klebsiella pneumoniae
gtggaaaaaatcctccgcgagcgccacggcctgcgcggtcaggattttctgttctcgctgacaaaaacgtatccgcgccgcgagcaggtgatgcagtacggcgaggatgacctgcgctttatcacccggctgctgggtgaggtggggatctggtttcgctttaccgccgacacgcggctgcacatcgacgtcgctgagttctgcgacagtcagcagggctatgagaaggggctgacgttgccttcggtcccgccgtcagggcagcagtcggccggggtggacgcggtgtgggagatggcatgcagccaccgcgtcgtggagcagcaggtcagtacccgcgactacaactaccgcgaggcgacggcggacatgaacgcgcaggtggatgtcacccgcggggagaccactacctttggtgaggcttaccactggggagataactacctgaccgccgggaatgtccatgaccgccatccggcgccggagtccggggcgttttacgcccgtcttcgtcatgagcgttatcttaacggccagacccggatgcaggccaccaccagctgcccgacgctctgcccgggacaggtgctgaaggtcaccggcggagaggaggtggccggggagtttgctgatggcgtgctcgtcacggcgatgcacagccacgcccggcgcgcgtccggtgatggccgggacgctgccggcccgcgtgaccagcacccgggaaaacgacacctacgggcatatcgataa

SEQ ID NO: 251398 - DNA, 267 bp, Klebsiella pneumoniae
gtggctctaacaacgtttgcccgtaaaatcagtaagattatttatttcatattgctgtttttggttctgggacgtgcacttccaagaccggaaatctatctcgattatgatatcgcaagggatatttgccacttcttattcgggattgtgaatgccgatacgatgtatgacactttcttttatatatcgctgataatagtgatattcctttcagctgtactctacattattacattgcagttaatttcaacgataaggagcaaatga

SEQ ID NO: 251399 - DNA, 186 bp, Klebsiella pneumoniae
atgcgggcgaaggtctctctcctgctgcgtgcccacgtcgccatagtagttagccaggtcagcgtcacccgtagagaagcctttgggcgactggcggaacatacgcaccagcgggattccaacggccccggcaatatcctctttgaactcgctcaggagatcagacaggccagcaaacgaatatga

SEQ ID NO: 251400 - DNA, 477 bp, Klebsiella pneumoniae
atgtttcttatacctaacactcagctaaaggcgttatttttcatgaaaaaaatcggtctaatttcggtagtagtaatgatctcacatccggcattcgcagaagataagtgtaaaccaaacctaactgagtttgatgtatgcgaacaggctcagaaaatcgtcactcaggtacgacctagactgcccttaacgttatcagaaaatgtaataatgaaagatgtttctgctgatggaaataaaataatcgcgcaggtaaggctaggcgtaacagaagaagaaatgctggctacggcttcagagacccatacttcaatcgacgttgctaaatctcgaatggctgaaataacaaaaaatggactatgcgagaaaaaaaacccgctgggttcattcattagattaggtggggagatgcaatatgtttacacctacccatccggaaaattcttcaatgcagttactgttagttcgtgtaactag

SEQ ID NO: 251401 - DNA, 2547 bp, Klebsiella pneumoniae
atgtcggtaccaaaccagacaccttataacatctatacagccaacgggctgacgacggtatttgcctaccagtttatgataatgaatgctggcgatatcgaggtttcaatcaacggaaccccgcaaaccagcggctataccgtacagggagcagggcaaactggcggggggcaggtggtatttatgacgccgccggctaacggttcagtagtcatgttgctacgtaaattagtcattaagcgcgataccgattatcaggataacggcgatctgctggcggagactatcaacgccgatttcgaccgcctctggttagctatgcagcaggcgtttcttagcgatagtctttcgctcaagcgtcctttgctcgggggaccatataacgccggcggtctcaaaatcgttagcctgcaggaccctaccgggaaacaggacgccgcgacaaagggctgggtagaccttcagtattctgtgccaacttcggaggcaaaacaggccgcagctgaggcaaaagaggcaagagacgaaacccgggaaatagcggataagttcggtgatgtagatagcgcgataacagcagcggaaaatgcgcgtgatgaggccgaagcctctgcaagcagcgctgcttcagatgcaacccgcgcggaggtcgcagcaacgacagctgaagctgttgtggatgttgaaggcacttatcccgatatcgcaacaggtatagcaaatacagccgttgggaaatactttcgcgttcctcagggtgttggtgcgctacaggctttttattactaccagaataacaacgggacggcccagccggtggcggtttatgcaggaaaggcatattttgattttatttattcgataatatctgaccgtctggatgtgattaatacccgtactcttacgcgtaatggtgtatccggtttttctttccccgtccttgccgctaataaacgcgttgttggttttaaggacgatggcggaatatggggagcatatttaaatttaccaggaattagcagtgtcccgccgcgcgatgcacctcgaatgatcgctgtcataaaatccctcgccgatggaaaaataggcatagggtttaacccaaaaacaggattaactttcgcgctactggatgatgattcagtagcgtatattgcagataaaatcggtggtggtggaacaacgatcccggatattcgcggggattggggggcgcgtgtatttaatccccgcagatatataggcgatgattacaatactgcatctgttctggataaaggctcgcgcacgtttgatgcgagacagttgcgtgatggcgtgcaggatacgcttgttatggctgcccccacagctacggcaatccgcattgctctcgcatatgggcagtcaaacgcggggcttggggggagcactgggcggcttgtgaatctgccgccgtgggcgttttccacctggggcttcgctggcgtgaatggttcgagtcagcagggcactgttcatatgtctgcagcatcgctcaccgactttgtaccggcgctggactactctgctgcacagtcaccggcgatctgctctgcattcggaatcacgcagcgtaacgcagaacttgggcgcgatgaccccggctatattgccgcaacagcctggcatggctcgcagcctattagctcattctacccgaatgcacagtcgggatactggaactacgagaacgcagtgacgttcctgcaacgtgccgtagagattgctgcggagtatggccgatctgcggtgcttgacgttatgcagtggattcaaggcgaagcggggccaacaggtcgcgataactacgccactcaactcaatgacctttttaacacgattcttcccggattcaaggccgcgacggggcagaccgacaacgtgcaggtagcaatctggcaaacaaacatgtcgaaagccgcaagcggcgagaactacgccagtcaggggcaatgggacgtagcgaacagccgcgccgatagttacctggctgggccgatgtatcagtttaaattaggcgatgagccaggcaccggccccagtacagtccacactggaccagaagggcgtttgatgttgggagaaacttacgctgacgtgtatagcagtatcgtcgataaaggggcgtggaaaccggtacagccggtatctgccgtactaaccggaaatgttgtcgatattactttcgaaggtacgcctttcgaggcatttggcgcaaaactgtcaatcgatagcgactgggtacccgatacgcttaaccacggcttttctttccccggcgcgaccatcacagccgttgaaataaccggggccaaaaccgttcgtctgacgctttcggcagcgccgacacagcgcactctacgttacgcgattgacgcatttgacgatgtgacctactggccgacacgccgcggtaacctaatggtcgaaaccgaccgaaaatcctggtggaacagtcagggtgtgaatatcccgcgtaacgttcgccactacgctattcgttttgaaatcactgttacggagtaa

SEQ ID NO: 251402 - DNA, 756 bp, Klebsiella pneumoniae
atgcccggaatcgttgttgcacaaaatttcaataataccgcgttgccggcgggggaaagtctggcatctgcgctgattgccgactcaggcgtaaaaaactggtttcaggccgatgcgaattctgtaacgctgagtggtaatgatattgtctcattcaacgatcggaaaggtaccgccagcaagttgacccgcgctgatgcagctaaaggtgcaaccctggtcagcaacgcatttggacaatactctggagcaagattcaacgcggcagaatctgatcgctctttattcagcggagatgtgctggatttaacgcagccattcagttggtcaggtgtggccacactaagggcgctggcggcatcaagtaacctttgtggcacattcacctcctcgtctgttcgggccatactcaatgtaagccccactaccaacgccgggaaattacagtttctgtatgggtcagcaacatgcgttggcccgacactggatctgaatacgccgtttgcgttcgtttgtggttatgatgggacgaatattttcctgcgcgtgaatggtgtgatggcttctgttgctgctgctggaagtccatcttcttcggcattcgccctgggcgcattacctggtggttctcagttctgggatggtgacgtgtccgatctctttctgtgtaccgtcgcaatgaacaccagcgctggagcatcattgctgacaaagctgacggcattttatgaagatgtttatggattaactctgtaa

SEQ ID NO: 251403 - DNA, 507 bp, Klebsiella pneumoniae
atgatcgcaaaaacaatccccttaccaatcgcaaaggctaggcagtttttggaagttgatggcagtagtgaaagcgggttgaggtggaaggttgatgctagtgccagagcaaaaaaaggctctagggctgggagtcttgataaccacggttattactacgtcaaaatagacggtgtgaaatataaggcgcatcgacttgtctgggccatagcaaatggtgaaatcccagatggcatgacaattgatcacattgatagaaacaccaaaaacaattccttagaaaacctgaggattgcagattataagctccaggctgaaaatcgtagccgtgactaccttaaatcacgcacgaattgcggctccctaactgtcaggaaatctgggcgaattgacgcctcaatctgtataaattccaggagattttataaaagcgggcgagataaagctgagcttattaaatggatggaggaagtgcagagtaaccagatggctcatctacttgactaa

SEQ ID NO: 251404 - DNA, 726 bp, Klebsiella pneumoniae; identical to SEQ ID NO: 236635

SEQ ID NO: 251405 - DNA, 450 bp, Klebsiella pneumoniae
atggccatcgtccaggtcatggacttatttgatgaaccaatgaaaatcctgatgcttgctcgtcactttggcggggcgtatgtggaagagcatgaacgtgccaataaactgcaggcaactctggacatgatgagcgaaccaaaatgctcgccggcgcctgatctctccggagacaatatcagcattgaaagcaaagagcgggagatcgtcagccttaagtcttctttaggcatgttaattaccgccttcaaactaatggcaacccataacgggttcaaaatgccagagctaaccggcgatgaacatcccgctgctattcgccagctgcttggtgcgatggcggataatatggatgaagcgaagagccgtatcgaagacatgatgcgagaacttgcccatcgccacgatctaaatgaccagccgcacaagatgcagcaagtcagccactga

SEQ ID NO: 251406 - DNA, 168 bp, Klebsiella pneumoniae; identical to SEQ ID NO: 149215

SEQ ID NO: 251407 - DNA, 3249 bp, Klebsiella pneumoniae
atgactttaaatgaaaagcccgattcatcaataaagattgttaaaacaaaaaccttgccaccagcagagggcgagcgccgggcaatgcgtggctatatgggccaatatgaaagagccggtgcagccatttatgctgaattagagcgtgggcaattggagtggataggcgtagcggaccgcagtgcgggtatcgttgatgatttagttcttggatttaatggccttatcgttgggcaccagttcaaaacgtcccgtttccctggtacatttacagtacagacactcttagtagggtctgatggtctacttaagccattagtttgcgcctggcaaaatctttgtagtgctaacccaacgtctcaggtagaaattcgtttagttgtcaacgattatccatcagttaacgacgctcccggaatggaagctccagctcatagcgctgccttccttgatgagtttgaacattatcccaaacgcacgcttgaggaatggcgctacagtaactggggctgtttagtcgaaatattatttcaacattcctgcctaggtgacgatgatttcgagagattttttcatgcgttgcgcataattcatggttctgcagcagattttatacaattccataaactcagtgcagaacaagcgagactggcgtctgatatagcaaaaatattacctcgactggtctccgataaacgagatagggatcgatggtcctgtgaagaactattatatgaactagggtggaaagatcccaccaaaacacgccacttacatcgttttcccatcggtgctcacgtccaacgcaaccgcgatacggaactacaacttctccagacgatacgcaacacaatccagggctatgtggcattgattgggcctccaggttcggggaaatcgaccttgctacagacaaccctagctaccgagtataacactcgggtcgtgcgctatctggctttcataccgggcgctgcgcaaggtgtagggcgcggggaagctgatgatttcttcgaagacatttctgcccagttacgcagcagcgggctgcctggacttcgccttcgagacagcagccaatttgaaaggcgcgaacaattcggtgaactgctcaaacaagctggcgagcgttatcaacgtgatacagtaagaaccatcattattgttgatgggctggatcatatcccccgcgaagaactaccagcccattcgctgttaggggaattgccgctgcctgcagccatccctttgggcgtgacatttatacttggcacccagcgactggaactcaggcatctcaaacccgcagtacaggaacaggctgggcatccggatcgtctcgtaacaatgcatccacttgagagagtggcggtcgccaggatggcagacgttttaggtcttgattcaaccatttcgcgtgtaaaactttatgaacttagccgcggtcatccgctggcggccaattatctcattaaggcactgttatcggctgatgaacaggacatatcatgcatccttgccggagggatggaatttaatggcgatattgaatcagtttacgcatctgcctggagagaaatcgcaaacgaccctgatgttatgcatgtactgggtttcattgcccgtgtcgaagctccgatgccgctgaaattgctggcaacaatcgtagatgctcaggcgatagagcgtaccttaaagaccgtccggcatttactcaaggaaacctcaaaggggtggactgtattccataacagcttccgtctatttgtgctctccaaaccaaagataacactgggcagtatagatgaaacctattcacaacatatttatcgtgaattagctgaactatctcgtcatgcaccagaacattcattacagtcctggctaacactgcgctatctcgcccggtcaggagagcgtgatgaacttctggcactcgcaactccagcatattttcgacaccagtttgcacatggacgttcctgttcagagattgatgcggacattcacttggctctgattgctgcgcgttccacgtatgatggtgtaattgccacacggttattactttgccgtgatgagatatccagacgaactcaagcgctggagtatgccaatgaacttccgcgcgcgatgttaaaagttggcgatattgatgcggcgatctctttcgtccaggactttcccaatgcgggctatgaagttgttgaccttcttttggaacagggtgattttgaccgcgcgaaagaactgtttgagcaccttgagccattatctcaattgcatacccccagattcgagcactatggggattcgcataatctacaagaattcaaaaaatgggcaaaacgagttgttcacttccgcgacgctgagcaaattaagcaggcaatagactatttgaccgttgaggggtttaaacacgccacaagtgtatcaaccgatgaaaatatttcctctattcgcgaacagttaaagtggacagtggtcgaggcaattgttaactggcaatcagacgttaatattcaggatacctgcaatcagtatggcattcatgagcaagagataccggttttgatgactcaggctggatttattgctagagacagaggaaataacaccttagcatcggaattatttaagactgccatggcattgtctgattttaatgatgtttctaatggggggcgaagatcgattgcattattttatgccacatcaggctgcaccgatctggcttcaaaattattcgaaaacctttttgcgcctgcaatttcgatgggagacaatgaattagaatcaacaaaagcactgacgcttgcagtcatggaacatgcgcaactttgcgttttgctcggcaaatccttgcccgacgtagtcacctcaacacacactatcttacgaccgctgcagacacatgcttcagaaacgggacgcttgttgggactgtccataataaatgcctcatgtattccttctggaaatattaaaatggtctgtcgcatggtgatgagatatgtaatgcaactcaatagctattctggaaacgatacctatcaggctcaattggcattgacagctacatcaccactgatttgtacattaattaaagtttctgcgctgtgtggtaaggttgaatatcattcagtaataaatgaaattgataatgcaatgcctgctttaatattaaaaggcaatatactactccggcgtgaaatagcattggcaatgtatcaggggctttgttga

SEQ ID NO: 251408 - DNA, 822 bp, Klebsiella pneumoniae
atgtgccacgccggtgatggtgagcgtgccgttattgttgtcctttacaccaatgacgcggtactgctgcggcaccaggtcagtatattcgacgatccagacgcactccgcctctggtgcctcactgtatgccgttgtaaccgtcacctgccgacgaccgtttaccgactgaatggtccgtgcctgcgaaatacccgatggcaggttcagatgcaggcggtcgccctcttttgcatcgatatcacgatcaagcgtgattacgcgtccattcaccgcgctgatacgaccaccattaactcgcccggccaaccgttcgtcgcccagcccaatgatgtaacccggctgcgggatcctgccgtccagcccgacatcaatttcgaccatgcggtccttattgttggtcaggatcccccacaaccctttacgatgggcttcactctgccgcgtacaaccaatggccgtgacttccagctggttaaaactgtatcgggaaaccagttccgggataaatgcgggctccatcgcatcggcataggcgttatccggatcagaccaggaaaccagcgcgttggtgtagcgggccttactggtgctgctggaatatcgcgggctaccaagaatatttgcgcgcgtatagttgaaatcgacatcacgcggcatatcggcctgaacgataatctgctcaccactccagcaggtcatcccccggaaaatagcagcgaaatcgcgcagtacggtgtaggcgtcgttacgctcctgaacatagacattgcagatataacgaggctccatgccatcgccgcccctgccatcgggaactaa

SEQ ID NO: 251409 - DNA, 285 bp, Klebsiella pneumoniae
atgaagtgtttctgggttttctcagttgctttaactctgtcgtttacagccgttgctgctgagaagaacgacaatgttacgaatgtaaaaccgtccaccggtagggacttatatcttacttgcaaaggttatcaggtgaagggttcatctgtaattaacatcgataaaccctcttaccttgaagggacaggtgagcaggttgaatttgcaatcattactcctagtggtacgtctgatggacttaaggtttttttgattcatggggtttttctccttttggattga

SEQ ID NO: 251410 - DNA, 411 bp, Klebsiella pneumoniae; identical to SEQ ID NO: 94150

SEQ ID NO: 251411 - DNA, 642 bp, Klebsiella pneumoniae; identical to SEQ ID NO: 94149

SEQ ID NO: 251412 - DNA, 528 bp, Klebsiella pneumoniae
atgggacaattcaaaccaggcgctggcgatacggctggtcaacatcagccgggcggccccgacctcagcttctcgtgccgccgtttctcccagtgccgcacgcagcgcagcacgctgcctcccccagaaatcaaatgtgtagtgcacgtcagcgctcagcgtaaacgtcgtgccgaaatttcctgcgagtgggggtgccgcgtcatacgcctgcgcgtagcgcttgcgtaccgcatcggcatctgcgctcattgttggccatcgctgcgcaccggcctgttcagcgatggcggcggcctgttccagacgggcccgagccaaacgcacatccggactcaacgacagcgcgcgttccatgaggctgttcagttccgggtcacgataacgctcccaccagtgagtggagggccatcgccagggcgcatcgctgacggcagccactgccgccgttgtcagcatctttgccctggggatgttgcgatccaccccccccataccggcacagcctgtcaggctcgccgccagtaa

SEQ ID NO: 251413 - DNA, 2766 bp, Klebsiella pneumoniae
atgaagccattggatttagaaggtcgccaatcaccctcactggtctccgggccattgcggctgacgcgaggcttgccgttaatcctgaccaaattcgtcccgcctcgctcctcgatacaattgctggagcgcccccggcttcttcagcttcttaatcccgttcagcagtgccggctgggcgtcgtctgcgccggcgctggatttggcaaaaccacgctgttggcgcaatggcatcagcagatggtcgcccagggggaacgtatcgcctggctgagcctcgatgaggatgatgatgacgtatggcagtttattccttatctgctgcaagcattgcgtccactctatgctgactgggacgccgatttctggcgtgacatggaagaacagaagctctccagctccgagcaactgctggccgggctcattaaccagctacactattgcccgcatgacgtatacctgatcatcgacgacttccacgtgattaacgatcgtggggtctatgaagccgtggggtatttaatcaagcatgcgcctgccgccttgcatctgatcattggcagccgtttccacccgaatcttgcgctgagccagctgcaggcccaggaccaactggtggaaatctatgatcgagacctgcaattcacgctcgaagaaacaaaacactattttagccgcacggttgcgctacccctcagcaaccaccatgcacagcggctacagtccgtgacagagggctggattgcagggatgaagatcgcttcattgtccgcagaattacagcatgatcccgagcatctgttgcgtaatatgcatggaggaacacgatccattgcccgctatctgaaagaggtggtactggatccgctgccggaagaggttctcgatttcctggtgaaaacgtccttcctcagtcggttaaatgccgaactatgcaatgcagtgactggacgtgatgatagtaaagcgatgctggcatggattgagcgacacaacctttttttgtcagcccttgacgaacaaggctactggtttcgctaccatcctctgttgcaggaaaatcttcggaccatgctgcagcagaacaacgatattgacctcaaacagctgcatgaattagccagtcattggttcgtcgaacagaagctgtggtctgaggcggtacgccatgcgctcagcgcaggcaagccggtgcatagccccgtgcaggacggcgcaagcgctcagtcactggcggaagaaggggatatcgatactctgatctcatggatgcatcatttaccgcccagcaccgatccgtcgcgcattgacctgcaaattaacctggcctgggcactggcgcattatttccactttgatgagtcgaggcagctgcttgataacctcgatcagatggtacttcatcatcgtgaggatttaacccgcagcacctggtgtaaattgcgcgttgtgcgggcaatttgcgaagcctttgcggaaaacatcccggagagtctggctattgttcagccgttgctggccgaagtgccctgcggcgacacctgggttgatggtctgatatgcaatattctcagctattgccatgttgttaaccagcgctatcacgatgcgctggaggttcaacagcatatgccctctccggaaagtcctttagataatctgtttgtctcggtttatcgcgcttttatcattgcccagtgccatctttgtcagggcgatctggggaaagccgggtggtacgcagagaaaacgttgcgccaggctgaatgttataccggtacccagtcgaccagtggcgcgacgctggcgccgctgctggcggagatagcctatgaatgtcagagtggcgactcgcccgagcatctgttagccgaccggctcgaattcatcgaccgattcagtccacccgatgcgctgagtcgttgctatacctatctcgcgcgtcaggccctggatggcaatatgccgtatgaggccgagcgattgctggagcatgcgcagcgtcttgccgtgtctcgcggctggcaacggctccaggccatgatgttagccgagcaggtgagggtgcggctgcagcgcggcaatgtcacaggcgcagagcaactgcagcgacaacttgaacaaatggccgccagcttcagaatggatgccgaacatccctgtcaacgcgctatcgctctgtctgcatcccttagccactgtcgccttcttctcgccagaggccaggcgccgcaagcctgtattctcctggctgatatggtccctgatcaggaaaaccggggggacaggttaaccgcagcgcgtctgcgtacgctctggtcattggccttgtggaacagtggcaaaactgccgctgcgcgcacgacatttcagccagtcgtgcagctggctgaacaacagcatctcaaaggcctctttcttgaagctggcgataccttgcaacctttgcttgccggtatgaatgaaacctcttcggcttgtactgaggaagggatagtccatgaaccctgggccggcaagcgcgcgcctgcagatggaacaccgtttaatagtggaagccccgatattcatggggaactcagcgagcgagaatttcagatattacaactgatcgctgaaggtcagatgaataaagaaattgctcgctccctcgctatttctgccgagacggtcaaatggcacatcaaaaacatctacgcgaagcttaaagtgaatagccgcactcaagcgatgagccgggcgctggagatgaaattactggattaa

SEQ ID NO: 251414 - DNA, 618 bp, Klebsiella pneumoniae
atggcggcaatggacaatctggctaagcacttaccaccggggttcgccggggagtgggcgggaagttcgttacaggaaaaagagtctgcatcacagcttccgggtcttattgtgctctcggtactggtggtattcatggtgctggctgctctttacgaaagctggtccattcccttcgcggtcatgctcgttgttcctctggggctgctcggcgctgtgctggccgtatccgttacaaatatgacgaatgacgtctttttcaaagtgggtctgataaccctgattggactttccgccaagaatgcgattctgattatcgagttcgcgagacaattgatgaaagaaggaaagagccttattgacgcgacattgacggctgcaaagctacgcttacggccaattctgatgacttctctagctttcacattaggtgttgttccgctgatgcttgccagtggagccagcgacagcacgcagcatgcgattggtaccggtgtattcggcgggatgattagcggaacgctactggccattttctttgttccggtatttttcgtgacgatcacacgatttacaggcatgcgaaaatacagactggggaatagccggaacggctaa

SEQ ID NO: 251415 - DNA, 267 bp, Klebsiella pneumoniae
atgtacgtactcctcaaaggcacgacgagacttaccgctgtagtgtttgaggaaaaccagcttgttaaattgaatttcttctgggtgatcgccggcgaagcatttcccgacgttgttggtcaggttgaaatagaccttccagtttgtgcttccacatatcggacattctttgatattcacttcgcggccgcgggcgcttacaccgccgcgacgatagatgatgccttccatatccagccattgttcgaaatccagctcggacagtaa

SEQ ID NO: 251416 - DNA, 438 bp, Klebsiella pneumoniae
atgcatcccgaacgtgccaatgggctctacgtagtcccggagcgtctcttcgtcgaatatggcgcgcttaacccccatgacatcgaaagccccctcacagacgacgacggtctgtttaccaactgcgttatgaccgttatagagaaacttcccggatgccggcagctgcatagggaagagatatcggcgttctgctgcgccggtgacgtcacgcccttggaatgtcttcatcaccccattcagatcataaatcggtatcaggatacgcatatcgaatgcctgcccttttacctgatcggtatatgggtcgacataagcatgttttccctcgacgcagtaacgcaggtcaaaatatttggccagctccggggtaatgttccgctcaacaagatagtccggcagccgaccgtcaattggcagttcataatgccgcggtaa

SEQ ID NO: 251417 - DNA, 1743 bp, Klebsiella pneumoniae
atgggtagtaacccgtggtttgatggttctctggagacgtactccgaaaaccagcagatcagcggctcgcgtgcggtcgtcgtcagctctcagaaacgaagcggaacgaagtcgttgcgtgtttcccgcggcgccggtgagggcggaaacagcgataaatccattggtaagtggattgctctgcgagaaaatgcggtattccgcattgaactctgggcgatgatgccagcagatcagtcgccatcatccgggtggtcaacaatcgttggtttgcagacccaaaacgctgccaacaataacaactggccgtcggcgatcaccatcactgaaggttcgttggggggcagaggcacctggaagaaattcaccggcacgctccgtgtagcgactggccacactcgcggcgtattctggatttctacccgcggagcaactggcgccggtacgccggggtatgatctgtatatcgatgatgtagttgtcaccgatatcacggacgcaaaagaggcacaggattcggctaatgcgaacgcatccgctctcaccagccttacctcacgtgttaccaatgtggaagggctggtaacatcccaggcgtctcagctgtcctctttgacgtcccaggtgaatgatgcgtcttcgaaggttgatcagatggcgcagaccatcaccaacaacgagaaaacgcagtcgtcgctgaataccagcttgcagtcgcaaattgacgcgcaggcatcggcaaacatcaaaaaccagacggagttgaataacgccaccacctctctggcggcaattaagtcaactcagcagacccaggccacaacgataagcgcactgtctcagcagcagacgaatttgacagctcaggtaggaggccagtcagccgagctgcaggagctgaagaaaacggttgttgaaaacggcaacgttagcagtacctggatggtcaaaatggaaaccaacagcaacggtaaaaagtatgctgctggtatcgctttaggtatcgatggcaaaaatttgcagagccagtttctggttcaggctgatcgcttcggcttaatcaatacctctaacggaaacacgaccacaccatttgttgtggaaaatggcgttgcctacatgaatgccgctgtgattaaggatggctccatcaccaatgcaaaaattggcggtgaaatccgatctgacaatttcgttaacggttcaaatggctggagaattggaaaagacggtagttcacagttcaacaacgtagttattcgtggtgaagttcacgcaaatactggtgtgcttaataacgtgactattaacgagaactgcactgtgcttggcactgttcaggccaataaaattgttggtgacgttgtgacaatgaccgaccgtgttgttaaaaactggccagcttccgggaatacctcatccggcacgcgctacctgattgcaacgattgacggtatgccctttgaacggcgtatggtgttcaatggttccgttgcgattgttcaggtatggcgtcagaacgtaacaattcgcgttgatgaaacgaccgtttggacttttgactctggaaacgatggtaaggattttgaaacatcaatcttctcaatccgtatcccggcgtcaaacttcggtcaacgtcaccagattaccattcagtggccgaaccgtggcgatagcggtcagttccggtttacaggggttgtctcgatgtacagaactactggctccatctctctggcttaa

SEQ ID NO: 251418 - DNA, 510 bp, Klebsiella pneumoniae
atgcgcaatttcagcattgctgacataggttgtgtaataagaaaacgtcatgaaatctgccgtattcttcaggagagctttatcctcatccgtgatgctgagaacgatgtttttctctttgaagaaccgtttgatatagccgggatattcaccacgcagaagcacatccgcgaagtagatttcatactggtttttctgccatgtggcaaagttgtcttccggacttgtcgtttcagggtaggcaaaatcggtatacagcatcatgccgatcttaatatctccgcccagggaggctgcatatttttttaccatagccgaagccaccagttcgtggtgaacgccctgatatttatcctgttccagataggtgccttcgtcctcgaaaatgcccagatgattgaaggactcgtagcgaatgaggttaatctggttaaaagggatccagtacttaacgcgatcgtgatagcgatcgaggcaagtgcgggcaaagttaaaataaaaatcgattaa

SEQ ID NO: 251419 - DNA, 288 bp, Klebsiella pneumoniae
atgcagctcggcgccgttaaaaagctggatcatgtcgccgcctttcagctcaacatcaacctcagcggcagcagagcgaataaagctgcggaactgatacgcctggcggcggctcgccgacagaaagatctggttacgttgatgcttgtacttcacatcgtcggaaagagcgcgcaccagggcttcgcgcgcaaagtaccatgtcgcgccaacctgacggcttttcaggatcatgcggttgcgccagtggtggttgtcgtaccagcctctttgatgccagtgcagtga

SEQ ID NO: 251420 - DNA, 2760 bp, Klebsiella pneumoniae
gtgagaattccaacgggtaattttggcaatgtgacgccgcaggctcagcagactcgcgttgcggttagcaatgtgggcgctgtggggaacgcggtatccggttttggtgccgctgtggggcaagtggcagaacaggtacagcgtgatcaggacaaagccgacgtagcggccacgcaggctattctgaccgatctggaagctaaatctaatgaccgctgggaaaacccggagacgggcgctacggtcacgcgtcagggctttaaatcgtccggcgtggtcactgatatggataaggccgacgctggcgattacgaggaagcccggaagcgcgtgccgcccagccagttaaactattttgatgcgcagtggaaagcggggcaggtacgccggacaagcacctatagcggttttgagcgtgcgcagactgaggaagcccagcgccagcagcttaacgcgacggtgacctcttcagtcgaacaggaggccagcgcctacgataacccgatgcaggcagagttaatacgcggagcccgcaagcattcgatcgagatgtatggccaggcgcgcggctggccgcaggaacgtatcgatgcggcggtatcagaagcgaatcaaaaagcgctggagcagcgcgcgcagaactacgcggtaaccaatcccaccggctggcttaatggcgattttacgctggtcaacagcagcaccggcgaacttgatatgcgcgccgttggcctggtggaatctggcggtaagcaccgcaatgcagacggtagtcttgttacatcacccgcgggcgcgcagggtgaatttcagctgatgccggacaccgggaaagaactggcggctaaacgcggcgaggagtacaacccagacgaccctgtgcagcatgcgcagctggcgcgcgattatgcggggcagctcagtaaaaaatatcagtctgaaacgctggccggtgctgcatataactgggggatgggtaatgtcgataagctgatcgctaaagtcggcgacccgcgtaaaggcgaaatctcaatggcagatttcgttaagcagctgccagctgaaacgcgtggttggctttcccgctacaacaaaaataaaactggcctcgacccggtagcagtaaacaaaatcgacagtatcgctgaatcgcagatccgccagcagcgtacggcgctgcgccagcagattgacccgattctcaataatacgatggcgcagctatataacggcgaggtgccggatgctatgccgaacgcctccaccattttgtttgcgtacggtgagcaggggcagacagcggtcaagcagctggatattgcgatcgagagcgccaaaaccttccaggctatccagtacgtcaccccggcagagcagcaggccgaactggcgaaagtgaagccgcaggcaaacgacccggattacgcgttgaaactcgatgcgtatggcaaacttagtgcgctggtgcagaagaacaacgctaatattcaggcgcagcgcgattccgcccgctttaacgacgcgctgatctccggcgagaaactcgacccgagcaacaaatccatgcagaaggcggcagacaatacgccatcggcgcttaacttccgcattaacgacgccactactcacgacgccatcgtgcagcaggttaaccagacgggcattatcccatcgcaagttacatcacaactgaatgcgatcgcccgttccagtagtccagaagtggttaagcagggctcgaccttatttaacgcgctgtacgaaacagatcctgcctctgtgggcgatatgccaaaggatatgcaaagcttttacctgaccgttaaacagcttaccgattccggtatggcgtcagacgaagcggtgaaacaggcgcagaacgtgacctataaccagactgacgccctgaaatcgcaattatcttctacgcagagcacgaaggaatacaaaaaagagcgtgccagtgcaatggattccgcagtcagcagcatgaaaccgtggtacagctttggcggccccgccgcggatgaccagaaccctaattctgtaaaattccgtaatgactaccagtcactttatgacatcaattatcgcaattcgggtggcaatgctgatatcgccaaaaagatgactaatgcccagatcgctcgcacctggagccttagcgatgtaaatggcagcgcccagcttatgaaatatgcgcctgaagcgctctataactacgggccgtctggttggcaggctgcgcagtggaaggaagaaaaagagcgcctgacctatggcgaacgtggagaaaaaattgaaaccagcccgacccaactgggaattacatcaggttcagcgcccgttattacatcaaacacacctgaatcccgaatcagtggcgaactggaaataaccccggatatttttactccgcatgatcgtgattacgcgattatggttcgcataaaagacaaagatggtatccccagagcgcagccttattacgataaatttggtcgccctatgcgttggaaacctgacattgaaaaatgggggccatatcaaaaaatgcagcaggagcgggaacagcaaggcgaagaggaattatcacgcgggaaagatattcgaggctttaaggaaaaacaccgtgcgctcgatgagcaatatcagcgtttgcacgatgaccgtatgaaccgggttaaaaaatatttttcatggagcaatgaatctgtctcttatacacatctgacgctgccgacgatctactctgtgtag

SEQ ID NO: 251421 - DNA, 915 bp, Klebsiella pneumoniae
atggaaaaagcgacagctgagcagataaataccgttcagtcgtcggtaaacggcatgtcggcaactgttcaggaagtatccagcaccgtggcggacattaatggcaagctgggcgcgcagtggggcgtcaaagtggctactgataccggtggtgcaaaccctcgcatagcaggtatccaactgggtattgatgcaaccggtagctcacagttcctggtacaggccgacactttcgcggtgtataccggcggcacggggaaagcctatccgttcattgtgcagggcggtgcggcctacatgcaggaagcgttgattcgtgatggttcgatcaccaacgcgaagatcggcaatgagattaggtcgaacaatttcgttgacggttctaacggctggcgtatagcgaaggatggctcttctcagttcaacaacgtaatcgttcgtggcagggtggaggcaaatagcggctcgttccacggaaccattgatgctaccgatggtattttccgcggctccgttgaggccaatagtttcatcggtgacatcgcggccatgagcacgttccctggcaaaagcggatcagcatggaaatcccgcatcatgcaccacgactcaagtaacaaggggggcaagagctacgcgatcagcggactgattcgctgggaggcgggcaataagtccgggtatgtgacggtagattgttatgtaaatggtcaacgcgtgtcgactgcatcatataacggtaccgattccggggaatccgcgcgcatgcgcatcacagcctgcggagtagctaccggcatatctacacaggacaccttggttgaaattgtggtaagcggcacaggtacatgtcacctcgaagccggatactgcgtgatgtctcgtggttctggttcatgggaagtaattgcataa

SEQ ID NO: 251422 - DNA, 285 bp, Klebsiella pneumoniae
gtggcagatcggctggtgtctttcgatgccctgctaccgcaacttaacgcgcaaaaacaggcactggcggccaggcagagtgctttcagcctggcacgaagacaatacgaatccggactgaccgactacctgacagttctgaacgcccaaaacgcgctgctgtatgagcgtcgtgagcagttaaccctgaaaaaacgagcaattgttctggatgcggaactcaatcgcgctttgggcggtggctttagtgcaaccgatgagacaagcaatatcctgtggaaataa

SEQ ID NO: 251423 - DNA, 1143 bp, Klebsiella pneumoniae; identical to SEQ ID NO: 94147

SEQ ID NO: 251424 - DNA, 1533 bp, Klebsiella pneumoniae
gtggcgctgaccagcttttttgctaacacggcgcgtccgcgccccatactgacggtcgcgacaatttttcttggcgcggtgctcaccacatttcaggggcgtttattctcagcggccctgcctgacctgcgcgggcagttcggcctggatatgctggaagctgcctggctgagcacggcattgaatggtgcgcaacttgtcaccatgccgatcgttccctggcttgccacagtacttgggccaacccgtgtgctggtcgtgcccagtttcacgcttggccttgtcgcctttatgatccccacgtttgcccaccactatcctgtgttggtcacgctgcacgccattgccgggttgtgcctgggtgtttatctgccgttaaccatttcgctggctctgcgaagcgtgcatccccgtttctggctggcggtcatggcggcatacagtctgcgcgtgtctactggcatggatgccggttatggcacatccggtttcctggtcgaagaaatcggttggcattggttgtactggccaatggcccttgtcggtccgataattgcttttctggcatggaaggcgttgccgttgtcatcgctcgatcgtacccaattacggcagggcgactgggcggggatcatcatgttctgctcggcgctggtactggttttcattggcatcgactcggccgaacggctgggctggagtgattccggactcgctatgtccacgctggcaggtggagccgtcttgttctgcgcatccgtgttacgcgccctgagccagaaaaacagcttttcaagtctcattgccttcggcaaccgcaatatttgcatctgtctggtgatcgcctgcctgttcggcatgcttatgacccccacgtctctgctgatcccgacattcctgacacaaatgggaaacctgaagcccattcaggcaggcacagcgacgtgggttgctttcggtacctaccttgccgcgacaccactggctatttacctggcaagacggatggaacctagactccttataatctgcggcctgatcgtcattgccttgactgcctggcaaggcacctacgtcagccatgactggcgggtggaccaattcgtcacgatccttgtcatgcagtcgttgggcgaaagtatcatgctaatcggccttattgccgcgttcgtcaccaatctcaatccgcagcacggcgtggcgctggggacttacgtacccatcgctcgcgtgctggcacccgtcgctgcgggtgcggttatgtcaacgtggcagagaatagctggcgacgttagctacgctagcctgagcacctattttccggttggcgagccctgggtggtggaacgtgctgagtcaggggtggcagggattgctcaattgctggcgcgcgaagcgctcgttgccgcacaaatcagcggttatcacctcgttttctggtgcagcttgctggcgcttggcctggccgtcttcattcgtccatccccgcctaatcagattgcgcctccgctgctgtctcttatacacatctga

SEQ ID NO: 251425 - DNA, 240 bp, Klebsiella pneumoniae
atgacccaattgtgggttagagagcgctttgggttgcccatgatttatgctgatgcggaaatcatcatgactatttatatgggggtgaaagaggtctatgctctacctactcctcatcaatatatcgctgccgcatttacctataacaaagatttatttgcagaaaccgtgactttttacccactggaacgggccaaagagattcaggccgtactggagaaaaaacgattagagagttaa

SEQ ID NO: 251426 - DNA, 417 bp, Klebsiella pneumoniae
ttggtcattcacgctgctaacgctgtcgacgatggggtcgatgtcacgcaaggatttcagatcgcggcgtttcgggcgaagcgggataaggatcacgttggccatcagcatagcctggcgctgaatttcggagtcgaaaccaccagcgtcaacgacgacgtaatcgaaacggccgcgaagcgaagtgatgtgtttgatgatgtcatcctggacataggcgaacgggatcagctccagttcttcattgtgccggcggtcttcacaccatcctgtcgtggtgcgctggatgtcgatatcagtgatctgtactttctttttctttttgattttcagacaggctgcaatttgctgcgcaacagtcgatttgcctgggccacccttggtgccgcccaccacaatgatctgagtcattcgtga

SEQ ID NO: 251427 - DNA, 1074 bp, Klebsiella pneumoniae
atggattccttaaggttttatgatttagatgataacctgaaagagttattgcttaaattaattttgaatgaaggtgatgtggtatctataaatagtggtatgtgtggcgatgtttatatatttgatcgtggttctaatacaatccctcaatattcatgtgcaaagatccctaaattgatagatggagtatctgataaggaaatctatgctcggtttgttaacgaacttaaaaatcaattaaagtactaccaccatcaatatgtgcactgggcatatgatttcaaagaggtaatgggagttccggtagcactctttcgatactggggaagtgacctcagaaagattatcaagtcctcctccagttctgatattaacaaaatatccattatagcatatttatgtgctgggcttagacactgctacagcaaaggacttgtttctcatcaagatttaaaaccagaaaatatatttattcgaaatatgagaaatgatttcagtgttccagtggaacaggatgtatataactttccgttggtaggtgattttggcttggctaatgcatccgtggattctaatttttttgatggggcacgaccctatatggcccctgaacaatgggaaaggaggccgttatcttctaagactgatgtgtttgctttgggggttattttatttgagatgatgtcaggaggattccatcctgcagggatcaaactgagtgatttttggcctaaaccgattgagggaaatactaaaaaatggactaaggctgaaccatggaagaaatgggcatcaaatgcaggggctatctcagcagatgttggtgttctcgttgatggagacatactagaacttgttaacaaaatgctttcatcaaatcctgataataggcccgacattagcgtaatgattgatgacttactacaactcttgaagtcacgagatatgagtagctttgtacaagtatcgcaattgattagtcattatgattctcaggcctcacaagtaagtcttgaggaatcttggccgtatctatctcagcgttggaagatgtttaagacaaagtttgggtga

SEQ ID NO: 251428 - DNA, 744 bp, Klebsiella pneumoniae; identical to SEQ ID NO: 135979

SEQ ID NO: 251429 - DNA, 1359 bp, Klebsiella pneumoniae; identical to SEQ ID NO: 222911

SEQ ID NO: 251430 - DNA, 1875 bp, Klebsiella pneumoniae; identical to SEQ ID NO: 222104

SEQ ID NO: 251431 - DNA, 2058 bp, Klebsiella pneumoniae
atgtctgcaacagagtctaaggtaaaaactgcaccaaaaaccagcaaaaaatcggtgaaacctgccgaagccgccgccctcaaagcggctctcgatgccgcgccgattgagtatgtcccggtgacggcactggtgaaatctcccctgaacgtcaggaccattccttatccggtggagaaagtacgctcaatggcagactccattgaagcgcttggcctgttgcagaatctggtcgtgcataacctcccggacggtcgctgtggtgtggctgcaggtggtcgtcgcctgaaagcgctgcagctcctgcagagtgaaaaccgtatcgatgccggatatcaggtgatggtgaaaaaggtacctgatgaactggctgttgcggcatcaatggcagaaaacgaacagcagatggcaatgcatccgtctgaacagatcgccgggttccgcacactggcagagcaggggaaaacccccgcgcagattggcgatttactggggttcggtacgcgtcatgttcagcgcatgttgaaactgaccgaactggctcccgaaattctggcggcgctggcgaaggatgaaatcaccaccgaacactgccaggcactggcgctcgaaagcgatcagaaacgccaggtggaagtgctggaatccgcccgcaaacggtcctggaataatgaagtatcagtttcctcgatccgtaacctcattatctcagaagaggtttccacaaacggcgacaaattccgctttgtgggagaggccgcattcagtccggatgaaatccgggttgatctcttcagcagcgaaaacggcggctatgtcaaaagtgcatcgctcgataccgccctgctggaaaaactgcagaacatcgcggagcacctccacgaagcggaaggctggtcatggtgtgatggtcgtcttgacccgatttcacactacgggaaggacactaaaatctggcgcctgcatgctgtcccgcctgtggaatataccgaagccgaatcagaacgtcttgcggaactggaagctctggaagctaagtatgaagacgagaaccccggcgtgaatgatgacgtcttggccggggctctggaagccgtctgggaagaacagcagaccatcgcgcaccgggcaaaacaccgggcatggacggatgaaatgaagcaatctgccggagtggtggtttcctggactggccaggaggtgaaagtacagcgcggtgtggtgctgtgcgccgatgaaaaaatggaggagaaggatgcatccaccgatcaggcccctgaaaaagtcgatccgctggacgccgtcagtgtcccgttgctgacccgcctttcttctgaacgcacactggcggttcaggcggccctgttgcagcagccgcagaaagccgtcgcgctgatggtctggaaaatgtgtaactcggttttccataccacaacgtccgtcaaagagccgttctgcattagcgtgagtgtgtcgcattacgcgctgacccgtgaagcacctgacggtgaaaacagcgttgcgtttcaggccatccagtcagaaaaagaacgtcttgaagccctgctgccggaaaactggcgaaaggatatgaccaccttctttacgctcgatggcgcaaccctgatggcactgatggctttctgcaccgcctgctccatagatggtgtacagggcaaggatgaatttggtcgtaaacaccagagttcgctggatggggtggaaaacgccattcagtttgaccttcgtgactggtggaaaccgacggctgataaccttttctcgcacatgaagctgccacacattgtacaggcactctctcaggccggactggctggcgcagcacaggacgccgcgaagatgaagaaaaaggatgccgctgaacatgcagagcacttcctctcaaaaatccgttgggttccggaatggatgaccagtgctgacaatcagaaacagcttgccgcaaagtctgaactcagtctggcaacaagtcagaacgataccgacgctgatgccggcgacgtcaccgaccataacaacccggcctgcgccgcctga

SEQ ID NO: 251432 - DNA, 225 bp, Klebsiella pneumoniae
atgaacggtgatcgcggcgccgtgatgtttcagggcattaaaaatggcgatgccatcaaagacatcgccaccgggcgaattaatgtgaaggttaatgtggctgatatcacccagcgctttaagatcgctaacaaactgtttggccgttactccccaataaccaatttcatcatagatatagatatccgcttcattgttggcgctggccttcatgcggaaccatga

SEQ ID NO: 251433 - DNA, 225 bp, Klebsiella pneumoniae
gtgggtcaacgccagcccaaccatctgcataggattgtaactcgcgacgccgataccgcgttcagtaagcgccatacgcgcatactcgcgcagcgtcatcccgttgtacacgttatcgcgttcctgattttcgtaccctgcacgggccatcagcgcctggcggatgccatcacctacaaaattgccgttgccggcataaatgtgagcctgttcgtttttgtttga

SEQ ID NO: 251434 - DNA, 306 bp, Klebsiella pneumoniae; identical to SEQ ID NO: 94231

SEQ ID NO: 251435 - DNA, 840 bp, Klebsiella pneumoniae; identical to SEQ ID NO: 222927

SEQ ID NO: 251436 - DNA, 360 bp, Klebsiella pneumoniae
atgcgtatgctgggtactggtgatactggccaccgatttaatcgtgttgtcgagcgtcgtctggtttttgatgttggcggccgcctgcgcgtcaatctgcgactgaagcgaggtattcaggctggcctgtgtgctctggctgtcgctcagcgtcttcgccatgttatcgacgcgggagttggcgttatccactttcgtggccagtgccgtctgctgctgcgcctgggcagtgattttcccttcggcatccgttacgcgcaccgtcaggccgctcacagcgctcgccgtcgcgtcagaggcatcctgtgccgctttcgcatcggtaacatccgtgatgaccagatcgtcgatatacagtga

SEQ ID NO: 251437 - DNA, 1134 bp, Klebsiella pneumoniae
atggcggaaaccgacgtggagtcccacggtttcgccaacgtcggcaacctcagcgccatcaccgacgacccggcctgggaacacatctacgttgagcgcatcgtgcgccacgtgcacgcgcagaaaaaccatccgtcgatcgtcatctggtcgctgggtaacgaatccggctatggctgcaacatccgcgccatgtaccacgccaccaaagcgctggatgatacccggctggtgcactacgaagaggatcgcgacgccgaggtggtggatatcatctccaccatgtacacccgcgtgccgctgatgaacgaatttggcgagcatccgcatgaaaaaccacgcattatctgtgagtacgcccatgcgatgggcaacggtcccggcggattaactgaatatcagaatgttttttaccagcacgactgtatccagggccactacgtgtgggaatggtgcgaccacggtattcaggccagcgacgataacggcgcggtgtggtacaaattcggcggcgattacggcgactacccgaacaactacaacttctgccttgatgggctgattttctccgaccagacgccggggccgggcctgcgcgaatataaacaggtcatcgccccggtgaaagtacaggcgcgggatatctgccgcggcgaactgcgggtggaaaacaaattatggttctccactctcgatgactacaccctgcgcgttgaagtccgcgccgaaggcgaaacgctctccagtcagttgctgaaagtgaaagacctggcgccgaacagcggccgcgacctgcaaatcgccctgccgcagctcgacgaacgtgaagctttcgtcaacatcatggtgaccaaagattcgcgcaccccgtatagcgaagccaatcacgatatcgccgtctatcagttcccgcttaaagcgcgaaccgccgcgcgaaccccgctgttaaacgccagcgccacgccgctgcagattgtcgatgaacgcctcagctacaccatctgcggccataacttccgcgtggtgttcagcaaggttagcggcaaactgagcgaatggcaggtcaacggcgtcgaccaggtaacccgcgagccgaagattaacttcttcaaaccaatgattgataaaccataa

SEQ ID NO: 251438 - DNA, 792 bp, Klebsiella pneumoniae
ttgataaaccataaacaggaatacgaaggactgtggcagccggcccacctgcagataatgcaggagcatctgcgcgaattcagcgctgaaatagagggcgaaacggtggtgatcaccacccgcagcgtgattgcgccgccggtgttcgacttcggtatgcgctgtacctatcgctggcagattaccccgcagggccacatcaacgttgaactggccggcgagcgctacggcgactatccacacatcgtcccatgcatcggctttatgctgggcattaacggtgagttcgaccaggtgaactactatggccgcgggccgggcgagaactacgccgacagccagcaaagcaacatcattgatatctggcataccaccgtcgacgatatgttcgtcaattatccattcccgcagaacaacggtaatcgtcagcacgtgcgctgggcatcgttcagcgaccgccacggcagcggtctgctggtcgttccgcgcaatccgctcaacgtcagcgcatggcactttacggcagaaaacctgcacgccgcccaacactgcaacgaactgcagcgcagcgatgacatcaccctgaatatcgatgcgcaactgctcggcctcggctccaactcctggggcagcgaagtgctggatagctggcgcgtctggctcaacaccttcaactatggctttacgctgctgccgctggagggcggatgcggcacctcgcaggtactggcgaaccatagcttcggcgccggtttcttttcccccgttgcacacagcgaggctgaacaatga

SEQ ID NO: 251439 - DNA, 309 bp, Klebsiella pneumoniae
atgtgtgaaaacacggtcaataaggcactgcgggtgatgggttacgacacgaaaaaggatatctgcggtcacggcttccgggcaatggcatgcagtgcgctgatggaatcgggtttatgggcaaaggacgcagtagaacgccagatgagtcatcaggagcgcaataccgtgcgcatggcttatattcataaggcagagcacctagaagcccgcaaagcgatgatgcagtggtggtcggattatctggaagcatgccgagaatcttatgcaccgccttatacaattggtaaaaataagtttatcccatag

SEQ ID NO: 251440 - DNA, 267 bp, Klebsiella pneumoniae
atggatctcatcggccagcagcactttattgtcgagtcccaacaaccgcaggttgttatgtttaaagggcatgactgccatcaacgcctgatcaagcgtgcccacccccacctcggccagaagcgcttttttattgctgtcggcaaaccatgccgcgcagccctggctgaatggctgttcgtcatcaggctcttccgaaccggagacagcgccgggccagatacgctgattaaagccctccatcaacccgcgagcgctgtgcgctag

SEQ ID NO: 251441 - DNA, 573 bp, Klebsiella pneumoniae
gtgccggatattagcgcggtcattaagaataagatcgactcccactgctgttgccagcagcagcgttgtaatgctgaaacccacttaacggctcaggccttgcgtcacgcgctgatgcgcatgcacgacggcttcagtcatgaacaaaagccgtcgacgctatggttgcaggggcaaagtctggtcatgctcagtctggtgctggatgaacatcgcgaagacgccagttgcctctcctgccacttcaacccgatggaacgccagaaactgctgcgggcgaaggatctgctgctggctgatctgacgcaagcgccgggcgtcgcggagctggccagagagtccggtctgagcgttctcaaaattaagcgaggcttccgcgttctgttcaacaacagcgtctatggcctgtttcaggctgaacgaatgcaggaagccagaagacgcctggccaacggcaatagctcagtcatgacggtggcggccgatctgggctatgccaacgccagccatttctctgccgccttccagaaacagtttggcgtaaccccttcgacctttaaacgcgtgatgtaa

SEQ ID NO: 251442 - DNA, 1695 bp, Klebsiella pneumoniae
gtgctcggcgcagtggcgtttgctgaacgcgatagccgggcgcgcgactattttcgccagcttttggccttgcccgtggaacaacagggcgagtgggggctcaaggcgcgttattcgctggcccgcgatttgatgcgtgattatccgcttactgatagtcgttcttctcacggtagtgagcaggaattgcgcgaagccttcgatctctaccagcagatcattgacgccgttcgtgaaggtcagcaggatccggagctgctctcgctggcaagtcttggccagcagggacgtatcaaacactggcaaagcgaccccattgccgcggctcatctttatgcccggcaggcggcgcagggttcccccagtggcagcctctctttacgctacactgtcgacgtcctcaaccacccggaaaacgaacagttcctgcaacctggcctggacgatccggttattcagcaactgctgattgcgagtttttttactcgttcgtccaatttgttgtacgagccggaaccgcggccctttgatccgacagaggtcaaaaattaccataatgagctgatagcgaagctggcgcagaaagtcgatcgcgatatggccggtagcgaccgcctgatcgccctcgcctatcgtaacggccaatatccgctggtgacgctgatgttgaaaaacgccaaagaaaatgggctcaccgcctgggtaagggccaaaatggcgctgcgggccggtgatgtcaacgcggcagcggcatggtacgccaaagccgcggcgtcatttccgccaaatgaaacctggggtttccagtcctatagtgatgacattgtcggcgaggagtttgttacgccggtctgccgtattcatgccgagcaggcgatactcgcgctcaaccgcgacgactatctgcaggcaatgcggctgatgtatcaggcgaaagaaaattactggccggatgtcgcgcacattgccgaacgagtgctcacggtcaatgaactccttgctttcgtggataaatatgtcccggcaccttctccttcagcccctactacgccgaaaaatgccgggcgcgatagcgctgacgccaggctacgcaacctgctcgcccgacgcctgatgcgcgcgggccagtatcaaaaagcgctggtctattttgcgctggccgaagatcgagacgccgcccgggcgtttatcgatgcctttccgaaaaagggacacaaaacagctcaggcgcagggctggtggcaagcggcgctaatcctgcgtcatcaagggatggaattgacaggctatgagatggcgcccgattttgcgctgtatggaggcgggtattcatggccctattacaaccagggaccggaagataattcggccgtgacatcgtggataagtgatggcgaacggcaacgcgttcagcgatccctgctaaaacaggacagtcatttcttacactatcgctggcaggcggtgacgctggcggaaaaagcggccgacctgttgccatataaatcacaggcctatgctgccgtgctgtgtaatgcaacaggatgggtatgggggcgggatgctcaattaaccaaacgcctgtatcagcgctatgttaagtacggcgccccgttcccatgggccgaaaattttggtcgggattgcccggagccggattttagcgcgatccaggagacggtaaaaaaacagtga

SEQ ID NO: 251443 - DNA, 186 bp, Klebsiella pneumoniae
atgcggatcgtccagccgggtaaaacagagcaggccttccgccataccgaaaacctgttgcagggtacagtcaaaggtggcgataacctgctcagcaagcgtcgggtcgagccgggcgccgcctgcctgaatgacgcgcagcgacgaaaggtcgctgtcttcccactccctggcctgcacccataa

SEQ ID NO: 251444 - DNA, 306 bp, Klebsiella pneumoniae
atgtggcatcttttctggtttccccggagaagaaatctacccgtcgccggcgcggcgagcactccacaaaacccaaatgtgaaaacccgacctggtttcgaccggagcattacaaaaaactgggtggccagctggggcacgcctataaccgtcttgttcaaaaagatcgcaccactggtgaggtgcgactgcgtatgcacgtatcgcttcatccgctgtacgtcagagaacgccgtcgggctggccgccggtatggcttccggccagaaaagcaacgtctgctggatgctatctggccagtgctga

SEQ ID NO: 251445 - DNA, 489 bp, Klebsiella pneumoniae
atgttcagggtaaaagttttggtctgccagtcggtggttacaccgctcaaccatttcgtggtagagctaagccagttcaccggatccgacaaatctgcaataacaccaaccgtatcggtagatacgtttgtcatcgtaaccgagcttcgcacctcaagactaagcgtcaagacggtccctgcctctacgggtactttcgtgatgtttgcagtccggatggaggctgtagttgtttgcaaagctttttcagcatcgttgtacgtaaatccagagccagtccccgaatctacccacagcgataaatctgattccattccaccattgccgatgagactgccggaagacagcgatcctttcagcatggtcaaaaggttaccttgtgatgtcagcattccttcactagcgctgacacggtcactaagcatacttacggccgcactgtcggctttcttagccacattcccgttggtgatgctcaggctgttctga

SEQ ID NO: 251446 - DNA, 201 bp, Klebsiella pneumoniae
atgagcgagcaacccgacgatctgctcaccccggatgaggtatgccagaagctgggcataacccagaagacgttatgcgactggaatataaagcatcggcatcgcgccgtactggcacccatccgtttcagtgcaaaagtggttcgctatgagcgccgtaacgtcgaagccttcatccagaaatgccgtagccagtattaa

SEQ ID NO: 251447 - DNA, 759 bp, Klebsiella pneumoniae
atggctggcattcaggtaccagatgtttttaatcatcctgatttaccccagggcgaaagcgttgcagatgcgcttttgctggatacaggattagatcattggtttcagtcagattatgaattcgttacattgaacggaacagatataatctcgtttaatgatcgggttactgctactgcaaaactaaatcgtgcaggagagaataacggagcttctcttctaaataacctgtttagtggttatcctggtgcgcgatttaactccgcagagagcgatcgctctatgtttaacggttcaacaccagatttaacccatactttcagctggactggtattgcaacgcttcgtaccctggctgcgtccagcaatttatgcggtacgttttctacttccacagtgcgcacaattattaacgtctcggttggtggaaataagccaggaaaaatagcctttctgtacggaacatcatcctgttatgggccggtgttggatctgaatactccttttgtttttgcctgcgggtacgatggagaaaacatttttcttagggtaaacggagagaccgtatctgctgtggctgctggttctccctcggcttcacagtttgcgctgggcgctttgcctggtggagaccagttctggaatggtgatgtaggcgacttctttatgtgtaatgttgcgttaaatgctccagaaggagcgggattattgaagaaattcattgagtattacaaaacaacgtatggactcaatctataa

SEQ ID NO: 251448 - DNA, 579 bp, Klebsiella pneumoniae
ttgatcatcgcgcgccacttcgacaatcagcgcccagatcaaattgccgtcatcgtcccacgccatatccaacatctgctgcggagaaatccagtaggcataggcgcgaacatccttcttcttctcgtcagcgacggattctgcgtcactatccatcgtgctatcgaccaccacccagacacggccatagatggaggattggaggtcaagcgcggacataaagccatcgatggaaacattctgtcgtgtcgcgcgtttccagaatttctgaattggctcaggcgcttcttctacatttcgatggatgtcctctttgaagagatatttattaatcaggttcaccacttccctggtgtgattgaagcggtaggcgcgttccagacgctccttgaactcctgatcaccttctttgaagtatcggaaaatgttgtcatcgaaccaggcacgcccgccagcgtatgtgctggcgaggaaatcccagtgctcttttttctttatgtattcggggtggcgtcttgccacaagatccttaatttgcttctcagtcaattccatttgcttctcttccatgataggtaa

SEQ ID NO: 251449 - DNA, 291 bp, Klebsiella pneumoniae
gtgattctcatcgcctggcaggagcgactgaacaggaatggccagctggctgaacgtctgatcctgaataatggcgtcaaggttcgacagatagttggctactgcacggtcaaggtaggcgatatcatcaataagcgacgggctaaaatacggcgattcgctctcccctatgcaatcaacaggaaacacaggtacaacgccaagtttgtgttcgcctttatcttcaagcacaacttttgcggtccgacgaccggcattcccggcgcctttcttaacctcttcccggaatag

SEQ ID NO: 251450 - DNA, 1440 bp, Klebsiella pneumoniae
gtggcggtgaaagccattgagacgctcaacggcaactggcgcgcgccgggcggcgcggtgcattaccacaccgtcaccccatccgtgaccggccgctggttctccggcaaccagacctggccgtgggatacctggaaacaggcctacgccatggcccacttcaacccggatatcgccaaagagaatatccgcgccgtcttctcctggcagattaaagccaatgataaggtgcgcccgcaggatgccggatttgtgcccgatctgatcgcctggaacctgagccccgagcgcggcggcgacggcggcaactggaacgaacgcaacaccaagccaagcctcgcggcctggtcggtgatggaggtgtataacgtcaccaaagataaagcgtggctggaagagatgtatccgaagctggtggcctatcacgactggtggctacgcaaccgcgaccataacggtaacggcgtgccggaatatggcgcgacccgcgataaggcgcacaacaccgccgacggcgccatgctgttcacggtgaaaaaagggcaaaccgagcagacgctttccggccttcgcgcctacgaacaggtgacggccaaaggcgattacgacagcctcgaaattccggcgcaggtagcggcgtcgtgggagtccgggcgcgacgatgcggcggtatttggttttatcgataaagaacagctggataaatacgtcgccaacggcggcaaacgcagcgactggacggtgaaattcgccgaaaaccgcgaccgcaacggcaacctgctggggtattcgctgctccaggaatcggtcgatcaggccagctatatgtacagcgataaccactatctggcgcagatggcgaccattcttggcaaagcggaagaggcaaagcgctatcaggcgctggcggcgaagctggcggattatatcaatacctgcatgttcgacccgcagactcgcttctattacgacattcgtatcgaagaacaaccgctggccaacggctgcgccggtaaaccgatcgtcgagcgcggcaaggggccggaaggctggtcgccgctgtttaacggcgcggcgacgcagcaacatgctgacgatgtggtttcggtgatgctcgacccgaaagagttcaacacctttgtgccgctgggtaccgccgcgctgaccaacccggcctttggcgctgatatttactggcgcggacgggtgtgggtggatcagttctggttcggcctgaagggaatggagcgctacggtcatcgcgatgaggcgctgaagctggcggacgccttcttccagcacgccaaaggcttaaccgccgatggcccgattcaggagaactacaatccgctgaccggcgcccagcagggggcgcccaatttctcgtggagcgcggcgcatttatatatgttgtataacgagtttttccgtaagccgtag

SEQ ID NO: 251451 - DNA, 546 bp, Klebsiella pneumoniae
atgacagcgcatggcattcaacggccatttcttcactgtcgctgccataaatatcctgtactttatgccattcctgacgataacgcaggggtctttcagtatgcttttcctgtcccagattaccgccattcgcatgttccagcggtaacgccaggacaactattgccgtattttccaccgccagagtatgtaaatcacaagccagaggcagcgcatcggaaacttcggagtcgatcaacgagccatcggaaaaacgcaggcgcagggtacgtaattttaacttccctaacgccaacgcttctctgtcaaactcgactctcgccacaccccatggatgacggatacccagctgtgcaatgctgttgttactgtacgtttcccagcgggcctgctgctgaaactgttgtgaggacaggaacgttccctcagcccatagtggtcgatgaattttcatactacaccaccgcccggtcaggtttttgcttttggcatttgagaaacctgagaccgtgccagcgtgacttaacgtgctggacgtctggctga

SEQ ID NO: 251452 - DNA, 333 bp, Klebsiella pneumoniae
atgattgtcggcggcgtagtcgaagagctgatcctgaaatggggcggcgatattgacgaattgcgcctgcgctttgtgggtgagatttacagcggcggtactagctcgctgctggaagtcgaaatgcgcggccgcatcactgaaattgatcagggtgaagcgaaacagggtgatgatactaaccacacctatgcgatcaaaaacacctattacaaagagtcagtagacgataagcccctgctggaaatcgacctgctgaacttcatctacaaacgcaacggcaagagcctctatcccgatcgcattgcctccgcgctgggcctcggccagtaa

SEQ ID NO: 251453 - DNA, 834 bp, Klebsiella pneumoniae
atgctgaatgaatttgaccaatatttagatgaacactttctatcaaagaaagccagaaaagaccgttggtattggaatagaaccattcaggacaaacgcaaaattgcgatagaggaaaaccgacaatggctgccagccattgcctactgccgctatgctgatgactttattgttatcgttaaaggcactaaagcacaagctatggccattcgtaacttatgtcggtctttcttggaagacaagctgaagttgacgttaaatatggagaaaacacatattacccatgttaacgacgggtttgtcttccttggccatcgtattattagaaaacgaggtccaaacggcaatatgcgcgttgtgtcgggtatcccacatagcaaagctaaagcgttttcatccacgctcagtaaagctttatcgggtgattactcttgtagcaaagtcgataaacttgagcacattagtcgtaaattgaaaggttgggcacagttctaccgccatacccactttacagctaaagtgtacaacaaaatcgataggatcgtattctggaaatttgcaaaatggctggctaggaaatatcgctgttccattaaatcattaatgatgacatggatacgacgaccaacgcctagcaaagctaagacttgggtggtttatggtaagtcaaataacggtattgtatgcggggcaacactatttcgtttagtgagcagccctaaaatgccattcagatggcgactacctgaaactaacccttacattaggcgagaagaaagaaacacgatcacctcgcgctacaacgatgttgctatggctgtcagccaacattaa

SEQ ID NO: 251454 - DNA, 1410 bp, Klebsiella pneumoniae
atgattaaccccgcgacgggaagcgatgacttaggcggcacccgcgccagcatagggaatgtgaaactgcgtctggcgccggacgatcagccctgggaaatgggctttgccgcctcacgcgaatgtacccgcgccacccaggacgcctatgtgggatggaatgatattaagggccgtaagctgtcgatcagcgatggttcaccagacccgtacatgcggcgctgcactgacagccagacccttagtgggaaatacaccaccgatggctgggttttcaacctgatcagcgcctggcagcagcagcattattcgcgcaccttcccttccggttcgttaatcgtcaatatgcctcagcgctggaatcaggatgtgcaggagctgcgcgccgcaaccctgggcgatgcgcgtaccgttgatatggtgtttgggctgtaccggcagaacacccgcgagaagttaaattcagcctacgacatgccgacaatgccttatttaagcagtaccggctataccaccgctgaaacgctggccgcatacagtgacctgacctggcatttaaccgatcgttttgatatcggcggcggcgtgcgcttctcgcatgataaatccagtacacaatatcacggcagcatgctcggcaacccgtttggcgaccagggtaagagcaatgacgatcaggtgctcgggcagctatccgcaggctatatgctgaccgatgactggagagtgtatacccgtgtagcccagggatataaaccttccgggtacaacatcgtgcctactgcgggtcttgatgccaaaccgttcgtcgccgagaaatccatcaactatgaacttggcacccgctacgaaaccgctgacgtcacgctgcaagccgcgacgttttatacccacaccaaagacatgcagctttactctggcccggtcgggatgcagacattaagcaatgcgggtaaagccgacgccaccggcgttgagcttgaagcgaagtggcggtttgcgccaggctggtcatgggatatcaatggcaacgtgatccgttccgaattcaccaatgacagtgagttgtatcacggtaaccgggtgccgttcgtaccacgttatggcgcgggaagcagcgtgaacggcgtgattgatacgcgctatggcgcactgatgccccgactggcggttaatctggtcgggccgcattatttcgatggcgacaaccagttgcggcaaggcacctatgccaccctggacagcagcctgggctggcaggcgactgaacggatgaacatttccgtctatgtcgataacctgttcgaccgtcgttaccgtacctatggctacatgaacggcagcagcgccgtcgcgcaggtcaatatgggtcgcaccgtcggtatcaatacgcgaattgatttcttctga

SEQ ID NO: 251455 - DNA, 1209 bp, Klebsiella pneumoniae
atggaaaaaatcgtcgacgtggtgaaagcggggatgggcttcccggcctgccacttcgatgactcccacatcaagatgatgctgcgcaaaggcttcgattttgaagacgcccgcgattactgcctgatgggctgcgttgaaccgcaaaaatccgggcgcatctaccagtggacctccactggctacacccagtggcctatcgctatcgagttcgtgctcaaccgcgggcggatggtgctgttcgatagctatcaggggctggataccggcgacctgcgcgacctgcgcaccttcgacgaattcgacgcggcggtgaaacagcagatcgcccatatcgtgcgcctgtcagccatcggcaccgtcatcagccagcgcgtccaccgcgatgtggcgccgaagccgctgatgtcgctgctggtcgaaggctgcatggagagcggcaaagatgtcgccgccggcggcgcgatggtcaaccacggtccggggctgattttctccggtctggcgacctacgtcgactcgatggcggcgatccgcaagctggtgttcgaagagaagaaatacacccttgagcagatccgcgatgcgctgctggcgaactttgaaggttacgaagcgctgcgccgcgactgcctgaacgcgccgaaatacggtaacgacgataactacgtcgaccagtacgcgctggatattaccgaatggaccgagaaagagtgccgtaagtacaagatgctctactcgaccctcagccacggcaccctgtctatctccaacaacacgcccatcggcgagctgaccaacgccacgccgaacggccgcctggcgtggatgccgctctccgacggcatcagcccaacccagggcgcggataaacaaggtccgacggcgattatcaagtcggtcagcaagatgaacgtggaaaccatgaacatcggcatggtgcacaacttcaagttcctcaaagggctgctggataccccggaggggcgccatggactgattaccttgctgcgtaccgcctcgattctcggcaatggccagatgcagttcagctatgtcgataacgaagtgctgaagaaagcgcagcaggagccggagaaataccgcgacctgatcgtccgcgtcgccggctatagcgcctacttcgtcgagctgtgcaaagaggtccaggacgagatcatcagccgtacggtgattgagaagttctag

SEQ ID NO: 251456 - DNA, 705 bp, Klebsiella pneumoniae
gtgcctgccgggcaaattgtggcgctggtcgggccaagcggcgccggaaaaagcaccgtggcgcgcttgctgctgcgttacgccgacccggacaaaggccatatccgtattggcggcgtggatctgcgtgatatgcagacggacaccctgatgaagcaactctcgtttgtgtttcaggacaacttcctttttgccgacacgatagccaataacattcgtctgggcgcgccggatacgccgctggaggcggtaatagcggcggccagagtggcgcaggcccatgattttattagcgctctgccagaaggttacaacacacgagtcggggaacgtggggtatttctctccggcggccagcggcagcgcattactatcgcccgggcgcttttgcaggatcgccccatcctggtgctcgatgaggcgacggcgtttgctgacccggaaaacgaagcggcgcttatcaaggcgctcgcggcggccatgcgtggccggacggtcatcatggtcgcgcatcgtctctcaatggtgactcaggccgatgtgatattgctgttttccgacggacagctcagggaaatggggaaccatatgcaactgttggcgcagggcggcctgtatcaacggctctggcaacactatctgcaggcgcagcattgggtgccgggtggaacacaggaagaggtggtggaaaatgaaagacaataa

SEQ ID NO: 251457 - DNA, 477 bp, Klebsiella pneumoniae
gtggagatcaaggctgaacccaagctctttgagctttaccatatggacaggcgggtcctgcttcggctgaaagccattgacgccctgcagcggaaggaatctgcccaggcgctgtatacctacatcgagagccttccccagaatcccgcacctatctccatgaaacgtatgcgggaccggctgaatcttacctcaaatgtctatacgcagaaccacacggtccgaaaggctatggagcaacttcgggatatcggctatctggattacaccgagtttaaacgtggccgggcgacttactttagcgttcataatcgcaatcccaaactcatcagcgggacggtgaaggtaccgcgcaaggaggaagaagagaaggcgccggagcagaattatgacgaagtcatcaaggcactgaaggctgcaggcatcgatccgcagaaacttgctgaagcgctatcggcgatgaagccggaaaattga

SEQ ID NO: 251458 - DNA, 522 bp, Klebsiella pneumoniae
ttgttcgaccacctgggccttaagctggcgaagaaatttttcgcgagccaggttcgctttttcctcaacctgctggagctctttctgccgcgccgtggtgtgggagatcagagaaaggtaatcgccctgggtaatatttccctgcgcgcgtgccttacggaattgttcctggatactggcaagcgttcgtgtttcgccgttgagtgttctgacaccatctatctgcctgaagaacgactccgcaagcgcatcctgccgccgcgccagtgcctctgcctgcgtgtcgttctcacgatatcgctgattcaaccctgttacgcgctggtaagtctcgtcgaccgatttggagacccgctgcagttcgctctgaagcccggcggcggcatccgcctgtcgcctctgcatatcggacacggcgccggcaccggcatcactggtcgttttcagcgcggtgatttgcgcctctgccgcactgcgcatgcgcgtctgcactttttccgactcattcgccacaccggatag

SEQ ID NO: 251459 - DNA, 249 bp, Klebsiella pneumoniae
ttgaccgatacgctcttccattgccttgttgcctttgtagcgagcgcgaccttccatcaccatctcacacagctggcacgcacgattgtgggtgtgctgttcgcagatataggcagtggtaacttctttgccctcctcattctgatgcttaacgtagtgcataccgaaagtctggaagaacacaccgttctgatcctccttgttggggaagatgcgcagatagttattaccgtctttcagacgggttag

SEQ ID NO: 251460 - DNA, 579 bp, Klebsiella pneumoniae
atggaaaccgaatacgatttcaaggctggaacatacgacatagccaagcatgaggctggtcactggttgtgtgcaatggcgttggggtgggaaccaaggagcattcatattatggttcctgaacacgcgaatggtcattatggctatgcacttaccagtcgccgagaacacttacaaagccttgaagacgtaaggttttacgcaatgaacagagttaaggtgctgtacgcaggagtgaacgctcagcattttaatggaagtgtatttgacggtgattctatccgcgccgatatgtcccgaggtggtggtgcaaatactgatttcctgaaggccgaagaaatatactttttctattataactgcttaagcaaccccaaagggtgggaggatgaatttcatccgttaatccttgatgtgcagcttctcatcaggatgaattacgattttatcttagctgttgctaaccggatgatggccatggcgagtgcgccaggcgaggagatccttttaactgggggagagttgaccagtatctaccattcctgtgatgtcaggctggcttcatttttaccagaatag

SEQ ID NO: 251461 - DNA, 234 bp, Klebsiella pneumoniae
atggccgtcgactgctgcaatctgtctgagatgatcggactgatcgctcatcaaaagccggtagtgtatctctctttggatcagcggcccgagaacacgaatggcttcaggttcgtcaagcaaagaaagcagacggcagaaaggctccagcaaagcatcggtaatagtacctatcccgacactcgttcccgcgtctcgttttttgaccggcggcaggcttccctgggcaattaa

SEQ ID NO: 251462 - DNA, 624 bp, Klebsiella pneumoniae
atggccgaggtcaaagccagcggtacccgccgggaagtaaaccgtactggtagggtcgccgccggtactgtgtccgtcctcgaacgggcagcggatataacgctcgccgttggtaccgtccagcagagtccagccgttggcgtccaggtattccgccgtttcgtcggtggcgccgggtgtaaaggtcgagcggtcacgcatcttactgctacccgcttcggtggtgaccgatacagggagaacgtcggccagctgctgccacagtgtttcgagctggtcagccgtcaccgccggcggttcatccggcagctcgttatcccattcgatacgggcgccgctgctgtgcgtaccacaggctacgaattgttggccgttggccagcagctcgataatgccgagatcgccctcgaggcggtgaatgcgtttgcggaattcaccttccacgcccagcaggtacagacatttgttgctgttagcacgccagcgccgcggcggaacgacgcccagcagctgcgcgagcaggtcgcggatcttttgctgcacgtcggcgtcttcactgtcgcagtccagcgccagccagccgttacccgtacgaacgcaaatcccgtaatcaggctcttttga

SEQ ID NO: 251463 - DNA, 372 bp, Klebsiella pneumoniae; identical to SEQ ID NO: 241652

SEQ ID NO: 251464 - DNA, 927 bp, Klebsiella pneumoniae
atgactacacagaatcagcctcaacccacaccccctgcagtcttagaccttggcgtcaagcaggaaggggttttcaacgatattgaaatgggggttttggagaatggtattccgtaccttactcagaacggcttggcgagaatttgcggtgtaaatagaacaaatattgctgatattgcaactgaatacgcacaatgttttgcaagtggcgtattcacccgtgggcgaatggaatttattagcacctatctgcagcaagcaggttatcgcgacccggtcttgtttatatcaattatgcgtaacgggtccgtccactatgcgtttccagatattgtctgcatggcactgctggagttttatgcatttgaatcccaagctgcatcaaatgcaaccgcacagcaatattatcgtgaattagccagagtcggtctccgtgactatatctatggcgctttacgataccaaccggaagacccgtggcgtcactaccatgaccgagtttctattattcaaagtactggtactgtccctgatggttattttatcgtcttcaatgaaattgctggtttgatggttgatttgatcaccgcagggcttgccgtaaacatgtatacggttccagatatcagcgttggttcttgttggggaagacactggacgtcaaaagggctgtccggaaattttggggaacgtgtaagatgcgcgcatcattatcctgacgatttcaaccagtctgcatccaaccctcaaatgataaatgcgtacccgaatgaatcattacctgagttccgtaggtggtttaggcatgagtacctacctactaaattcccgacttatattctcggtaaagcaggcatgttgcctggcgggcgagccgacgcattgagaattgcggataattttcgaaaccctcaattaagccgataa

SEQ ID NO: 251465 - DNA, 864 bp, Klebsiella pneumoniae
  misc_feature (780)..(815): n is a, c, g, or t
atgcgtgaaacgcttgaaggaaatgtcggtgggctggaaaatttgattcgcaatatttgcgccagcgcctggacatttggcgaacgtgatagcggtcttttacatataaaagcgggtttgctgcccgaccgattactggcggatgcgccttttacccttcagcaaaatagcgagcgggttatgatttaccgcgatggcgacgcgcagcctcttttttctggtcgtcaccatgaataccaacggctaacggaaaatatttgtagcctgtgcgaggagttggctcaggataatattagcgtgcggacctttgaaaagcttatttatcagaacgtgacgctctatcttgatgcgctgatgaatcaggagagtacggtctctctgcaggacaaacggctgcgctttattgaagatgtgggcaaagcaatcgctgtcaattatgaccttcagctaaatgtcgaattcgcttatcttaccggccgctacctcaccagcctccctctggcgccgcgcagcgttgctgagcccgtgcgtctggtgatgcagcgctggctggactcctcggcggggctggcgcaacgcatcgcggagaaactactggatgtcgtcaataataaatacgatctgctcatcgatacgcttgaccgtctggcgattaccgccattgtcagtaatgctatcgatgcgaccagcggcggaaaagtgaaagcgctgataatcgcccacggttattcgaccgccagcagcattgccggcgttgccaaccgcctgattggcgagaannnnnnnnnnnnnnnnnnnnnnnnnnnnnnnnnnnngcgagaagatctaccaggccatggatatgccgatggaggtggcgtttaa

SEQ ID NO: 251466 - DNA, 123 bp, Klebsiella pneumoniae
atgaaggattttgcccgagtacctaccggtaaccaggcgacccgcctgaactggttcgaggtgagactacgccagctgtgttacttgctggcgcagaaaggaaaccctgaggctgaggcatga

SEQ ID NO: 251467 - DNA, 231 bp, Klebsiella pneumoniae
atgaatcttgataacgagatcatttcaaacgcagacctcgaacgaattactggatacaagatcccctcaaagcaatcacagtgtttacgtgatgccgggattttctttgttgaagggcgagacggaagaccacgcacaacctgggcgcatttcaataatcctttagctcagagattacgacagaataacgtcgataatttgctgcagcccaattttggagcgcttgattaa

SEQ ID NO: 251468 - DNA, 126 bp, Klebsiella pneumoniae
atgctgacctcccgaggtaaaccctcggtggcatccaagcatcgtctttattttttctcggacgtggcattaatcaagcgctccaaaattgggctgcagcaaattatcgacgttattctgtcgtaa

SEQ ID NO: 251469 - DNA, 336 bp, Klebsiella pneumoniae
gtgagcagtgtcgtcgtacaggaaggcgtaaattccatcaccgtcaaacttcgttacactgatatcgacgaacagcagatcgcctggctcgatcgtaccagacatactatcgccacgaacgtttatgatcctgatgttctcagctttacgcccatcgaacatatgattcgcatcagctggcgcatactcaacagagcggaggatttcaacgaactcttggtttaccaccccaggtcctgcgctgacggcgatatccaaaaggtcaaccctaaagacgtctttccgattagttgccgacccaggctcaataccgtcctcatcagcatcgccaagtag

SEQ ID NO: 251470 - DNA, 213 bp, Klebsiella pneumoniae
atgactatcgtgaaaacacatattggtactgtaatcaccaaagacggcccgaaaaccatgaagctgcacgaaacgaaatctatgtgggtagtcggtaaaactgaatgctaccacaaagaaactggccgccggcactttgcagagcatacgcgccgccgattgctgctcgaaaccatccggccgatcgagggtgctccccaggataaaagctga

SEQ ID NO: 251471 - DNA, 201 bp, Klebsiella pneumoniae
atggctcttgaccaaaaccaacaagtacagcgtctggtaattctcggcgctgtggcaacgcttagcgacgaagatcaggcggctattcgccatttgaaacaagaaatactggcgttagctgaagccgcaaaggagccggaatacgcgatttttgccctttcactcgcgggtctggactacgccgacaagtacgagggttga

SEQ ID NO: 251472 - DNA, 378 bp, Klebsiella pneumoniae
atgaccttccggccagcccagcagcaggcggtgcatgataaggctatgcatatctggatcgtcaggatcgagatagcgctgaagcagcaggcaggcttctccctccggccagaagagtctcagacagtgaaaatcgctaaagctgccaaccacgtcgcactccacggcggcggcatcaacgcccagagccagcaacaacaaatccagagtggagtagagcaactgtcggctggtggtggcgtggactaccggcggcgtcttagccaggcagcgacgcagctgctgcgcatcgcgaagccatgtgcgtcccgcgcgcgtatgcggataaaacgtgtttacccaatagcagcagccctgttcctgcgccagcgtttgtaa

SEQ ID NO: 251473 - DNA, 963 bp, Klebsiella pneumoniae
atgtcggcatttgtttctaatagtggcactgttgctgtgcttattcccattgttttaggtatcgccgggactagtcaaatcaaacccattaaactactcatgcccttggtgtttggcgcgacaattggtgcagatatatcaattatcggttcgcctggaaacctgattgctaaaaatacaattgaaacttttagtaaagggaacttatcggtaccattttttgagtatgccaaaattggcatcccattgatgatagcgtgtgcattgttacttttcttctttggttccaggttaattccggatcgtgatgggcatgagcaatctgatgtacaaatggattatagccacattcctgagtggcacaagcttttaaccttgattgttttcgtattagcaattttgggaatggttgcaacagactatgttaaatttcttccacctattcatatcattgcttgctgcgccgctatcgttttggtattgaccggtgtattaaatcaaaaagaaacgtttaattcctttgagacattaactgtttttatgcttgcattcatgatgccacttggtgccgctttaaattcaactggagcaggtgagatgatagcaagagcggtaatttctgtaacagggaactctggcgtcatagtcatcatggcttcactatggatactgacctgggctctcactcaggtgatgagtaatactgctgcttgtacgttgttatgtcctgttggatggacaattgcacaatctatcggtgctgatccacgggctgtcgttattgccatttttattgccagtagcgtagcagtgtgtacacccatggccattccagccaattcgatgattatcggtcctggtaatgtgaagtttaaggattttttaaagccaggcttagcgataagtttcgtctgttttatcgttagcatgattttgttacctgttttttatccgttctattaa

SEQ ID NO: 251474 - DNA, 393 bp, Klebsiella pneumoniae
atgcaaatcctcagtgacatgaaggccatcactgacaggctgacccgacaaaaccgccgctttgttgtgctgccagaattcccgatggccagcgaggtgattggcacaaacgggcaggctcaagtcatgtacctgaactcagaactgaagcgactctatcccggtaactactgcgaaattgatggtattgacctgctgcagaatttcaaaaatcactacaacccggattatccgcaggacgttgaggatattgccaacggcatcaccccaacctcattacggcaggacacactgcatcccagccagagcctgctccctaatgcgctgtttatcggcactgaagtcaacgcaattttcgttcatcaattcatggtcagcaaaggctggctgtaa

SEQ ID NO: 251475 - DNA, 240 bp, Klebsiella pneumoniae
atgtcgggtggagtgaagatcgaagtgccagcgttcgatgttgtcgctatcgctgtcccgggtgaagaagtcggtcacggtctgctccagctcctgggcgcgtgccgactcttccccaccaggatattgatgatgacggctggagaacaggcggttgagatcgtgagtcaggtagcgttgtccggcgcggatggccggtggattgccgtacagtaccagcagacgagcggcaagcggtaa

SEQ ID NO: 251476 - DNA, 234 bp, Klebsiella pneumoniae
atgacgcagcacagtgcggtcgaagtgcgaattgtggaaataaagcagggtgtcggggtcagcgatggctttgcgaagacggcgggggatgggttcgccagccgtcagatcccagacgctaaccggctcgtcaccgatggcccaggcgaacagcattacttcgacgccctccgcataagcgtgggtaccgttggtaatcgggatttcgcaataggtttccaggtcgccccatag

SEQ ID NO: 251477 - DNA, 150 bp, Klebsiella pneumoniae
atgaaacctgaacacctccaccggctgacggggcgcgatgtgctccgctggcgccgtaaacatttcgactttatcaccgggctggctatcgcactcgcgtgcggcctgaccgtttccttaatccttcttatcgcgaggactgccgcataa

SEQ ID NO: 251478 - DNA, 543 bp, Klebsiella pneumoniae
gtggtgggggcggtagaggacgtttttggctatgccagccttccagtggtttcgttgcctgacctctacggtggaaaattatgcgcggcgctggatcgccagcatcccagagatttttatgacgtgaaattacttcttgatgcgcaggagcttgaccgtcccattttcaatgggtttatcgcgtatttactgagccataatcggcctctggctgaagtgctgaatcctcgctggaaagatattgctgaacctttttaccgtgaattcagcgggatgacatttgagacgatagccctggaggaactgacagcagtccccaacaggatgattgctgcgttaaaatcctgtttcacacaacaggatgtcgattttttactgtcatttaaacgaggcgaaccagactggcgtttagcgccggaaatgcgtattcaggatttgcctgccgtgcagtggaaattgcgcaatattcatcagatgccagcgataaaacgcgctgagtcattagataaactggaaaaggtgctggccgagtggcgcagttag

SEQ ID NO: 251479 - DNA, 276 bp, Klebsiella pneumoniae
atgctggcgatgagcatcgagcagggttgcaaccagggcgcgatgatcgtccagggtgaagggcttgccgtaggcggtgaagttggcggttttgctggccgggatgtagggggggtcgcagtaaataaccacgtcatgcgccagctgcatagtgcctgggatggaatcgcgaaaatcgccacagtgaaaaatcgcgtttgtgtcattggccttttcggcaaacaaacgcatttcattttcagggaagtaaggcgcggcatatttgccaaagggtga

SEQ ID NO: 251480 - DNA, 225 bp, Klebsiella pneumoniae
atgccgacaattgacctctcgcagctgccgcagccgaccattatcgaggaactggattttgaagaaatcctgattgaggtgaaagcggtgatggtggccgcctatccggcggatcagcaggctgctgttattgccgcgctggcgcttgaatctgaaccgctgaacgttatcgcccaggcgctggcatatcgcgagatgttactgctgtctcttatacacatctga

SEQ ID NO: 251481 - DNA, 303 bp, Klebsiella pneumoniae; identical to SEQ ID NO: 225213

SEQ ID NO: 251482 - DNA, 420 bp, Klebsiella pneumoniae
gtgcggggcaaccatctcaccatccacctctttaattttatttccctgactatctttaactgccagagcggtaaagtagtaaggagttggattcgttattgtgagttggttaccgacagtctgaagggtaattttttgctccggattaacgtggctgctacgttgtatggactgtgggcgatagaagagttttattcgactctgaatcgcaacttgcataacattttttttctcgctttttggcggcacttctctcgtattaaaatagaaaagcgactcacgatcggtgggcaggctttcagcttttacacctttaacgatccgaacctgacttttatcgcctgcttcaatgcgttgcagagggggcagggcgatcagcatctcatccgctttcttccctttgtcatcttcaacccatga

SEQ ID NO: 251483 - DNA, 318 bp, Klebsiella pneumoniae
atggaaaaatccatctttcagagtaccctgacggaaggggcgattggctataaatctcttccggtaaataaaggataccgtgtgatggcgacgattacgctcgcagatggaacggctcctggatttggttcgccggtgacagatactgtcagtggcagagaactcggtattgttggccctggtggacaggcctatttatcaggtatcgacgataatgcaaccgccatcgtggatctgggtaatggaaaaatctgtaacattcacttcccaaaactcaccggtacagcattaacaacattactattgccgtgccagtaa

SEQ ID NO: 251484 - DNA, 678 bp, Klebsiella pneumoniae
atgtttcagcagggatatgtggagaaaggcattgaattaattaatgaatatgttgaagaattaagtggtcgcgtggtttatgtgaaagacaaggctgaatttattaaattcctgaacagcagaaaaaacaagaacagagtaattaaggagatggttattctgtgtcacggaattatcgacactgcatcatttgattatcatcatgaaaataaaggaaaggaaaagaccggtgagtttaaatccagagatgttgttgacgttcaggaggctgtctttgattatgatgccgttgtcacaacctatgcctgccgggccggtatttctgttaatggaaaagacctgaccggaatggatgccggacaggaaaacagtccggcacaaaagatggcggcttgctgggacgtgagtgtcagagcgtttgaaatgcggtcggattattcatcgatttacggaacgaaaaaagaaatacgtgcagcagaaaattatgaagatgttattgaagaatacgaggaaagcctgagtgaatataataagaaaaaggcgaatggtgatgtcgatattacgccgccccagaaacccgaaaattatgatgagatgtcaaaacgctatgatgatgtcacagcgagagatgctaacgctaaacgcggtgctggtccaattgcgccaaatggtgcgtag

SEQ ID NO: 251485 - DNA, 381 bp, Klebsiella pneumoniae
ttgttgaacagaggaaaatacattagtggcagaatcctgatactcagcccagccctgtttggcgccggccagccagttaccgcgcaatgcgtcctcggcttcataggtggcttgctgttcctccagcaccttgcgctgcgcatcagggttgaaagcatacgtttcactcagcttttcaagcgtgcttcttctgttcgcttccctgccagaaagtccgtcggcctgagccttgatccccgcccggatcgcactctgctgctgagcgaatttattggcctgatctgccagattattcagcttctgctgccgggcgaccttatcaccgagatctgccaactgacgtttgtattccagggtttcgtttttgtgggccagcagtga

SEQ ID NO: 251486 - DNA, 525 bp, Klebsiella pneumoniae
gtgaaggcctgtgccctggcgctggtggccgtgccagacgtcaacatccagtttgatgaagcggcacaaagtatccgccgctttacggatgccgacatttcggtggccgttgcgctgcctgccgggctaatgacccctattgttcgctcggcgaaccggaaatcgatcagcgacatatcgaacgaaattcactcgctggtgaccagagccaaagcgggcacgctgaagccggaagagttccagggcgggacctttagcctgtcaaatctggggatgctcggcgtccggcagtttgacgccatcatcaatccaccgcaaagcgcaatcctcgccattggcgccggcgaggtccgggcggtagtacgcgacgggcaaatcgtcgcgcgccagcaaatgacggtatcgctatcctgcgatcaccgggtcatcgatggcgcggcaggtgcggcttttctccgggaactcaagcgactgactgaaacccctaccctgatgtttatccaggagacgagctatgcacgataa

SEQ ID NO: 251487 - DNA, 564 bp, Klebsiella pneumoniae
gtgcagcagctccttggcgccaccgtcaccaattccgcctacacctttgatgttgtcggaggtatccccttgcagagctttggcttcgaggaaagcacgaggagtaggcaggccgatcagctctgggaactgctcaaagttcacctgcttgtgtttggcgtcttcacgaaggctcacccagctgactttttctcgaaccagctgcagccagtcgccgtcgccggtgagcaggtagatatgatcgaccgttggttgtggcgcaagacgaccaaccagcatccccgccaggtcatcggcctcggcgtctttggcgatcagctggttgacgccaagggctgccatcattttcaggatgtaaggcttctggactgcaaagccttctttcatcttcttcatttccggatcttcatcgcgatttgctttgtaatccgggtaatagtcgcgacgcttgtcgctaaagccgtcccacaggatcatggggcgtgcgtgaagaatggacgcatagcgacgaacgtttttgacgaagccaaataccgcctgaacttccatttcgccgttatgtaa

SEQ ID NO: 251488 - DNA, 786 bp, Klebsiella pneumoniae
atggtcattatggttatgatcctttctgattgtcgtcagtcgtattatattgccagaaatacggggcgcaatataatgaccttatccgaccatcagcgcgctaaatcggcgttaaacgctaacgatttaaattcagctcagggctacctgacgggagaaaaatacaataatcgctacaggcctgttagcggtgaggaatcctggggaagtttacaatatcgggcggcgaaaatcgtcgccaacgccgcggcgaacggtcaaaaagtgcgtgatgatgcgctctatctcgcttatatctctttgtttgaagcagaagagggagtgcccgaacatcccgatattatgttgggttacatgcataaagccatggcgctactgttagcgaatccgcaattactcgataaaatcgattctaaaaatgtcagtactttacccagccagtttacccttgaacgctatgctgtatggcaatatttatacgatggcggcgagattgactggaccaaaaaagcgcctgaaggtgaaggttatacaattgctggtgaaagctatcagacctggaatatcaagttaaaaaaagccatctggaatcggggagacgcttttttaacaaatataggtaaacaacaatttattcatgacgctatagattattcgcaattcccggttattgcctgtaccgccaggcgaaaaggctggcacttaacattacctgctgactaccgggaacaaaatttccgcggcggtggacgttttgattgggcttcatgtcgcgctgttgaataa

SEQ ID NO: 251489 - DNA, 678 bp, Klebsiella pneumoniae
atggctaaacgtggcgataactctaattatctttatcactggattaaatctgacctaagtctcaacgcttcattgcaagatcattacgaaagcgcattcaaaacgctattactgattcttggcgatcttgccttgaaatctggtaaagctttgggttatagaaccggtcatagttgtatttgttttactgaaacaccagtctggtttatgtctgatgataagtctaaatatcagccatttggctttgagtttaataagagagatatatataagattggtggtgaatatgttatttactgttcaagagagagttcaaaaaaattacctcaagagtttatgtggaaatggatgatacatgaacccctaagtcaaactacgcaaactccatatgggatagactttacttgggagcgggaggttagggttaatagtagcagaataaatttcttaggtccgagtgatatcgttgatcgttcatccttaagtaatgtaatgtttgcatttacttgtatatacgtaccttctatttattggaaaggtcggtttcttaaagaggtggatgtactattagatgggtggttgagtgaattaaaaaatgaaaataattattatctatatgaaatattctataatgaagtgatagaagagctaacaagatctattcaggttttaccataa

SEQ ID NO: 251490 - DNA, 447 bp, Klebsiella pneumoniae
atgagcctgacgccggaagaggcagagcagcgctggcgggagcagctgcggatcgaggccgagcggcgcgcgaataactacgccgcagcagttgcggaataccagaggaaaaaggccgaagccgcactgcgccaggcgcagcaaaaagaagcattgcagaagaacggcattccagaagaggtgatcgactgtatcggcgcgcagctgcgtagctgtcggattttcgtcagtgatgacgttgtgcggtcaatcgccgccggtgctcgcgttcgccacggtggcgggatgttggcggcggacggtggccggttgcgtgaggtgaaggtgtggcgcgcaggcgagaaagataaaccaacttccgaatatatggcggtgtgtgacctggtcacgcgctggaagaaggcggccaaacaaaaggccaaaactgaagttaaggggaaaaaatga

SEQ ID NO: 251491 - DNA, 648 bp, Klebsiella pneumoniae
gtggcgcataatggtatccagccgagcgtcgatctcctcttcgctccagaaaaggctggagagatcctgcacccactcgaaatagctgaccgttaccccgccggcgtttgcaataacgtctggaaccagcacgatcccccgctcagccagcacgtcgtcagcctccggcagcgtaggaccattggcaccctccagaatgaggcggcagcgcagcccagccgcgagttccgcgctaatttgcccctccagggctgccggaatcagtatctcgtactcgagacgccagaaagcctcttccgtcacgttatcggcaccggggaaaccagctattgtgccgtgctcctgttgccacgcctgcagtgccgggatatcgagcccgttatgctgatacaacgtcgcacgatgatcctgtacagccaccacccgcgcgccagcagcatgaaacagcccggcgctgacgctacccacattgccaaaaccctgcaccgcaatccggctttgcgccacggggagtcccattttttccgcaatgtgacagccggtgataaacacgccgcgcccggtcgcctgtacccgccccagcgatccgccgaggtggaccggtttccccgtcaccacgccggtcgcggctgttccggcgttgcgtga

SEQ ID NO: 251492 - DNA, 492 bp, Klebsiella pneumoniae
atggcaattcctgtttatctttggctgaaagacgacggcggcgcggacattaaagggtctgtcgacgttcaggatcgtgaaggcagtatcgaagtggtggctcaggagcataacctgtacatcccgaccgataacaacaccggcaaactgaccggcacgcgtattcatacgccgttcctgttcaccaaggagatcgactcctccagcccctacctgtacaaggcagtgaccaccggtcagaccctgaagtccgctgagttcaagtggtaccgaatcaacgatgccggccaggaagtggagtatttcaataccaaacttgagaacgtcaaggtggtgaaagtgaatcccctgatgcacgacatcaaaaaccccgcctacgagaagcacaaccatctggaacagatagagctgcgctacgagaagatcacctggacctataaagacggcaacatcattcactccgatagctggaacgaacgcgccaccgcgtaa

SEQ ID NO: 251493 - DNA, 522 bp, Klebsiella pneumoniae
atgtcttcggccagctccgatgcgatagccgccgtggccatcatgatgcgggatgtctataccctcgttaccggaaaaatgccgccggcgcataaggcgataacgctctctcgctggatgctggcgttcgttatcggcctggcgatgatcttcgccctgacctcgaacgatatcatcagctatatcaccaaaatgatctccatgctgatgtccgggctcttcgtctgttccattctcggccgcttctggctgcgctttaactggcagggcgcgctaaccgcgctgctgagcggcatgctggtgtctattgtggttctggttaaggccgactggctggcttactggggcaatccgtgcattccgtcggttgttggcagctttgtttccgctatttttgttaccgtcatgacgccagccagcaaaatcagccgtcagcaggcgctggaaatgattacccaggagcgggaaggggaggcgatcccggcgaagacggtagtgcaggtctcaggagaaacgcaatga

SEQ ID NO: 251494 - DNA, 156 bp, Klebsiella pneumoniae
atgtacgacagacataacggaataaaagggaggtatctcaaaattcacaacatgctgatttctgtggttgtaccaaaaaaccatgaagtaaactacctatggaggttatttaacataacgtacattatgcgtactaagtttgtaatggctcaatag

SEQ ID NO: 251495 - DNA, 198 bp, Klebsiella pneumoniae
atgattgatgcgctcagatccgggcaaatcatgggcgccgcgcttgatacctttgatgacgagccgcttccagacgacagtgcattctatactctgaataacgtgaccattacgccgcatattgccgggagtaccattgacgcattcagtaattcgcccaaactcttcgctgagatccttttaaagaaactcagttaa

SEQ ID NO: 251496 - DNA, 135 bp, Klebsiella pneumoniae
atgctcgtaaaaactggcgaagaagagatacaaacgcttggcctgcacggactggctgacggaaagaagatactctactttacgaggattaagattaaccagcccctggaaaagctctgcagcgtggttaaatga

SEQ ID NO: 251497 - DNA, 396 bp, Klebsiella pneumoniae
gtgcagcacgccgtagcccggcatcagcgctttattgataccctggtaatcaatcagatagcgcaccgcctcgcgcactttcggattggcgaagtgcgcctctttcatgctcatcgccacgtagtacatggtgccgcgctgcaccgcatcgacggtcagctgcgggtcgctgcgcagggcgttgatatcggaaaccgccatattgttggcaatatcaaggtcgcctttttcgatcatcaggcgcagagtttgcgactcctggaaatgacgcagtaccacgcggctcattttcgcctcgccgcgccagtagtcagggttgcgcttcatgcgcagcacctcttttgcctgccaggtttccagcgtaaacagcccggaaccggcttcatgggtggttag

SEQ ID NO: 251498 - DNA, 378 bp, Klebsiella pneumoniae
atgaaatatctgtccaaggtgggcattgacgaacgggcgcaaagtaaatatccggccaatctttccgggggacaacagcagcgagtgtccattgcccgggctctggcgatggagccggaagtgttgttgttcgacgaacccacttcggcactggacccggaactggtgggggaagtgctgaaaatcatgaggcagctggcagaagaaggaaaaaccatggtggttgtcacccacgaaatggagtttgcacgtcacgtatccagtcaggtgatctttctgcatcagggaaaaatcgaagaacaagggcctccgtccggggtatttggcaacccgcaaagcccgcgccttcgtcagtttttatccggtgcgctgaaataa

SEQ ID NO: 251499 - DNA, 339 bp, Klebsiella pneumoniae
atggggcagacgggaggctttgtcgactgcaccacgttactggataagcagaaacagtccatcagcgatctgcctgacgggcctgaaaagtcactgggcttcattgatgatccgggcaacaccgattttgccgcgctgctgaacgcagcagaggcccgcaagaccatccagttatacgtcgaattacccaacaagcgaacagcgacgatgctcctggcgctgtccgggtggcagatgaatgaaatcgccgctccggcgaatgaggtcatccagatcactgttcagggtaaacagaacaagatcacctggggaaccgtcgctgtctccggcggcgcctga

SEQ ID NO: 251500 - DNA, 480 bp, Klebsiella pneumoniae
atgtctactcccgcacatttatggcttgaagatgaaaacggttcgccgatcattggaagctgcatgatgccaacgcgtcttggatctattgagttaaaatcattctctcatggtattactattccagttgatccaagctggggaaaactgacaggtacgcgaatacatcgtcctgtgtcgatagtgaaggaattcgatcagacaacaccgcttttgtatcgtgccgtgtgtgaggggcgcccgatgaagaaggcgattataaagatgtatcgcattctggaggcgggcattgaggccgagtatttcaatatcatcctggagaacgtcaaagtcactacggttgcgccgtatttatcacctactggtatgagcagtacccacctggaaacgctcgagatgcgttacgaggcgatcacctggaaatacatggacggaaatatttactaccgcgactcatggaatgaccgttgttgtgcatga

SEQ ID NO: 251501 - DNA, 204 bp, Klebsiella pneumoniae
gtgctgcttcatcaacagcagatctttttccacgcgatccatgccgaccgcgcggcctttcagatggtcgttatcgtggcggttcacgccgtgcagcattacgtagcggttgttgatgtagaacaagccgtcacgcactttgatatcgcggaaaccgacgcgctgcggaatgatttccagcacctcgccggcggcgttctttaa

SEQ ID NO: 251502 - DNA, 453 bp, Klebsiella pneumoniae
atggatcgtatggatatcgtagttgcccggatcggcgatccagcaattatcgtcgcagttagcgataaaatcagcggtgttaaagctgtcgattttgttatgcgcgtaaatgtagcccagctcaaaaccgtgccacagggagttaacgcccgcggtaaagtcagtctcatcttcggcatccatataagcgacgttaaggttggtcaccacgctgtcctgcggatcggttttttgcccattccacgtcatcgtatagccatagccggtacggctggactggtcgacccagcgtcctttcgcatcgtgatagccataggcgttatttaccacgttgctttccatggcgatggcagtggagaagcgcccgctgttccacgcgataaccgggcgcaaataggccacatttttctcattttccagtgcggtgccatgatactgctggtcctggaatag

SEQ ID NO: 251503 - DNA, 201 bp, Klebsiella pneumoniae
atggttaagccgcggctgatggatgaacaaacgcacgctgtcgaagtcgtacagcaggttgaactgctccagcgcgccaagggcatacagctgcagctgctcgttatgctcggcgtcaacctgcacgccgcggccatatttaagatcgtggatctgcagctcgttgccgacaatgataacggcgtcggcggtaccgaatga

SEQ ID NO: 251504 - DNA, 177 bp, Klebsiella pneumoniae
atggccagtaatgatgacatcgtctttatcgacagtgatcggctggtcaaaaccacgcttttttatggctgcggccaggtcacggatctgctgctcgtcatgctttttggcgttcatttcatagggaatgagctctgccgggtctcggtagacgatttcgaacgttttggtcattaa

SEQ ID NO: 251505 - DNA, 486 bp, Klebsiella pneumoniae
atggtgccgcgccgcaccgggctgatgaccgttgatgcgctgctggccggcaacggccaggtgttctggaacgccattaatcatctgattcttcccgcctcgctgctgggttttcactcgctggcttatatcagccgtatgacccgcagctttatgttagcccagctgtcgcaggagttcattattaccgcccgggtgaaagggctgaccgagcgccaggttatctggaaccatgcgtttcgtaacatcctcgtgcaactgctgacggtggtggcgctggcctacggcgcgctgctggaaggcgcggtgctgattgaaaccgtcttctcatggccggggtttggctcctaccttaccggaagcttgctgctgggcgatatgaatgcggtgatgggctgcgtgctgctggtgggggtgatcttcgtgatgctcaacctgctctccgacatgctgtatcaattctttgacccgaggacaaaatcatga

SEQ ID NO: 251506 - DNA, 480 bp, Klebsiella pneumoniae
gtgccctgggttggcattgaggaactacttggcgagcaggggcatcgacatctgagtcagctcttaagcggctatcttaatgaaaagcaaattgcgctgattaataaaaatatggttcgtgagttttcactgcataacgttgtcaactctctgacgatactgaatgctggaaaaaccatgggccatatcgaaaccattatcgctgagtggcaaaatacgcttggttttcattttaataataacttaattatcagtttatatgtgcatctcagctgtatgattgagcgtctggtaatgcgtaatgaaattagccattataaagatattgagcaatttacccgccagcatggcgaatttattgccatggtgaatcactcgttccagcgcctgaaaatactctataacgtggcgctaccggtagcggaaattggctatattcacgatatttttgaattacgtattgaagattttagctggtaa

SEQ ID NO: 251507 - DNA, 279 bp, Klebsiella pneumoniae
atgaaaaatatcgggctttttacatctgtgtattttaataatatcggtaacgcgtttattgattttggtgcgcaagcaactatcgagggggcattaccagatggctatcagttagttaaagttagccaatttcagtcttttgtgaatgcaatgcaagttgggatgggactaagagaatctcgagttgtacgtgcagtctggaatagtgtaatgaaaaatcatgcacataagattcatgacaaattatacactgcgatcccaactaaaaaaaaactataa

SEQ ID NO: 251508 - DNA, 228 bp, Klebsiella pneumoniae
ttggtggttttagtgtttctgagttttatcgttgcggtagaagaggtggtaatcaccatcgagcaaaaagggctgactatagttatgagtgattttaaaattaggaaagatggggccggtaaggcccccccaaaaaaagaccgtcagagagttagacagaagtttaaaattgaaaaagatattagtgttattatttactatggggcatcgatcgcaattggcaattga

SEQ ID NO: 251509 - DNA, 216 bp, Klebsiella pneumoniae
atggttcagccggaacagctcattctgctcagacagctcgccggtgcaggaatgccacaggtaattcagcttactggccagctgcgcattgacgcccagctgacggcactgtttaagcagccactcgatgtcgggagcgacatcgcgcgaaaaacgacgttgcctcagagcggtcgccagccagcgggtgagaaagatattttcctgtactggtga

SEQ ID NO: 251510 - DNA, 246 bp, Klebsiella pneumoniae
gtgcaaaaagcgatcgataacctggttcacaaccggacggtgattatcatcgctcaccgtttatccaccatcgccggggccggaaacattctggtgatggaagagggacaggtggttgagcagggtactcatgcgcaattgctctcacatcatggacgttatcaggcgctgtggcaggcgcaaatggccgcgcgcgtgtggcgcgacgacggggtttccgcgtctggagagtgggtgcatgagtga

SEQ ID NO: 251511 - DNA, 156 bp, Klebsiella pneumoniae
atgaacgaagaaaccaattaccgccggttctggcgaagcacagttatctgtatcgccctctgctcgctgctgttttggctcccgatgggctatctcgcctttcgtgttttctctgtggtgtgggaggcgctgtggctgcttattacaacgaaatag

SEQ ID NO: 251512 - DNA, 390 bp, Klebsiella pneumoniae
atggtgttgttccttaaatcaaatgaggtcagcggcgatcgcatcttcggatacgtcgtcaaaatcgtttacagggttaacgttgagcgcagggcgcgggtcggattcaggcgcgatggtgggtttaccatcagagcgggttatcagcgcttcgactttcgtccagcggcgtgggctttctttcttcagaagcttttcggcctgcgtcggactgatcaccttctggctgtacatctgatcctgtttcagcctgaaagatttcagcaactcttcggcttcaacttcatcgcgccatgcacgattgccctgcttaccggttaccagcttgaaccccggtaccggatgcccggcgttgagttcactgtttacccggtcgcggatggcctttag

SEQ ID NO: 251513 - DNA, 219 bp, Klebsiella pneumoniae
atgcgcggcgctttcatcatggaaaatcgccccgtgcggtttacgggtctggttaccgacgatcagctcgtcggtgctgatggtcagcggcagctggcgcatcagttcatagaagcggcgcgccggtttaacggcggcgggaacgcccgcgatgtcgccatcaagagcgttcagcgtggtggcatgttcggtgcacagcgtgcttttctgggcgagtaa

SEQ ID NO: 251514 - DNA, 246 bp, Klebsiella pneumoniae
atggattgcgaagtccacggcaacggagcggcaagcctggcggtggtgggcgcgatccgcaactgccgctggtacgagcgcggcctgctgcatccgttcctcgactacgatgaaccggcggcctatctcaacagcattgtcgacccgatggatgaccagggatttgtgcatttgtcacaacgtccgggtctcggtgaagacattaattttgcgtatatcgaagccaataccgttagccacgactga

SEQ ID NO: 251515 - DNA, 165 bp, Klebsiella pneumoniae
gtgtggatcaacacctacaaagttttctccatttcgaccccgtttgggggctttaaagagagcggtctgggccgcgaaaaagggatccaggggctgaaagcctggatgcaacaaaagagcatttatctggcgacgggtaatagcgtcaaccactggtgcgactga

SEQ ID NO: 251516 - DNA, 306 bp, Klebsiella pneumoniae
atgcagtttaaggtttatgcctataaaagagagagccgctatcgtctgttcgtggatgtgcagagtgacatcatcgatacccccgggcgacggatggtgatcccgctggccagcgcctggctgctgtcggataaggtctcccgtgaactctatccggtggtgcacatcggggacgacagctaccgcctgatgaccacggacatggccagcgtcacgtcctccgtcaccggggaggaagtggccgatctcagccaccgggaaaatgacatcaaaaatgcgataaacctgatgttctggggaatttga

SEQ ID NO: 251517 - DNA, 225 bp, Klebsiella pneumoniae
gtgatcttcccgttcgccgtcgacaagtcgctggtcagctgggtgatggcgttaccctgcgcggtgatcttcccttcggcagaggtgacacgggtggtcagtgactgcaacgcgttcgcatcggccttgttgttcagcgcggtgttgatgtcctgcactgagttgttcagcgtgacaatcgcggcgctgttcgcgtcaaccttcccggaggtctgctcaacctga

SEQ ID NO: 251518 - DNA, 150 bp, Klebsiella pneumoniae
atgctcccagtcctccgtaaacgtgagctggtttttacgcgccaggttgctgacggtatcgccatcgcaggcggtatccagcagaagaatattggtgaagtcggcaagcatcgcgccaaccgccgggtgcagcggctggcggtcgaataa

SEQ ID NO: 251519 - DNA, 231 bp, Klebsiella pneumoniae
gtggtctgcgttttcccggaacatccgcgtgatgagccgatcagtcacgctgtaggtatccaggtcatgcaggacaaaccactcgttattctcccgatagcgttccagcatgctatcgccggtgtcaaagaagaactgaagcaggccgcaacattcttccgacgttctgctctcaatcaggggcttcgtcatctgggccagaatatgttcaaaccaggtccgggtggataa

SEQ ID NO: 251520 - DNA, 168 bp, Klebsiella pneumoniae; identical to SEQ ID NO: 103979

SEQ ID NO: 251521 - DNA, 258 bp, Klebsiella pneumoniae
atgccgctcattcgcggctacaacgactcattcgacgccattaccggcgccattgattacgtacagaagctggcgaagcatggaaatatccgccgcatcgacatgctgccgtaccaccagttgggacgcaaaaagtacgaacgcctggatatgccctacccgattacccaggacccgtcttattcaccggacgaactggaccggctggaaaccttcttccggcaatttgattttgatattcgcttagtccgccattaa

SEQ ID NO: 251522 - DNA, 153 bp, Klebsiella pneumoniae
atgcgcccggtggatgccgggctcatcccttacaccgccctgaaagatggatcagtcgacctggctgatattgcccgtatgaatgactggctggacctgaaagccgataacgaaaaccgtatagcgaaatggagagaggctaatgaacgctga

SEQ ID NO: 251523 - DNA, 153 bp, Klebsiella pneumoniae
atgcgcccggtggatgccgggctcatcccctacaccgccctgaaagatggatcagtagacctggctgatattgcccgtatgaatgactggctggaactgaaagccgataacgaaaaccgcatagcgaaatggagagaggctaatgaacgctga

SEQ ID NO: 251524 - DNA, 204 bp, Klebsiella pneumoniae
atgcgcctgcagcagctctttcgcagtatctctggccagcgttattcgtgcggcctggtactctttttcatcaagaaggcgggctttgaaaagctcagccaggtcccggctggcttcctgctcttttcgcagagtttcctgggcgggggaatactgcgcggccagatccagtcgctgtttctggtagttctctgcattcattaa

SEQ ID NO: 251525 - DNA, 162 bp, Klebsiella pneumoniae; identical to SEQ ID NO: 204931

SEQ ID NO: 251526 - DNA, 858 bp, Klebsiella pneumoniae
atgttgccgctggaacgtcatcgtttgattgttgataaaggggcgaaccaggccaccgccgcgctaaaagcgggagcaaatgtccactatatcggcaagattggtaatgacaccttcggccattttgcccgccgtcatctgaaaggcgtgggcttcaatgctgtgacgctgctggtcgccgaagagatccccaccggcaatgcgctgatttatgtcgccggtaacgatgccgaaaacatgattgccgtcgatcccggcgcgaatatgacggtgaccgatgatgaaatcgccggctgcattcccgctatcggctgcgcggatgtggttctggttcagctggagaacaatctttctgctattgaacaggtcatagacgccggcaaacaagccggggccctggtaatactcaatcccgcgccctggcagcccgttgagcacgcccttctacgcaaagtggatttacttacaccgaacgccacggaggccgggttaatgaccggacgccgggttgacagtctgacggccgcggctgaggccgccgacgtgttacatgctcagggcgcgcgcaacgtcattatcactctcggcgccagcggcgccctgctgagcgagcatggggtgaaatcccctattccctgctttccttctcacccccgagacactaccggtgcgggcgatgccttcaacggcgcgctggcggcgcggctggcctgcggggaaccgctacaggccgcagcccgattcgcggcggcctatgccgccgtcagtgtcgaaaagcaaggcgcctcatctttacctgagtacctggaggcacaggaacggcttctccgtgccgccgctgattatgaaatggcataa

SEQ ID NO: 251527 - DNA, 486 bp, Klebsiella pneumoniae
gtgcgccagagcggtcagctgatagaacagctgtcgctgggagtttacgactcggtgcgtagactgctaggccgtctgcgtccgcgtcagctcgacgacctgccgctggagcaggcggtacgttcgttgatgcgcgagatggagctggaggaccgcggcattgtcagccatctcgactggcggattaacgaggcgggactgagcgagaaccagcgcgtgacgctgtttcgcgtttgccaggaggggctgaataatatcgtcaagcacgccagcgccagcgctgtcactctgcagggctggcagcaggatgagcgactaatgctggtgctggaagatgacggttgcggcctgccgccggggtcgaatctgcaggggttcggcctgaccggcatgcgcgagcgcgtgaccgccctgggcggcacactgacgatctcctgcacccacggtacccgggtgtgcgtcaatctaccgctgcgttacgcctga

SEQ ID NO: 251528 - DNA, 366 bp, Klebsiella pneumoniae
atgcgtgatatttctttggttctggaacgttggggcggctgggcttcaatggatagctctggtgttgattattcgcatatcgcagccggttttaagggattacttcctcagtgtgggaaaactcgtttgagttgtactgacgacgatgcactgattattgaaggctgcatggcaagattgagaagtaagaaaccgtatgagcatagcttgctagtggctcattatctgtatggtatgtctaaacggaaaatagccaaagccagaaagaaggatgagaagttaattcgcattgaaatccagattgctgaaggttttattgacggttgtttatgtatgctagatgtgaagttagagcttgatgattga

SEQ ID NO: 251529 - DNA, 1071 bp, Klebsiella pneumoniae
atgatggaaaattttagtgaagcagaaatattaaatgccaagttgaaaatagaaagagatgaccgtttgaagaaaatatcaattatagccccagcatttaccggcatatttatagtaacctacaattaccttttccacacagaaaagttttcattggttaataactttttgagtgtacttgggccagcattattgtttgtgtcactatttttcgcactaatccattatttgcagactggattcaaaaagcaaactgtggaagatgcattatataaaagcaataacaaggcaataaccacctcaatttcaataggaccaagttctaccagtgacactcaggaagagatatcaaaaataaatgagtatattaccctcttagaagatagggtaaatacattagaatcatttaacaacgcactatcatcaaatcaaaaagaagaatacgtaaagattataaaatctaaaatcattgaggaatccattaatgaggcatcaacagatatcttaaaaaatctcgatgagaatataaaaaaatcattaaacatatctcaagtagagatagtattgactagaacaatcgaacgcctccgcgaagaaattgactctctaacaaggcggggaaatattaacctcatacttggagggatgacaacgattgtagggttaatcattcttgcttatttcgtctacgaaataggtacaccttcattacttgataaagtatcttacatcgccaacttcattcctagactatctgtagttatcttaatagaagtgttcgcgtttttctttttaaagttatataaatcaacgctttctgaaatgaaatattttcaaaatgaaatgaccaacacagaggctaagttagcagcaataaaatgttccattataacatccgataaagatggtatttccacagtcataaaagaattaataaccaccgaacgaaatgccatcattgaaaaaggtcaaaccactgtcgaaattgaaaaaaacagacttgatcaacaaagcacaaccgcaatcttggataagttatcaaaaatactagcagtaaataaaaaaatctaa

SEQ ID NO: 251530 - DNA, 246 bp, Klebsiella pneumoniae
atggcagaaatcacacctgcagaacagattcgcctagacctgctttcaatcgtgaattacgacacagcggcagcaaaagaggcgattgagttcgttaaggatagcaaacttaaataccaggttttcgttcaacagttcaaccgtgtagttactgagtccacgatagttgccaagaccatcaaagcgattcaggaagcgaccgaagcgctggcgttgtttgacacgacagccgagtcgtccagttag

SEQ ID NO: 251531 - DNA, 603 bp, Klebsiella pneumoniae
atggcagaagttccactcccgacaccgacgcaagttccggtaccaagcacagatatccgcaatgcggtatttgcaggcgcgaagcttgacgaggaagtaaccggttctggcgaatattacactgatcgccttggtgtaaaccgcctgaccaatacagggcgaaataatcagttcaatgcagctcaggctgataaagaggctcgcttccagcagttcctcctttcatcaggttatgtatttcttggcgactatgaggatggtccttttcagttcagcgcccgtaaccagtacatccgttacgacaaccagtattaccgccttaatgctgccactgacgtcggctttatgaccactggaaccgatgcagccagctttactaacgacgttactcacttcgttctgatggatggtgacacgcttcgccaaaacttgggttcaagcgaagcgggtttaggtgtgaacctggtctacggagcgctaaagcaagtatccatcacaaactttatgtcattagcagatgtaatccgttttgacaatggagaactcgtaaacgtagataatgcgatagtggcggccggtgatgctgccaacttactgatttag

SEQ ID NO: 251532 - DNA, 840 bp, Klebsiella pneumoniae
atggggacactgttactatccgctatcctcgttagtggttacatttttactattacatcagtatctacgagatacaaatttaagcgctccgatggttggggcgcttatttttatgtggcgacgtgggggaccgggttttgcatcctgagctggatgttatgctcgataatgggatttgtgggattcattgatttctctgccaaagtagtgggaatgaacaaggaaaatgtcaaattacttatcccgctatctgcagatgctgtagctacaggaaagagcttaaagatagctctatggctagttggaactgtagcactttccacaatttgtgggcttctaaacaaggcttggcacggctggggtaataacagatttaaagctcttgcaaaggcagcaaggaaccatcctcttgaaacattagcaatcgaggcttctgctactttagctccagtaatttttactttgaaatcgaagaaattttatgtcggctgggtaattcgtccccccttggagcatgggaagattgaacacatggctttcatcccactgctcagcggttacagggataaagacacgctaaaaattgtcgtcacgacaaactatataactcattatgaaagcattggtttatatggcgatctcttgggtgtggatggcccaccaagggttaagagcaatcttacctttgatgacttcagggtcgtgtgcccagtttcagaaatagaaaacctttccttttttgatttcgagacttacaacaactttaaggcgcaggaagagaaagagcagaacaattcacggagattacggactaaagttgcaaggcataagcattcataa

SEQ ID NO: 251533 - DNA, 210 bp, Klebsiella pneumoniae
atgtttagtttctcgaacaaacggaagacaactacgggaactgaaagccccgtacagcgcttaacgaacatccttgtcgacaaccaggaccgactcacgattgatcgcgatggcgtaatcagcttaaaccttgaaaacgataaggttcgcaaagagatgaagcgccagtttcagtttcttgcgagagttgaaccctctaaggcaaggtga

SEQ ID NO: 251534 - DNA, 492 bp, Klebsiella pneumoniae
atggcaaaaatcgctaagaagcttactgacactgaaatcaaaagcaccaagccaactgacaaagaaatcaacttgtttgacggtgatggtttgatcctacgaatcgctcccctctcgaaaggagggaagaagaattggtatttcaggtatgcagtgccggtgagtaagaaaaggaccaaaatgagccttgggacctaccctcacctcacactggcaagagcaagagccttgcgagatgaatacctttccttgcttgcgaatggtataaatccacaagttcataacacccagaaagccaatgccctgaaagatgccacggaacacacatttcaagcagtagccaagaagtggcttgatgagaaagtcaaaacgtcaggcatctcccaggatcatgctaacgacatttggagaagtctagagagaaatatctttccaacgttgggtgatacccccattaaggagattcgccctaaaatgggctttgttgaataa

SEQ ID NO: 251535 - DNA, 195 bp, Klebsiella pneumoniae
atgactaacaacgtagagttaatagagaaagaatacaaagagttacttgacgccgctctatcaaacccaggtgtggctgatgtaatggcattcttttcacaacaacagccagtacttaatgctcacaataatctgatggcatctatatctatacctgctcagatagcaatgagggtaatgctgccaacttactga

SEQ ID NO: 251536 - DNA, 156 bp, Klebsiella pneumoniae
atgtgttatgcgcgatggggcatgaaagaaattttcaccctgttccgtcacaagatttactactattgtctcatttccttcgagaaattgtcattgccgaataaaatcaccgtgtatatgattacgttcataataaaaggagagtttaatgactaa

SEQ ID NO: 251537 - DNA, 249 bp, Klebsiella pneumoniae
atggtagcccaccacctacacatccgcgattgccggagagtttccagcctgaagcgtggcggcgcggcggtttaccacctcgatgagcgcctcttcggcatcacccaggcaatcagcaataccgcggcgatcgccgtcgaagtcattcatgtccaggcgtatacgagcaaccttctgcaatgcgtccagcacatcatctggtactaccggctgctgcgcgtggcgatagagcttgtcgccagcttttaa

SEQ ID NO: 251538 - DNA, 198 bp, Klebsiella pneumoniae
atgatcaccgggaccacgaattacgatgaagttcctgatgttcgttgcaccttgtgcggcggttattacaaagccgacgagccagaaagccatgactgcgatgaagcccgttacgaaattgagtgtgaaatctgcggtttcaaaagcactgatccggatggcgctcactactgctgcgaggataactctgatgactga

SEQ ID NO: 251539 - DNA, 210 bp, Klebsiella pneumoniae
atgacggatggctggccgctgtatgaatcccgcctgaagggaaagctgcacgttatcagcaagcgttacactcagcgcattgagcgacataacctgaatctgagacaacatctggcaaggctgggacggaagtcactgtcgttctcaaaatcggtggagctgcatgacaaggtcatcgggcattatctgaacataaaacactatcagtaa

SEQ ID NO: 251540 - DNA, 783 bp, Klebsiella pneumoniae
atgatgatcgaaggtgagataccccatttgcaggagtttcctggtgacctctatttcaggcacgatcgcctgccagcaatggaatggaagacgcatgcgcacccctggggtcagctaaactatgtctcgcatggtgtaatgcacctcgaaattgacggtatccgattcttgtcgccttctcagtatgctgtatggatccccccttttgctgaccatttctcctttgcctccagagaccttgtctatcgaacggtatacatctcgttaaagctctcgaaccgactcccctcaaaacccaccacactcaatgtcagccccgtgctgcatgccatcttggatgattttgcattgcgtgacgtaagagtacctgagacagaggaggacttgagaatggcacaggtggcactggatcaaatcctgcatataaaaccccacgaaacctatctcccttatgcggtgtcagatgaacttaacagtgtacttaaggagttgcagttgaatccgggagatcgtcggtctgttgaagattttgcagatcaactacatatgacgtcacgaactcttgaaagacgctgccagcgagagctgggtatctcatttggtgagtggcgttcaagacttaagtttatgcacgcaattgaatccctcgaagcgggactgactgttcagcggattgctctggaattgggatatacaacaccctcagcctttattgtgatgtttaaaagatttacaggaacaacccctgaacaatatagactaaatggattaaaacagcggtga

SEQ ID NO: 251541 - DNA, 933 bp, Klebsiella pneumoniae
atggattacatatttccactactcgctgccattctatggggcgcgaacattgttattacaaaaatggccacaggcctaatttccccaaatgaaataagttttcttcgttggttccttgctacgattgtactgactccttttgtcattcgacctttaattagtcatgcatcaatagtacgccagaaccttgggaagatctttatattaggtgtcttaggtggtgttattttccaatgcctcgcctattacgctgcagcctacacatcagcgatgaacatgggcatcatccaggctctaatgccattaatggcgatcatcctggccagcatgcttttccgtaccatgccgggaattaatacagtcgcgggggcggtcatttctcttgcaggagtgctgatcgtaatttctggtggccatatcagccagctgataagccgcggtctgaatatgggtgacgggatgatgctgctcggtgcctttgctatggcagtgtataatgtattgcttaaacgttggcacattgaagttccgttatcggtgtctttatatcttcaggctgtcgctgcgtgtattgttttactgccggactatctgctttctgaaaagcatgcactgacaatggcgacctccggtatggtgctttattctgctatcggcgcctctgttctggcaccgctgacatggatggcaggttcgcgtcgcctgggcccatcacgggtatcattatttttcaatctgatacccgtatttacggcaatcatggcggctgtgtttttatcagaaaagttcacgtggtcactgatttcagggggtgtactagcgttgggcggtgttatttacgttgagataacaaggaaattctcgaccgctaataaagatcaaagtgaagtcattgaagataaggataataaaaaagcgcacaaattttcataa

SEQ ID NO: 251542 - DNA, 948 bp, Klebsiella pneumoniae
atgacaaattattctcgtcaggaatttaagaaaatacgcgttgccggcgtgcaggctgctcctgtttttctcgatctgaatggaacgacagagaaagcctgtgaactgatcctcgaagctgggcgtaaaggagccgaacttatcgcgtttcctgaagcttttatacccacatttccgaactggtatgaaacgctggcagagtcaccaaaagcacgtgaactagacaagcgtcttttcctcgaatctgtggagatggatggcgaacatatgaaagccatcgctgaggcatgtgccaaagcgaatatcaatgctgtagtcggtattaatgaacgtagtccgatgacaaacggcagtatgcataacacgcaggtacacatcacccgtgatggtatcattgcagggaaacatcaaaaatacgtacctacaactggagaacgtcaggtccatacgccaggaaaaactggtcactacaacaccttcagaacaaatttcggtgtagtgtcaggcctgatctgtggagaaaactccaacatgctgggaatgtatgcagccgcagttaattacccggtcgtacatgttggatcatggccaatgtacttccatccttacttccatatgcaacacgccattttaaccgctactgcggggcttgcttactcactgaaatgcttcgtcgtgaatgcagtgtcaagaatcacccctgaatacatagatgctgtggctgaaacggaagagcaacgcgttttcctggaagagcaacgcgcatatcttcccggggcctcaattcttgacccttcaggaaatttaattattgatggtacaggtatggaagaagaacttctcttcgcggatattaacctggaagacgttatcattcctaagctcatcattgataccgcaggtcattataatcgcccagaattatttgcacctctcttccagaaatga

SEQ ID NO: 251543 - DNA, 816 bp, Klebsiella pneumoniae
atgccattaatgagtctgatgtttattaaatggggcactgccgcgctcccaatgctcatccttgccaatttcatcgaaaaaccagactggcgcgtggtacttaaaagctggttcaaaatcctgcttctgagcgcactgggaattgcaggttacagcttcatgttttacgaggccttaggtagtaccaccccgatcaacgcatcgctgattaatgcatttaatccagccctgatcattattgcatcagtgtttttcctgaaggaaaaattaaccacgaaaaaagtggccgggatcgccatcgcattctgtggagtgctctgggtattaaccggaggaaaccctgctgttattttctcacaaaagctcaacccgggtgatatctggatgctaggtgttatttgttgctggaccggatataacatcgtcgcgcacaagggcccttcactaccgccactaactagttgtgctctgcagatgacattcttcactctggccatggcgccttacatgcttgttcatggcgtgactcttccttcaaccaccgctgcctcatggtccatggcctacattgccatcttcccttctgccgtggcttatgcgctgtggaactacggatcaaaatatattgaacccggtgtagcgggccagtcactcaatctggtcgtgccttttacagcaatcatgacgctgttgtccggtggcagtgtcagttcagttgacctggttgggggcgttctagttctgggcggtgtctatctctcattgcaggccactaaacctaaaaatattccagcagcctcggccgatctggcctga

SEQ ID NO: 251544 - DNA, 696 bp, Klebsiella pneumoniae
atgacccgctattatgtctatgaagaagaaaaaaccatgccggatacgcctgaatttatggcatatctggaccgtaaaaccacagctatcgtttctattgatatgcatgaagggcatctgagtgaaagggcggattgtccttgccccgccccccgtgggcgaaatgttgtcagtgctattgatgcttttcacgcgcaggcacgaaatttaggcgttcctgtcatccatgttgtatcaacacttcgtccctctgggatcgatgattcgaagggtattcctgccgcgtggcgtttaacaatgccagaatactttggtcctatccccggagcccctctccatgggattgagggatcggaatggaccaagttgcgaactcacttcgacccccacgacgaaattgttgacaccaagaagaggctctcagccttttaccccactgatctggatttcatgctcaggcaaatgaaggtggagacggttgtgtttactggagtgaacaatgattgctgtattttgaacagcgcatttgatgcatcaaatcgaaattacagggtcgttgtgcttaaggacgctacggcgggtacaaatgaacacctcgaagcggccggccgtacaattgtatcgcttttccttggtgtagtaatggactcggcagaactgctgagggcctgggacactgaactgtactggaattaa

SEQ ID NO: 251545 - DNA, 1257 bp, Klebsiella pneumoniae
atgattgattgttatgtaaacatttataatgataatgatgaattcagaataccactaacagacagtggtagttatgaggttagggaaaatgacaagctcgttttccacttaattataagtgagcatgacctgctaactcttggtgagccagttatggtaatcggcgatatcccaacaaagtttttaaaaaatgaaaactccccacatggggagtgtcattttgtaacttgcgaaccatcatattctcattcatcacgttacttctttaacttttttggtgaaagcgaggttacaatttattttgaaaaatccgaggggaaaactctaacatttaggttcaatattttagctagaaaagaaaatgcaaagttagctgaagaaatgttggggtttataagcgataatgttgatgatgctgtagccatttgtttttccagaagcaaaaacggaggtggctttaatagtgatgaagaacataagtttagcaagtatgatgctgtgatttatgctgtgaactatttatcaagaacattaccttcttttattaatgacaaaaaaacccactggaaacagaaggtcattttgtcgcaaaatgggcaaccaacggggcctgattctgtatattgggcacttacgaatttagataaattatctccctctacagcggagaattataatatatactttaacaatcgtggctatcattttgatgaacaacccaaggaagtgctaattgatgacacgaatgtctatgagaatatagtcataaactcattcttgtacaatgctgataagttcttatatgctttaacaaaacattattcagagttcgcaagtaaagaggttggctactctgatactgaatatgttcgctttgatcatacaatgacaaaatatgcgaagatagctttaaaaatgcgaataaaggaaattgaagaaaatcatgccttagtgaagaaattgatgtttttttataaaaaaataattaactctaagattaacccaaacatcattcctaaaataacagcatttgtagcaaaaaaaggacattatagagaagcgtttagattaataaatattgcgaacttatcatcagcacctgcttttgatgacactaattttttattcgggttgaaaaacctgtctattgtttatgaaataactagccttatcatgctccataagagtatctccgaaattttcggagtaagtttaagccttcaatcggctttgttgaataaatcagatttcgggtaa

SEQ ID NO: 251546 - DNA, 348 bp, Klebsiella pneumoniae
atgcacttacacctgactgaatcctcagcccgtccgggaatgcaggtcactgccgaagccgagcgcgagtactggatgagtcgccagaaagcggcggtgaaagcgcccgctgaaatcgacgttcacgccttccacgacgcgctgggcctgatgtacccgctcaactggtcaacgagtgataacggcgtctgggagacgttcatgctgcaggagatggtctgcggtgacgtgacagagatttatgcccgctgcggagccagatatttccggctgcgggatgtgtgcaacctgagccatgcgcagattaaagcgcgcattaaggagggatttaacctgttccggaaatga

SEQ ID NO: 251547 - DNA, 2793 bp, Klebsiella pneumoniae
atgaacagtgatatttccagacaaagccgtcatcagcctgaacgaactgtttttattccattttccctaggcgatcacaatactacgggcaataaacaaagtgataccattactctggagcgtcttaccagaagcggtttcgaagagaagctcattgctttaggagaagaagaatctgatgcaaggcggttatcacgaacaaccgggcgctcctggtcagtttatcgacgtcttagggccaagaacccggcaatctcatctcccgtatggctgaccacatcgccagcaaatgcgttaatcacgttgactttggtggggtgctggaatggcaaaaaagcaggcgataaatattgcgttgaaactattgcgaaaataagttacgaagaactggaacaggaactacgcgaaatctctcttcgggatgactctccggtattacagattggcaatgtatggaaagcaaaatctcccattgagctattgtatcaactagcccctcgacttacagaaagtcagctcgaacgtttcttcttggttgtaaaacaaacgctacttaaacccgatcctgcccttgaactcaaaaacgaagagcgctggatggcggctatctatggaaaagttcgttcagaatcagattttattctgaaatcaatcgctgactcactggtgaagctcagaatctacgctgaaagcagtgaagggaataactcagatttcatcattgctgccatcgacaatctggttagagatctgttgatggatgccgagggtgaaagatggctgtcattaaccgacgtattatgttcgttagctgaagcatcaccagaggtattcttaaaatccatagaaacaagcttacagtcaacagaggctagcgttactcgcccactaatggaaacgagcgaaagcacaggctttggcatgcgctgttggcatgctgacttattgcatgcactggaaattctggcttggaatccaaggcgattacttagagtcagccttattcttgcaaagctatcatcattaagaattcagggaaactgggccaatacaccagaaaatactctgaaatcattgctcagaccctattggccacaaaccatggctactgatgaacaaagacttatcgtacttgatatgcttatcaaaaaacacgatagcattgtctggcgttttctctatgaacaaaccgatcctttgggtggtatgtatatggaaaatgccagaccaaaatggcgggatgatgatgctggcagtgcacaaatgagagggaattttctttatgaatattattctgcacttggtgagcgaatactggatctggcagaaaaaaatgtcgaaagaatagctgcacttattaagcgaatagatcattttgaagggggctatcaagaaagacttattttattaattaaaagcacaacttcatttcctgacaaagacaaggagattgttagagaagcgttatatcattatctaaactggcataactcttataacactgatggagataaaaaaagtagagctattgcagaagatctcatgtcattcgtcgatttattaacacctcaagatattattcttgataaacgtcgactgttcactcttcaatatcctgtattacctgaaggcagtgaaagagatcatgtaaagcatagtgaaagaataagagaaatgcgaatcaatgcaatagaagaaatatacaatcatcaaggatgggacggattatcatctttactttcaatagtacaatctccctctgtaataggtgagtctctggcaacctgcaacttacatttgacagactcattctcatggattgttgaaaaattcagggataatggtttcccgttccatgatccactgatcagttcgttttataactggctccctgaagaaaaacggcttaccctgataacttcttcaatatttaagaatgagatggatagtgatgaaaaaattgctgcattccattcagtactcccacccaatatggctacatggcacaaccttacaaattaccctgaaaacgctcaaatgctgtactggaagggaataaactatccacacatctggagtgacgatgctgatgaaattgactacttcatcggaaaaatgatgcttgctgaaagatatataacagcatttaatctcataaagtatcgaatggaaaaagtttcctggcaaaacctattaaaactactaaatggattccgaagtaccaccgaaaaagatgtatcaatacctgatggttggcacttgaccgaggctatagaatatcttgaatcatcgggtcaggtaccgcgtttagatttagcattactggaatttttctttttctcagcgtttagaagttgtgagaaaggagcaaaaaacctctacgcagagttactttctaacccatcactatttatgcaattaatatgtcttgcttataaaccagaatccgataaagagtataaacaagatgaatccttaatggctgcggcacaacaagctggcagagttctggatcaagggaaaggcatccccggtcagaaatcagatcatagtattgatgaatacgtatttagtaactggattgaagaagtcaggaaactagcgacagaaaatgacagaagcaatactaccgattacataatcggtgaatggctatcccgctcaaaacatctaaatgatgcaccatgggccagcataacaatcaaagatttgctggaagagacagaacgagatgaaatcagacaaggtttctattttggcacggctttgttgaataaatcgaacttttgctga

SEQ ID NO: 251548 - DNA, 1101 bp, Klebsiella pneumoniae
atgatcggtgatcacaatcaattgccaccgtatcgttcaattgagttaagaaacattttaaccaataatacaaaacttaaaaacacctttgaagaagttgacagcataagtaattttaaattaaaaaatgaactaatgcgtaatagtcacttttcatcaataaccgatgatcaagcaagagaaataggattacgggcagccaaatatgtaaatctatttgaatctcttattattgatgatgaaagacaagacgtaatgtatgaaaaaataaagggaaaagattataaaagaaacaataaattatcctcaatgctgtcagtccagcaccgtatgcatcctcatattgcagaagtgatttcaaatgttttttataacaacaaattagttaccgataaagataaagaaaggaagtatcttacagaagattttcaatcagtacttaacttaaaagaggaatctcacctcacaaatacaccagcactggtatggattagtcaaccagatgtacaaaaaactaaaggtaacagagcaggagagcatacaccaatctggtcaaacgaaagtgaatgtaaggcaatcatagatattctcaaagatttggacaagaactccaacccaacaaaaaaaataaagttggcaattctttctccatactcaaatcaagttaaattaatttcaaagcatattgaaattgaaaagaagaaaaatcaattcaaaacacttttaaataattacattccaccagatgataatgatggttattgccttactgttgattcgttccaaggtggcgaagctgatattgtcttaatttcattagtacgaaacaatggtaaaagcacaattaagagtgcattaggatttttatcagatcaacgccgtataaatgttttacttagtagagcaaagtacaaattgatcatagtcggttcatatgaactccttaaggcttggtctaatcgtatatccagagagaactcaaaagaatatgattttattccaagactaactgataaactggatttgtctttaaatgagagaaagctttcattaattacatcaaactttataacaaacaaaggaaataaaaatgaaaaataa

SEQ ID NO: 251549 - DNA, 498 bp, Klebsiella pneumoniae
atgaatcttaagctgcagctcaaaatactgtcgttcctgcagttctgcctttgggggagctggctcaccacgcttggctcgtacatgtttgtcacgctgaagtttgacggcgcggcaatcggcgcagtgtatagctcgctcggtatcgccgcggtgttgatgccgacgctgctcggcatcgtcgccgataagtggatcagcgccaaatgggtatacgccatctgccacctggtcggcgcgttaacgctgtacctcgcggcgcaggtcaccacgccgggcgagatgttcctcgtgatcctgcttaactcgctggcctatatgccgacgcttggcttgatcaataccatctcctactaccgcctgcagtcggcggggctggatattgtcaccgatttcccgccaattcgtatctggggcaccatcggctttatcctcgccatgtggggcgtgagcttctccggctttgaactgagccatatgcagggctttgttgaataa

SEQ ID NO: 251550 - DNA, 204 bp, Klebsiella pneumoniae
atggatgatgcttatgatctggtacgccgggctgacggaaagacagtgtatagcttcccggttggtggtcgttatctggtggatacttctagcgggattcagtcgatgcgccccctgatagaagacgagattatttttactgtggagagtgcggcacgctttctgctgaaaattggttatcaggtaatcccgccgacagtgtga

SEQ ID NO: 251551 - DNA, 339 bp, Klebsiella pneumoniae
gtgcatatcggtttgccggtagccgcggttatcgaaacgctggatgtgaacgttgcagggcagtctacgctgctggataagaccaaactcatcaatcagctttgcgtaatgctcaacagcggtcgctcggtttgggccggaacagatgatgctcacttactggagtatacccagcgtgagtgggaattctacgacgacccggtagggctaaagacgggcatcatcgatatgaacctcgatgcaaactgggagcgtaacgggcgggttgtaattagccattccgatccgctgccgcttggcattctggccattataccgcgcgtaacggtaggaggctga

SEQ ID NO: 251552 - DNA, 231 bp, Klebsiella pneumoniae
atgattttcctgaaccgtcaggtcatatatcattttgatacagcctgcgactggcgtctcataaccagtgccatttcctgtgtcctgtattgtctcagtgtaaggcagaaaactcgcgtgtgtgattgcagggtcttctccgccatcctgagcgcgtacaccgccattaaacttcactgcgttatacagttcatcaattgtttggactggagtgccatttaccccagttga

SEQ ID NO: 251553 - DNA, 141 bp, Klebsiella pneumoniae; identical to SEQ ID NO: 140612

SEQ ID NO: 251554 - DNA, 216 bp, Klebsiella pneumoniae
atgcctgacatcacgcctgctccggcctcactgcttgaagccgtattcacccccatgaccgagtacacgcacaacgtgtattcggtgaagggtgatcggctggcaatgacgcttacaaaaatcggtgttgcccaagctaacagccagggcgacattcagttatttatcaacccggactgtgccaccggtaaggtactgctctacagaaaggactga

SEQ ID NO: 251555 - DNA, 270 bp, Klebsiella pneumoniae
gtgtttcagcaggcggcctatgtggtcacggtggaagtcctctccaacgtaccgtcagagggcaccggctccagcatggtggagatgctgcgcatcaagcgcaccattcgaaaggtcaaggacaacaccgaaacgtatgattactggacggtgcgcatgacctaccgctatttcccgcagaagaaaatgacggcctccgagcgcgaggtgaacccgttcggcttcatcgtcaccagttaccagcggtttaaggagaaaagcgatgaataa

SEQ ID NO: 251556 - DNA, 183 bp, Klebsiella pneumoniae
atgcgtaaccataatccgatgccgggaagccgttacaaggattcgcacggggctgtagtgaccgtacagcgcgtcgagcataaccgagtgaccttttaccgcgagggctatcagtcgccatgtgttcagcctttggagagattcgttaaggagttcgtggaggtgcgccgtgatactgaatga

SEQ ID NO: 251557 - DNA, 201 bp, Klebsiella pneumoniae; identical to SEQ ID NO: 234731

SEQ ID NO: 251558 - DNA, 813 bp, Klebsiella pneumoniae
atgggaaaggctgagaaattgttaggcgtatcaattgatactggtgaaaaactatatcgcttcccttctatcaataccggaaccctgggaatgattgatgttaagagcgtctgggccggaggcgctcaaaacctgccgtcaggctctaacctgaaaaacctttgctatgttgaagacccggccactgtaggcacggtatcactggtttatgatgcgacggcgggcgggatgattttcgataaaacgtcccgccagtacttcaaaatgcctaatggatttattcctacatcggcgatgaaggactacatgcatactttctggctgaaggttaacccagcaaacgccggtaatgagggcttcaataacgttatcgttggtattgcggcgaccagttatgcgacgacggcaaaccgccttctgcaggtgttccccaccattacctccggagtgattacagctctgaccgtcagcgtccgcggggtgaactactcaatcctgtcgtatcttagcgggctggttgacggaaacctgcattgtctgagcgttcgctatgtcgagtcgtcagatggaacgcaacagaaagggatgatttacctggatggtgtactggtatacgaagggacgttcgtagcaaaagtcgcctatccatccagcgccatcacctacaacggcgtaggttctgatcgcgccgatgctgccgccttcgcagggcggttctaccgcgcccgaatggatgacctgactcttaccagcaagtcagccctggaggttattgcggaagaaatggcagctgtctccggtcgattcagctga

SEQ ID NO: 251559 - DNA, 486 bp, Klebsiella pneumoniae
atggcgcacttttgtcgttacctcctatccctgctaatctgtccaaaactaactagtggggatagggatatgaaaaaattaatgctagcaattattggcctgtctttagtcgggtgctctcaaccaaaaccttctgaaccagacgttatgtctactatagattttagtaaggcaaactatgggcaaccaccatctgactataagcagcaaataaaatcgtggttagagcaaaatctgaaagatcctgaatccgccaaggttagtgagccaacccctctaagaaaagaggttgcgatagagaaccggcagccaattttcggatacaccacatgcatgggcgttaatgccaaaaatagctacggaggatataccgggactcaagggtactggttcttcttccataatggaaagattgtgagagcgcaaaacatggaaacctttcccggcagaatgatcttcagaaaccattacgttaaatgtgattag

SEQ ID NO: 251560 - DNA, 195 bp, Klebsiella pneumoniae
atgtattaccaatttggcaatatcactatccatttttcagtatttcaaaaccggttctttgtcgctcactggaatggaggaaacgttgtaactgacaagtggacacagttcattgaacttgtaacccaacagacaggcattgataaggttgagtttcaaaacgcagcaaaggaattctttggagaacaacaataa

SEQ ID NO: 251561 - DNA, 291 bp, Klebsiella pneumoniae
atgggcgttaagggatactatttattcagaggtgataagacacgatgtggtggcgttatcactgaaggatggagcgaccaccagcattttgacagagatatgtcctgtgaagggcataaacttgtggtaaacatccagggctttaccgtatttgtggtgggcttgatgatgacatacacggcaaaaggattgccggaacactacacagttatagctcctgcccctgtaaatccaaattcatcaattcaaactgggatgatgattacgaacttggtggagaagcaacggtaa

SEQ ID NO: 251562 - DNA, 657 bp, Klebsiella pneumoniae
atgcctgaacttccagggccgattgagtcagaaccggaacagaacgcccaaacagcaaaaaagaaaacaggtatagatgcaggttttgccgttatcacttatggcggtactacggaagcgtggcaacgtctgttattcaccgaaaacccaccagcaggggcaaaagagctattctctattctgaacggcccggatgaaagatacaaagctggttcgattatgcttctggttgatccagagaaacaggacgacgagcagattgcccacatgaaagccgcgaaagcgcgagttgatgcggcgttagaaccgctgacaatccaggaagctaacttgctgcacaaacactacgcaaccatagctaatttcaccagctacgctgatacaggaattggccttgctgctgatcctgttggaaaatactttgagagtatcgaaaaaatactcagagagattcaagaaacgtataagaatacctacataacgagaggctcgttgataggagaacaattttacgttcaacgtagccagttgtttaaagagcttgaatcaatacttaaagtcagattcctgaataaggctatgaaattcggagagtatacaaaaataaaaaaaagcacttggcctatccagcagttctattacccacaaatggaatga

SEQ ID NO: 251563 - DNA, 207 bp, Klebsiella pneumoniae
atggcctcgcatctgcggggcttttttattcgcaaaggtaaaacgatgaagagcttagatattgaatccataggcgggaggctgatggcgattgagtatgacggtttgtcatgcgcatcgttgccagtttcagagttccccatcgacagtacacctttaactctccctcaattcatgctcaaggatgtgtatgccaccacgagctaa

SEQ ID NO: 251564 - DNA, 1167 bp, Klebsiella pneumoniae
atgcgaaattataaagtcatcacgccattgtttccgacctacgaccaaacccgagcgatgatgaaagccgtaacaggatgctctgtaaaatcggtccgtaatatgatctccgccattcaggaacagaccggcaccccgcagaacccggtagactggtcagaaccggaccactggattaaggaacgattaagcggagaagatgccaaaatagcctggcaaatctggaataccgataaccatatacttaacccccgccacagctatggctgttatatgtttatcaataatccgctattcgatttgatgcagaccgatgaggatggtggctggcatcccagtgaacagggacgcttattcctcgctcacgatgaagcgacgctgcgtaaactggacgatattgaaggcatgctgcagctactggaattgctcgccggtcgcgaacaggcccggcgcgccgatctgcttccggaatggcaggctttcttgcatcagcactctaaattcgcctctccaagttcagttaaaacaacgctctatgcccggctttacaatctggtcgagcgcgaacttattactcgtgaaggcatgagctacaaaatcaccgaagcaggaaggaagtggcttggcaaagcgctgccagaacggcaaaccgacccgcgcaaagaacttctggatgcagtgaagcgctacaatcaacagcaaaaagagctgttgcgtgaacagatctccaccatgaacccctacaagtttgaacatctggtggctcagttgctggaagcgatgggctatgagcaagtcgaagtgaccaaagcctccggcgataaaggcgtggatgtggtcggtaaagtgcaggttggcatcaccaccattaccgaagtggtgcaggtgaagcggatgcaaaataccattacccgcccgtttatcgatcagctgcgcggcgctttgccctaccacaaagccattcgcggcacgcttatcactaccggaaaatttgcggcaaaatgcgcagaggcggcgctattccccggagccgcgccgattacgctgatcgacggcgatcgcctgctggaactgttgattgaaaacaacgtcgggatcagacgcagtaatgccgttgaattgctcgacgtagacttacagctgtttgatgagctggagattgagtag

SEQ ID NO: 251565 - DNA, 1167 bp, Klebsiella pneumoniae
atgactttttgggatgattcttaccagagcgaattaaattcaatagacctttggattgaaaaaaatatcagatataacgatgttatacctggagatattagcagacttggtgatgaagagtttatcgaagctgtattgtttcttacttgggattattttcgaagcttatttacttatcaaagagactcgctcaacaaatacactcaatataatcaacgtcacttgcaagaaagagccattccaaggttagataaactagattcaaaccgtttttattttttaaacaacctcataagaatcatgtatgagcactatttctggactcagaatgctacgatgcctcctgtttttgtagatagtaggactcttgaacgattagatcaactatccccctcttctgacggaaatgcccagttcttgtggattgaacgttcaatgcctgccgcattaacaatgagtattatgtcatcggaagaatttgttacgttgaaaaagatggctaacgatgtcacaggttatgaagaaaaattctcccaacagataaatacaggcacccagaaagccgttgaaaaaataaatgaaatatcagttaatatcgacgaattagtaactagggctaaagactcgcaaaaagacataagcgaatacgttaataaactgaaggattttaaaagcgaatacaacttcgttttgttaagcaaagcattttctaacctgcgagccaagaagaagaaagaatatacacttaacaatttaaatgttatatgtttttcgttgtttttggtttttatccctctaatggccttaatgaatcatattgcagtttggtatccggtggaactcaatttgagcgcactttcttactatttaccaattttatcattagaattgttaatgttttattttatgcgcctttattatatcgaaggaaaatccattaaagctcagatgcttcaaatagatcaacgccttagcctgtgtgaatttatacatgattacgttgaggctaaaaataactctggtgctgaaaaggaatcttggtcgctgtttgagaagttaattttcagcccaatacaggttacctcagaaaacataccgtccttactggatggcgcgtcatcgattgcagagttggcaggaaaagtcttgtccagagattcaaaataa

SEQ ID NO: 251566 - DNA, 522 bp, Klebsiella pneumoniae
atgacgaaaacagacatcacctacggaatacctgctgaggttttgccacgcgattactccaacgtggagaattcgttgatattctggcgtaagtctctcatccctgtaagggttacaatggaagatggtcaggtgttctcgatgtacatacatggcctactttccgcacgaaacaaacttgatctatcgcccaccccctgggataaagagaatcgcataagagtccctcttgagcgagtaagtacaatagagtcaggggcaggtgatgtagatgtttcctttgtcggacggttgacgataagtaatgaagatgaggttaatcggccatcacgccgagacttcttcaaaatttgccgtcaagcccatgaggcgcagaagtctataagggtctacatggcggatggccgtgaaatagaaggcgtgtcgttaggcgttgacgcttgtcaggtgacgatgaaaatcagggaacacgcaaaaatgattgttctcttcgattgggtcgaacgcattttaccgttttaa

SEQ ID NO: 251567 - DNA, 591 bp, Klebsiella pneumoniae
atgactcgcttagccgtcttaacaatcacttccattctttcattctctgcaaatgcactatctgatcaaatgatggacatgcaaaaaacttacagcatgttcacctctcaggataatgtagaatatgatgccgcaggtttagttcaaaaagtttggtacagattctcagataatgcagaagtgacaacggcaacggggtcttctgaaaggcttaggctacaaattaatggaacacctgtcaaagtcgataaaactaatatgtcgcaagaagctcttatgccttcagggatgatcattgaggttttagaaggtactctttattgcaatgaaatggcaacatctggttgccaagttaatattaaagtcggaaacgaaaattcaattacaactcatgcaaaagttggcgcaaacacaaacggcaaagttcttacaatcgatagcgaaacaacaaaacgtgtgattcaagacatcgaaaaagtatcaaaatccaacattaacaacaagcatatataccttgaagcaccactctttgttgtaggcaataaagaattcagatttgggcttatcgaaacaccgctaagggccaactaa

SEQ ID NO: 251568 - DNA, 537 bp, Klebsiella pneumoniae
atgaattacttagctgaactaccattcgttgacatcttcgatgccaaagcaaacaaggcttttttctggcgcgtcgacaaccctctcgactataagtgcggcgtgaatagtgcaaagacgttcgtagagtttatcgagaagtatccatttatgaacaacagcaatgttctgtatagaattgcttgtgacatgactgaatcagggcttattaaatccgaatctgcacgaggcttttttaacacgttggataagttattgttgcctagaaactctaaaagccagaacgattcatctatattaaagcggcgacagatgcgtagcattcccgacattgccagtgaaattggtattacaagtattaagcttctgaatttccttgctgtaatcggatggatagattgtgtaactgtacagccaacaatcgaatcaattaatgaaggcgtattacgtaaaaacagcagaatgcccttcggatatacaatcacaagaaagggtgaacgtctgattgaaagcaaatacaaggctatgtgcaaataa

SEQ ID NO: 251569 - DNA, 273 bp, Klebsiella pneumoniae
atggggcctgattttcagcaaaacgaagtgggactgataggaagcgatgatgttccgctgctcactacctcttcagctgaactgatctatcagcaattatcgcgcctgaacggctgctgttggctacctgctcgctgggcgaaagagaagcatgggttacatacggtcatggacagcgctacgttatcccgtccactttatgcgatctggttacaaaatagcgataagcaggcgcagatccatgagatcctgaaaaaccctattctggaataa

SEQ ID NO: 251570 - DNA, 1020 bp, Klebsiella pneumoniae
atggcggagatggacatcaaccgtgacgggaaagtgacggcagaggaaatcaggcaggcgctggcagtgcgcgatccgctggtgaagaatgtggtcaaccggctggtggtaaaacatcacagcgagtggtgtgatggccgttcgacaggccgctgggaagggttttataaggatctggactcgctggaagtgaagtactgtgagaagtggcaggcggatctggagtggatgagtaaggtaccgccgtttgataaggatgaggcggtgtggcattttcatccggtggtttttttgaatgaattattatcttcaaaacttattacactggaaatggttcttgctgcaaatctaaatgaaaataaaattcaatgtgaaagggttctaccttatctcaataaatatgcaagagcctataagatggaagataaaaaagaaattacacacttcctgtctcaaattgggcatgaaagtggttttagtataacagaggaaaatctaaattatagtgctaaagggatgcgaaggatttttgggtgcattaaaggtccagcccaatataataaaaatactgatgattgcaacttgggacgtttaagagacaaactctggactcaggaatctttgtatgcgcatagcccaaaaaatttggctaattatgtttatgccagtcgaatgggtaacgatggagaatcttctggggatggttataaatacagggggcgagggatgattcaattgactggtaaagatggctacagattttttaccaataaacataatgaaatgaatccggatgataagagagactttgtcgaacaacctgatctagtgataagtgatactgaatatggtgtagagtcagcgttttccttttgggtaagtaaaggactaaacaaaactgccagagcattgagtgtgcaagaagtcacgcaaatagttaatggtgggcagaatggttaccctgatcgcttacagaggtttaatgcagtggccccattattaagagtcgataaggagtga

SEQ ID NO: 251571 - DNA, 405 bp, Klebsiella pneumoniae
atgagcagaaaagaacgaaatgtaatcgcacgtattgaacgacaatccaatactctcccccccgctaaatccctagccagccgtaaagagtttcaggaactttctcgatttgcaatggaatggaacagtgttgctggaaaatggcatacagaagtagttgaacatgaaagccccccattatcagaggaggagcaggaagcattaaatgacattctctcctcctgtgatggtgcgtatttcaatcctcgtaaacgaaaaaaatacatcgtcaatagttcagatttgaagaagtggcagattttgttttttgaagattatgtatcgtactgcgggtatttatcgattaatggcctcaacaacctggtaagagattttgacgtagtatacggcgataaggaagaataa

SEQ ID NO: 251572 - DNA, 324 bp, Klebsiella pneumoniae; identical to SEQ ID NO: 227619

SEQ ID NO: 251573 - DNA, 558 bp, Klebsiella pneumoniae
atgaaattatcatcggatccatcgaccattacaacatccaataaattcctgaaagatgaacaattagaagaattcattgataaatggggagacgatctagagcatgcagcatctgaagctgcaattgaatgtctcgagagcgcatctgactctcctatccaaagatttttaggggcggttggggttcctctgaaatgtattaaaaccatccagaatttttcagctaccgactttgaaggtgttgaggatccggagatatactcaagcgagcaattaaatgatgaaaatatcaagctcggatattattttgagctactgagcgtagtgtgggggatccaggtcttaaaagaaaactatcatgctcacaaaatggacttcgatagccacttttataatcaagagttaaaagatgaaatggtacatatggaggctttccaacggtgcctttttaaagctgatgtgattttcaacccagaaaaagaagagtttactgatataaaaatcgtctggatgggtattcggataccaaacaagagagtacaaaataatactgaatga

SEQ ID NO: 251574 - DNA, 408 bp, Klebsiella pneumoniae; identical to SEQ ID NO: 23438

SEQ ID NO: 251575 - DNA, 201 bp, Klebsiella pneumoniae
atgtggtctgcgcattttcatacgttccgctggtatctcccatatacctttttggaggtctacttcttcccacgtagcaaagcgcatctcctgcgttcttacaccagtcagcatgaccatcttcgtagcatttttagtgatgatgctaccggtataagcttcgagatcccgaataaaatgaggcaattcttcggcagatag

SEQ ID NO: 251576 - DNA, 240 bp, Klebsiella pneumoniae
atgaaaacatttagtttgtcctcaactccagccagaccacagcgcctctggcaggttatccgcgtcattgatcgggctgcagagttgtttgaaggcgacaaggaagccgcacagaagtggttgaacgaacctaaccgggcattgagctggaaagtgccagcagacctgatggcatccgagacaggagcgtatgaggtcattaagctgattacgcgtctggagcatggggtgtactcgtga

SEQ ID NO: 251577 - DNA, 294 bp, Klebsiella pneumoniae
atgacaggaaaagacgcgattctgaactacctgaaaacgcataaaacatgcagctcttcagatgtcgccgcggcttccggaatgacgcacacctgcatcaaccaggctgcaaatatcctggcaaagcagggggtgctagtagcggaagctcgggtgtggcggacggtttactaccggctggccacggaagaagaaatttcaggcaggaagagcacaaaccagattttcaacgagtgcaggcagagcccggcgatgaagcgggtactggctgtttacgggagaacatcagcatga

SEQ ID NO: 251578 - DNA, 375 bp, Klebsiella pneumoniae
atgttatgtgtggctgtagtggaactctctgacgtaatgtttgccttcgactctgtcccggcaattattgcagtcagtcgtgaacctctgattgtctatagcgccatgatgttcgcaatactgggcctgcgtactctgtattttgtactggaagccctgaaacagtatctgtcccagctggagaaagctgttatcgtcctgctgttcttcattgcgtttaagctgggtctgaacgctaccgatcacatctggcaccatggttacagcctgtctgcgaccaccagcctgtatgttgtactgggtgtactggctcttggtattctggccagtgtcatctttccggaaaagccggaagctgaaaataaagaaagctga

SEQ ID NO: 251579 - DNA, 210 bp, Klebsiella pneumoniae
atggtcagtaacagctttatgcgagtggtgaacaacgataatggctccgagattgcacgctttgacctgtcagaagatgcctctactgaaaccgcaatgattttcggtgaactgtatcgccatggcgcggaatggaagtttaaggctgtaggacagggctttgctggtggcctggctgcgctggcaacccagcacggcatcaacatctga

SEQ ID NO: 251580 - DNA, 408 bp, Klebsiella pneumoniae
gtgactcgtcgtgagattctgcgggactatcgtaatgcgcgccagcttcttgagcttgagagcgatgattccgtgctttatatccaacgccttaggatcgctggcgatgcgccgttaatgttagagaataattactactctctgaaacgattaggttttttacagcaggaggatcttagcgggtcgctgtatcagctattgcgtgaaaaatatgcgatcgtgcctacctatgcgggtgaaacgacagtagaaatggtgcgtgcggattctgacagcgcaccgctgctgaagcaaccgcccggcgaaccgttattcctgatgaaaacgctaattctggatagccagcatcagcctattcattatggagaacagtatatcgtcgccgagcgttacacgtttagtttctga

SEQ ID NO: 251581 - DNA, 147 bp, Klebsiella pneumoniae
atgtactcctgcagccgtcttcagggccgtctgatctcgctggatgccggctcggataccgagaacgtttcgtccagcaactgcagagagttcgacggtggcatcatcgcccatgctggcggcgccggcggtttgggttgctgctga

SEQ ID NO: 251582 - DNA, 459 bp, Klebsiella pneumoniae
atgggcgcgcctgtctcgggtctgatttcgcgctctgtctgggccgaagaaggcctgcatggctgtgtggtttgcgatcaccttcagtcttttgaatgtagccagatgctggtggatacggtagcacatttccgtgaacagcttgacggtaaaccccttcccgcttctggctgggacgcagggaaaaatgccgcacgctggcagctgagcagaaaagttatccagagccttgctgcgcgttatgaggtggacagcattaaccgcattaagccgggtatcgctgaagcgacgcgggcggttctgcgtcgtgtacctgatcatgtttttgttcgccagatggatgacccggatgtttctcttctggttgggctggcaaaagagaaaggtatccaggtgacggaagccggggatacgctcggtcagtatcgtgcggttaccattatcaaaaaggtacgctga

SEQ ID NO: 251583 - DNA, 225 bp, Klebsiella pneumoniae
atggtgctcaatcaggatggcggcagcttaatacagtccctcagcacatctcagttactgctacttgtctggctcgcctctacgttgatggcctgccttgtcacggtatttaccatcgcccgggaaataaactggcggtttgcagtagcagtggctgggaaacaggtattaagttctctggtggtggctctggtgatatcccagttatttattcatgaggcataa

SEQ ID NO: 251584 - DNA, 150 bp, Klebsiella pneumoniae
atgctcatcttcagagaacactttcgcgatttcgatatggcgagtctgcacccaggagggaacgttattttccgcaccgtccatcaccccttgctgcatggcggtgtaaacttcaccaaaggagattggtgtcggggagccccccattaa

SEQ ID NO: 251585 - DNA, 129 bp, Klebsiella pneumoniae
atgctggcgctaccgccggagaaaaaacagtatgacgtgctggtagacgaaagcctggtgaccttcgacagacagccactgcatcacccgctgtccatctatgacacgttctgcagaggggccgcatga

SEQ ID NO: 251586 - DNA, 168 bp, Klebsiella pneumoniae
atgaaatatatcctcgccctgaaagaccagccagaggcagctcaactggctcttcgtgtcggtattgctgtcgctaaaagtgatggcaacttcgatgatgatgagaagagtgctgtccgtgaaattgcccgttcgctgggtttcgacccggctgaatttggcctctga

SEQ ID NO: 251587 - DNA, 270 bp, Klebsiella pneumoniae
atgagtggtcacggcccaggaacggaaggggatctgcacccgactgatttcttccgtacctctggccgtcaccggaatgaggtccgcatgttccagcaaccagtccaccagcatggcctgctcttcggtcataaagctgcgaggcgtgaggctgcgatccagtgcgccggtccggaacggttcaagggcaagttcatcaaccatttttcggcgggtctggaacagggtgtcatcgaggtcgctgaagacgacgggcttattcataggtaa

SEQ ID NO: 251588 - DNA, 390 bp, Klebsiella pneumoniae
atggcaaacggcgatttcttcgacgagcgccatggcctcgactggttgcagaacgccgtgcagacggctgactacaacacgctctatacgagcacaaccaaaatcccccagaccgacgccggtaccacaacccgtatcgccaacattgagctggtgctcgataaggctgtgcaaaacggtctctttgcgccgggtaaatggactggtggcccgattggccagctcaataccggtgacatgctgacgaagggctattacacctgggcagaaaacgttgatgaccagcttcaggtcgatcgcgaagcgcggaaaggtgtgccaattcaggttgccgggaaactggccggagccgttcattacggcaccgtcgcaatcacggtcgtgcgctaa

SEQ ID NO: 251589 - DNA, 183 bp, Klebsiella pneumoniae
atggccgaagaacagatggcaggtcataaaaaaataggtagcatcagcggaactgcgccaactcagggagaactggagaagaaatttgccatggctgcggcgcaaatgggggccagatattacgttatcaccggcctcagtaataacaactatgcctttggtaacgctgatatctacgaataa

SEQ ID NO: 251590 - DNA, 165 bp, Klebsiella pneumoniae
atgaacaaagcggccggtgagttgcacgccgcgctggtggatcaggtgccattcctgtttgtcgcccacgacgtcgggccgcgtgcgatttcccctgcggtgaccggggtggtgcaaccgcagagctggtttatcgacctcagcctggtgagcaaaaaagagtaa

SEQ ID NO: 251591 - DNA, 192 bp, Klebsiella pneumoniae
atggggaaagatacccagaccgcaggctcgatcgtggtgatgtcgattatcggcggggccgtaattccgctggtgatgggcattatctcggatatgaacggcggcaatatgcaaatcgcctttatcgctccgctcctgtgctttgtgtatgtcgctttctacggcttctggtgcgtgcgtaagggggtataa

SEQ ID NO: 251592 - DNA, 186 bp, Klebsiella pneumoniae
atgcgtaatgaaattagccattataaagatcttgagcaatttacccgccagcatggtgaatttattgccatggtgaatcactcgttccagcgcctgaaaatactctataacgtggcgctaccggtagcagaaattggctatattcacgatatttttgaattacgtattgaagattttagctggtaa

SEQ ID NO: 251593 - DNA, 165 bp, Klebsiella pneumoniae
atgcacgcggaggacgaattttatcagcaggctctctggctaaaaaacgaactcgaccgctgcgccatggcgctgagtgaagacgaaaagcaggcgttatcggcgctttacggcgaggtgctgcagtgggaaattgatttccatcacgcggcgtacgaggagtag

SEQ ID NO: 251594 - DNA, 237 bp, Klebsiella pneumoniae
atggtgcagcaggataaagcccgcggctacgtgattggcgaatcgttctatcgccacggcatctcatcgattgtctatccggtctttgaccgcagcggccgggtggcggcggtcgtcagcattctggtgccgtcggacgagatcccgcaaagcgatcgcgaacggttgcagaacgacgtcaggatggcggcggacaaaatttccggcttcctcggatatttgtcacaggcaagttaa

SEQ ID NO: 251595 - DNA, 216 bp, Klebsiella pneumoniae
gtgcttaatcacaccgccgatgccgaagcgaaagatgccgacgccactatcgccctggatcgcgccacgctgaacaaaatcatcctgaaagaggaaacgctaaaacaggcggaggataagggtgaagtcaaagtgaccggcgacggcgcgaaactggatgagatgctgggctatatggataaatttgagttctggttcaatatcgtgacgccgtaa

SEQ ID NO: 251596 - DNA, 210 bp, Klebsiella pneumoniae
atgtttctcggcatgggctttgtgctggtgttcctgctgctgctcattttcgccatccggggaatgtccctcgccgtcaaccgcctgtttcctgagccgtccgccgcccccgcagcggcgccggccgccgtcgcgcccgccgacgatttcgcccgcctgaagccggcgattgtcgccgccattcaccaccatcgccgtcttcacccttaa

SEQ ID NO: 251597 - DNA, 159 bp, Klebsiella pneumoniae
atgctcactgccatcaaccgtcacatcgacaaaaaccagtcgattgttacgcacctgcgccagcgcctcagcgagtttcgcttccagttcctgcgggtcgctaatacgaatgcccacatggccataggcttccgctacgcgggaaaaatcaggcagtga

SEQ ID NO: 251598 - DNA, 240 bp, Klebsiella pneumoniae
atgaaaaaacgtacagcaaaagcacatccaggaatcgcgatcaccgttctggccttgatggcttgccaacctttagccgcgcaggcaggacgcatcacgatgagcaaccccgacgaacaggagctaaagggtgggaagcggctgtgtgtctatagtaactctgtttatacattcagttttataacccgttcaacatcctgcccgcatacaaaaacatttaacacggaagatacagaataa

SEQ ID NO: 251599 - DNA, 762 bp, Klebsiella pneumoniae
atggacaatattgagatagcaaccctcttacccggggctacattgtttagtgatagcaacataaaccagacgtggaaagcccatgtcagaacagcaacgaatacggttgtagtgtttgctaagatcattgatccccgggaaatttgcgtggaagcattctgcgctattcttggtagagagctaggaataccaattcctaagcccttcctcgttctcgcagataacactacgttggatgttatcccaccagggcagcatgcactgatgtatggttctgaagatgcggattatcctagttttcggcggtacgccgattgcagtcaagcatacgaaaaactacagaattttaaagcatccctagatgttggcgttttcgatgaatggattgccaatcatgacagaaatgttggtaacattctttatgatggatgtgatgattttttattcattgaccatgggctcgcgctcccagaagggctgcatgctagcgaaccggcaatcgataacaatatcttgagagctctattctcattcaaatccgaattagaaaaattccgcgatttacgaaccgcctcacagatgattacccctatgtatcgagctttaaatttggaagatgtaatgtctagcgctcaggcaacaatgtatgttcccgatgcggtgatcgctcaaattttagcttttctaaccgagagattgtcatcaatcgagactctgataagatctaggctatgcatctctcaaacggacatgtttcaatga

SEQ ID NO: 251600 - DNA, 873 bp, Klebsiella pneumoniae
atgacatttgacatttcactgttcccagctaaaccaacctacgcaggtaagtggtggtcagtgtcctttgagcccatcatcggttcaggcgaacgaattaatgcaatcattgtggctcggggagttgatggtaagcatgaaatcatacagtccatcagagatgaggttctcgattcaatctacgggacgaaatcagaatcaatcaaatcaatggtatcttgggtgagaagctctctccattctcacctagaatcccacattaacttagaacattgggcaccaccgatttctggtttcgcaatttcaaaaaattcagacgctctcgacgatagcttatcagggatcttaaggcaggctgtcaggctaacagcgagcctaggtactttaacccttgaggcagaacgcttagaagatgatgacagatctagtcagaagcagtctgagcaatggtcaaccagaatatctgacgaagccagaaagctaaacccgaagctttcagattattttggtacccgagtccagttatcaagtgcgcagttgcacacgcgctttgggttttataatgatatctatgcgtctaattttgggttaatggtacctagtcgtttatccgcatcgattaactctattaaagcaaaagtatatgatttagaatcactttctcgctccagtatggttttaaagccaaagactcttgacgttatcgtcggtattccttcattcgacgatccaacgatcccacctaaaaccgttgcaagcatgcgtggttatgttaatgaactcaccgagttagccttaaaggaagatattaatttcattcctgtaaacagtgcattcgaagccgctcaaagaattattaaaatagcagcctga

SEQ ID NO: 251601 - DNA, 558 bp, Klebsiella pneumoniae; identical to SEQ ID NO: 225048

SEQ ID NO: 251602 - DNA, 576 bp, Klebsiella pneumoniae
atgagtctgctgtggcttctggtaaccgactgcgaacaacggggttgttttcaccggctgcacactatgagtctgctgtggcttcaggtatcagcctgcgaacaacgggtttgtattcaccggctgcacactatgagtctgctgtggcttcaggtatcagcctgcgaacaacgggtttgtattcaccggctgcacactatgagtctgctgtggcttcaggtatcagcctgcgaacaacgggtttgtattcaccggctgcacactatgagtctgctgtggcttcaggtatcagcctgcgaacaacggggttgttttcaacggctgcacattatgagtctgctgtggcttctggtatccgactgcgaacaacggggttgtattcacctgctgcacatcatgagtctgtggtggcttcgggtatccgactgcggacaagctgaggggggtttacttgctatgcatcgggagtctaatgaggctggaggtatccgactgcgaacaacggggttgtttcaccggctgcacattatgagtctgctgtggcttcaggtatgcgtctgcgaacaaggggtttaa

SEQ ID NO: 251603 - DNA, 1032 bp, Klebsiella pneumoniae
atgccgatcatagcaccaattccccgtgacgaacgacgcctgatgcagaaagctatccataaaacgcgtgataaaaattatgcccgcagactgaccgccatgctgatgttgcaccggggcgagcgcgtcagtcatgtggccagaacactctgctgtgcacgctcatcgattggtcgctggattaactggttcactctgtctggtgctgaaggcctgaagtcattaccgtcaggacgtggcaggcgctggccgttcgaacatatttgcgcattgctgcgtgagcttgtgaagcattctcccggcgatttcggttatcagcgttcccgctggagtaccgaactgctggcgataaaaatccgtgatgtcaccggttgtccgctacatgcctcaaccatccggagatggttacctgcagccgggctggtatggcgcagagcagcgccgacactgcgtatccgtgacccacacaaagaagaaaaaatggtcgctatccatgaagcactggcgaaatgcagtgcggaaaatcccgtgttttacgaagatgaagtggatattcatctcaacccgaaaatcggtgctgactggcagttacgcgggcagcaaaaacgtgttgtcacaccgggccagaatgaaaagtactatcttgccggtgcgctgcacagcggtacgggaaaagtcagctacgtaggtggaaacagtaaaggttcatgtttatttatcagactgttaaaacatcttaaggcgacataccggcgggcaaaaacgattacgctcattgtcgataactacattatccacaaaagtcgtgaaacgttgcgctggctgaaagcaaaccagaagttcagggtcatttatcagccggtttactcgccatgggtcaatcatgtcgaacggttgtggcaggcgcttcatgagacaataacccgaaatcaccagtgccgttcaatgtggcatctgttgaaaaaggttcatcactttatggataccgtcagcccattccccggtggaaaacacgggctggctaaagtgtag

SEQ ID NO: 251604 - DNA, 717 bp, Klebsiella pneumoniae
atggcaactaaagttgcagtaaagttttctgatgtaaaatataaacaaatatatttggaagaggtttggttcttggcagactccataattagaaaagtaaaaaagcttgatgatgttgctaacatccctgaaagcggatatttgatttttagcatacctgaaattacagaactgatccttggaatacttagcaactcagcgaatataaaaaaacttactaatccaggcaagcaagctagaggtgagtcagcaggtgcattccagtttagagtagatcgctgcaattttattaaaaacagtttcccagaaatagatttctcaggggttttggatacaaaattaagaaacacactagagcattttgatgagtatttagatgatttcatggcaacaatagcaaagggtgatttctcaaatgcataccccatggttgcatttaatatcggactttctgaccaggatgccttcaacccacacttatatcctgtaagaatgtatgagtcaaaaactaaaaccttttataactttgacaatgttgtaaacatacaatcgatttatgaagttgcaattgccatagatgaaaagttgaaagatgaaaagttaaaattaatgcaaaaacaatatctcctgaatcctaacatccctgcaggaagcttgggtgatggcggatgtgctgcaggcatcattcttccaagaagattaatctgcgataattga

SEQ ID NO: 251605 - DNA, 306 bp, Klebsiella pneumoniae; identical to SEQ ID NO: 225047

SEQ ID NO: 251606 - DNA, 711 bp, Klebsiella pneumoniae
atgaccaccagcagcgaccacgcttacccgtcagcgttgaggatggtcactggtatcgcccctgtttacccgcctgcgttgaggatgagcaccgtcagcggtcacgtttacccgccagcgttgaggataagcaccggcagcggcccactttccccgccagcgttgaggatagccaccgtcagcggccccatttacccgcctgcgttgaggttgagcaccggcagcggccacgcttacccgccagcgttgaggatgactaccggcagcggtcccgtttacccgccagcgttgaggatgagcaccggcagcggatccgtttacccgccagcgttgaggatgagcaccggcagcggccccgtttacccgccagcgttgaggatgagcacctgcagcagccccgtttgcccgccagcgttgaggatagccaccgtcagcggccccgtttacccgccagcgttgaggatgagcaccggcagcggccccgtttacccgccagcgttgaggatgagcacctgcagcagccccgtttgcccgccagcgttgaggatagccaccgtcagcggccccgtttacccgccagcgttgaggatgagcaccggcagcggccccgcttacccgccagcgttgaggatgagcacctgcagcagccccgtttgcccgccagcgttgaggatagcacctgcagcgaccccgcttacccgccagcgttga

SEQ ID NO: 251607 - DNA, 1569 bp, Klebsiella pneumoniae
atgaccaaaaaactgttgcctttactgctactgtcggcgctctccgccgccgcgcatgccgccacgccgcccaacacgctggtggtcgcccagggtctcgacgacatcgtcagcctcgacccggcggaagcgaacgaactctccagcattcagacggtccccagcctctatcagcgtctggtgcagcccgaccgcaacaaccctgaaaaaatcgtaccgatcctcgccgaaagctggcaggccgatccggcggcgaaaaccctgaccattaaactgaagccggatgccaaattcgcctccggtaatccgctgcgcccggaagatgtgattttctcttacacccgcgcggtgacgctgaataaatcgccggcgtttattctcaacgtgctcggctggcagccggacaacatcgccagccagctgaaaaaggttgatgatcataccctgacgctgcactggaccgccgacgtcagcccggcggtggcgctgaatattctctccacccccatcgcctctatcgtggatgaaaaacaggtggcgccgaacgcgaaaaataacgacttcggcaacgactggctgaaaatgcactcggcgggcagcggggcctataaaatgcgcgtctaccagccgcatcaggccatcgtgctggaggccaacgccagctccccaaccggtgcgccgaagatcaagagcatcattattaaaaacgtccccgacccggcttcccgccgcctgctgatccagcagggggatgccgacgtggcgcgcgatctcggcgctgaccagatcgccgccctgcaggataaacccggcgtgaaggtgctgagcatcccgtccgccgagcagaactacctggtgtttaataccgccaacagcgccaacccgctgctcaataatccggtcttctgggaggcggcgcgctggctggtcgattatgagggcatcaccaaaaatctgctgaaaggccagtactttattcaccaaagcttcctgccggccggcctgccgggggcgctggagactaatccgttcacctttgacccgcaaaaagctaaggctatcctcgataaagcgggcattaaggatgcccacttcaccctcgatgtggagaacaaaccgccgtttatcaccatcgcccaatcgctgcaggccagctttgcccagggcggggtgaaggtggatctgctacccgccgccggcagccaggtctatgcccgggtgcgcgcgaagcagcatcaggcggcgatccgcctgtggatcccggactactttgatgcccactccaatgccagcgcctttgcctggaacgatggtaaatccagcaccgtggccgggctcaacggttggcagatccctgagctgaataaagccaccctcgccgcggtggcggagccggacccggcgaaacgcctcggcctgtacaaaacgatgcaggaaaccctgctccagcattcgccgtacgtctttattgaccaggggaaaacccagatcgtggtgcgtgacaacgtgaagggctatcagcagggactgaacgccgacatggtctggtacgataacgtgaccaagtaa

SEQ ID NO: 251608 - DNA, 834 bp, Klebsiella pneumoniae
atgccgacttatctgtttttacgccgtctgcgccgctcacccgccgccttcagcggcctgaccctggtgatcctgctggtgctgaccgcgctgttcgccccgtggctggcgccgcacgatcccaactggcaggatgccgccgctcgtctgcaggggcccggggcgggacactggctcggcaccgacagctacggccgcgacctgctgtcgcgcttgctctacggcgcccgcccggcgctgggtctggtggcgctggtgaccgccattaccctgcccgtcggtctgctggtgggtatcctctccggctactatggcgggtggctggagcggatactgatgcgctttaccgacgtggtgatgtcgatgccgcgcctgatcctcgccttcgcgttcgtggcgatgctcggcccggggctggtcaacggcgcgctggcgttagccctgaccacctggccggcctacgcccgtcaggcgcgaagcgaaattcagcgcctgcgccatagcgactacctcgccgcggcggagatgctgggcattcgcggcgggcggctgctggtcggccatattctgccactgtgtctgccgtcggcgattgtccggctggcgctcgatctggcgggcattatcctcgccgccgccgggctcggctttctcggcctgggcgcccgcccgccgatggcggagtggggagcgatgattgccgacgggatgcaggtgattttcgaccagtggtggatcgccgccatccccggcgcggcgatcctgcttgccagcctggcgtttaacctgctgggcgatggcctgcgcgatattctggagccgcaacatgactga

SEQ ID NO: 251609 - DNA, 837 bp, Klebsiella pneumoniae
atgactgacatccgactcaccgtccagggactcgccgtcgactatcccaccgcccgggtggtggacaacgtcagcttcaccctcggcaacgagcggctggcgctggtgggcgaatccggctccggcaaatcgatgaccgcccgggcgctgatgggcctggtgcgcaagcccggggtggtgagcgctgaacggctggaggtgctggggcgcgatgtgctgaccctcagcgcccgcggctggcgcgcgctgcgcggcaacgatatcgccatggtgctgcaggacccgcgctatgcgctgaatccggtgcagtccattcagacgcagctggaggaggcgttaaccctgcatcagcgtctgagccgccgtgggcgcgccgaggcggtcaaagacgccatcgccgccgtcggtctggatctgccggtcctcagccgctatcccggcgaactctccggcgggatgggacagcgggtgatgatcgccctcgcgctgctcaataacccgaaggtgctgatagccgacgagccgacctcggccctcgacgcccgcctgcgcaaccagatcctcgagctgctggtggagcagtgcgcgcagcggcagatggccatgttactgatcagccacgatctaccgctggtagccgcgcattgcgatcgcgtgctggtgatgtaccaggggagacaggtcgacgagatgccggcgcgggcgctgccgagcgcgacgcacccttacacccgcaccctgtggacctgccggccaaatgcgcacacctacggccagatgctgccgaccctcgacagaacccaggactttacggagacagcccatggcgatcgttaa

SEQ ID NO: 251610 - DNA, 705 bp, Klebsiella pneumoniae
atggcgatcgttaatcttcaggatttacaggttacattcggcgcgaagacggcggtctccgccgccagtttccgtgtcgacgccggggaaaccttcagcctgatcggcgcctcgggctgcggcaaatcgacgattttgcgcgtgctggccggattgcagcgcgaatggcgcggcagcgtggatctgctcggccaggccattacgccgggcgcccgctttcagggcgatctgcgacgcaacgtgcagatggtgtttcaggatccgtacgcctcgctgcatcccaaccataccctgtggcgcaccctggcggagccgctgcagatccacggcatccgcgacgttgccccgcgagtaaccaccgcccttgagcaggtggggctggccgccgacgccgtccgccgctatccacaccagctctccggcgggcaacggcagcgcgtggccattgcccgcgccctgctgctgcgcccgcagatcctgctgctggatgagccgacctcggcgctggatatgtcggtacaggcggaaatccttaatctacttaatcgtctgaaacaggagcacggcatgacctatctgctggtcagccatgatgccgacgtcatcgcccatatgtccgatcgggcggcgtttatggcggagggcgtgatccagcgctttttcgatcgcgaagcgttggtcaacggagagcaccggatgaggtga

SEQ ID NO: 251611 - DNA, 180 bp, Klebsiella pneumoniae
atgcgagagctcaaccgatggttcagagatgactacggcgtcccggtcagggtcatacgctgggagccccagacacagcgcgttatatacctgcgtgaagggtacgagcatgaatgctttagccccctcgagcaattcagacgtaaattcagagaaataaaggacgatcatgagcactaa

SEQ ID NO: 251612 - DNA, 984 bp, Klebsiella pneumoniae
atgagcactaaattaacaggatacgtctgggacgcttgtgcatcttcggggatgaagctatccagcgtggcaatcatggcgcgcctggctgacttcagcaacgatgagggtgtttgctggccttctattgcgaccatatcccgtcagattggcgctggtgaaagtactgtcagaacggcgatagctgcacttgagaaagaggggtggctcactcgcacacagcgccgcaacggcaaccgtaatgcatcgaacgtctaccagctcaacgtttccaaactacagaaagcggcattttctcacctgtcagtttctgacacatcaaaatctgacacatcaaaatctgacacgtcaaaatctgatgcgtcaaaatctgatgcgtcaaaaattgacccctcaaaatttgaggcgtcggaatccatcaaaaaaaccggttttgacccgtcagaatctggtggggatccgtcagtaaaatcaactactgatccatcagatataaatccttcttgtccggacgcttcgcaaccggacgaacagggctctgcagatgaatttctgtcacggcatcctgacgcggtggtgtacagcgctgcaaagcggcagtggggcagccaggacgatttaacctgcgccgagttcatttggggaaaaattatcagcatgtacgaactggctgctgaaagtgatggtgaggtagttcgccccaaagaaccaaactggaccgcatgggcgaatgaggttcgcctgatggtgatgcaggacgggagaacccataaacaaatttgctcacttttcaagcgcgccaacaaagattcgttctggtgtaaaaacgtactcagcccgtcgaagcttcgggaaaaatgggatgagctgtcgttaaaactatctgctccactcaatagctcccaccaggagtcgtccatttcgcgagccagtttcgatggggttgattactcattgcctgaaaactcggggttccgctcatga

SEQ ID NO: 251613 - DNA, 810 bp, Klebsiella pneumoniae
atgagtaagccatttctgaaatgggctggtggaaagtatacccagctggctgacctgttcgtgcatatcccggcagggaaacgcctgatagagccattcgttggtggtgggtcggtattcctgaacagcgaaaagcacgcagattacctgctggcggacgttaacccggacctgattaatctgtatcagatgttagcggtggtgccggatgaagtggaagtgaaggcccgctggatgttcgagaacatgcggtcaccagatggctatgagctgatccgttccgagtgcaacgcacagacgctggatgctactgaacgcgcagctgcattcctgtatctcaaccggcattgcttcaatggcctgatgcgctacaaccaggcgaacaagttcaatgtgggctggggaggctacaaggctccatattacccgatggatgagatgaaagccttcgcggctatggcgcataactgcgtattcatgaccgctgattaccgccggacaatcagcctggccggtaaaggggatgtggtttactgcgatccgccttacgaaccgatgccgggaacaaccggattcaccgcctacgccgctggtggttttagctgggataaccaggtggacctggcgaagcaatgtgtatctgcctttcaccgtggcgctcgggtagtgatttctaactcatctgcaccgaaggttctcgacctgtaccgggagcatggttttaacctgcaattcatcaacgcgcgccgttcgatctcctgcaaaagcagtacgcgggaagtcgcaaaagacgttgtagcgatcctttaa

SEQ ID NO: 251614 - DNA, 378 bp, Klebsiella pneumoniae
atgaaactgactttaccatttccaccgagcgtaaatagttactggcgcgccccgagcaagggtccgctgaaaggcaggcatctggtaagcgagacagggcgcaagttccagcaggcagcgagagcggcgattattgagcaactgcgggccgttccccggccatcctctgatctggccgaggttcacatagtgttgtatccgccggatcagcgccgtcgggatatcgataactacaacaaagcgctgttcgatgccctgactctaacaggcgtctgggaagacgacagtcaggttaagcgcatgctggtggagtgggggaacatcgtgaagaaagggaaagtagaaatcaccatccgacgttttcgtgcagctgcctga

SEQ ID NO: 251615 - DNA, 483 bp, Klebsiella pneumoniae
atgctgattatttcttctcaaattgatttgaacggagaacgctggtttttcccttacaaaaagccagcaggaagtaaaaagaaattcacgccggaagacgaggcgctatttaaactccgtctgctggtggccagtagcgagaatccacaatatcgctcacgcaatgcgctggtgcggcgccatatcgacaaaatggacgcgagctaccaggtcggtacggatgttttcgatctcgccagtgtgggcgagattgactcggttgatgatcttctcatcgacaattgcgcgcgctttcttctgaaagactgggaaggcgtgggggagctggtggatggtacggtgacggcggtagcgtatacacctgagcgtggtgttgcgttactgaagcaaaacccctctctgtactggcttattctggctgaggcggcgaacattgctcagggtaaggagcagcagactcaggaaaccgtaaaaaagccatag

SEQ ID NO: 251616 - DNA, 318 bp, Klebsiella pneumoniae
atgagtaagttattgagtttttttctgctgtttgtcctggcattttcagcattcacttatgccggtcagagtgactcaggggacgggtacagactgcagtttacgaatgatgcgaacggtggagccgggcttgccgggaaaaaggcccagcggggcatggatggttgccctggaggcacctctccctcctctgatggaagtactatctccccggtacacatgaggaatgcaatcccgggcataaaagctccccgcaccagaacagtcgtttatccgtggcgcagaattatgaaagggcctgaggtggttcaatgctga

SEQ ID NO: 251617 - DNA, 405 bp, Klebsiella pneumoniae
atgaccattttagtgacgatacaggcccagctcgttgtcggggaggaacaggttataaagagcctcgctcctgagggcatgctggccgccgtgttcgaagacgatggccggaccgggtatttctatgcgctcgatgagtccgtcgagggaaacccgattatggacgcagtacacatctacaatgccgaagacgtttcagacggtcacattccttctgatgttaaaattggctggtcagaagacagtcagaagtgcgtactcctgatcaatggatacccgcacggggcattcgatttcgtgggaaaaaacgggtactgcaggagtggttatcctccccctataaacaaggtgtggtctctttccgggcatgagtggaacgactcggtggatgattttttccggtga

SEQ ID NO: 251618 - DNA, 381 bp, Klebsiella pneumoniae
atgaaaataaacaaaaaatatcaaatagaggtgataaaggataaagataaaactttattcattgtctacgctacagatatttatagcccgagcgaatttttttctaaaatcgagtctgatttaaagaaaaagaaagttggtggcgatgttttttttgatttaataattcctaatggtggaaaaaaagaccgttacgtctatacatcattcaacggcgagcgattgacaagctacatattagacaaagttacggaaacagataagtataaatccttatcggaacgctcagcttcgttctttaagaataactttaataagattaatgcaaaccttctatctaaagccacattgtttgctttaaaacaaggtattccaatataa

SEQ ID NO: 251619 - DNA, 1038 bp, Klebsiella pneumoniae
atggcacagaacccatttaaagcactaaatatcaatacagacaagattgaagctgccttgacgcagaatggcgtcacaaacttttcttctatcgtgagaaacgaaagagaaacacatttatcagggacatataaagaaatagattttttaataaagctaatgccatcaggtggaaataccactataggaagggcatcaggacaaaacaacacttactttgacgagatcgctggcattataaaagaaaactgtttgtattcagataaaaaaacgtttgaatacaccattccaagattcagcgatgaaaacaaggaaatgttatttgcatttcttaatgaagaaaacgtaaaaatagaagaagataaaaacaacgaccctaactgtaaacatcaatacatcatgaccgctggcaatggtgacagagtcagagcaaaaatctacaaccgtggctcaattcaattccaaggtaaatatcttcaaatcgcaagtttgattaatgatttcatgtgcaccatactggacatgaaagagattatagaacagaagaatcaagaatttaatgttgacataaaaaaagaaacaattgagtcagaattacatagtaaactaccaaaaagcatcgacctaatccatgacgacatcaaaaaacagctatcctgctcgctcataatgaaacaaatagatgtcgaaatggaagattactcaacatattgtttctcagccttgagatccatagaaggctttatatatcaactacttggaagtgtatgcaacccgtcatcatcaaggaatcttggcgagtacttcactgagaataacccgaaatacataataagagatatacaccaagaaactattaatggtgaaatagcagaagttttgtgtgagtgctacacttactggcatgaaaacagacatggtttgttccatatgaaaccaggtgtggctgacactaagacaattgacaaagcagaatctattgaaattatcgatactgtatgtcagttgatagataaaggcatagctaggttgaaataa

SEQ ID NO: 251620 - DNA, 303 bp, Klebsiella pneumoniae
atgatgctgcgatcctgttggttcgacaaaaccaaatgcgaaaaaggcctggaggctctgggacagtatcaaaaagagtgggacgacactcgaaaaatgtataagccaacccctctgcataactggacgtctcacggcgcagactcattccgttatggtgcagtaggcagtaagtctttgcgtagcggcaaccgccacacaacccagcaatttgcccagtccaattacgatccttataaccctcctggacatagccagcagttttacgctgattccgactgggatctgtatggggacaactga

SEQ ID NO: 251621 - DNA, 663 bp, Klebsiella pneumoniae
gtggtggcccatattggggaggtttccacccgggagacgcgccggctgggccagcagatcgcccgcctcggagttgacgcggtatcggccattaccccgtggttcgtgcccttgaagcaggaagagctgattaaccactatacggcgatcgccgacgcgctgagcgtcccgctctttctttacaacattcccgcccgcaccgggaacactattgccccggagaccgcgcgccagctggcccgccacgagaatatcgtcggcattaaggatagcgccggcagctacgacagcctgaaaggctttctcgacgcggtgcgcgatatcgacggtttcgacgttctgaacggaccggactcgcttatccatcagggatttgtcgacggctgctcggcctgcatctcggggcttgctaacgtcgcccccgctgaaattaacgccatctggtcgcgctttcacgccggggatatcgccggatcgcgccaggcccaggagcaggtaacgggcctgcgcaccgatctgtataaagtggcgttctcgcctgcggcggtgaagaaagccctgcagctaatgggtcacgaggtgggcgacagccgctacgcggtgcagtttagtgaccaccagctgcagcagattaaaaatatcattaacacctaccttcactaa

SEQ ID NO: 251622 - DNA, 591 bp, Klebsiella pneumoniae
atgactgacggcaaggtgctgacgaaagagcagcgtgggcagctggaggaaaactttaaggagattgctggtggtccggtcaaaaagcggctttggatccttgagagcggcttcaccacgcaacctatcggcgtttcgcctcaggattcagaaattctggctgcgcgtaaatttcaggtcgccgaactggcgcgattttacggcgtgcctccacatctggtcggcgacgtggataaaaccacctcctggggatcggggattgaacagcaaaacctgggctttctccagtataccctcaaaccctaccttgatcggtgggagtacagcattgagcgctggctggtcaaagagtcagaacagggcatcattcacgccgagcataacctcgacgggctgttgcgcggtgattcagcaagccgggcatcatttatgcaaatcatggtcaataccgggattcggaccgttaacgaggttcgaaggctcgataacctgccgccgctgcccggaggtgatgtggcgacacggcagtcgcagaacgtgcccattaccgatctcggaacaaacaaagagccccgcaatgccggggcttaa

SEQ ID NO: 251623 - DNA, 261 bp, Klebsiella pneumoniae
atgtccgttgataatcagaaagtttttcagaaaatcgtcgaggagctggaatcactcaaaggtgagaccgaggtcttatctatcgctatatcctgcctcttcagcgagttgccaacagatagcgccagtaacgtgagggctaaattcacaaaatccgtaaatgaactaaacacccttaaaccagcggcagcagctagccggaggaggtcgcgtcgcgacgtatattcaaaagctctgtcaatgatgagtaagcctgaataa

SEQ ID NO: 251624 - DNA, 516 bp, Klebsiella pneumoniae
atgtctattaagaaaagtgttatcgctgctgcagtttttgcaagcctttctggtgtcagcatgatggctaatgcagcaccgtctgctgatgtgacgctggaaggtattatcaccaacactacctgtgatgtttccgttaacaatggcctggcgaccctgaatgtgggggtctacaaagcaagttcttttacccctaacactcagcagggctctgttgcgctgccggttgaattaaccaactgcgctgatgagactggcgcgctgattattcaggggcagagcgcaagctccgacccgagcaagcagctgtttaccgccgcgacgggtgataccgttggctttatgattaaggatgctaaggatgtgcaggtggctgagtcacagaatgtggctttggatgtgacctctgctgacacgaatagttattctttcaatgtaggtatgggtaccactgacgctacgccggcagcgggtagttatagcgtaccggtgactgtggcttatattgtcaattaa

SEQ ID NO: 251625 - DNA, 882 bp, Klebsiella pneumoniae
gtggtccgggcccttcacctgctcgacatagttgaagctgcgcaccggcacggtgtccgggccgtacggcagacgacccagcacgcgcggcatcaccaggccgatgtagcgggcatcgtcggtttcacgaaacgccttccagcgaatatattccgcgcgatcgaagtagttgccgatatccttaatggcagccacctcttccatggtctctttcaggaagaaggccgggccgacggcgccgataaacggcatatgggcggccgcagagacgcgggagatgttgcgcaggagcgccacatcctgcgggctggcgtcgaactcataggccgagatcaccgagccgatcggctcgccgccgggagtgtcatactccgcggtataggtgtgccagtacaggccgctctggataagctccggcgcgtcctcaaagtcctggcgcagatcgtctttggcgacgtcgaggatctccgttttgacgttctgccgatagtcggtgttgtccaccagctgtttgaggccgcgccacagggattcgacctgctgaaactcctgatggtgcatcaccgcgtccagctgacggcttatctggaaatccagctcggcgatatggtggtcgatcagcgttttgtcgagcttttccacccgctggccggactgacggatgcgttccataaacacctgcatcgccgcggtgagacgttccgccgccggcgcctcggagagcgcggcatcgtccagaaagtcgttgatatccccgaggcgagacgccggggcgagattaattttttcaaacagcgaggcgtaaacgccctcgcccgccctgttttcctgcagcgtggtttgcccctgaacaggggcgttttctgtggtaacagacattag

SEQ ID NO: 251626 - DNA, 441 bp, Klebsiella pneumoniae
atgcggcacgatcagtgtaaacgccgcggagcagaacatcccggcaatgatgcagatcttgcggcttttgatcggtgccatgccgcctttgaccagccagtcggtgacgtagccattgatcagcataccggcggcaccaaacaggaaaggaattgcggccataaatccggtacttttcagatcgaggttatacgctgtttgcaggtagcccggcagccaggccagatacagccacgcggtataattgatgccgctgaagccgagcatcattccccacatggttttgtttttaaacaggctgcgccattcggcaaagctcagcgggtcgcggcgaacgttgacgcttccggcgttaaggtacgcctgttcatcggcggtgagggggagatcctcccggttgcgataaagcatataccagccgatagcgataaagatccctag

SEQ ID NO: 251627 - DNA, 252 bp, Klebsiella pneumoniae
atgccgatagtgataaacatccagcgccagcccatcatcagcatcattgcggcaaggattggtgggctgaccgcgacaccgatcgtcgaggcggcgttgaagaagcccattgggcgaccgcgctctttaatattaaaccagtcgttgatcaccttgacgccgcaggggttcattggcgcttcgccgatccccatgccgatgcgcaccaggacgaactgggtaaagctgtgcaccatcccggagagcgcctga

SEQ ID NO: 251628 - DNA, 396 bp, Klebsiella pneumoniae
  misc_feature (30)..(30): n is a, c, g, or t
ttgctgttcgaacttaacccgcgcctgagntgcgctgttaagcttgtcactggcgtcaagctgggactgcatggcagcggtctgctggtttatctgatcaagcaacctggttgctgcgtcctcggtatatgctttaccctttggcgtcttgggtggtttcggatctttgtacatctcgttaatgcgagaaacattttttgcatattgctctgcagtaattgcaccagccttcaggaattcgctttgctgcttaatagctttattgcgcttatccgcattgctcagatattgctggttaacgcgatctgcttcctgctgcgttttaattctttgctgttcggcttccttagccttcgcctgtcctttggttacatccccctgaagattggcaactga

SEQ ID NO: 251629 - DNA, 579 bp, Klebsiella pneumoniae
atgacgcctgtaaaaaaaccgctaaagaaggccttaattggtccccagtatttccagatcagtaccccagccgctacaaacgcagcacccactaagccgattgggctcaatagcattgataagccgccactcagcgccgcaattccgcctttcacaatgccgaagagagcagggatcccggttagccgcagtgccagcccgccaatgctttttgacagggcgccaatagcagtcaccggagaggtaaaggcgccaagtaacgcaccgcgcagtggtaccatcaatctggttaatacgctgaggcgtccgaccaggccgctgagtaaagcaccccatccgctaatttttgccaaggagctaccgcccgcggcactcatcatgcggaacgttgataccgtacctcctatgccgctcccgccggacagcagtgcaaacccgagcctgagctttgcaagcggccctaaaagtaaaccagcagctaatgacatcccgccaattacagcggtcagtgccagtgcagtcccgccggcgagtaacaacgtttgtgaaagtctggggttttcttctatccagctttga

SEQ ID NO: 251630 - DNA, 399 bp, Klebsiella pneumoniae; identical to SEQ ID NO: 191103

SEQ ID NO: 251631 - DNA, 411 bp, Klebsiella pneumoniae
atgatcactttcatcaccgttgaagatgtcaattcgattctcggtgccacctggacagatgaaagcaaaaaagccaaatctgtgctgatggccaatacctgggtgaatggacttaacctgaaactaccgtgcaataaggcaactcacgaaaccattattcctgacgatgtgaaacaggctggcgcctatgcggcgctgtcggcggcaaatggcgggctgtatcagcagaaaactgattcgggggtattgctgagtaaggcagttgacgctgacgacgtttctgtttcaaagaccttcgcagaactcgctaccagcagttcggcattgcttgattctgacctacagctggcgctggccatgcttaagccctatggcgttagtcagtcacgggtgcggctggtgagggggtga

SEQ ID NO: 251632 - DNA, 513 bp, Klebsiella pneumoniae
atgccggaatatatggcagcactgctggccgccagcctggcccactccgctgacatgttccgtaagttgtactacgacaacggatcgcatgctggatgtattgtctatattggcgctggacaggttgatgataaaagcatgaaggcagtcaaagagacgttgaccggtgcgcgtgggaaaggggcatttaaaaacctgctgctgcatgcgccaggcggcggcaaagacggcgtgcaaatcctccccttccagcagatcacggcgaaagatgagtttatcaacattaagaacgccacacgtgacgacatactcgcagcgcaccgtatcccgccgcagctgatgggcgccatgccagagggaaacggctcatttggggatatcgagaaagccgcccgggtctacgctatcaacgagctgacgcccgtaatggaggcgctgaaggtggtcaatgagtggatcggagaagaagtgatccgctttaacccttacgcattgcttaccgctgagaaataa

SEQ ID NO: 251633 - DNA, 186 bp, Klebsiella pneumoniae; identical to SEQ ID NO: 240433

SEQ ID NO: 251634 - DNA, 408 bp, Klebsiella pneumoniae
atgcagcgcttccgtgacccgatgaccgcccgcacgctgctccagtcacagcagaactcagacgaggcactgagcatcaagcgcgatgccgatccgacgtttgatttttgcggctaccttgaggagctgcccgaacctgacgggatgtatatggggaatgcgaatattgtcccgcgacagccgcgcctgtatctgtaccacgcctatctggtctatatggaggcgcacggctacaagaatacgctcagtctcaccatgttcggcaaaggactgtcatcgatgctgaaagagtacggcctgaattacggcaagcggcgaacgaatcagaggatgcagactaatctcgcactcagagatgaaagcaacgcagactggctgccccggtgcaacgaaagaacagcaatataa

SEQ ID NO: 251635 - DNA, 564 bp, Klebsiella pneumoniae
atgattggttttcgcaatggcgtactcgataccctcaccggcgtattcagcccacacagcaaatcacactggctgcgtacgctgtgcgacgtggactttacccctccggtggagggcgaaacgctggaaacccacgcgccaaacttctggcgctggctcgaccgtgggaccagcggcaacgctgacaagcgtgatgtaatactcgccgcgctgtttatggtactggcgaaccgctacgactggcagctctttcttgatgtgaccggaaccggcgggagcggaaaaagtattctggctgaaattgcgaccctgctcgccggggaagacaacgccacgtctgcgaccatcgagacgctggagtcaccacgcgaacgcgcggcgctgattggcttcccactgatacgcctgcctgaccaggataaatggagcggggacggcgcggggctcaaagccatcaccggcggtgatgctgtgtcggttgacccgaaataccgcgacgcctattcggcctatatcccggcggtaattctggccgtgaacaataacccattgtgcgccagctga

SEQ ID NO: 251636 - DNA, 534 bp, Klebsiella pneumoniae
ttgacgattcgtcgcttatctgccggtaattgtaccagctatcacctgctggataagggcatttggccgaaagggctgaaccatctgcgcattggtgggttacatgaatttggtatcgaatatgtagagatgaaatatctcaatgaatttcaccactccgcaaagcctgtagataaagcgtgctcggatatgtatgtgctggaggccgagattatcgagttaaacagcaaaccgacagtcccggttggtgagctgggggtggatgcattcttgcagagtaaaacctttaccgataacggcatccgtaagcgcgcattactggcatttggtcgccaggatgtcccgtctgataactgtgtgccatgtcatgacagtatcaccattctggggcagaccagcgatcataccctggtggatattgaggattgcccattaccactgcaggtgggtgatgtgattagctttgaacttgattacaccgggctattgatggcttgccagaccaaaggcgttgccatccgatttattcgataa

SEQ ID NO: 251637 - DNA, 366 bp, Klebsiella pneumoniae
atgcaagaggctgttccgctaatttcaaagcaattagaaaaggccagaatagaagccgaggagtggcgcattcagcgtgagcgggaacatgctatatatctggaaaaggagcgaataaggcaggaagaaaaagcgtacagcgccagtcgtaccgagctgaaatccattatggttcagtggactgaagacaaacagctggaacagttttttcacgaggcagagttagacgcagcaatgcttgatgagcagcagaagatacaggtcatagaacgtctgcaacttgcccgtcagtttctgtctgaggatacggcgattgagcgattgttgaagtgggaaacgccggaagagcggttaaataaaggatga

SEQ ID NO: 251638 - DNA, 384 bp, Klebsiella pneumoniae
atgacccacacgcttggaaaaatggcgataccgaacatcggcaagacgatccctttggtgataagccagccggctatcattccgcagagaccgagcgtagcgccaatcgaaaggtcgataccggcagtgataatgacaaaggtgatccccaacgccagaaaggcgttaatcgcaatgtgtttaatcataatcaccatgctgccagcggataaaaaaccgggcacggtcatcgtgaagaagccgacaatcaggaacagcgcgataaaggtgcgcagttttaataacaacagcaggatattttcacgggagagagaggctccgccgcgcggcgccagtgcgaccgattgtgtcattttcatcttagaacccctgagcgcttgctga

SEQ ID NO: 251639 - DNA, 732 bp, Klebsiella pneumoniae
gtggagaacctgacctgcgtgaatgccgcgggcaatacggtggtggataacgtcagttttaaagcacatgccggtgaaattattgggatctacggcctgatgggcgccggacgaaccgagctgtttgaatgtctgctggggacagcgcgccactactttggcaagatctggctggacagcaaaccggttccccagcggttaaccacggccgaacgcatccgcatgggcatgagtctggtgccggaagatcgtaagcggaccgggatttttccgatctcttcagtcgccagcaatctgaccattgccagcctgtggcgtcgtcttcagcgcggggtaaccattgccaataaagaggaagaggccgtcgtcgccagcacaattggcaatctatccatcaaggtctcatcaccagaagtcgagatccaggcgctcagcggcggcaatcagcaaaaggtggttattggccgttcgctgttaaccaatccgaaggtgctgtttcttgacgagcctacgcgcggaatcgacatcggcgccaagggggatgtgtttcgcatgatggtgcaattgtcgcagcagggaatggcggtggtgttctccacctccgatttaaaagaaatcatggcggtctctgaccgtatcctggtgatgtcaggcggcaaactgaccgccgatatcgttcgtgaccaggccgaagagtcggcgctggtttcagcaagcgctcaggggttctaa

SEQ ID NO: 251640 - DNA, 183 bp, Klebsiella pneumoniae
atgatggggagtcgtaatgcgacagaagaggattttgccaaggtcgggcggctgatgactgaagggaaagtgaccgccaggatgatgctgacccaccgttacgacttcaaatcgctggcggaaatttacgaaagcgacgtgattaacaatcgtcagctgatcaaaggcgttattcatttttag

SEQ ID NO: 251641 - DNA, 801 bp, Klebsiella pneumoniae
gtggcaaaagcggaacataccggtttcttgttcctggtggtgatcaatgcggtggtggccgtctgggccgctccggcagtcagcgcctcggatttcacccagaacgcgcgctcatttcgcgagcaggctattggtcagacgcttggactcgtggtggcctatattctttttgcggtcgccggcgtctgtattatcgccggggccagtatccactatggtatggatacctggaacgtgctggatatagtgcagaaatgggacagcctgtttgcctcgttctttgcggtgctggtgatattgatgaccacgatttccaccaacgctaccggtaatattataccggcaggctatcagatcgcggcgattgccccagccaaactgacctataaaaatggcgtgctcatcgccagtattattagcttactgatttgcccatggaaattaatggagaatcaagacagtatttacctcttcctcgatattattggcgggatgttggggccggttattggtgtaatgatggctcactatttcatcgttatgcgtgggcaaataaatcttaatgaactttataccacaccaggagattataaatattttgataatggttttaatgttaccgcattcctggtaaccattgtagcagtcattttatcgctcggtgggaagtttattcctttgctggaacctttctcccgtgtgtcatggtttgtcggtgttattgtcgcttttgttgcgtacgctttgctgaagaaacgggcgcaacccaataatctgacacggccaaatactgttagttaa

SEQ ID NO: 251642 - DNA, 321 bp, Klebsiella pneumoniae
gtgaccgggactgacgtcagcaacccacgcgagcaaaagctcactcttacgctactgggccagccgttggtcgtgcagttgggtcctgtcatgagaggcaacgccattcgcgatgccagcggttttaaatttgaagactttaccaaccaggtgcagtttgcgcagctttcacgcgcctacaaccgggaggcaataaaatcgttgccgacagtggacgcgagctggacaggcaagcctatcgatattctctttgcggtcacggtggttaacggcagcctgcaggatgcggccgctcttgagctaaaacaggaggcgcgctga

SEQ ID NO: 251643 - DNA, 483 bp, Klebsiella pneumoniae
atgctaaagctgatgcggcggcgaaggaccagactgttactgcgccggttgcgccaccggcaaccactgttgatattaccccgggggctactgcgccaaatgacggcgaccagacgatcggcaccgttgatgtcaaaatcaccaaatccaaaatggccccggtcaaatggaacggtgaggaacaactggcgctggggcccgcagggacatacaacaccatccttgctgatcagtttaagcaggcttttcgcgctctggctaatgagatggatgcagatctcgcggctctgtatttcgcatcctctcgtgctgttggtacggccggcaccgctcctttcggtattgcaggtgatttgtcggatgcggcaaatgcgcgccaggttctctctgacaacggttcgccgacaactgatctgcagatggttctcggttcttcggctatcgcaaacctccgcggtaaacagtctgttctgttcaaagtaa

SEQ ID NO: 251644 - DNA, 462 bp, Klebsiella pneumoniae
ttgattgccggaattagagaatgtttttgcgagttcgaaagcctgtttaagccggtctgtccactgcttgatctggctaacattgtttttaccctgctgaatgaagatgccttccggtgttacctgtcgccactgcatgccgagtacatcagccagacgggcagcgcaaagataggcaatttccattgctgtacgaacgacatcatcagcctccttatagatggcctcatattccgcatcggtaatgtacctcccgcgggcgacagctttaaatttactgacgccctggcaaggattccctttaaccataccccgttcaaagccccatctgaaaacacgagacatgctactcatttcatgatttgcctgtgttttactttgcaagcctctcctatccataaacatcctgatatcttcagttttaattttatctgccgtaatcttcccaaatacagcaagtag

SEQ ID NO: 251645 - DNA, 342 bp, Klebsiella pneumoniae
atgtcgcttaacctggcaaagccagcgggcgtcacgctggacatcgccaccgttgaacaggcggcggaaaagcttaacagcggcaagttggatcataaaaaagtcatggtggtcctaggcaatactgcggaaaccctcgcgctagtggaaaaagtcccaggaattagcgcaattaattacggcggtctgccacagaaggaaggggcaagacaattcggcaaggccatctatctgaccgaagaggaaatcgcccatagcagagtgctaaaagaaaaaggtattcggctggagatgcgtcaggtacccgcccactcggctgaactccttaacgaccaactttaa

SEQ ID NO: 251646 - DNA, 690 bp, Klebsiella pneumoniae
atgcgttattacctttctccctcgctgatgtgtatggacatgatgaagctgacggaacagctgcgctttctaaacagcaaagccgacaggctgcatgtcgacatcatggacggccactatgtcaaaaatctggcgttgtcggccagctttgtggcgcagatccgtccctacacctcgcttcctatcgatgtccatctgatggtcgaagcgcccgcttcgtttataccggcgctgttagacgccggcgcagacgccttctcactgcatccggagaccatctgccgcgaagcgttccgggttatcaatatgcttcgtcaggcggggaaagaggtgggaatggtgctcaatcccgccacaccggttgagagcatccagcactatctgcatctgctcgataaggtgacggtgatgaccgtcgacccaggctatgccggtcagccgtttattcctgaaatgctcgccaaaattacgcagcttcatcagctcaaagagaccggcagcctccgcttcttgctggaagtcgatggctcctgtaaccgcaacacctaccgcgcgctgctgggcgccggcgcacagatattagtgatgggcagcagcggtttattccgcactgatatgccgctcgagctggcctgggaaaccatgtcccgcgaactgtccgccgcgctgcactcccccgagctggtatag

SEQ ID NO: 251647 - DNA, 759 bp, Klebsiella pneumoniae
atgcgcggcgcttacactggcgcagagaacagtcagggctatctggagttggcgaacgggggaacacttttccttgatgaactgaacgcaatgccaatcgagatgcaaagtaagttgcttcgcttcttgcaagataaaacattctggaggctaggcggtcagcaacccatccattccgatgtgcggattattgccgcgatgaatgaggcccccgcgcgattaatccagcaagagcgactgcgcccggacctattttaccggcttaacgtcggaatgctcatgctgccaccactacgcactcgcccggaagatattcctctgttggctaattatttcattgataaatatcgcagtgaagttccgcaagatatccatggtctcagcgaggcggcacgcattgcgctactgagccatacctggccgggcaatgtcaggatgcttgaaaacgcgattgtccgcagcatgatcatgcaggagacagatggcatgctgaaaaagatcgtttttgaaaatgaagaactgagtttaggcggcccggaaaacccaacacagcactcctctctcccggcagcagaaccggataacgaaagttctctcgaggcgcgggtagcaagctatgaaagggggctaatagaaaccgcgctggatacttaccagggaaatattgcagcagcggcgcgcagtctcaacgtctcccgaacgacgctgaactataaggtacagaaatacggcattcgttttggtgtcgtacaccgttaa

SEQ ID NO: 251648 - DNA, 513 bp, Klebsiella pneumoniae
atgcaggcgcgcgcgcggcgcctggccggtgatgcacagaatcggaatcgagtccgcggaggcagagtacagggcggtgatcatatccgtacccgccggaccggaggtccccaaacagacaccaatattaccggcagtcgcgcgggtatagccttcagccatatgagacgcgccttcaacatggcgggcaagaatatggcggatcccgccgtgcttacgcatcgcagaatagaacgggttaatagccgcgccaggcacgccaaatgccgtgttaaccccttctttttccagaacatacattgccgcgtcaacggctctcatttttgccatttttacaacctcactttattggaaaatttttccaaatctaaacataatcaaaaaagtcccgctcaagtgagcgggttggatcggcgatcagtcggcctggggtttaaggcccagcgcggtactgatattccttgccgtctcccttaccagctcgccctggctgacaaaacggtccggggttag

SEQ ID NO: 251649 - DNA, 276 bp, Klebsiella pneumoniae
gtggtgggtgtgtatcgcctgatcatgaagagtggttcggacaacttccgcgcctcttctattcagggcattatgaagcgcatcaaggcgaaaggtattccggttattatctatgaaccggtgatgcaggaagatgagttcttcaactcccgcgtcgtacgcgacctggatgccttcaaacaagaggcggatgtgatcatctctaaccgtatggcggaagagctggcggatgtggcggacaaggtatacacccgcgatctgtttggtaacgattaa

SEQ ID NO: 251650 - DNA, 492 bp, Klebsiella pneumoniae
gtggtggcttatcgacgttattacattaaggggggaacctggttcttcactgttaacctaaaagaccgtagaagcatgcacctgactgaaaacatagaattattgcgctactctgtcgccgttgttaaacaacatcgcccctttattattgatgcctgggtggtgttgcctgaacatctgcattgcatctggacactacctcataatgatgacgatttttcttcacgctggagagatatcaaaggctgttttagcagaacgttaaaacgacaacccctctggcaaccgcgcttctgggagcatgccatacgcgatgaagatgattaccgccgacacgttgattacatccatatcaatccacttaagcatggctgggtcacccgggtgatcgattggccattttcaacctttcatcgcgatgtccagcgcgggctatatcccccaaattgggctggcgatagctttgatcttagctgcggtgaacgccgatag

SEQ ID NO: 251651 - DNA, 792 bp, Klebsiella pneumoniae
atgacgtcgatgaatactttagtatgtcaggaacctaaaaaattacactgggaaaaacgccagattcccattcccggcgatgatgaagtgctcattaaaataaaggcggtggggatttgcgggacagatattcatgcatggggcggcaatcagcctttttttagctatccgcgtgttcttggtcatgaaatatgcggtgagataattgggctgggtaaaaatattcttaatttgaagagtggccaacaggttgctgtgattccctatgtcgcctgccgccactgcccggcctgtctgagcggccggacaaactgctgtgagaacatttcggtgatcggggtgcatcgcgacggcgggtttagcgaatacctctgcgttccggtaaacaatctgctggtggtggatgatgtcgaccctgaagctgtagcgttgattgagccattcgccattagcgcccacgcggtgcgtcgcgcagcgatccagccgggagatcaggtactggtggtcggcgcgggtccgattgggctcggggcagcggcgatcgctaaggctgacggcgcacaggtggtggtggcggataccagcccggcgcggcgcgatcatgtggcacaacatctcggcctgaccaccctcgatccctccgatccactgtttaccgagcaactgtcggccacgtttgacggttctctggcgcagaaagtgattgacgcgacgggaaatcagcaagcaatgaacaacaccgttaatttaatccgtcacggcggcagcatcatttttgttggtctgttttaa

SEQ ID NO: 251652 - DNA, 300 bp, Klebsiella pneumoniae
atgccgctggttatcagcctgcatcttcaggcgattcagtgcagcgctacgttctgccggatctgcaagacggaaaaaatcctcaatatcaggattgtaaccgtctactgcctggcgaatcgcagacctcagtgcattctggcgaacaaagatattcgcatcgctgaaacgctcagacgcggttcttacaccgccagccagcggagaaacctgcaaccccccttgtttgatttgcccggccctagcttcaatcagacttgcaagatcatccggaatctccccacgctcaagctggcgtaa

SEQ ID NO: 251653 - DNA, 234 bp, Klebsiella pneumoniae
ttgcccaacaagcgtaccgttaagcatctggaattgagccttctggttcatcgcttccatgaatggtttagactggttgaagcgaaaacctgccgtattaccattcagcgcagcaacccgaacatcaacctgagagcgggcttcaagaagaccggtagtctcatctacctgcgcggtagttgccttgctttccggaatacctttgttcagcttgcgccagtacacagcaggtaa

SEQ ID NO: 251654 - DNA, 153 bp, Klebsiella pneumoniae
atgctggcgtttggcgagatggcaatgccgaagccgctgtccggctgcggcaaaataatggcgctctcctgtatcgtattagtggtgctaaacgtagcaagcataggttcggtcccgcaatcactgccgttaccctgcttgaccagaccatag

SEQ ID NO: 251655 - DNA, 588 bp, Klebsiella pneumoniae
atgttcacagctcttatcgaggccgagttgttttcgggtgaacatccgatcagagggcggaagaagttgaaagaagaagtcccagaaactggctatctgacagaggacgaaatcaagcacttgctctttaaactggatggcgacaacaagaagatagctgttctgtgtttaagtactggtgctcgctggggcgaagcggctcgactcaaggcggaacacatcatacagaaccgtgtgacgttcgttaaaaccaagagtaacaagcagcggactgttccagtttcagcggaagtggcaaaactcatagcggatggtaagcgagggttgttatttggtaaggcgtcttattctgacttcaggcagatactcagggaggtaaaacctgatcttccgaccggccaggcgacgcatgcactacgccacagtttcgcgacgcattttatgattaatggggggagcataattacattacagaggatcttaggacatgcgcgaattgagcaaactatggcctacgctcactttgcaccggaatatcttcaggacgcgatctcgcttaacccgctgagaggtagcgctgatgtgtga

SEQ ID NO: 251656 - DNA, 651 bp, Klebsiella pneumoniae
gtgcaggggtttgtagtcaggcagtttgtacatgaaggtcagtcgataaaaaaaggtgatccgatttaccagattgacgtcagtaaaagcacacgcagtggcgttgtcaccgataatcagcgcagggatatcgaaaaccagctggttcgagtggacaacatcatttcccgtctggaagaaagtaaaaaaattacgctgaatacgctggaaaagcaacatctgcaatacagcgatgcgttccgtcgctcatcagatattatacggcgggcagaggaagggataaagataatgaagaacaacatggagaattacagaaactaccagttaaaagggctgattaataaagatcagttaactaaccaggtggcattatattatcagcaacaaaataatcttctcagcctgagcggacaaaatgaacagaatgccctgcagataaccagtctggagagccagatccagactcaggctgcggattttgataaccgtatctatcagatggaactgcaacggtacgagttgcaaaaagagctgattgatactgatgtggggggggaaatcattatccgtgctttgtctgacgggaaagttgactctctgagtgtcactgtcgggcaaatggtcaatgccctgtctcttatacacatctga

SEQ ID NO: 251657 - DNA, 384 bp, Klebsiella pneumoniae
atggactgccgccacaccgatgcccttgcattaacggcatttactgaaatgatcgaaggcgatatgcggcggatctgcgaggaaatggatattggcattgaaatcgacctgtggatggatgaagccccggttcccatggacaaaagactggtcgcccaactcactgccctgtgcgaaaaggagaaggtgaatttccgcgtgatgcacagcggcgcgggacacgacgcgcaaattttcgccccctgcttccccacctgcatgatctttatgccaagcatcaaaggcatcagccataacccggctgaaagtacgcatatagaggatttggcggaaggggtaaaaacgctcgccttaatgttgcatcaactggcctggactgaataa

SEQ ID NO: 251658 - DNA, 219 bp, Klebsiella pneumoniae
gtgctcgatggtgccatgcactttgatgatgccccagtcttcaccgtattcccggtgcaggatgtcaaaggttttggtatcaggatcgataacgtgcacagggatctgatgacggccagcctgttcgatgcagttatcaaaattggtggtaatgcaccagctgcgctgcttaatcaggtaatcggcaatcaggtgatgattcgcattcgggggacgtag

SEQ ID NO: 251659 - DNA, 324 bp, Klebsiella pneumoniae
gtgatccttgaaacgcactatcttaatgaggagcagattcgtcgcgtgtgcgaaattgccgtagaggtggggatgaagtgggtcaaaacctctaccggctgggcgcccaccggcgccacggtggaaaaagtcaggatcatcgccgaccagcttaaaggccgaatcgatatcaaaggcgccgggggcattcgcgatctggccacggtgcgtgcgctgtaccagcttggcgtgcgccgctttggcatgagccatggcgcggtaaccaaggtgctggctgaactggagcagcacccggaacgttttcccgagctgaacgccgattaa

SEQ ID NO: 251660 - DNA, 252 bp, Klebsiella pneumoniae
atggcctacacagggttggcctggccgctgattgatggcgtcgggtccatttacgggatgtatgtcatcaccgggttgcaggaaacgcatcaggagtttgatcgctacggtaaggcgaaaaaaattgagttcacactctcactgcaaagggttgatgaggatatcagggaggcgctgcaaagttcctctgtcagtgatctgatggctaccttaaaggatggaattaaaacagcattgaacacgctccaataa

SEQ ID NO: 251661 - DNA, 276 bp, Klebsiella pneumoniae
atgttcatcatgcagttccggcagcgctttaccgtcgaggcggatatacactggcccgacgtgggcaagggcataatcaataatctgccggcactcgccgggactggacggtgcgtaaatttcaatattgccaaaaccgcgcagaatggcgatatcgtcaatactgtggtgggtgctggccagtggaccgtagctggcgcccgcgttcagcccgaacagtttgacgttggtgttgttgtagcaaacgtcgaccttaatctgttcattagcacgtga

SEQ ID NO: 251662 - DNA, 420 bp, Klebsiella pneumoniae
atgcaactgactgaaacgctgatcgtcggttttctggcctttgccaaggatgcccatcacgcggttgaaccagttgacgctctcctcgctgcgatgagctgccagttcgatcacttcagcttcaagcgcatcagagaacagcggcgcctcgatctgctggttattgaacgccatcacctgcgcgcgctgctgcgcggcaaatttaaggcgctcagtccccagacttgccggagtgtcggtcatcgccaggccgaccacatacgccttgccgttaagggcaaactgcggatgcagctcaatactggaatagattttttttccttcatcggtgagctgcttcattcgtgccgacgcgtcgatctcggcatagagcgccgtacgaccggccagcggcccttcggtgatatcctccgcgcttaa

SEQ ID NO: 251663 - DNA, 531 bp, Klebsiella pneumoniae
atgctgacctctgatggccaaaccttccccgggctcgcgggcaatccgcagctgggcaacacgggtttcgatgaaattggcgcaggtgcgctctttggcatcccgtgggccatctggctgatgatcctcctggcgctgatcatcgcctatatcgcccggcgtttgccttttggccgccatgtttatgcgatcggtgacaatgagcgtgccgccgagctatccggcgtgaaagtgaagcaaattaaagtgctggtctacacgctgtccggcttttgcgccgccatagccgggatcgtggtctccgcacagctgctggccagccatccggctaacggtaccgcttttgagatgaatgctatcgccgccgtcgtactgggcgacgggctggtgatgatgggggtaagcgagttctggcagatggtcatcaaagggatcgtgattattgtggcggtcattatcgatcagatgcaaaaccggatgcagcagaaggcggcggtggtcgcccagaaagcggtcatggagaataagtaa

SEQ ID NO: 251664 - DNA, 348 bp, Klebsiella pneumoniae
atggataaccttaagcttctcggtatagagcaccatggcgtaatcggtagtctgcgtcaggtgggccagcagttcggtatggccgggataagcgtgcccggcgagatgcagcgcctctttattcagcggcgcggtagcgatggccgcgaccgcgccctccagcgccagcgcggtcgcccgcctgatgcagcgaaacgcgagatcccctgcctgggcctggacttcgccagggcgcagcccctgcgggtcgctgagtggttcatcaatgacgttgatggtcgctggggaaaaactcgcctcggcgggatggtcaatgatgcgcagctccgcccgcggcgtgatatttag

SEQ ID NO: 251665 - DNA, 213 bp, Klebsiella pneumoniae
atgatgcgcagctccgcccgcggcgtgatatttagcgccaggatccgccgcagcgtctgcgcgcagcccaccaccaccaccggcgcgccgctcagcgccccctcggcgagggatttgataataatctccggaccaatccctgcagggtcgcccattgtcactgcaatcatcttagacactcagtttctcctcaataaaattcacaacatgtaa

SEQ ID NO: 251666 - DNA, 297 bp, Klebsiella pneumoniae
atgtcagacctccgcgactccggttctatcgagcaggacgccgacagcatcatgttcctgtaccgcgatgaagtctacaaccctgaaagcccggcggcggggatcgccgaaatcatcctggggaaaagtcgattcagtgctgctggtgccgttatctatcaggagttcaaaaacggtcacttcctgcacgttgatcagcatgtcggcaaagagaaaacacgcattcagctggaggcaacaaaaccacgaaaacaaccgcgtagatattcagagaagtacaacaccgatgcattttaa

SEQ ID NO: 251667 - DNA, 363 bp, Klebsiella pneumoniae
gtgattggctctgcatacagcgcagataacccgccaacgggcagcagcctgctggaaatcaccatcaccgcaccggatggcgcgcgtctgcattacgacgccgctgccgatgccggagcgctggccgtgaccggcattaaaaccgcgcatatccaggccgagacccgcgtcacgctggatacgccggaggtggaatgcacaaaccacctcaaaacacgcactttcgaactgacccacggcggcacgatggccggtgatgtgttccattccggcggcgtgttgcagtcaaacgggatcaccgtacatgaacataaacacggtggcgtgcagtctggtgggagtactacaggaggcccgcaatga

SEQ ID NO: 251668 - DNA, 273 bp, Klebsiella pneumoniae
gtgcaccagcacggtctgcttcatttcggccagcttttgtatgcctttgaagaactgccaatcgttgacgtcgcggaagtcgttatcgatcccgcggtcaccgcaggtggcgacgaagcatttgaatcccaccactcccacttcatccagctcatgcagtcggtcgaggttataagagaccaggccgccaagctgcgcggcatcgatggtcagtttgcctttcgccgcgtcaaatttcagctcaatggtctgccggtcaacggtggccggtag

SEQ ID NO: 251669 - DNA, 243 bp, Klebsiella pneumoniae
atgggcgatcgccaggtcgttacgctctgccttcggttttttaatcaggccaaggtaatcaacaacgatcatcgccagatgcggatagcggcgcttatgcgtctctgcaacagcccggatttgctcaattgtcagatcggtagcatcgacgatccagatatcgcgcccgttcatggtttccatggccgctgtaaagcgcgcccagtcctcatcgtgcatatcgagaggattacgcaggcgtga

SEQ ID NO: 251670 - DNA, 201 bp, Klebsiella pneumoniae; identical to SEQ ID NO: 217587

SEQ ID NO: 251671 - DNA, 288 bp, Klebsiella pneumoniae
atgcgggcgaagggagtggaggtgaccggcccctgtccgccggacacggtgtttatgcagtgtcacgaaggcatgtacgacatggtagtggcgatgtatcacgaccaggggcatattccgctgaagctgctgggattctatgacggggtgaatattaccgccgggctgccgtttatccgtacctccgcggatcatggcactgcgtttgatattgcctggacaggtaaagcgaagtctgagagcatggcaacctccattgagctcgccatgcacatcgcgcaggaataa

SEQ ID NO: 251672 - DNA, 183 bp, Klebsiella pneumoniae
ttgtcgcgcctgtcttcggccatgaaggaatgcgctgaagcaaagcaggcggtgatgctgaacgcgccagagcaccagaaactgaaggaagtgagcgaggggattgcgtcgcttttcaggctaatgcctgagcagacaggagcgctgatgacgatcgtgagctcaatgctcggcgtgatgtaa

SEQ ID NO: 251673 - DNA, 5580 bp, Klebsiella pneumoniae
atgaatgataacgaagattcactgtttaagaataataatctttctcttcagcaaaaattagagcgagctcgtacagagcttctggatttatctgcacgcaataaactcctcaatatccctcgttcaagaacagccaagctcttagaaattatcgatgagagatctacggagatttatcgtttactggttaaagaaggaaaggcatttacttttctcccgggaagggaagggaagaagggagagttagtggatgatgagggtattgtatcggattcggatgatgctcttgttgatgatcgactgtttgtttttgatgaggatgttgatccaaaagcgatcagtgctgagcatctggatacgaaactacaaacaaggctaactccgcaaggtttgcaaaagagattgttggatctttaccatgattctaaaacgttagaagaagaacaaggtgtaaacatactctatctgacgcttggaaccttaaaatggattgacccaaataataaagaaaatgttagatatgcccctttaatcttgattccagcatctcttgagcgtggaactgctggtgagagatttaaactacgggcaaggcaggatgagattattgaaaacctttctctggaagcatacctacagcggacacatgagattttattgcctaagatcaacaccgatgaggagttagatctttcagggtatatggatgaggtctctcaggctgtacagaccaaacctgactggagtgttcaagaaaacgatattactttagggttcttctccttcgctaaattcctcatgtaccgggatttagatccagaaaactggccagagaatgacaatatcactgaacaacctcttatacagtcacttatggttgatgggtttgatgagaaggatgaaaggatttcagatgatgcccctatagatcattttatttcaccgagagatatgctccatattatggatagcgatacctctcaaactcttgctattcatgatgtacggaaagggaaaaaccttattattcaaggccctcctgggacagggaaatctcagacgattgcgaatatcattgcttctgctgtggcagatggcaagactgtcttatttgtcgcagaaaaaatggcagctcttgaagtggtgaaacgtcgccttgaccaagcgggtgtgggcgatgcctgtttagaattgcatagtaataagacgaataaaagggtctttctggaagaattgaaaagggtctgggagctcggatctccaagaggtgagtttcctgacaccctggtagggaacctaacggaggcgagggataaacttaacgagcatccggcaaggctgcacaagatatatcatccttcaactttctctccctatcaggtcatggggcaccttgttcgattacgtcagttaggccaggctccgaccgattttcatctcgaaaaatttgaggattggaatgccaacgatcttgagaaacgtcttgagcttgtgagggagattgttgaacgcatcagagatattggtttacccgcccagcatccgtggagtggcgttggtcttgagcagatattacctgtagatgtagaaaaattgcttccacgtcttcaagaacttgaaagagatgtggtaaatcttacaaacgatgttgcaaatctgtctgccgagctttctgttacacccgtacctgaaacattctcttcaattgataaattagttgaggtcgcagagtgcatcaataaagcacctgacctatcagtgaaggcctttacttctactgtttggcatgatggtacacctgcagttaaacgacttattgcggtgggtaagcaataccaacaagcgcgtttagatcttaaggaagatatagtaactgaagaaattgaaactccagttaccgaactggaagattcgctggcaaagctccctcgtgattttcaggttaatggtttttccgctgctcgtactctagtaatacctttatctaagttacgtcttgatgctgctcgttttcatgaagagctcggttctcaggaagggtattacacagttcaggaaatagaacgtctcatcacgttgggtgaaagaattgctgccgcccctaatgccagtccagatgcctttatcgcatcagtctgggatcatggtattgagaaagctgctgagctggttgagtcgattgcttccttcagaactgttagcgattctcttgattcccaaatcaacgaagtagcctggaatacggatgttcaggaggccaggaatctcctggctagccacactggaattttccgatacctcaatgggaactggagaaaagcgaggggacttgttggttctctactgcgagatcgttcgctacctgttgagcagcagatcttattgttggataagttgattaaggcgcaggcagagaagaaaaaaattcaggaaggcaatgattttggtcattctgccttcggtagtgattggcgtggtgaaagaagtgacagctcttctttaatggcattagttgaatggatgagaacactaaggggggtaggggctgaggctcgcttattggccagccgacttattgaccgcgaaagtgtgaaactccgtgcgcaacaactaagccagttactgcagcaggttcggaccccgttggatatcctatggggcgcattcggtttttcacctgaggaatatttttccaaccaggtatctatcacccgcgtctcattaggttacattgaagagaaagtccaaaatctcatagcgatcgatgaacaatgctttcgtgtaatggttaaccctcctgcgcgtattgatgagcgctatcagctaatcacccgaatgattgagttgcagaaactaattgcagaaatacgtgcagaagacctgcttgtaaaaaatgcttttgacgaacagtggaaagaactgtcatctgattgggattatctgagtcaggcttgttcttggttagaggagaacagtgcattacgtttcgtcgcggcaaaactggctgacaaagctgaaactgtccatttcgcgcgagaaactcacctgttcagccaaaagatagtcaatgaactggaacaaatcgcgacggaattaaaaggaactatcgaaacccttatggggtcatcctcggataaattaaaaatagcgcttgcgtgcgaaaaactccaaacatgggttgagaactcagaacaactctctaaatgggttgcgtatcagcatcgtgttacgcaggctagaaaatatggattagctgaggtaatagaaaaactcgcaagtggagatctttcgctagattcttctatttctgccgtagagcggacctatttcgagtcgttacttaaaattatggctcatgacgaacctgatttagtgcgttttgatggtgagcttcattctcgtcaggttgcaggatttgcagagcttgaccttaaacgtatcaaagctgccagtcttgaggttgtgcgtgcccatcataggcaaatcccttccaggagcggtggtatcggccctgtgggggttctgcgttcggaaatggtgaaaaagagggggcatttaccaattcgtcagctaatgctaaaggctggagtggctatacaagcgctcaagccggtcatgatgatgagcccgttatctgttgctcaattcctcattccgggaaaacagaagttcgatcttttggtcatggacgaggcaagtcagatacaaccggttgatgcgattggtgcaattgctcgctgtaagcaggtggtcgtcgtcggggatgaacgccaacttccacctacgcgattcttcgctaagatgacagaatctgctgctaatgatgatgatgatgatgaagtatctcaggttgctgatatagagagtgtattgggcctgtttgttgcaaggggattacctcaacgtatgttgcggtggcactaccgcagccgtcatcaatccttgattgctgtatccaatagtcagttctatgagaataaactttttatcgtgccgagcccatacacccaagaagcaggtatgggtctgcagttccaccatatcccggatggtgtatttgagtctggcggtaagggaaccaatacgatagaagctaaagctgtcgcaaaagcaatcatggagcatgcccataaatatcccgaacagtcactcggcgttgcaacattttctgtttcccaacgtaaagctattcaggacgagctcgagttacttcgccgtctaaatcccattttagaagagttcttcaatgcgcatccgagcgagcctttcttcgttaaaaaccttgagaacgtgcaaggtgatgagcgtgatgtaattatgatttctgtcggctatgcaagaaatacacaaggatacatggcgatgcgttttggtcccttggggtcagaggggggtgaaagaagattgaacgtattaatcagccgcgccaaacgtcgatgtgaggtttttgcttcgattacagacgaagatattgatttggaaagggcaaagggaaaaggtgtaattgcttttaaactcttcctgcaatatgcccgtaccggtcggatatctttggctcagcggtcggaaagggaaatggatagcgtatttgaagtacaggttgctgatgcgcttcagaaagctggttatcaagtccatcctcaggtaggtattgctggattctttatagatttagctgttgctgatccagatatgccagggcgatacttgattggtattgagtgcgatggtcgtgcttatcattcctcacgttctgctcgcgaacgtgatcgcttgcgtcaggctgtactagaagatcatgggtggattattcatcgtatctggagtacggattggttccaccgccctgatgaacaactgaaacgtacacttcaagctatagagtctgccaaaaaagaactttcagaacggacagaacaattgaggcaaaggacccgtgcggtacctgttgaaattgttactgttgatagaggacctgtcgtagagattggtcttgtcgattcggatattactaaagaatctgagatcgactatgtggaggctactccatccgttaatatggggtatgaattgcatgaaaccccattaggtattctcagcgaaataattgagcagatagttgaggttgaatctcctgttcatgtgggtgaagttatcaccaggttacgaactgcctggggattacaacgtgcaggtgcaagaattgaggccgttgtcaacagggctgttagtctggtttgcaacaaaggtgatattcttcaggatgggcaaattttaatacataaaaaatcaaaaattatcttacggaatcgacagcatgttcagtcgtcgggactgcgtaagtcggaaatgctgccacctcaggaaattgctgtgggaattactcaggtcgtaaaacataacctcggtgcgacagaagaagagatagttatgtctatttctagatcccttggatttaaagcaacaagtggcaccttacgtaaagtaatttcaggggtgattgaggagcttctctttaatggcactcttgtaaaagaagattctcttattattgagggtaaagaaatagtcgccgagtga

SEQ ID NO: 251674 - DNA, 123 bp, Klebsiella pneumoniae
atggcgcagatcgcgggccagaccggcggcggggcgggcggcgcgaaaggcgcggatcgcctcgatgccatacagattttcgccggctcacagccgtacggtgcgcgggtcgtgccagaatag

SEQ ID NO: 251675 - DNA, 225 bp, Klebsiella pneumoniae
atgaagttaaccaacctgatgatgtcagagtacagattgaagcgtcgcaagcgccgaaagcaggataccgataacgactggataaaaaacgcaggaaatcaggtattcagctaccttatgaccttcactttgtatatgaatagttcttcctatacttatcagagaggcaaaaaaaccgatcgtcgccacaacggcgatgaaagtcagaatgcaatacagcgttaa

SEQ ID NO: 251676 - DNA, 198 bp, Klebsiella pneumoniae
atgaaaaaccaagagactggggagtttgtttgtgacttctgcggaaaacaccaggacaaggtggccaagatgtttacctcccattccaatggggtagcgatttgcaatgactgcgtggctctgtgtgttgacgtaatccttcaagacataaagaccaaaggtttcgttgagaccttaaaaacaggcggtgcagcatga

SEQ ID NO: 251677 - DNA, 711 bp, Klebsiella pneumoniae
atgactgagcgcggaatgatttttaacgctgagatggtgcgggccattctcgacggccggaagacgcagacacgtagggttattgccaatgtaggacatgataattgtctgcctttgcaaaaaagaaccaaaacaaaggacggtatttatacccatgtcatggatgcccatatctatgggctttgcccatttggaaagattggcgatcgcatttgggtgcgtgaaacatgggcaaccctgggcaacgaagacggctgctgtgtcgactgggaaggcaacctttgcaaaggggatgagcgctcagctgcgaggatttaccgcgctagctgcgagcagagaccaggtgattacggcctgtggtctattcccgatgacgcctactggaaaccacataccaaagagcacaagttcgaaggagcatggcgcccgtcaatccacatgccgcgctgggccagccgcattctgctggaaatcaccgacgtgcgggttgagcggctgaacgctatcagccaagaagatgctcaagctgaaggcatggagcttaccggatggcggccaacatactctgacccggatagcggcggcgaggttatgacgccatacgacaactttgctgagttgtggtcatccatctacggcgaaggaagctggaaggctgacccctgggtttgggttatcgagttcaagcgcgttgaaggcggtgcagcatga

SEQ ID NO: 251678 - DNA, 900 bp, Klebsiella pneumoniae
atgttccgggatatcgaggaccgctatctcggtatcaagcgcgctctgaaagcactgtttgaccagcgcctgaccgggagagcgcgagaggttaacagccataactggcatttcctttgccacgttaacggcgacgagccaacgctctaccaggtcaacgctggcaagttcatctacgacatgtcagcgcaggaactggccgacctgctcgaagcggtgcaggttattctcgacgattacctgctggaaggcggcgaacaaaacctgtgggcgatgggatatgtcaccaaagaggcgcagcgcggaacgctggaggccttcaacaacctctcgcagcagtcgcaggtgtacgccagccagacgacgcttcagcagcttttaagcagccctgcataccagaaccagatcgccagtgcctacatcagcacgtatagcgactggaagctggaagctgaccgggcgcgcggtgacctggcgaacatcatcgcggatgccgttgggcgcggtgtgtcaccaagggataccgctcaggttattagtaaacgcctggacgtaagtatgtccaaagccaaaacgatagctcaaacggagcaagttggagcattaaggcaggcgcagcgcaatgaggttgattgggcaaaagaacgcctgggtctgaacactgcgatattgtggatttccgcacttaaaccgaccaccagggcgactcatggggcaaggcacgggaaaacgtacaccactgatgaggttgcagagttctattcgaaggatggaaactcctataactgttactgtgccaatatcccttgcctgcttgacgatgaaggcaaactttacaacgaaggtcttgccgagaaattaagtaaagagcggagtaattggaagtcatccgaaaagtaa

SEQ ID NO: 251679 - DNA, 582 bp, Klebsiella pneumoniae
atgaattcgaaaccagcgccaagcgcggagtttttacgtgaatgcttttcttacaatccagatactggcgagttgttttggaatgcaaggccagtcagtcactttaaatcagggaacgcatgttcagcatggaatgggcgatatgcaaataagccttgtgggtgcattaggccagatggatatgtaaaaatctccgttaacaaagtgagctatttggctcatagagttatatggaagatgattaccggtactgatagcgaattcaccgaccatatcaatggcattaaaagtgataacagattggcaaacctccgtgatgtaaccatgactgaaaacaacagaaacatggttggaggattggcgtctggggataactttatcggcgtgtattggcatcaacagcgaagcaaatggatggctagaattcgctgcgaggactcagagcggtatattggaatttacgatgatataaaaattgccgtccttgcctataacgccgaatgtgaaagggttcatggcgaatacggcaagcgcaagattgagcacaacctgagtaagctccgagagatggggctgatgtaa

SEQ ID NO: 251680 - DNA, 1497 bp, Klebsiella pneumoniae
atggaagaaaacactaggcagcgtacggaaaattatatttcagccaaaaaccagcatcccgcatggatacttctggcttcccgccgtgccccgttggtgctgagttgcctgaaaacgttgtttgaaaaagctcatgatggtatcccccttgaggacgcgattcagtctctttccggcattctcatcgagcatgtgagtcaggaacagtatgacattaatcaggacaatccctctcttcaggccagtcgtgaactgcgggaatggattaaacgccgcttaattgtcgaacgggatggccgtatcttcgccaccgatgcgcttgaggttgcgattacgtttgttgagtcgctggataatcgtttcatgacctctacggcttcccgtttgtctaccgtacagcgagaaattgaaaacctggaaaccaggcttaatcctaatccggctaaccgggttgcaaccttacgtcgtcgtattgctgaactggagcgtgaattacaggaggcggaagccgggcatattgaagtgctggaaacgcatcaggcggttgaacatattcgagaggtcttcaatttagcttccagcctgcgggctgactttcgtcgcgttgaagactcctggcgtgaggccgaccgtgcgcttcgccaatccattattggtgagcagtatcatcgcggcgatatcgtagaacgcttgcttaacgatcaggacgcactgcttaatacccctgaaggaagagtcttcgacagttttcagcaacagctacgccaatcagttgagttaacggcaatgagcgagcgactgcgcgtaatccttagccatccttctgcttccaatgcgcttaaccgtctacagcgtcatgatttacgctggctggttaaacgcctggtcgatgaatcgcaaaccgtactccaggctcgtgcccgaagcgagcgagatgtccgcggttttatgaaaaccgggcttgctgctgaacatcaccgcgttggtcatctgcttaacgagtttctgaatctggcgttaaaactcgactggcagcgccagatgattcgtaaacaagaggttccgcttcctgccgttggtgtggcggtgacgggagtccccgcaattgagcgtttacgttttaaagaagtggatgatgaagcggaacaaacgttggatctcagtaatcatgcgacggatttgacgcagattggcgatgatttctgggatgctttcaatggccttgatcgtgaggcgttgattcagcagacgttgcagcttctggcaaaagaaaatcgccccgttggtctggctgaactggcggcgctgttgcccccggctcacgatctcgaaaccttcgccgtctggattggcatggcgagagaagcaggcattgaggttattgattcacagcgcgaatttgctgaacttagtgatggggaaggtcgccgctggcgatttaatctgcccacgaccggtctggaaagtcaggcattaatggatatcgattgggagtaa

SEQ ID NO: 251681 - DNA, 750 bp, Klebsiella pneumoniae
atggcgggcttttttgacaaactgattaaccggagcgtcgctgcaaatgcaggtagtgaaccagaaacatcggacgaagaaattactgatgagttggttgaagacagtgcggccagtggcgaaacgcggaccctgaagaaaatacgcgaagcgattcaggaattgctcaaatacggcctgctggaagaggccagtaaacccaatctgtaccgtgtcgtactgacccatcctgaagaggttactcgcattctggaacctcttgatctggatatcggcattgatgagatccgcggcctgctgtatgtcaaagtcagacttgacgaaacgccagagcaggatgaatggtcccatcctctggtgaggcggcaacggcttaatctggaacaatcattattagttgccatactgcgccagcattttgttgcctgggagcaagaaagtggaactggtgccagccaggcacagatcgctatcgacgatctcctccctcagctccagatttaccttggcgatccgggcagcgaatcaaaagaacgcacccggttgctcaccctggtggatcaattaaaggggcatgggctggtcacgtcgccggatgcgcatgagcggatcgtgattcggccaattattgctcatcttgccgacccgatgaatcttcaggcattactggcatggctgtgggaacaaattacgcaacaaacttccccggatgattcgtcagcaaaggagagtagtgaggaggacgtatga

SEQ ID NO: 251682 - DNA, 3291 bp, Klebsiella pneumoniae
atgaatcaaatagcgcgtctggctggaaaggaatcctttattctcacccgtatcgagttgttcaactggggcggttttcatggattgcatcaggcagcaatccatcaggaaggtaccgccgttattggtccaaccggaagcggaaaaacgacgctggtcgatgccttaatgacgctactctgtgccaatccccgttacaacctggcctcaaccggggggcatgaaagcgacagagatcttatctcctacgtgcgcggtgtatccggacccggcgatggcggggaggggcaatcgcatattgccagaccggggaaaaccgtgaccggcattgccgcgacgctggagcgtgaagggcagcaggtacgtctgggggcgctattgtggtttgattccaccagttccagcgcggcagatttgaaaaagctttggatgtttagtgataaccctacacagacgctggatcactggctgaatatctggcatgacggtggcgcacggtcgttgaagcaaatggaaaaagagacgaccggaatctggatttggctgaacaataaaaaacagtatctggcgcgcctgcgggacttcttcgaagtgggggaaaacgcctttacgctgttaaatcgggcggcaggattaaaacaactcaacagtatcgatgagattttccgcgagctggtactggacgatcactctgcttttgatcgcgcgacggaagtagccaatagttttgatggtttgacagaaatccatcaggaactggaaacggcgcgtaaacagcagcagtccttgcaaactgtagccctgagttgggataagtatcaaaagcaagagcaacaacttgctgacaggaaggcgctggagtcgctgttaccaatctggtttgcacaacaggcaagccagctctggcgagaaaaggtcagccatattgaagtcgagtttggtgagtcacagactcgcgaagaacagatccagtcgcagctcgagttgcagaaaaaagtggtgacggactgcttacagcgctatctccaggtcggcggcgccaatattgatgaactgaacgagcgtatcaaggactggcaaaaaacgctcggcagtcgggagactctggcgcaccagtatcaacagctgacccgcaatcttggattgccgcctgacctgagccaaccacagctggaggcgaatcagcatgaagccgaggcccgatgtgagcagtttgctgatgatataaagttgaaacaggaagaggtgtatcaaaaaggcgtgctcagccatcgcatgaccgaagaacttcgggaacgggaaactgaacgcgccgagatcgcgcgtcgtccggattctaaccttcccgcccattatcaggcatttcgcagcgagctggcagaagcgctgaacgtcgatgagtctgaactgcctttcgttgctgaactgatacaggttaaaccggaagaggcgcaatggcgcggtgcgattgagcgcgctgtcgggagtaacaggctacgtattctggttgctcctgaatctgcacaggaagcgcttcgctgggtaaaccagcgcaataatcgtctgcacgtgcgcctactggaggtcaaattaccgcactctcccgccaggttttttgatgatggttttacccgtaagctgttgtggaaagatcatccgtggcgagaggccgtcaaagcattattggccgaaaacgacaggcattgtgttgacagccctgaacaactgcgtgacacacctcatgctatgacggtgcaggggttaatgtctggtaaacagcgtttctatgacaaacacgatcagaaacgtcttgatgaagactggctaacgggattcgataaccgcgatcgcctgaacttccttgccaaagaaatcgccgcccttcaggagcaggttaaaaccgcaaacgcagcgtttgagtttgcgaaaggcgaggtgggggttttgcaaaatcaggccatttcattccagaaaatacaacaaattgattacgatagcatcgatgttcccggcgcaaagagccaactggacgcgctcagggagcggctggagaatctgatccgcccggattctgacgccagtgtagcgaaagcaaaacttgatgaggctcaaacggttgaatctgaactcgataagcagctcagagccgccaataaagtcactaatgggctggatacagaactcacctcagcccgggcagcagaacgtaaggcccagcaaactgcgcaaaaaggtatgcaggatgaagagcgagagttgtgcgcgtcacattttcctgtggtggctctggttcaactgcctgacattcgcgatctggaacgtcaacatgagcggggaattcaacaagaaattgagggtattaaaggtgaattgcatcgactgaacattgagttgaccaaacgtatgtctgaagccaaacgtgtggatactggggcgctcgttgaggcaggggctgatttggacgatattcctgtctatttacagcgtttgcaggaactgaccgaagaagccctgccggaaaagctcaaccgctttcttgactatttgaaccgttcatctgacgacggcgtaacgcaactgctcagccatatcgatcatgaggtgctggtgattgaagcgcgactcagcgaactcaatgaaaccatgtttagggtcgattttcagccggatcgctacctgcgtctggataccaaaaaagttgtccatgaaagcctgcgcacgcttgaaaaagcgcagcgtcagctaaatgcagctcggtttgttgatgataacggcgagagccattataaggcgttgcaggtgctggtggcgcaattgcgggatgcctgtgaacgaaaccgtaccctgggggcgaaagcgctgctggatccccgttttcgtctggagttcgccgtgtcggtgatggatcgccagagtggtaatgtgattgagtcgcgtactggctcgcagggcggtagcggtggagaaaaagagattatcgcgtcttacgtattgaccgcatcacttagctatgcgctttgtcctgcggggagtcgttatccgcttttcggcactattgtccttgatgaagcattctcccgcagctctcatgccgtggcgggcagaatcatcgccgcgctcagagaatttggcttacatgcagtatttatcacccccaataaggaaatgcgcctgttgcgtgaccatacccggtcggcgattgtcgtccaccggcgcggtcaggattcaaatatggcttcgctgagctgggaagaacttgaacaacactcccgacgacgggagaacgcgtaa

SEQ ID NO: 251683 - DNA, 903 bp, Klebsiella pneumoniae
atgccattgcgctggatcatgaatggcccttctgactggatcaacgcagcggcagatgcgacggtaagccgggaatttcgcttgctggagggaattattgagcaggttgatcccattttccatccgctgttgattagtcatcgttcgctctggcgaaacaaaggctcgcaggacatcatcagcgctgccaggctggccagccgattagagccgggctgcgcaaaagggctgccgctaagactgctttccgggcaaggggtggataccaaatttattgagaataatatttcgttattaacccgactgttggatatgcgtttttccggcgaagccagcgagcaggggttaaccacctttcttgatgcttttgatgagtccagccactgggttttggttgtgccgctatcacccggcttgcttccttttaaaaaatgccgggtgacaacagcggaactggcggaaacaacattgcccgcgtcgcgtgtgctgatgattgaaaatgaacagtgtctgcatcaacttccagagttatctgacactatcgcggttttagggtgtggccttgacgtgcaatggttatccagcgttgttctggataaaaaacgcgttgcctattggggggacatggatagctgggggctactgatgctggcgagagccaggcgctgtcgtccgacgcttgatgttctgctcatgaatcgtgagttgtttgagcaatatgccagccaaagcgccgttcctgaaccggtaaaagcacaggaagccatacccgatggtttgcttaatgaagaaggcgatttttatcgctacttaacctgcttaccgcgtggtcgtctggagcaagagtttttgcctgcgggggtagttggagaggaactggttaggtggagaaaagagagttaa

SEQ ID NO: 251684 - DNA, 291 bp, Klebsiella pneumoniae
atgcgggtcaccattctggtgctgtcggtgccgttatttatcctggttgccattgaggagatcgcggatggaatggtacgacgcgatcttcgtcgctacggtgcggtctatgagtcgagctttctttatcatcatgccaagcgcgtggtgaagcctgtggcgtatattccgtgcgtgctctatctgtctgcgctgttcacggtatatccgaacttgttgctgttaccggcggcattgctgatggggctggcgatttcagtgacgatgggaagttttaagaagtatttgtag

SEQ ID NO: 251685 - DNA, 570 bp, Klebsiella pneumoniae
atgcctgaaccgacgatacgagaatctggtgaagtagcggtcgagcaaacaaatgaattattccgacaggctgataagcctctcgttgcttgcctattgagcgaactggatttggaatggtgtatttccgctgtgcggaatatgcctgaggaaagacaactcccttgggatcaaattggtgcgatgctgcgagacgataacgccttcaatttttgttttaagttgctggatgcccgtcatcgacccgcaggtgcatgtatctgtgaatactgcccgggggatggtgtactgaatgttgagatgttgcagaattttcagatccagccatctattcttgatggcaacatgttgaagtttgcactctatgccattgttttgtttcttctggaaacggaaggctcgggtgtgcgtttgatgtttcccattaatcaggcggttgcggcctattacgttgaagaacatggcttcctggatattactgacgatggctcaagagatatcctctatcgttcggcggcagacttggttgattggttcaggcatgacgctgctttagttgatggtgagtga

SEQ ID NO: 251686 - DNA, 276 bp, Klebsiella pneumoniae
atggtgacgagaaagagaaaattagtcgcgcctgaatccccttttttccaggtgccagaaacgacgcaggttcatgaggatgggagtacggagagcgtggtccgtggccgtaatggcaaaaaagtgacgttcactaccccaaaaggccagaagattagcgcttcaaaaggcgaagttttcaacgtgctgttgaattcagcaaaatcaacacgccagccacgaccgatctctgaaggtatctgcgacctgaccagatacgagcttctttccaaatag

SEQ ID NO: 251687 - DNA, 441 bp, Klebsiella pneumoniae
atggtgcctgttgaggaacggtggattgacctgaacattgagggagcgaactaccatcgcgagcatcgggttccgattgtctcatcgttgtatccgtcgctggaggaactggtgagaaaagccggtgaggcagggatggagccgggcgatcaggtatttaatgtaggctggtttgacctgatgagaaaaaggaagtacccggaggtgatgaacgagtacccgctgagagcgttcttccggcgcttgtcccgtgagtgtaaatttacgatcacgccacacaggtttcgccatacggtggcaacccacatgatgaaatcacctgagcgcaatttgtacgcggtgaagaaactgctgggccatgtcagcatcacatcgacgctggaatacattgatgaaagtgttgatagcctgcgggatatactggaaaccgaattgatgtag

SEQ ID NO: 251688 - DNA, 219 bp, Klebsiella pneumoniae
atgttcgaactcgcctttcacacctgcacccgcctgcatgaggccgagatcaagggtatgcaggatgactggcttgagcgattcaggcacgttgccctctgcaatacgcagcgccagtgcttcaaccaacgcggttttaccgacgcctggttcaccgaccaggatcgggttgttctttcttcggacagctgcgggcggctgcgtaccgaacgcggttga

SEQ ID NO: 251689 - DNA, 2700 bp, Klebsiella pneumoniae
atgagcagtaatcccccgatcagattcagccacaaccatcaccagctgtcggtgaagggatgtgaagcagaactcgatgtactggcgtttgaaggcgatgaagccctgagcacgccgttcggttaccgtattgaattcacaagcactaaccatactatcagcaaagagatgatgctgatgaagtccgcctccctgacactacaggccccggttgaccagggttacggcatcaaaatgcagcaggcagtgcgaacccttcagggggtggtgagcggctttgaacgtctcaacacttcaaaagttgaaacccactatgcgctgacgctccagccacgtctggcgctgcttgaccgttcgcatcagaacgctatctaccaggatatgtcggtcccgcaaattgtggaaaaaatcctgcgcgaacgtcacggtatgcgcggtcaggattttttgttctcactctcaaaagagtacccgcgtcgtgagcaggtgatgcagtacggcgaggatgacctgcactttattacacgtctgctgggcgaggtcggtatctggttccgctttaccactgatacgcgcctgaacatcgacgtcgtggagttttatgatggtcagcaggggtatgaaaaaggtctgacgctgccgtcggttccgccatcaggacagcattcgaaaggcttagactcggtctggggcatggagagccatcataacgtggtgcagaagcaggtcagcacccgtgattacaactatcgccaggccactgaggacatgaatgcccaggtcgatgcgacccgtggggatgccaccacctgtggggaggcttaccactggggagataactacctgatggcggggaatccccatgactgcaatccggccccggagtccggagccttttatgcccgcattcgtcatgagcgctacctgaatggccagacgcagatgcatgccatcaccagttgcccgactatctctccgggtcaggtactgaaagtcaccggcgggtatgaagtggcagacgtgtttgctcagggcgtggtcgtcacggcgatgcacagccatgcgcgccgtgatgaagactttggcgtcaacttcgacggcatcccggacagcactgattttagtttccgtcctgagcctggctcacgtcccgtgatggccggcaccttaccggcccgcgtcaccagcaccactgaaaacgatacctacgggcatatcgataaagacgggcgctatcgtgtcaacatgctgtttgaccgcgataactgggaaacaggattcgagagcctgtgggtgcgccagtcccgcccctatgccggcgaaacttacggcctgcatctgccactgctggcgggcactgaagtggcgattggttttgaggacggtaacccggacagaccgtttatctccggcgtactgcacgactctgcgcactgggaccatgtcactatcagaaactacaaacgtaacgttctgcgtaccccggcgaacaacaaaatccgcctggatgacagccgtgaccaggagcatatcaaggtctccaccgagtacggcggcaagagtcagctgaatctcggacatttagtggatgcggagaagcagaagcgcggtgagggttttgagctcagaaccgacagctggggagccatccgggcacagaaagggatgttcattagcgctgatggccagacgaaagcacagggccaggtgctggagatgcagccagcggtcagcaatctgggtgatgcccgggagcagatgacgtccatctccgatgatgcgcagaaggcgaccgcgaacccggccgatctccaggcgcaaatcaaactgctggaacagcagctgacagacctcaaaaaatcagtgctgctgctcagtgcacctgatggaatggcgctgaccagcggacaacatctgcaggtatctgccgggcaaaacctgatagccactgctggtaaaaatgccgacgttagcgtgatgaaaaatctgttcatcggggtgggtaatgtcctgagtgtgtttgttcgtaagctggggatcaagctcatcgcgaaccaggggccggtgcaggtacaggcgcagaaagacctgatggaattgctggcacgtaaagaaatcagcattgtcagcacggaggatgaaattaaaatcatcgcgaagaagaagctgactttgaatggtggtgggagttatatcaggattgatgcaagtgcgattgaatctgctactgcaggtgaatatcgtacgaaagcaggacactatgggcgtaaggcaagcgcatcagaaaaggtcacgctgcctgtatttcctgtaatggaacctggcgaacaaagcttacgttttgctttgcctggtgccgatagtgtcagccaaagtatggactggatgacaaatcagccatacaacattactgacagcaatgggaaaatcctgtcgaccggcacggtagacagttcaggtcgcttcccgaaaatagtgcttcctgaaagcgatacattaaacttaattattgggcgagaaacctggctcaaagaagagcttccaacatcagtcgaagaggctgaggtggatagcgtggaagatatagaatcactggaacctgatactgatacggatgataccgagacagtagaagatcatacttctgcgctaacagaattaatgatcgcaaaactattaaatttaactacgacagggtga

SEQ ID NO: 251690 - DNA, 417 bp, Klebsiella pneumoniae
atgttaaaggaaatttggaagtctattttttgctttatgatcgtgttttctagctttagtgcatctgctacttgcctaaaggaagggaataaagtaagtctgacaggagttgttagcgaaaaattatactacggccctcctggctggggagagaataaagcgaatgatgagaagctacatgagtggatattgcatttaaaacagccactcacatgtgtaacagacgcagatactgacaatcaaaactggaatcatgacgttcagttgataatgcgtgatagtaatgactataaagcaaataaaagtcttctaggaaaaattgtcagtattgatggcgtaatatttcttgcagagaccggatatcacatgacgcctgttttattggatgatgccaagtttgaagttgcaggcaaatag

SEQ ID NO: 251691 - DNA, 1821 bp, Klebsiella pneumoniae
atgcgctttataaatgctatttatcatgcatcgacaaaaacggtagaatatgagtcatcgaatggcacaagattgttaaaaacagggggctcactgaattggcgattcaataacccaggaaatctcatttctgtaaaaaatcagcaaggaaaaatcggtattggagttgtctacaatccagacaaacattcattcgcaatattttctagcatagaagctggtgataatgctaaacgatctctgctcaaaagaaaatataaggattttactattccagaaatgatgaaaaaatatgcgccggggaatgatggtaataaccctgaagcttatgccaattttatcatgtctgaaagtggggtcgctcagggcgagaaagtaggagatcttgatgatacaaaattcagtaagataatcaaagcaattagcacaaaggaaggtggtttgaagccgggcaccgaaaaatgggtgtatgtgacaaatgtgactgtttctgatggctctcgaccagttgctgatgtgccatttaaagtgacactaggaagcactagctacgagtggagaacagatgcttacggtaagctcaagacaatcatccatacgaaacaaggaatggctattgttgtcaaatatactaattctgctggaaaagaggatgttgtttattcagcagtcgctggggatgaaacgaagaatatactgctcacgcgaaatttttcgctattctctgcaaaaacacttgccgagatcccaaaaactccacgtgcgaagagcactcaaaaaccgattgagtatatagtcatgtcaggtgacactctctcgaaaattgccgaacgttataagacaagcgctgatgaaatagccaaaaacaataatataaaagatgtaagtaggatctttccaggtcagaatttgatgatatatggtgtcaatgctaatagcccttcgatctataccgttgctccaggggacactttggcgaagatcgcagaaaaaaatggtgtgaatgttgaagatattgcccgacagaataatatatcagatcctaataaaatatacccgggacaatcaatttctatagacaaaagtggcaatattacgtctggtcagactgaaaggccagttgaaaatccgatagcctcaaaaccagttaataaaaaaactgaaaaaaattgtgtaatcaatacgaataaaaaagtactggattcagttggagggaaaaattctggcaatccgattgcattactccctcatgatcagagagaggccccatggatggtggttgcaattaaagaagctcaaaaatggaaaggggcagatgaatctataataactaaaaaatctaattaccatcagttgataggttatgggaaaatgttgccaaacctcgttggcagcaatcacgcgtggtgcgcatcatttgtaaattattgtttgcaagaagtggggtatgctaaatctcattttccattcagagcaagatcattcatcggtgatagtaattttttcgaaatatctaagcctgtttacggggctattgcgacgtctggtcatcatgctacccttgtttatggagctgcaaagggtgccatcattggtttgggtggtaaccaaggcgggttatcaattataaatggaactgtatctgcagggacgattaaattttccacttataaagggatgcgatattttttacctgtaacttataaaatatattataacgaggcacaaaaacatagccttcaacaatttgatgtcaatgaattgaactcaaagatgttaagtattaccgtaaagtcaaaaggaaaagagagtacacgatga

SEQ ID NO: 251692 - DNA, 2019 bp, Klebsiella pneumoniae
atgaagtatactattagatcaattgattcatataatggcttttctttgaatgaacccatagagttcgaaggatacctatgtgcaattactgggaagaatggagttggtaaaacaagattattagaaagtatattaaataacaaatcacaaatttttatagatgaatcaatattatacataaatcaaattgaaaaaataaatatagatgaaactaatgttgccaaactcaatcaccaaggctcacatgaattaaatgataaagttgcaacggaaataataaagaaaatagaacgcataaacaatattgatgacatccctgaacatgccgaaatatatctttatcctggcaatagccattcaaaccaaccaacattctctataagagaaattttaaccagagcatgcactttttttaataaagaactcgcaattctaactttagatgaattaaagttatccatgttaattcacaacgacttgcacaacagtcaatcaatgatcgactaccctaagataactgatagccttggacaattgactgttaattacttctctgccatctacactaacgagcatctgtcacttattaactcaagaaatcctgacatttgttttctagataaacatacactccaagaaaaaataggtaatgaaagcccccacgaaaaattcaatgatattatcaggagaattttccgtggtaaatttaagcttctgccacctgacccaagaagctgtcatttaatctacaccccaaagttagttctcgcaaatggcgggcaagaagtaaaattagaagcattatccagcggtgaaaaaaatatattatggctggcattaaaaaccttcgagattaaaacctcatcattagaggaaaacttcaaatcaaaaaaaacattcattctcgatgagcccgatcgcaatcttcaccctcaaatgattgtcgatttttttgattgcctaaaaacacttcatgaggaattaaacgttaactttatattttctacccattctcctaccacaatagccttaatgccaattgacaacatttttacattagaaaacaatgaatgggataatcattacttagcctgtaaggttgagaaagacatagctatatcagcattactggatggcataacacaaatagcaataaaccctaaaaactccagacaaatatatgtcgaaaatgaaaacgacagttctatttatgcagaaatctacagaacaataaagaggcgatcaaaaaagaaaataatagaaatcccactaaactttattagctcaggcccaaaaattgccatcgatgaattagaaaaacatatcaattccgttttaaaagaaactgatgacaccttgaaaaaaacgcttattgatacaataaatggtagtggtaactgtgggcaggttattggtgtggtttctcaccttaccgatagcggaaacacaaccgttagaggtattattgattgggatgtagaggatagaaaaccaccgccacaggttaaagttttcgctaaaaattatgcatattcgattgagaatgttgtatatgacccaataagcctttttgccttaacaatgcatttatccacaaggagtccatctgactactttgattgtgatgatgactttaactggaaggaggctttatccgacatggataaattacaagaaattgttgatgttatcacaaagcaactactgggaagagagaacaaaaaagatcatgatataagatacatgggtggaatcatattaaaaggagacagaaaatatttcatcccacgagataaaattaaagaccccgcacttatagtaatggggtgcgaggtcaaaaacggccatgacttagagagtgtcatctctgaaaaattcatgccagaaataaagagaatacataacagaacaagcaaacaacctttaatctaccactttacaaaaagaataacgattgatttactgggtcctgattttataagttgtgcatttgaagatgttttttcagagatagactaa

SEQ ID NO: 251693 - DNA, 2139 bp, Klebsiella pneumoniae
gtgtcccgaactataatgttaattcctaccgagtcgggtatcggcctgaccagcatcagcctcggtttaattcgcgccatggaacgcaaaggggttcgcttgagtctcttcaaaccggttgcgcagtcgcctggcagcgaagagatgcctgaccggaccacaatgcttactcgtatacgttcggacctatgttgtgcagagccgctaaacataagcgatgttgaagcgctgctttctggcaatcagaaagatgagttgatggaagccatcgttgcccgctatcacgcatgcgcgcagggtgcggatgttgtgcttatcgaaggtgtgatccccacccgcaaacatcagtttgcccagtcgctgaatgatggcatcgctaagagcctgaatgccgaaattgtttttgtgatggcgcatgacaaaaatacagccacacagcttcatgagcgcatggagctggtgcgcagcagttttggtggcgccaaaaatagcagtatcagcggcgttatcattaataaaatcaatgctcttcaggaggataaaggctttaacaaacgggataaccctgttacaggggatagcattccgaatacgatggtctggaaccgctttctcactaaactgaacagcagtagccctatccccgtgctggcagctattccctggtgcgttgagttaatggctatccgggccattgatatggcgcatcacctgaaagtgaaggtattgaacgctggtgatatgcacactcgccgtgtcagaacggttctgttttgcgcccacagcatttcccatatgctggcacatctgcgtccgggcgcgttattagtcacctccgcagaccgtgctgacgtgctggttacagcctgcctggcagccatgaacggtgttgaaattggcgctatcctgctgaccggtggtgacgaaatagacccgcacgtgagcaagttgtgcgaacgcgctttcgccactggcctgccgttattcatgatcaacaccaacacctggcagactgccctgaacctgcagagcttcaactatgaaatcccggttgacgatcatgagcgcattgagaaagtgcaggaatatgtcgcgagctacatcaacgcggactggattgaatcgctaactgcggcctccaagctccgacgccgcctctctccacccgcctttcgctaccaactcactgagcaggcgcgcaaagcgggcaaacgagtggttctgcctgaaggcaatgagccgcgcaccgtgaaagccgcggctatctgcgctgcgcgcggcatagcaacctgcgtactattgggtaatccggatgagatctatcgcgttgctgcggcccatgggattgaactgggggcagggattgccattattgacccgaaagtcgtgcgtgaaagctacgtggccaggctggttaaactacgtaaaaacaaagggatgaatgaggcagtcgctcgtgaacagctggaagataacgtggttctgggtacgctgatgctcgagcagaacgaggttgatggtctggtatccggcgcgattcataccaccgccaacaccattcgtcccgcgctgcagctgatcaaaaccgccccgggcagctcgctggtttcttctgtattctttatgttgctgccggagcaggtgtacgtttatggcgactgtgcgattaatccggatccgagcgcagaacagctggcggaaatcgcgattcaatcggcggactcggcaatagctttcggtatcgaaccacgggtagcgatgctttcttattccacgggcacctccggagtgggtagcgatgtagagaaagtgcgcgaagcgactcggctggcgcagaaaaaacgccccgatctggagatcgacggtccaatgcagtatgacgcagcggtgatgactgatgtggcaaaatcaaaagcgcccaattcggctgtggctggtcgcgcaacggtattcatcttcccggatctgaatacaggtaacacgacctataaggcggtgcagcgttccgctgatcttatttctatcgggccaatgctgcaggggatgcgtaagccggtaaacgatctgtcacgcggtgcgctggtagacgatatcgtttacaccatcgcattaaccgcgattcaggcgagttttcgttag

SEQ ID NO: 251694 - DNA, 1200 bp, Klebsiella pneumoniae
atgattattgaacccgttattaatggcgtcgttgccagaactgctcatccgcaaggttgtcagcaggcggtattaaaccaaattaactacagcaaaaagcatcagcaaatcgaacatggacctaagcgagtgttaattcttggcgcatcttcagggtttggcctggccgcgcgcgtggcgctgacctttggtggcgcgcaagcggatacgatcggcgtatcgtttgaacgtggcccgagcgaaaaaggcgtgggaaccgctggttggtataacaatatttactttcgcgagcaggctgaagccgaagggcgaattgcgcataacatcgtcggcgacgcattttcggcacaagtgaaagaagaggtgatagagctgattaaccgcgatttcggtgggcaaatcgatctcgtggtttatagcctggcaaccggtttacgtccggaccctaaaaccggggagacgtggcgctcctgcctgaagacggtgggcaaaccttttagtggtaaaaccgttaatctggaaaaaaactgcctggataccaccgtgctggaagtggcaaacgaacaagagatcctggcaaccgaaaaagtgatgggcggtgaagattgggaagagtggattcgctggttgcggcaaaataacgcattggcgacgggcgctaaaacagtggctttttcctatatcggcccggaaatgacctatccaatttatcatgacggtactctgggtctcgccaagaaacatttacaaaaaaccgccgacagacttcatgatttattatctgccgaccaaggtgaagcctacgtttctgtctgcaaggcgttggtcacgaaagcgagtgtctttattccggcatttttgccctatgtattatgcctgtatcaagtcatgaagcagatggggctgcatgaaacttgtattgaacaaatgcagcgtctttttagtcaaaagctttacttgccagcgggtgtaccggttgatgccgcccgcttgattcgtgttgatgattgggaacttcgtcctgatgttcagcaggccgttaataaattaatgaccacattgaccgatgataatttcgctgaggttggagattacgcaggttataaaaaagagtttctgcaattgaatggttttgcttttgataatgtggattatcaaaaagatgtcgatttatctgcgctgataaagcttaaaccataa

SEQ ID NO: 251695 - DNA, 417 bp, Klebsiella pneumoniae
gtgtcttatacaattaacgatttgtttatcggacaaaaagccagtttcgaaaaaacaattactgaaagcgatgtgctgcttttttctggtatatcaggggatatcaaccccgttcatattaatgatatggtggcgaaacagagtatctttggtaagcgtattgcgcacggcgttttggtctcggggttgacttcagcggtgctgggaatgcaacttcccggtgaggggacaatttatcttggccaggataataagtttcgccgccccgtttttatcggcgatacggttaaagcaacctgcgaggtgatcgagattaacctcgcaaagaatattgctaaattttctacgacaacgactaatcagaacaacgaagttgttattgagggtattgccgtagtgatggcaccgaaaaaataa

SEQ ID NO: 251696 - DNA, 1560 bp, Klebsiella pneumoniae
atgcaatcagttaaagaaatcactgctgcgcaggctgctgatttaattaaggatggcgataaagtcattctgggcggatttatcggtgcggttgtgccggaatctattgagaaagccattgaagataaatttctgtctgtcggatatccacgcaatcttgagttgatatttgcagctgggcagggtgatgccaaagaaaaggccaataatcgcctggctcatgaaggtctggtcgccagcgccatcggcggacattgggggctgattccacgactgcaaaaactcgccaatgaaggtaaaattaccggctataacttaccccaaggggtgatctgccatctctttcgcgacagcgctgcgggtaaaatggggacctttacccatgttggtttggggacttttgtcgatccacgcgtggaaggcgggaaaattaatgctaaaacaacggaagatatcgtttcatataccgaagttaacggtgttgaaaacctcttttataagcgaattgatgctacggtcgctattttacgtgggaccacggccgatcagcgtggaaacatcacgatggaagatgagtgcctgattctggagaacctcgctgcggcgcaactggttcataatcagggaggaaaagtgattgtccaggttaaacgtattgttgccaacggtacgcttgacccacagcaggttaaaatccccggtatttttgttgatgcgctggtggtggcggaggatgaattgcatatgcaaacttttgccgaagccatgaatgaaaactacgtcggacggggcagcagaacgggtaatggtaaaaaaatgcgcccgctggatgtgaaaaaaattatcgctcgtagggcggcgatggaactgaagagaaatgccatcgtgaactatggcattggtgctccggaggtgattgctgaggtgacggatgaggagcggattactcaggagttgatcgccaccgtggagcccggggcaatcggcggttctcctgccggtggtctgtcctttggcgcatctgcatttcctgaagccattatcacccaggatcagatgtttgatttctatgacggtggtggcctggaccaggcttttcttggactggcagagacggatgtgaaaggcgatctgaacgtgtcgaagtttggcatcaagattgcgggctgcggcgggtttattaatatcacgcaaaatgcaaaacaggtctttttctgcggctcgtttaccgctggcgaaagtgaaatcgtcgttgaacagggtaaacttaacatcaagcgtgatgggcgtatcatcaagtttattaaacaggttcagcaaattacattttcgtccgatacggcgcgcaaaaataataaacccgtgtattacattactgaacgtgcggtatttaaactggcggataaaactctcgaactgatcgaaatagcgccgggtgtcgatttacaacgtgatattctggataaaatggagttcgctcctgttatcagcccatcattaaagctaatggatgcgcgtattttcaatgagcaggtaatggggctggtattaacgcattaa

SEQ ID NO: 251697 - DNA, 1335 bp, Klebsiella pneumoniae
atgattggtttactcctctcgttgttttttttgatttatcttatctatcgcggcgtacctgtactgattgtttcaccactaatggcaatggttgccgttttcctcggctctgacatcccggtattatattcatggactgggccgtttatgcaatcggtggtcggttttgttgcagcctatttccctattttccttgttggcgcaattttcggcaccttaatgaatgccagtggcgctgcattaacgattgcccaatttatctctcagataatgggaccaaagaaggcgattctggctgtcattctggcgtcgtttctgcttacttatggtggggtgtcggtttttgttgtcgtatttgcggtattaccgattgccagaacgatttttatcaatagcgactacccgcgtcgtctattacccagcgccatttgtgccggttgtttgcctgcttacgtcgcccctggctctgcgcagtttattaatactattcccatccctatattcaaaaccaccatctattcaggcatggatgtgggcattatcggtaccatcgtttggttggtgatcggcgtatggtatatgacccgactggttaagcgggctaaagataaaggcgaaggctatggcgaagggcaggaaagtgaaaaattaagtagtcaggggaatatttttgttgccatcactcctgtcgccattgtcatcgtgggtaatattcttctgaccaaatatttcgaactcgattatgttattaatcattacgctggtttcggtggggttcaggggatttgggcaattaccgtatcactgtgcgtcgctattattgtgacattgttcctctatcgtaaagaggttggaaatattacccgcaccttagcgcaaggcgcgaatgattctctggcacctatatttaatacctccacccaggttggttatggcggcgtggtgaaaatgctaccggtttttgccgtgattaaagccgccgtctttgctatccctggctctgcaatgattgccgctgtcgtagggaccgctgtgctggccgggattgttggctcaacgtccggcggggttggcttagcgatgctggcgtttggcaaggatctcctggcgctggcaaacgcacatcatattcctgcgggattaatgcaccgaattattgtgttcagcgcctctacactggataccttaccgcattccggatttattattaccttattgggtgtttgtggcctgacgcataaacaaagctacaaagagctatttattgttacctgtctatttccgatgtttgccgtcatcgtaatgctttcatatgtcaccgcttttttaatttaa

SEQ ID NO: 251698 - DNA, 1209 bp, Klebsiella pneumoniae
atgaaaaaggtatatatcgttggagccaaacggacggcattgggatcttttggcggcagcctgatgacggtaccagcttgcgaactgggagcgacggccatttcagctgctctggcacaaagcaaagttcgtcctgaaaatattgatgaagtcattgtcggtaacgtgttggcggcaggtcaaggaatggggccgggacgacaggcggcggcaaaagccggtattccgcacgaagttccggcgttgaccctaaatatgatctgcggtagtggaatgaaggcggttatcgacggcgttttaaaaatcaaaagcggagagatggatctggtggttgctgcggggatggaaaatatgtcacaggcaccttatttgatcgacagccgtgcgaggttcggcatgaaaatgggtgctcagcagatgtctgactccctcatctcagatggcctgactgatgcttttcatcgctaccatatgggcgtcacggcagaaaatatcgctaaaaaataccattttagtcgtgaagctcaggatgtatttgctctgaaaagccagcaaaaagccgtacaggccgtggagcaagggcgcttcgacgacgaaattgcgccagtcaccgttctcagccgtaaaggggaagcgaaatttacacgtgatgaatatccacgcaaagatgcctctctggaacagctggcgaaattgaagccggcttttgacaaacaggggacggtcaccgcgggaaacgcctctggcattaatgatggcggcgttgcgctagtgctggcctccggggaagcgctggaaaaatggcagctggaaccgctggctgaagttatcgcctgcgggcaggggggcgttgatcctgcattgatggggttaggaccggtaccggccattggcaatgcgctaaaacgagcgaatatgaacctcagagatatcgacctgcttgagattaacgaagcttttgcagctcaggcgatgggggttgcgcgagaactctgcgctgagcatcaggtggatgagtcgtggtttgaaaaccgaacgaacgttaacggcggtgcgattgcccttggtcatcctcttggggcttccggcgggcgcattatcgtttcgctgttatatgaaatgataaagcagaataaaaataccggtcttgcttctctgtgcatcggcggcggtatgggtactgcaattatcctcaagctaacaaaataa

SEQ ID NO: 251699 - DNA, 720 bp, Klebsiella pneumoniae
atgaaaaataaaatttgtattgtgaccggtgcggcgcaaggtattgggcgtaaagttgttgaactattttcccagggtggggcagcaaagatatacgcctgtgatattaagcataatgatgaagaagcgcttaagaatgtgattccggtaacgctaaatgtctgcgatcgcctggcaattagtgaattggttaacaaaatcagactggatgatgggcgcgttgatgttctggtaaataatgccggaattactcgcgataatctgattgctaaaatgactgagcaagattgggacatggttatagatattaacctgaagggcgttttcaatatgactcaggccatcgcaccgttaatgatggaaaatgatacaggttcgattattactatgtcatctgtcgtgggtaccgatggaaatattggtcaaagcaattatgcggcaactaaaggcggcgtgattgcgatgaccaaaggttgggccaaagagttcgccagaaaaggtgctaaagttcgcgctaactgtgttgcgcctggtttcgttgtcacgccaatgaccaaaaatctgcctgaaaaggtgatcacccatatggttgataaaacgccgcttggacgcatggcgttggcagaggatattgccaatggcgttttcttcctcgccagtgagaaggcgaattttattaccggccagacgctgaaaattgatggcggcttagttatctaa

SEQ ID NO: 251700 - DNA, 918 bp, Klebsiella pneumoniae
atgttagacaaaacggttttttttatgcatgtcgttcgcttcggttcaatatctgaagcagcaaagtcattcaatattaccgcagcaaccggtagtcgctggctcaaagaactggaagaagaattaaatgtcccacttttggtttcgacaacgcgtaaaaaccaacccactgaagcgggcatgttactttatgatagatttcattccgtatatcaaaacatccaggagatatacaaagaagttgagactattaataataccgacaaaggcgttatcgcgattgcatcaacacctctcttttctcgcaattttctttccaaaatcattggcgaatatctttttatttgcccgggagtgaatttcaaaatcgaagaaacgccctatgttgatgaaaataaaaacaacactgatttttatattcgggcctgcgcaacctatcggggctatattgagcctgatagtttattggttaaaaaaaagctcttcaattaccctctggttgtttgttgctcaccaggttacatcagcgcttatggcgaacccacaaccccggaagagcttaagtttcacaactgtatttatacatcgacgttagtaggcgggaaccgttggcaattcgaggtaaatggtgaaatcactaccatcgaaattgcaaaaacggtagaaattgagaatagtgagtttttaaagtcggtggcactggcgagcggcggcatcgcctatcttccgctaccgttggttaaaaaggagttagctaatggtgagctggtttcaattttaaataattatatcaagagcaagtttgaaatcagtttatggtttagatcgcagaagagtatgcccagtcgctgtgcaaaatttaaagagtttctcatcaaaagaaccaatgagattaaagatgttatcaattactactga

SEQ ID NO: 251701 - DNA, 222 bp, Klebsiella pneumoniae
atggcgccgggggtgtcctccccggcggcgctgcgcttgccgggcctggggtataggggcttacgggaggagcccgtaggccggataagcgtagcgccatccggcacaaaggcgggtatggtgtctgcggtgtcctccccgccggcgctgcgcttgccgggcctggggtatatgcgcctgcggggtgccggtgataatgttattggtatgcaactctattaa

SEQ ID NO: 251702 - DNA, 327 bp, Klebsiella pneumoniae
atggtgagcacgccgaccacccgccactggtcattgcgccagatatcgcgcaggtcttcacgcatcgaggtactgctcggcggcgcttcgacacgctctttggtggtaaagaagcagaaggccagcatcaggaaggcaatcaccgacagcaccgcgatgcccccctggaagccgagcgctttgtcttcgccgccgataaagttgaccagcggcatcatcagcacggtggagagcatgccccccgccgtcgccagcacgaagcgccaggactgcagcgagatgcgctgcgtcgggttgtcggtgatcacgccgcccagcgcgcagtag

SEQ ID NO: 251703 - DNA, 321 bp, Klebsiella pneumoniae
atgcaaattttatctgtaccggccacggtgcccgtttcgtcacgtccgtcacccgtacaggtttggcagcaactgttaacgtatctgctggaacaccattacggtctgacacttaacgacacgccattccacgacgacgcggccattcaagagcatattgaagccggtattacacttgctgatgcaatgaatttcctggtggaacgctatgaactggtacgcatcaaccgcaaagaatttacatggcaggagcagacaccatttctgaccgcgaccgatattctcagagcgcgtcgagctattggattaataaatacctga

SEQ ID NO: 251704 - DNA, 213 bp, Klebsiella pneumoniae
atgatttttctgaaaatgctggtgaccgctctggggcaggttctgacctggtacggcggtcagctggcccgacagtttattgaaatccgctttcgtcaagccggtcacgatgacgacagcatagatgcagccagagaagcagccacgctgctgatgaccgcgctgataacggcactgatggcacagatattacggatcctggacaacttctga

SEQ ID NO: 251705 - DNA, 360 bp, Klebsiella pneumoniae
gtgaaaatcaaacaatggttgatatccgcactgtttttactgtctgcttcggcgctggccgagccaacgtctccaataaaagtggagaccagtgattatgttcatcctgccggaacacgctacgccactgtagtggtcacctcgctggatgacagtgtgaaagttgaaaacattgacgttaatcggggcaactgccgcatcgacaacaaaaagtttatgtcctccgttaacaaggaaaccattctgccgatcactctgcgctacgggcagtccgtcaaagtaaatttttacaatgagtgcgtggcttcggaagtggtagtcaccaccgacaaaggggcgtggcgctacacctataactga

SEQ ID NO: 251706 - DNA, 465 bp, Klebsiella pneumoniae
atgaacaattcatcactcagcgcgttggtgctggtctgtggcctggttccggtcatggcgcaggctttcggaaataaggacacttggtccagcggttggggccaaggcgtatcagagtttattatcaaggggaaaggtcaatcgcagttatatctgtcctgtgaggattacggctcacagccagccacggtcatatttacggacgctaacgggcatgaagtcagtatggatgaggatagaaacctccaggtcagcattgacggtggggagtccattgatatcagtgagtctggcagtcgtgtcggcagcaataacctagtgctggcctggacacagttgcgtaacggcaaacaagtcttggtatccggcgaaggtgttaagccagctaccttcacactagttggggcggcgaaggtgctgcccgagtttggcacacacggctgtgtggtaaaggcatcactctga

SEQ ID NO: 251707 - DNA, 678 bp, Klebsiella pneumoniae
atgtctgaacagggacaccgctatgatcggttggccagccgtctcgccatcctggtcagtcgcctctttatgggtgaatcactcagcgtcagacaattggctcaggagtttggcgtttctgagcgcaccgttcagcgcgacttgcgtgagcgtctgcgttatctcgacatcgaatattcccgtggaagcttccggctcctggacgcccggggtccctttcgcaccaacagcgacattctccgctttgcccggataaccagcgtggcgcattactttcctactctggatcccaggctgctgtcggtgttgctcgacagtggtcaggattccccctgcattatctggaatgccccgccacgtcaggcacctgcgttgtttggtggtttccaggctatcgttcaggccatcatccgtaatcgccgtgttcactttctgcatcagggtcatcagcagtctgcagtggccccttaccggcttatctgtctggacggggaatggtacttggtggccgtatcgaaagatcgcattcaggtgttcaccctttcagccatcactgatgtggtgatgaccctcagcggttttgtgcgaaacagccatatcactcgcatttttcaggacccgagattcattcaggctctgccgcattatcagtatatcagcgggctcatcagggaatga

SEQ ID NO: 251708 - DNA, 921 bp, Klebsiella pneumoniae
atgctgataagggaatatctttcaacttttccattgtctatgctcgggcgcatattaatttcgctaaatataacgatagcaaactcaaatttccctcagatagccaataatgccccggcattaatagattttatttgttcgggtgtcgcttctgacaaaataaaatctccttttgataagataaataaacttgtaaaagatgtagaaagtgacgctttctccgatggttgtattgtatggcttaaaaatgatatcgaggcatgccactatttctggtggaatctgatgcagctcgaatggaaaggtgtgtttaaactgctcagagcggataatatacatctctacagtgatgtggggggtaagcagcaagctcaatgcgtttctgatacattttgtctgcccagagtcgtaggcggacataaagaacgctataaatccatttttaccttattaagtttgtttccattcaaaaatactgaaataaatcttctgatttcacatttatcctgtaactacaagagagataaagagatatgcaggcgtgaggtcaatgtcacctctttgatgaaaagcaaagagtcggtttctttttcagtttgttacttaaagaaaaaaaatatgttcctggctgatttagaacctctcacggagagtgatagtaaatacgcattaatcacacagctttatctgcttacaagagaagacaattttaaagagttagtcacctcgttgactaaagcttggtcacaaaagaaggtacgtgaaaaaagaaaagagacggataaaaaacagactgcagaacttctcggcttgagcaaagaaagcatcaggatgcttaaggaattatcaaaaaaacacagtatgggccactcagaactgatggatctggctatacagtctttgttcgaacaaatgcagtaa

SEQ ID NO: 251709 - DNA, 570 bp, Klebsiella pneumoniae
atgaacaaaacctttaatcctttctggcaacaacgtattaccgacaccttactgaacgcccttaaggcttatccgcgagtattaatgctgagggttgatctacgactacccaatgttccagcagctacagatgctgctgtcatctcccgatttatagactctctgaaagtaaagattgcaatgtacctgcttcgtaaacaccgcgagggcaaccgaaaacgcatgaccgacctgcgttatatctgggcaaaggaatatggagaacgcaacggtaaaaagcactatcacatggtgttgttgcttaatcgcgaagtctggtgttccgcaggcaactataacgatccggcttcactagcaggtttaatcaaacaggcgtggtgtagcgccttacgggtgggtactcaggagtatgcaacgctggcacactttccggaaagcccggtgtactggattgaccgcgggaataaagagcaactacaggaggcattagtacgggcttcatatcttgcaaaagaccataccaaagttaccggtgacggcgaacgtaattttggatgcagccaacgctga

SEQ ID NO: 251710 - DNA, 228 bp, Klebsiella pneumoniae
atggctactatcaataaccccattcttagtgctgaagacccgcttatagacatgacttttatcactacatataccggcatgaccgacaagtggttttataaacttattcaggacggagttttcccaaaacccatcaagctgggacgtagctcacgttggtttaaaagcgaagtggagagctggatgcagcaacgcattgaggattcacgggggagccgtctgcgatga

SEQ ID NO: 251711 - DNA, 210 bp, Klebsiella pneumoniae
atgaaaagacagtacacagcggaatgtatgccactgataactcagaaacacaaaaaccagccctcagagagaaaacacttcgaacaaatcaccggagctgtcgctccggctcggattcacacgttactcaaagtaatccatgtccagtttgggcactctaaccaaacgagaggaaacgccaacctcgttttcaatcatcaaatgaactaa

SEQ ID NO: 251712 - DNA, 915 bp, Klebsiella pneumoniae
atggccgttcctacctacgataaatttattgaaccagttctccgttttctggcaggtaaacctgagggcgtaccagctcgtgatgcgcatgaagctgcggcagatgctcttaatcttgatgataatcagcgagcagaggtaatagccagcggtcagttagtttataaaaatcgggcgggctgggcacatgaccgtctgaagcgagctggattatcgcaaagtttatctagaggaaaatggtgcttaaccccagaagggattaaatgggtacaggtccatacccagccacttaccgaagagcaagtgaaccacttagcttttgatttcatgaacgtgaagttaaaacagcagccagatgctgtcgatctcgatccaagaccagcagcaccggaccaagaagagttggcaaaaagcagcccggacgatcgtcttgatcaagcgttaaaagagctacgggatgctgttgctgatgagttactggaaaacttgttgcaggtatccccagcgcgttttgaggttatcatcctggatgttcttcatcgtctgggatatggcggacatcgggatgatcttcagcgcgtaggtggtactggagatggtggtatcgacggaattatttcacttgataaattggggctggaaaaagtttacgtgcaggctaagcgctggcagaacactgttggtcgccctgaacttcaggcgttctatggtgcgctggccggacagaaggccaaacgaggagtatttattactacttccggctttacttctcaggcgcgagattttgcccattccgttgagggaatggtactggttgatggtgaacgtttagttcatttgatgattgaaaacgaggttggcgtttcctctcgtttggttagagtgcccaaactggacatggattactttgagtaa

SEQ ID NO: 251713 - DNA, 723 bp, Klebsiella pneumoniae
atgtgttttctctacggcgatgaacggatttatttcgactgcgtcccccgcccgcagataaccgatcgcgtgctgataaaagtacttcccgactgccgggtggttgtctctgctccagaggagagcgacgacctaaccgtgcttaatgcggtacaaaaacgccgtcgctggatttatcaacaattgcgcgattttcgcaaccaacttgcttacatcaccccacgaaaatttatcagtggggagagccactattacctgggtaagcagtatttgttaaaggttttggttgagccagccagtgcgcagggagtaaaaatgctgcgaggaaagctggaagttacaacacatgatcgagaggctgaaaaggtccgacagctgcttataaactggtacaaagttcgcgcaaaagaagtctttgcccgtcgtctggatgcaatgcttgaacaggcactgtggataagtgagaggcctcaactgcgtctgttaactatgcaaactcaatggggtagttgttcacctggcgggcgtctgacacttaatccttatctggtaaaagcaccccgtgagtgcattgattacgtgatcctgcatgagctgtgtcatattgcagaacacaaccatagcgagcgtttttaccgtctgatgggacaagttatgcccgagtgggaagtagtcaaaacgcggttggatgagatggctggggtgatattttctgatttatga

SEQ ID NO: 251714 - DNA, 3285 bp, Klebsiella pneumoniae
atgaatacgcatcacgcgccaaaatttcaggaggagttcagtgctaaaatcccggcactctcactactttctaagcttggctggtcatatatcacgcctgaacaggcgctggtagcccgtggcaacaaacaggatcaagtggtattaaaccagattttacgcgaccagctggcaaagcgtaccttcatctttgccggtcaggaatatccactttctgataaagcgattgataatcttgtttccgaagttaatagcccggcgctgaacgaaggtttgttgaccgccaatgagcgactctataaccacctgatgtacggaatttccgtcactgaatttattgacggtaaaaaggcgaatcccaccgtcgcactgattgactggcataatccggcaaataacagcttcgtgtttactgaagagtttaacgttactcgtgctggaggagttgaagctcgcagaccggatattgtttgctttgttaatggtatccctctggtggtgattgaggccaagcgacccgatggccatgctaaaaaagggccaacgattgatgaagggatctcacaaagcctgcgtaatcagcgtcacgatgaaatcccacagttgttcgtctatagccagttattgttatccattaatgggcatgaaggacgctacggtacctgcggtacgcccgccaaattctgggcaaattggcgtgaagaagatatctctgatgcagaaatgtatgccatcaaaaatcgaccactctccactgagcagttcaccaagctgttcggccatcgttcgacagatgttgtagcctggcatcaacagcgtacttccggcggtgaactggctgtaactggacaggacaagctgttaatcagtctgctttcgcctgctcgtttgttagagatgatacgcttcttcacactgtttgataagaaagtcggcaaagtggtggcccgttatcagcaggtttttggcataaagcgtctgcttgaccgcatcaacaccagaaggtcagatggtggacgtgaaagcggagtgatctggcatactaccggttcaggtaaatcattcacgatggtttttctgagtaaagtcctgatcctgcatgagagcctgaaacagtgtcgtattgtggtggtaactgaccgcgtcgatctggaaaaacagctaagccgaaccttcatctccggcggtgagctttccggtaagcgagataaagactccgctatcgctacctccggcacgcggctggcagaacagattggtaaaggaactgagcgcatcatcttttcgctgattcaaaaattcaactccgccacccggttgcctgaatgcgttaacaccagcccggatatcatcgtattggttgatgaggggcatcgtagccagggaggggaaaatcacattagaatgaagcaggcgttgcctaatgccgcgtttatcgcctttaccggaacaccgttgttgaaagacgataaaactaccaataagttcggccctattgtacatgcctataccatgcagaaggcggtagaagacaaaacggtaaccccacttctttatgaagagcgtatccccgatctagatgttaatgaacgcgcgattgatagctggtttgaacgaataactgaaggactgagtgacgagcaaaaagccgatcttaaacgtaagttcgccagaaaggggcaagtgtacagcagcgacgatcgtatcagattgattgcactggatatcgccaatcacttcgttaagaatattgacgatggtttaaaaggccagcttgcctgcgacagcaaagcctcggccatcaaatataaaaaatatcttgatgaagctgggctgtttgaatctgctgttgttatcagttcccctgatagtcgtgaaggaaataccgagatcgatgaatcaacgacgccagaggtaactcagtggtggaaagagaatgtcggttcgcagaatgagcagctctatacccagcatgttattgaacgttttgaaaaagacgactcgctaaagatgctgattgtggtcgataaactgctaacaggttttgatgaacctaaaaatgcggtgctctatatcgataagccgttgaaaggacacaatcttatccaggcaattgcacgcgttaaccgccttcacccgaaaaagaaattcggtttgcttatcgattatcgcggcatccttcgagagctggatacgactatagagaaatatcaaaagctcgcatctcgcactcaaggcggttacgacatcaacgatctggtcggcctttataaccagatgagtacggaatataaacgtctgccccaattgtataaaaatctgtggtcgatttttgcgggcgtgaaaaataaacatgatattgaacagctacgtcaggtgttgattccgcgaattgaagaacaagacggcgaactggtggatatccaccttaaggtgcgcgaagacttctatgaagctctgacggagtttgcaagctgcctgaaagttgccttgcaatctgccactttctttgaagataagagcttcactgatgatgatcgctatcactataaagatacggtaaagcagttttcaagtttgcgtcagttagtccagcaggatgccggtgaacgagttgattacgacgtgtacgctgagcaggtgagaaaactgttgaataagcatgtggttggcgtggaggtccgtgaacctgatggggtatatgaagttagtcaaatgggaaaacatcaacagcctgaagactggagcgatgagaaaacccgtaacgaaaccgacattataaaaacccgcgttaccagaatgatcgagcagcaactgcgtgacgatccctatgctcaggaagcattttctaagcttctgcgccaggctattgaggaagcagaaaagctattcgagcatccattgaaacagtacatgctgttccgggagttcgaagaacaagtgcagaaacgccatcttgatgatatccctgatgacttttctggtaatcatcatgctcaggcttattttggcgtcttcaaaaaagttctgccggaagtctttgccattttcgacccgcaggttcaggaaaagtgggtgaaactggcatttacgctggatcagttgatcgatgtttcagtcgcggaaaactccattaatccacaaaatattgaggcagatattcgtaaaaagctattaccaatgatgtttaaagagtgcaaagccattggcggcggcatggaacaggctaaaaagattgtggaaatgatcgtgcaaattacccgtgtcggtttgagtggagtgtaa

SEQ ID NO: 251715 - DNA, 1047 bp, Klebsiella pneumoniae
atggataaacacttacctcaagccccggcaggtgagtttctgctgtttcaaagtgatgatggccgcgtgcgggttgaatgtcgatttgaagcagagacgctttggctgtctcaggcctcaatggccgagctgtacggtaaagacgtacgaaccatcaatgaacacttagtcaacatctttgctgagggtgaacttgctcaaaattcaactatccggaaattccggatagttcgtttagaaggtaagcggcaggttgcaagggagatcgaccactataaccttgaaggtgttctggccgtcggttaccgcgttcgttcaacgcgtggcactcagttccgccaatgggccacccaaaccttacaggaatacctgattaaggggtttgtgatggacgatgagcgattgaaaaatcctccggttggctcatcagtggtgccagattactttggcgaaatgctggaacgtatccgtgatattcgcgccagtgaacggcgcgtctatttacgcgttcgggaaatctttgctctggcggcggattatcagccctcactgaaagagacgactcgcttcttccagactatccagaataagctgcacttcgcctgtaccgggaaaacggctgctgaaattatccaccagcgtgccgatgccactcttccacacatgggactgaccagctttaaaggtgatgaagtgcgcaaaggagacgtcaccgtcgccaaaaattatctcaaccaaaatgaggttgatgaactcaaccgcgtggtcaacatgtggttggattttgccgaagatcaggctcgacgtcgacgccaggtgttcctgcgagactggcaggagaagctggatcattttctgcaatttaacgatcgcgacgtcttacaaggtgctggctcgatcagcaaaaaagtggcggacgataaagcgcaggctgaatatgaatgctttgctgagcagcggcgtcgtttaaaagaagccgagggcaaacgagatatcacggagctattgcagtggcaggctaaaccaaaagctaaggatgagtcatga

SEQ ID NO: 251716 - DNA, 1215 bp, Klebsiella pneumoniae
atggctcgtaatcttaacgtttcctccattcctaaagactggaagtatgatttgcttgataagtttgcagtaagatgtagtggtcatacacctagcaagagccatcccgaatactgggatggcgggattaaatggatttcgctgacagatagctataggttagataaaggttatgtctatgcaacggataaagaaatttcgttagaaggaatcgccaacagttcggcagaaatacatcctgctgaaacagtggtgttatctcgtgatgcaggtatcggaaagagcggagtgatggctgaatctatggctgtaagccagcactttatcgcctggaaatgtgataacaaacaaaagctaaacagctggttcttatataactggcttcaatttaataaggcggaatttgaacggcaagctgtcggttcaacaattaaaacgattggtttaccttatttcaaaaagttgaagatcgctgttccaccgtattccgagcaaaaaaaaatcgcccaaatcctttctacttgggataagtcgatcgctactactgaacaactgcttttcaatagtcaacagcagaaaaaagtactgatgcaacaattactcactggtaagaaacgattcccagggtttaatgatgattgggattactatagtttttctgatattgctgtcgtcacaatgggatcttcaccaaaatcagtaggttataataccgttgggattggtcttccattaattcagggtaatgcagatataaaaaatagaaaatctgcaccacgtgtttttacttctgaaataactaaggaatgtctccctaatgatattttgttaagcgttagggctccagtggggacaattgcggtatcaagccataaagcatgtataggtaggggggttgcctcaataaaggtaagggatggatttgagcaagcctttatttaccagtggttagtttggtttgagccaagatggtgttctttatctcaaggaagtacatttgaatccattaatagtgatgatattaagaaattaaaaataaaaacaccaagcatagaagagcagagggttatagctaaaactcttaccttagcagatacagaaattgaatttatagaacagaaactgaatcacctaaaacaagaaaaaaaggctctgatgcagcaactgctcaccggtaaacgtcgggtgaaaacggagggggggcataatggataa

SEQ ID NO: 251717 - DNA, 1524 bp, Klebsiella pneumoniae
atgagcaacatgataaaccaaaatcgtatcaacgatgttttatggagcgtttgcgacattttccgtggcaccatcagcccagatacctataaagattttattcttaccatgctgttcctgaaatacatctcagatgtgtggcaggatcattacgacaactatagagcagaatatggtgatgagccggaactaattgaagagatgatgaaaaacgagcgttttgtgctgcctaaacaagccagcttttatacgctatttcagcatcgcaatgagccgggtaatggtgagcgtatcgatcaggctttgcatgccattgaagaagcaaacggcaccaagctgaaagatgcagggaaaagcgtgtttcaggatatctctttcaataccgataagctgggtgaagagaagcaaaagaacggaattctgaaggaccttctggaagtcttctccagccctgaactcgatctgaaacccagccgtataggtgggctcgatgtcatcggtaacgcctatgagtacctgattggtaagtttgccgccaatagcggccagaaggcgggggagtactatacgccgccggaagtatcagatctgatggctgagttactcgatcctcaaccgggtgacacaatttgcgatcccgcctgtggctctgcttcgcttttgatgaaatgcgggcgtaaggtcgtgcagaaccacggcagcaagcagtacgagctttatgggcaggaagccattggttcaacctggtcgctggccaaaatgaacatgtttctgcacggtgaagataaccataaaatcgaatggggtgacaccattcgcaatcccaaactgctggacaaaaatagcaatctaaagctgttcgatatcgttaccgcgaatccaccattctcattagataggtggggatatagcgatgtggaagatgataaattcagtcgctttcgtagaggtttacctccgaaaactaaaggtgactacgcctttatttcgcacatgatcgaaaccctgaaaccaaaaaccgggcgcatgggagtggtggtgcctcacggcgtgttgttccgtggttccagcgaagggaaaattcgccagaagctcattgaggaaaacctgctggatgcggtaatcggtctgccggaaaaactgttttttggcaccggtattcctgcggcgatcctgatttttaaaaagcagaaggttgacgataaagtcctatttatcgatgccagccgtgagtttaaaccaggtaaaaaccagaaccaattgagtgcggaaaatattgcaaaaattgttaaaacataccgtgatggtgataacgtcgataaatacgcttatcttgctagtttgcaagagatccgtgacaacgactataacctgaatattccccgctatgtcgatacctttgaagaagaagaagagattgacttgatcgcggtccgttctgagcgtcagcaactgcaagcacagctggcaaatctggaagtggaaatggcgaagtatctggaggagttgggttatggctcgtaa

SEQ ID NO: 251718 - DNA, 603 bp, Klebsiella pneumoniae
atggcgcacttttcaggggacaatatgcatacacccttaatgaaattaggcgacattgcagacatccgttccggctatacgttacgggaggcaataacgcctgcatcaaaaggtgatgttcatgttttacagatcaaagacctggagctggactggcagtgggatcgcaaggttttgccagcgattatctgggagcaaaatgcacctcctcccttactggaacaagggcagatagtggtggcggccagaggaaaccgaaatgcggctttcgtttaccgtggcgacattccagttgttgccactaatcagttcttgattatcacccttaaacagaaagagagtgaatttatcccggaatatttgggctggatactcaaccaccccatgattcagcagcagtttcaacgtagtggttccaacatacagctcatcacaaaagcggcattaatgaatgtttcactaccagtacctgcgccggaaatacaacatcagataagccagcttcagcgcatatgggcacacgaagatggtttaattaagaagctacaggacaatcgtcgccagcttgaagtgggtattttgcaaagattaattaaggattaa

SEQ ID NO: 251719 - DNA, 282 bp, Klebsiella pneumoniae
atggcagtatatcaaatcaattacgatctgcgtaagcagaaagactatgcctcgcttattgaacgcattaagggctatcccaactggtgccatccgctcgaatctacctggattgttgttacaaatcagtctggaacacaaatacgagatcatctcaacgaggttatggatgacgatgatggtcttttagttacacgtttgcagtggcaatgggctggatctggattatccaaggaaatttatgactggctcaaaagccaatccgttacttctgctttttaa

SEQ ID NO: 251720 - DNA, 1041 bp, Klebsiella pneumoniae
atgaaaaatgaagccaggaaaggactgttgactctggcgatactgagtgccccgctgatggcgcaggaaagcggcgtgtccttcagccataaggactgggaagtggtatgtgataacactctgacatgccgggcggcgggatatagtccgaaagaaggaaaagggggatcggtactgctgacccgtcaggctggcgcggggacatcggtgtcgggagaggtgatgctggcggagcttcaatcagatggcgccccccagccttcaaagctgacactcttgattaatgaccagctggcaggtggtgtaaagcctgataaggaaggtaactggcggctgtcggtcaaacagacccgggacattattgcggcagtcaaaggcagcggaaaagttgagtttaaaggcgggcccgatccgtttgttctctctggtgaaggcgcttatgcggtgctgctgaaaatggatgatgttcaggggcgcatcggaacgcccggcgcattgaccaaaaaaggcgacaagccggaaagtagcgtccaggctgccgttcctgccccggttatttaccaggtgaagccagagaaaactcaggaaaggccccttacagtgcctgagctcgcggtgctgaaaccaaagcttctcgcgtccctgagcgaagatgactggtgcgatcgcatccagccttcagaagagcaggaagccgagaccatcagcctgacgccgttggataacgtgcattctctgatttctgcgctgtgttggcgggcggcgtataacgaaggatatggttactgggtggcggacagtaaactagcggggaaaccggagctcatcacggtttctggatctgattatggcgatggcgttattttcatgagccagaaaggccgtagccttggggattgctgggggtcggcaagctgggtttgggatggcgagacgttccgcaaaagtcgcgaagcaacgaccggaatgtgccgttatctccatctcggtggcacgtgggatctccctacgtgggtgacagatgttaagccagcaaagtaa

SEQ ID NO: 251721 - DNA, 519 bp, Klebsiella pneumoniae
ttgagccggcatgtttttcatttgtttattaagataacattattcgctgtagtaatggtggtggttgcgaaagtgattccgtatgagggattagttgacgctattatggtaatttttacttatcagagcgctgacaggtttactcatttcattttgggtgagcctgatttagaagtttggcaatctctgaacgcctatgttagcatcctgactaatatcttgatcagcgtacctgttatgacagtcttaatcacgttatgccgtgcagtaaaatataaatttatcattatcgatcttctcagagggttgagcagtgctaccttgcggcgattcgctaaaatatttagctttaccatcctgttttgggtaatgtttcgcttactaccttatgactccgtatgccctcaacataaatattcaactttcgcaatggcggcgattgtgagctttcacttatttttaacgattgcttgctactggttcattgcgaaaaaaatcactaccaaaagaatttggtaa

SEQ ID NO: 251722 - DNA, 5259 bp, Klebsiella pneumoniae
atgctcagtttcagccaggttaaatcggcgggcagtgccggtaactactacacagagaaagacaattactacgtcatcgggagcatggaggagcgctggcagggtaaaggcgcagaattgctgggacttgaaggaaaggtagacaagcaggtcttcacggagcttctgcagggaaaactacctgatggcagcgacctgacccggatacaggatggcgtgaataagcaccggcccggttatgacctgacgttctcggcaccgaaaagtgtatcgatgctggctatgttgggcggcgataagcgtctcatcgatgctcataatcgcgcggtaacagtagctcttaaccaggtggagtcccttgcttccacacgggtaaagaaagatggcgtgtctgaaacagtcctgaccgggaatctgattattgcccgctttaaccatgatacatcgcgcgctcaggatccacagatacacacacacagcgtggttatcaacgcgacacagaacggcgataaatggcagacgctggccagcgataccgtcggtaaaaccgggttctccgaaaccatactggccaaccgcatcgctttcggaaagatataccagaactctctcagggccgatgttgagtctatgggttacaagacagtcgatgcgggtcggaatggcatgtgggagatggagggcgtgccggttgagtcgttttccacgcgcagtcaggaactcctggaggctgcaggacccgatgcctccctgaagtcacgggatgtggccgcgctcgatacccgcaagtcgaaagaagccatcgatccggcagaaaatatggtggagtggatgaacacgctgaaggagaccgggtttgacatccgggggtaccgtgaggccgccgatgcgcgagccgcagagctggcccgtgcacctgccgcgccggtgaacactgacggtccggatatcacggatgtggtgacgaaagcgattgccggtctcagcgaccgcaaagtgcaattcacgtatgccgacctgctggcacgcacggtcggccagctggaggcgaaggacggtgtgtttgatctggcgagaaagggcatcgatgccgccattgaacgggagcagcttatccctctcgatcgcgagaaaggcctgttcacctcaaacatccacgttctcgatgaactcgccgtcaaagccctgagtcaggaggtgcagcgccagaatcatgtctccgtcacgcccgatgcgtctgtggtgcgccaggtccctttcagcgatgccgtcagcgtgctggcgcaggatcgcccggtaatgggtatcgtttccggtcagggcggtgcaaccggccagcgggagcgggtggccgagttaaccctgatggcccgggagcaggggcgtgacgtccatatcctggcggccgataaccgctcacgtgattttctcgccggtgatgtgcgtctggccggggaaacggtgaccggtaaatccgccctgcaggacgggacggcgtttattccgggcggaacactcatcgtggatcaggcggagaagctgagcctgaaggaaacgatttccctgctcgatggcgcgatgcgccataacgtgcaggtcctgctctccgacagcgggaagcgcagcgggaccggcagcgcgctgacggtgctgaaggacagcggcgtgaatacgtatcgctggcaggggggccatcagaccacagccgacatcatcagtgaaccggataaaggagcacgctacagccggctggcacaggagtttgccgtcagcgtacgtgaagggcaggaaagcgtggcccaaatcagcgggacgcgtgaacagagcgtactcaacggccttatccgtgactccctcagacatgagggggtgctgggtgagaaagacacgaccattacagccctgacgccggtgtggctggacagcaaaagccggggcgtgcgggattattaccgggaggggatggtgatggaacgctgggatccggagaaccggacgcacgatcgctttgtcattgaccgggtgaccgcgagcagcaatatgctgaccctgaaagaccgggatggggtccgtctggatctgaaggtttccgcggtcgacagccagtggacgctgttccgggcagatacactgccggtggcagagggggaacgtctggcggtgctcgggaagataccggacacacgcctgaagggcggggaaagcatcacggtgatgaaagtggaggaagggcagctgacggtacagcggccggggcagaaaaccacgcagaccctggccgtgggcgcgggcgtgtttgacggtattaaaatcggccacggctgggtggaaagtcccggcaggtcggttagcgagacggcaatggtctttgcgtcggtgacgcagcgtgagctggataacgccaccctcaaccagctggcgcagagcggaagtcatctccggctgtactcggcgcaggatgcggcgcgcacgacggagaagctgtcgcggcataccgccttcagcgtggtctcagagcagctgaagacccgatccggcgagacggacctggatgcggccattgcgcagcagaaggccggactgcgtaccccggcagaacaggccattcacctggccatcccgctgcttgaaagtgagaaactgaccttctcccggccccagctgctggcgacggcgctggaaaccgggggcgggaaggttccgatggcggacatcgacacgaccattcaggcacaaatcaggtcggggcagttgctgaatgtaccggtggcgcacggctacggcaatgacctgctgatttcccgtcagacctgggacgccgaaaaaagcatcctgacccacgtgctggaaggtaaagacgcggtggcccccctgatggaccgcgtgccggccagtctgatgacggacctgaccgccggacagcgggcggcgacccggatgattctggaaagcacggaccggttcacggtggttcaggggtatgccggggtggggaaaaccacccagttccgggcagtcatgagtgccatcagtctgctgccggaagagacccgtccgcgcgtcatcggtctggcgccgacgcatcgcgcggtcggggaaatgcagagtgctggcgtggatgcgcgcacgacggcatcgttcctccacgacacgcagctgctgcagcgcaatggccagacacccgatttcagcaacaccctgttcctgctcgacgagagctcaatggtggggctggccgatatggcaaaagcccactccctcatcgtcgccggcggtggacgggcggtgtccagtggggataacgaccagctgcagcccatcgcgccgggccagccgttcaggctgatgcagcagcgcagcgccgccgacgttgccatcatgaaagagattgtacgccagatgcctgagctgcgaccggcggtctacagcctgattgagcgggatgtgcaccgcgccctgaccaccatcgagcaggtcacgccggagcaggtgccgagaaaagaaggcgcatgggcgccgggcagttctgtggtggaattcacgccaaagcaggaaaaggcgatagaaaaggcgctgagcgaggggaaaaccctgctggaaggtcagcccgcgacgctctacgaggcgctggtgaaggactataccggacggaccccggaggcacagtcgcagacgctggtgatcacccatctgaataaggaccggcgggcgctgaacagtctgatccatgacgcacggcgggagaacggggaaaccggcaaagaggaaatcacactgccggtgctggtcacgagtaacatccgtgacggtgaactgcgcaaactgtcgacctggacggctcacaaggaggcggtggcgctggttgataacgtataccaccgtatcagcaaggtggataaggataatcagctgatcaccctgacagacagtgaaggaaaggagcgatatatctcaccccgggaggcatcggcagaaggcgtcacgctctatcgtcaggaaaagataaccgtgtctcagggggaccgaatgcgcttcagcaaaagtgacctggagcgcggctatgtggccaacagtatctgggaggtgcagtctgtttcgggtgacagtgtcacgctatctgatggcaaactcacccgtacgctgaccccgaaggcggatcaggcgcagcagcatatcgacctcgcctacgccattacggctcacggcgcccagggggccagcgaaccgtatgccatcgcgctggaaggggtggccggtggtcgggaacagatggccagctttgagtctgcctatgtggctttatcccgcatgaaacagcatgtgcaggtatacaccgacagccgtgagggctggataaaggccatcaagcattcacctgagaaagcgacggcgcacgatattctggaaccccgtaacgaccgggcggtgaaaagcgccgatctgctgttcgggcgggcaaggccactggatgaaaccgctgctggccgggcagccctgcagcagtccggtctggcacagggaaattcaccgggaaaattcatttctccggggaaaaagtaccctcagccgcatgtggcgctgccggcatttgataaaaacgggaaagccgccggtatctggctcagcccgctgaccgatcgggacggacggctggaggctataggcggagagggaaggattatgggcaatgaagacgcgcggttcgtggcgctgcagaacagccgcaatggtgaaagcctgctggccgggaatatgggagagggggtcagaatggcccgcgacaatcccgataccggggtggtggtgcggctggccggtgatgaccgtccctggaaccccggggccattaccggcggacggatatgggctgaaccggcgccggtggctccggtaccgcagaccggggctgacattatcctcccgccagaggttctggcgcagcgggcggcagaagaacagcagcgccgggaaatggaaaaacaggcggaacagactgcccgggaagtggccggggaggcgcgtaaagccggcgagccggcggaccgggtgaaagaggttatcggggacgtcattcgcggactggagcgtgaccggccgggtacggagaaaacgacgctaccggatgatcctcagttccggcgccaggaggaggcgattcagcaggtggcctcagaacgtctgcagcgtgagcgtctgcaggctgtggagcgtgacatggttcgtgaccttaaccgcgagaaaaccctcgggggcgactga

SEQ ID NO: 251723 - DNA, 726 bp, Klebsiella pneumoniae; identical to SEQ ID NO: 233454

SEQ ID NO: 251724 - DNA, 282 bp, Klebsiella pneumoniae; identical to SEQ ID NO: 101047

SEQ ID NO: 251725 - DNA, 498 bp, Klebsiella pneumoniae; identical to SEQ ID NO: 202676

SEQ ID NO: 251726 - DNA, 438 bp, Klebsiella pneumoniae; identical to SEQ ID NO: 202679

SEQ ID NO: 251727 - DNA, 657 bp, Klebsiella pneumoniae; identical to SEQ ID NO: 16007

SEQ ID NO: 251728 - DNA, 279 bp, Klebsiella pneumoniae
atgtttctgaagttgctgaacatccgggataccgatctggctgagcagttccgcgcatccggcaagaatggcgcgtccctgagtcatcagcaggcggttacgctccccttctattcggacaaggtcctgcgtcagttgctcccggctgtcaataccgatagtccccgtaaggtcagaaactgccggttgttcatttttttcaagcacatgcagcagggcaagaggaacgtcaagcttcccggcaatccaggctgcatactcacacacggcgcgtgttga

SEQ ID NO: 251729 - DNA, 210 bp, Klebsiella pneumoniae
atgaagatggagctgaatccacatgggattattaacacgccactgccaggactgcttaaacagctcaaccaacatgctattatgagtcgcttcagcaattgccagatgaaattgcatatcaccgacctcgtgatcgtcagaaactgccccctcctcctgcaactgcaaagcgcggcgcatttttatgatatcttcacgggtcgcctgtaa

SEQ ID NO: 251730 - DNA, 531 bp, Klebsiella pneumoniae
atgatctttaaccagcgtcaccatcaggagagccattgcaccggtggaggacgaaatcatcgccggacgtccgccaaagaaggccataacgagaggaatacagaacgccgagtagaggcccacctggggatcaacaccggcgataatggaaaaggcgatcgcttctggaatgagtgcgagcgcgacaacaataccggccagaacgtcaccacggacgttacccagccagtccttacgcgtcgaggacagcaacatagtaatttctcagtttttagatacagtcagccctggagggctacatttttacgtacggtaaagcacatccgcagacgggatgttattgagtgcgtgctgaggcttgctcagtacgacagaggaaggaaaaactcagggtggcgtaatacgcatagcggttgtcagattctccatagcggatgtgtatatattgtcggctctgttgtcaggaagaacttacagaacacgtcgcgtttgaacatgaaacacttcaaagcagcccaatactacaaataa

SEQ ID NO: 251731 - DNA, 267 bp, Klebsiella pneumoniae
atgctcaatgagcacgtgaacgtagccatccccggcggtagttttcaggctgtagagaacgtcgctgaaatactggcggagatcatcctcaataaacgagccggattccagtttcagtgtgctgaggtcgcagatggcctgcagctctgccgggaggtgcagctccatgaaatcccgggcaatatccggttgcgtcagaaactgcctgaacgtagcatcgtgaggagtgggtgtgctgtttttcttcttcatcagccctggctctga

SEQ ID NO: 251732 - DNA, 759 bp, Klebsiella pneumoniae; identical to SEQ ID NO: 231813

SEQ ID NO: 251733 - DNA, 348 bp, Klebsiella pneumoniae; identical to SEQ ID NO: 203618

SEQ ID NO: 251734 - DNA, 558 bp, Klebsiella pneumoniae
atgggattctggcgttttgatgacaatgtttccccggtagcttttctcaacaatcctgatagccgtgttatccacccatcacagtatctggctgctcatgcccggatggactgctttactccacaagtactgatgccctatttacccggaccagaatactctgtggatatggtggtaagtcaaggcacggtcctggccgctatcgggcggcgtaaagaaggtgtgcttcagtatctggaaaatgaaggggaagcgattgaacttgccatcaactgcgcccgcctaatgaacgcagacggcatggtcaatgtacagactcgccataatgccgaaggcaaaccactattgctggaaattaacatgcggccatcaggtggtatcggttatacgcagcacagtggcgtgaatctgccgggtctgtatgccttccatacacttgggctgatggatgatgatcaggtcaggcagtcagcgaaaactgatttttcacctgcagtcgtccgctctgttaccgatgtcattctctatccggcatcattgaccaacaggattgattaa

SEQ ID NO: 251735 - DNA, 546 bp, Klebsiella pneumoniae
atgggtatcattatttgcctgcggttcggtatccgaatcgctgtcagaatccgagtcgctgtccgagtcagagtcgctgtcagcatccgagtcgctgtcggaatccgagtcgctgtcagagtccgaatcgctgtcagagtccgaatcgctgtcggagtcagagtcgctgtcagagtccgaatcactgtcggagtcggaatccgagtcgctgtcggaatccgaatcgctgtcagagtcggagtcgctgtcagaatccgagtcgctgtcggaatccgaatcgctgtccgagtcagagtcgctgtcagaatcagagtcgctatcggagtccgagtcgctgtcggaatcggaatcgctgtccgaatccgagtcgctgtcagagtcggaatcgctgtcggaatccgaatcgctgtcagaatccgagtcgctgtcggagtccgagtcgctgtcggaatcagaatcgctgtcagagtcagagtcactgtcagagtcagagtcactgtcagagtcagagtcactgtcagagtcagaatcgctgtccgagtctga

SEQ ID NO: 251736 - DNA, 252 bp, Klebsiella pneumoniae
atggtaaacggtaagaaggaagagctgctgaccgcacagcaaattttacgtgacgcggatatagaaaacagcacaacacatcttaccgggcaatcagtcggggacgcgcttattcgttacgccgaggaaaatgctgtcgatctgatagtgatgggggcctacggtcattccaggttgcggcagttctttatcggtagtcatacctccgaaatgctgcaaaagacgcaacaaccgcttcttatcctccgttag

SEQ ID NO: 251737 - DNA, 591 bp, Klebsiella pneumoniae
atgaataatactgttacagcctgtgtggacggttcactttcaacgcggtcagtgtgtgaatatgcggcgtgggcagcccgcactttgcaatcacagctagcactgttgcacgttatcgaaaaagacagcaccccggtagtgtcagacctgaccggcactctcggcatagacagtcagcaattgctgaccgatgagctggtagaaattgaagggcaacgtaatcgcctgctgatggcccaggggaaagcaatactggaaagttgtgctgaactgcttcaaaaacagggaagcccggatgtgcttttgatgcaaaaacacggtacaccggatgaagttctggcagagctgagcgaccttcgtctcatggtgctggggcgtcggggtagccagcatccggtaggctctcatctggaaagcgttattcgtctgcaaaagaaacccctgctggttgttccggagaactactcagtgccttccagagtcatgctggcttatgatggcagtgaagaaagcaggagtaacctggaacgtctgacgatgagtccctttactcagggggctggagtgccaccttgtcatggtaaacggtaa

SEQ ID NO: 251738 - DNA, 306 bp, Klebsiella pneumoniae
atgggtagcaaaatcgcaggtgtggttttcttattcttcactgtctggggaatggcttcagtgattgaattgcagtactggcgtaacgctgatacctatcctgtctggctgacaaaacatctccggatctctcccgaaaataacgaaaagagcctgataaggataggaatggaaacctttgacaaggtatgtggtgataacaggggcctccttgccgtcacccaaaaacaaaacggtatgtttatgcgctgtgatgattcccccggatttttttcatggatcagcggcgtttacaaagtcagttaa

SEQ ID NO: 251739 - DNA, 240 bp, Klebsiella pneumoniae
atggtggaaggtgaaagccaagataccaccgggcttcaagagtcgatgcgcctcacgccagcactgggtaagcagccgctgatagaaaccatctggatcttccggctcgcgagcccgattggctactgcctccagagactttggggtgtactcggagccaaagattgctgggtatttgttcttgagcgccaggcgaagccatacgtagaagaaatcggacagctccgaatagtgcagtaa

SEQ ID NO: 251740 - DNA, 636 bp, Klebsiella pneumoniae
atggagaccatgcctgagcaggccgaacaaagccgaaatgactggcttgcactgatttcacggctgaaaaatacggacgctgatacagccaaaggcgacaggcctgtgcaggcatggcacggtgtcgactggccttcactgatagccgaaatgaacgagatgaaatccctgtcgccacatccgcggggtttccgttttgaagcatggcttgcagaacttttcagtatctttaagcttgccccccgctcgtcattccgtaacacgggcgagcagattgacggcagcttccggctgaatgatgacttttacctgttggaagctaagtggcatcagaacagaacgccagcggcagatttgcacgtattcgaaggaaaactcagcaccaaggcgaagtgggcccggggcgtgttcatcagttggatggggtttactgatgaaggtctgacagccttcgtgaaaggaaaacgggtgatctgtgtcagtggttatgatctttaccattcactcagtcacggtatcgctctgcccgaccttctggacgcaaaactccgacacgcagcggaaacaggggagccttatgcccagtttgacaggctttacactcttaagggcataataaccggcacgccgaaataa

SEQ ID NO: 251741 - DNA, 525 bp, Klebsiella pneumoniae
atgctgccattctgcgtactgctcagcccaggctatacgctgtttctcataacgctgtttcagcaacgcattttcacgttcaatatcagcgacggacgtctgccaccgccgaagattttcgttctgtcgctcctgtcgggctgcatcagattcaaaccatcccccaaggaacccgcgaccggcatgctcatcaggttctggtggaagtggaatatattcaggtttgtttggtcgtaccggcgcaggaagagtgaaactgccctgacggagcgccaggtactgtgtctcgagcgtggcccaggtattccctccctttggggaaggggagagttcatggatattggttatcgctgttacggtggacatcagtttttccaccaccagctccagttcagacctcagaccgggatctgcctgatgcctggtattcactctttcccgtgctgttctgtcaatccgggtgcggtaactcagtcccgttccgggaagacccaggttggcaaacgttccattctttcccactga

SEQ ID NO: 251742 - DNA, 732 bp, Klebsiella pneumoniae
atgaaagcgttacgcattgtctatggtgatgaggtcatcgtcgtacagtgtgttccgcgtcaggtcgtaaagggcagggtgctcatcaaggtgcatccggactgccgggttattgtctctgtacctccagaaacaccggagcacgagctgttgtctgcgctgaaaaaaagagggcgctggatataccagcaactgcgtgatttcagggagcaacagacacacattgttccgcgtcagtatgtcagcggagaaagccattattatctcggtaagcaatatcagttgaaagtgacagaagacgctactgtgccgcaacgagtgaaaatgttgcgtgggcgtctggaagtgactgtcagacacaaatcggcagaaaagattaaagccttgctggctgaatggtatcgggaacgtgccagagatgtttttcagcgcaggcttgatttactgattccgcagaccctttgggtcagtgagcgtcctccgatacgtctgcgggcgatgcaaacgcaatggggcaactgttcagcaaaaggctgtctgaccctgaatccatggctggttaaggcatcctcagaatgtatcgattatgttttgctacatgagttatgccatgtggctgagcacaaccacagcgagaagttttaccgtctgatggggcaggttatgccgggctgggaaaaggttaagaagcgactggatggtatggctgggatgttgttggcagatatgtag

SEQ ID NO: 251743 - DNA, 654 bp, Klebsiella pneumoniae
atgggtatcattatttgcctgcggttcggtatccgaatcggagtcggagtcgctgtcagaatccgaatcgctgtcagaatccgagtcgctgtcggaatccgaatcgctgtcggagtcggaatcgctgtcagagtccgaatcgctgtcggagtccgaatcgctgtcagagtccgaatcgctgtcagagtccgagtcgctgtcggagtcggaatcactgtcggaatcggaatcactgtcagaatccgagtcgctgtcggagtccgagtcgctgtcggagtcggaatcgctgtccgaatccgagtcactgtcagagtcggaatcgctgtccgagtcagagtcgctgtcggaatccgagtcgctgtcagagtcggaatcgctgtccgaatccgagtcactgtcagagtccgaatcgctgtccgagtcagagtcgctgtcagagtccgaatcgctgtccgagtcagagtcgctgtcagagtccgaatcactgtcggaatcggagtcgctgtcagcatccgagtcactgtccgaatcggagtcgctgtcggagtcggaatcgctgtccgaatccgagtcactgtcagagtccgagtcgctgtcagaatccgagtcgctgtcagagtccgaatcgctgtcggaatccgaatcgctgtctga

SEQ ID NO: 251744 - DNA, 150 bp, Klebsiella pneumoniae
atgcttgaagaggtagtcgcaaaaggccgtcagtttagcccctaccaaaccaagatccgccattgccttgtcaatcagctcaaaaccgttcaccaaaccttcattgaaggtactcccccgcaaatcgtagggggcaacaccctgccataa

SEQ ID NO: 251745 - DNA, 207 bp, Klebsiella pneumoniae
atgcataccccatggaaagctgaagatatcgcgctgctggaaaaatggtgcggtattccgggacccgcagcgccctggctcctgaccgcgctggcagccgatctggtcagcctccgtaaacagcccctgctggcgttattttccagcgaacaggaacattttatcagtaccatcaccccagggagtgaagatgaatataccgggtaa

SEQ ID NO: 251746 - DNA, 546 bp, Klebsiella pneumoniae
gtgagtgttgggagaatcgaatataacaaaggctatgatattcttgctgaagcacttgctaatttaacaaaaaaagagtggtctaaaatcaaattttcttgggatcactatgggcgtggaaaaaataaaattgatattgaaaatttttgtagaaaaaacaacgtaaaacttaatattatttccgcagcatctgatgaagacgtacaaactgcaatagcatgttccagtttgtttgttcaaccctcccgctatgagggcagcagtttaacaacattagaagcgatgacgcatggtgctcttatagttgcaatgcctgttggtggtatacctgataaaattttcgataaatatacaggttttttatgtaaagaagttagtagcatggctttagagaagagtttgatagaagcaaggaaatcagaagaacaagaagtgatccgtaaaaacgctaggcactatgtagaagagaattttgatatccatatttcaactgaaaaatatgactgtatatataaaaaaattttagctgaaaaggaaatcaaatga

SEQ ID NO: 251747 - DNA, 660 bp, Klebsiella pneumoniae
atgatgtacgagaacaaccagtcgatgtatgaagctggtctggtacagcatgatgattttcttaaacagaaacaacgtcttgaccaagcgtatgctattaaatctcaagctattgaacgtcaatctgcacagcagaaacttcaaatcgctaatgatttaacttctggcataagctcggctatgacaggtatgttaggtgagaacaacaaagctgctcaagcaatgtttgcagtgtctaaaggagtggctattgcaaatggtatgatgaacgctcatgagtctgctacgactgctatggccaaatatccaggaccattagggtatgcactggcggcgtcatcatacgctcgtgttcttactgaagtaatgcagatgaaatctatgtctctcggtcaattccatgatggtatcgataatgttcctaacacaggtacttatctgttacaagagggtgagcgagtagtagataatcggttgaaccaagacctaaaagacttcttaggcaaacaacagactggtaaaacagacagtcaaccaatcgatgcatctatccatatctctggatctgtgaatggtgaacgtgagttaatgcagataatgaaacgtcaacaaaaaatcctagctgatattgttcaagatgctaatcggcgtaaaatgtaa

SEQ ID NO: 251748 - DNA, 339 bp, Klebsiella pneumoniae
atgctggcgattaacgtccagcaacgccgtaaccaaagcgcggtggtcatccagggtaaatggcttgccgtaagcggtaaaattggctgttttgctagtcgggatgtacggcggatcgcagtaaatcacggagtccaggcggttccttgcaacgtacggaatagaagtacgaaaatcattacaaagaaagagcgcgtgagtatcccgcgccttttcagcaaacaagcgcatttcggcttcagggaaataaggctccttatagctgccaaaggggacattgaaaccgccatccctgttggtgcgataaagcccgttaaagcagtggcggttcaggtataa

SEQ ID NO: 251749 - DNA, 174 bp, Klebsiella pneumoniae; identical to SEQ ID NO: 39930

SEQ ID NO: 251750 - DNA, 714 bp, Klebsiella pneumoniae
atgctgcatctgtttttccgtaaggacattcccgccgtttacgacgtttctctgttgaaagaaccgaaagacgcgatacgtgatgtgaatacctttaaaaccggctggctggttctggtgttgcttctggtgggattcttcggactggagccgctgggcgtaccggtcagtttggtcgcagccgctggtgcattgcttctgtttgctgttgcgaaaaaagggcatgccattaacaccggtaaggtgctgcgtggtgcgccctggcaaatcgttatcttctcgctggggatgtacctggtggtctacggcttacgaaatgccggtctgacccactatctctcttccttgctgaatcagctggcagagcagggattgtgggcggcaacgctgggtacgggcttcctgacggccttcctgtcatcagtgatgaacaatatgccgaccgtgctggtcggggcgctgtcgattgatggcagcacagcgaccggtgttatcaaagaagcgatgatttacgccaacgtcatcggcagcgacctggggccaaaaattacccctatcggcagtctggcaacgttactgtggctgcacgttctgtcgcagaaaaatatcaaaattacctggggatattacttccgggtgggcattgtcatgacaatccccgtgctgtttgtcacgcttgcagcactggcgcttcgtctgtctttcactttgtaa

SEQ ID NO: 251751 - DNA, 381 bp, Klebsiella pneumoniae
  misc_feature (350)..(359): n is a, c, g, or t
atggttaaggcgtggcgcagccgccgtatggccgaattactgcagcagggcgctgatggcatccggcaggcaaacaaccaggaacagcgcgatcaggttgttgaaactgccgtggcgcagctgctggacatgaccggagacactggcgacgtgcagccggtacacatgagcgaattattgcctgtgtacatggaaaccatgcagaaacgcatggacggcgaagagggcacccgaaacctgaaaacggggatcgaggaactggacgatgctaccggtggaatcaacctgcaagatttgattgtcgtcgccgggcgtccgggcatgggaaaaacagaatttgcgctgaaacnnnnnnnnnngctgccggcggtggtgcgctga

SEQ ID NO: 251752 - DNA, 516 bp, Klebsiella pneumoniae
atgacgctgggcgatgaagtgatctacgccgatggctggaaagtccgcgacctgcgcgccttacggcgtgacaagatcggtttcgttttccaggcgccgtacctgattccgtttctcgatgtcaccgacaacgtggcgctgctgccgatgcttgcaggcgtcgcgaatggagagtcgcgcgcgaaggcactggaattgctcacagcgcttgatgtgcaacaccgagctcgcgcaatgccctcgcaactctccggtggcgagcagcaacgggtcgccatcgcgcgcggactggtcaatcgtccgccggtgatcctggccgatgaacccactgcgccgctggattccgagcgcgccatggctgtaatccgcatcctcaacgacatggcccggaagttcgagaccgccatcatcgtcgtcacccatgacgaaaagatcatccccacattcaagcgcatctaccacatccgcgacggcgtgacccatgaggaagctggcgaagggcgggagttcgaatga

SEQ ID NO: 251753 - DNA, 183 bp, Klebsiella pneumoniae
atggaagacgaaacagaactgaccgaaccgccatttgaaacctggttcagagacgtggttgaactggttaaaaatggcggacattcaatggatattgttgcctataagggggaatgggttgactttttcaccgatggattaacaccaaaggaggctgtcatcaaaggaagcgtgattaagtga

SEQ ID NO: 251754 - DNA, 297 bp, Klebsiella pneumoniae
atgtcagacctccgcgactccggttctatcgagcaggacgccgacagcatcatgttcctgtaccgcgatgaagtctacaaccctgaaagcccggcggcggggatcgccgaaatcatcctggggaaaagtcgattcagtgctgctggtgccgttatctatcaggagttcaaaaacggtcacttcctgcacgttgatcagcatgtcggcaaagagaaaacacgcattcagctggaggcagcaaaaccacgaaaacaaccgcgtagatattcagagaagtacaacaccgatgcattttaa

SEQ ID NO: 251755 - DNA, 375 bp, Klebsiella pneumoniae
atgcgcggcttcacgcccagctgcgactgcgccgaaagtaacgccttcatgccggttttcttaccctcagcggtcacgccgccgatgatgtttgcggtggtttccgcttcggtttcgccctgggcaacgcgcaccactacggtgacgggttttgcctggtctgcgatagcgtccagtgagcgggccagcgtgccggactcgcccgctttaccgctggcggtcagcacatcggtcagtaataccggcttattgagcgggaacatggaggcatcggcatcatcgccggtgcacaccatgcccacgatcgccgtgctcaccgttgtgatagagcgggtgccgtcgttaacttctacaacgcgcacgccgtggtggtag

SEQ ID NO: 251756 - DNA, 264 bp, Klebsiella pneumoniae
atgatggtaggaaaccgcaatccgcctcactatccgcgaatttatctctatcacgcttacctggcattcctggaggccaacggtttcgacaagccgctgacgctgaataaattcgcagaggggatggaaagcgcgatgagggagtttaatcacgagtaccgtaaggaacggagagcccgtggcatggtgaccaacgttgaactttcagagagtgcggaagactggttacctcagacgcatcctgtagccggtcataaagaatga

SEQ ID NO: 251757 - DNA, 276 bp, Klebsiella pneumoniae
atgccattggttcatctgacgatgcccttcagcaatatgatcaggcagccgctacgctggggcagacaatccctgtggggagacgtgatgactggaaccgacaggttgctgctacccgtcttcaattacagagttctgcagattcgcatgaatatcagcaatttcaagactacagccgcgggcaactggaagggcgcctgcagatggctgttcaagatgccgaaacttaccgcagcgatccgggaaattatgcggttaccagggcaaaggccatag

SEQ ID NO: 251758 - DNA, 360 bp, Klebsiella pneumoniae
atgtggtttcgtctcggtggtaacaccggcgtgctgaaactgcaccagattgaagacgcagatggaaaagcagactggcgagccatcaacaataaccgccagcagatttttcgctggctgcgtggagaaactaaagcggccagaaccaaaacccaagcgctggccaaggcgatggaagcggcactgccggcggaacattacgcacgcctggacatgtctacccagtatttgatctgcgtcgccatacgcgaatttgcggcggccattatcgcgttattgctcgaggccagagacggcccgcagcaagttgcgaaggcattgcaagcgatgagagaaacacagcgcctgaccagcgtttaa

SEQ ID NO: 251759 - DNA, 216 bp, Klebsiella pneumoniae
atgatgagcctcatcaaaaaccaccagatcccaccgaggagcatccagcaagcgtttaatacgcgccggacgtttgagtgtatcgatgctcgcaatcaatcgatcgtgcttggcatatgcattggttttacggtcagttatgtcgccctcagaaccgaacacttcaaaatcgaggttgaatacctcgttcagctcccggtgccagttattcactaa

SEQ ID NO: 251760 - DNA, 156 bp, Klebsiella pneumoniae
atgaatacagtatcctttactgtgcatttcgtaaatatgctgttcagcagctttttccatacccccaacaccttttccgaaggatatagaacgcaccactatatagagatttttcataaatataccattttattttacagaaacgtctcgacttaa

SEQ ID NO: 251761 - DNA, 330 bp, Klebsiella pneumoniae
atgagtcatatcgaattcgtagctgagcacccaggcgtgccaagaatgatgtttggtgagcttcagcgtgccgaatcgacaccggccaagcgcatggtgcaaaccttgattcagcgctacggcgaacgtttgcatcgtctcatcgagaaaggcaaggccagcggcgagttgtctccctcgcttgacaacgaggcggcggcaacgctgttcattggcacgatccagggcttggtcatgcaatcgctgttggcgggtgatgtgggacgtatgcaccgcgatgcgccgcgcgtctttgcaatttatcggcgtggcataaggagtgcgcaatga

SEQ ID NO: 251762 - DNA, 405 bp, Klebsiella pneumoniae
gtggttgccggggcgctggcaaaacggctgagtgagaaaaccattattttcgccggatttattgccgatgccaccgcgtttttactgatgtctgctatcacttccggatggatggtgtatccggtcctgatcctgctggcaggcggcggaattgcactgcctgcattgcagggcattatctctgccggggcatcggcggcaaatcagggaaaactacagggtgtgctggtcagcctgaccaatctgaccggcgtggcgggcccgctgctgtttgcttttattttcagtcagacacagcagagtgcggacggtacggtgtggctgattggcacggcactgtacggtctgctgctggcaatctgtctgctgatcagaaaaccggcaccggtggcggccacctgctga

SEQ ID NO: 251763 - DNA, 312 bp, Klebsiella pneumoniae
atggagggcgctgaaggtaacgtgtatgttttgcgtaaaacctatcagaacgaaacggcggccaggcgcgcagctgcggcaaaatggatacagctccagaaaggcgcagcacagttttcgataaccctggcgcgcggacgcgccgatttataccctggtatgcatctgaacgtatcgggctttaagcctgaaatcgattctcaggattggatcattgccagagcggaacatgtgatcggtgataacggatttaccacgaaaatggagcttgaggcgaaaataagcgactggattgcggaaactgaacaatag

SEQ ID NO: 251764 - DNA, 234 bp, Klebsiella pneumoniae
gtgttcagttcgacgacccgctcaccgatttccactggttatgctatccagtccgccattgcttttagcgataactacggactgggtattccgaattatgtctataacgttgctcatcagcagtttgaccggatcctgatttgttgcgaaacgccagcttccagcgtggacccccggctgcttgaggcgctttcctctgttgctcccaccgtagaggtgattacctatgaataa

SEQ ID NO: 251765 - DNA, 312 bp, Klebsiella pneumoniae
gtgccgcccctcagaccgctgccggatgtgatgccttttccgtataccggcaacccactgcacccgaaccagaaaccggtggaggcgctacagccgctgattgagtcattcagcgccccgggcgcgattgtcctcgacccgttcgcagggagtgcttcgacctgcgtcgccgcataccgcgccggacgccgctatatcggcattgaaatgctggcgcagtaccaccgggccggaaccgaacgactggccgccatgcaccgggccgtaaataccccggcggcgaacgatgaatggcttccggaggccgcgtaa

SEQ ID NO: 251766 - DNA, 402 bp, Klebsiella pneumoniae
gtgacggttctggcccgcgacggtgatggcaccgcgccggatgatttgctgcaggtggtcggggatgccctgaatgatgagactgtgcgcccggtggcggaccgggtgagcgtgcgatctgctgagattatacgctatgagatcgacgcggttttgtatgtttaccccggcccggcgaaggagccgattctggcggcggcgaaagcacagggcgcggcatatatcaacgagcagcgccgcctggggcgtgacgtcagactatccgcgatttatgccgccctgcatgttcagggcgtgcagcgggtggagctgatgaagcccatggctgacatggtattagataaaacgcaggcttccttctgtaccgactttaaagcagaaattggtggctctgatgaatag

SEQ ID NO: 251767 - DNA, 141 bp, Klebsiella pneumoniae
atgctgcgcggcccagtcgataaaatggcggaagtgctgctcggcctgcgctgggttaccgctcttacgcagcgcaatgccctgccagaaaaggtaatcggcgggttgatcgttgtagtaccgcccggcgtccagcgttga

SEQ ID NO: 251768 - DNA, 195 bp, Klebsiella pneumoniae
atgggcattctgcagggggatgggcaccaccgcgccgtagtcgtcgatatagttcaactggtacaggcgagtgctgtcggtggtcatcacggtatggctgctgtatggccggagcatcacgtttcttatcggcgagaggtggcctttattatcgatcagcgccccgttgaccagggtgatatgcagtgggcctaa

SEQ ID NO: 251769 - DNA, 234 bp, Klebsiella pneumoniae
atggccgggcaatcagattatctgccgcccggcttaccgctcaatcgcgccaaatggccgcaggagtgccagatcaaagagcactacgacatgcgggctgcggcactcatacgtcagctgttcgagaagaaagttactcgtcagttcatcgttgagtcgattgcagcgacgccggaaagctaccgggaatttttcaaagcgagattaaatttttggcgggagaagagagcatga

SEQ ID NO: 251770 - DNA, 189 bp, Klebsiella pneumoniae
atgctgccgtggctttattggaatgaatgctgcttccgctcgctgcttacagtggccggagctatcggttacgccccccatccgcgccgctcagttgcacacaacgccttaaccgacgccatctatcaggccgagcaggtttgcgagatctggcagcgcctgacctccccgcacctcgaatcattgtga

SEQ ID NO: 251771 - DNA, 249 bp, Klebsiella pneumoniae
atgaacgatttctatcaggcgcgtctggcgcatagtgtaatagcttctaatcctaatcttactgctgaaggccgtaagaaaatcaatatgaaagatttctatctgttgaaggataaagtattcaaaagtcctgaggaactcaaaaagaaaaacagaaagagcaagaacgtaaacgaaaagctcttgaaagtatgtttgaacctgaacttctggctaaagctagaaagtcaatcaaataaggtgggataa

SEQ ID NO: 251772 - DNA, 162 bp, Klebsiella pneumoniae
atgggcgccaccgctatcgcgctggcgcagtgggagccgcggatcagcctgactaccgtcaacgtggtgttttcggaaacaggcgcagtgaccgccgagctgagcgggaccatcacggaaaccatgacagaaaccagcaacaccatcaggttaaggagctag

SEQ ID NO: 251773 - DNA, 153 bp, Klebsiella pneumoniae
atgctgatctggccgaacttcatcgcctataactcactgaccggcgccaatgatgagctgagactgtgtctgtgcgccttcctcggtcttagcttcagcgacacgcacgacgatcacgcgggtgctgacctggtcggaaatagccttgagtga

SEQ ID NO: 251774 - DNA, 159 bp, Klebsiella pneumoniae
atgcgcaccggccagcatcgtagcgatatgggtaaagacacttttcccgctaccgccctcaccggttatctcgaggaacagctgccagtcgtaccggttcgccagcaccataaagagcgctgcagcgatgcgctgcatcttaattgcgtctctatctga

SEQ ID NO: 251775 - DNA, 123 bp, Klebsiella pneumoniae
atgtcattggtgagcttcttcaagatgagtctgaaggctacgagtttaattatcttactgatagcaaagattttgctaaagctagggataacggctttcgcggttttcctgcttttgatataa

SEQ ID NO: 251776 - DNA, 129 bp, Klebsiella pneumoniae
atgcgtaagcgctacggcgtggtgtacgtcaatcgcgaaaaccatgacctcaaggacctgcggcgggtgccgaagaagagctatgcatggttgaagcaggtgttccgcagcaacggcgaagcgatgtaa

SEQ ID NO: 251777 - DNA, 312 bp, Klebsiella pneumoniae
gtgattaacccgcgactgcagatgcagcagcacctgcaaaccctcacccgtcaggcgcagcatgcccccctcgtcgaccgcctcagcgccttgcaaaacatcctcagcgaaacgccggggatccgtctgcgagcgctgagctgggatgccgcgggcaatcgtctgcagctggatatcgccgcggtctcttcccgggcgctggagcagtttacccagcgggcgcagccgcggtttcgcgtccggccgggcgacatgatcacgaaaccggatggcattgagggacaactgacgctggaggaaaacgatggctaa

SEQ ID NO: 251778 - DNA, 990 bp, Klebsiella pneumoniae
atgatacgtttcgcagttgttggcacaaactggataaccaagcagtttgtcgatgccgcccatgaaaccggcaaatataaacttaccgccatctactcccgcagcctcgaacaggcgcaagccttcgccaaagactatccggtcgagcatctgtttacctcgctcgatgaactggcacagagccctgacgttgacgcggtctatattgccagcccgaactcgctgcactttccgcagacccggctgttcctgagccataagaagcacgtcatttgcgaaaagccgctggcgtcgaacctgcaggaagtcgaggcggcgatagcgctggcgaaagaaaataacgtggtgctgtttgaagcctttaaaaccgccagtctgcctaactttctcctactgaaagaaacgctcgctaaagtgggcaaactacgcaaagccttcatcaactactgtcagtactcctcacgctatcagcgctaccttgacggcgaaaaccccaacacctttaacccggcgttctctaacggttcgattatggatatcggcttctattgcctggcgtccgctgtggcgctgtggggcgagccgcgggccgttcttgccaccgccagcctgctggacagcggcgtagacgcccagggcaccgtggtgctgagctatggcgacttcgacgtgacgctgcatcactccaaagttagcgattccgcgatccccagtgaaattcagggcgaagacggcgcgttagtgatcgaaaaaatctccgaatgtcagaagctggcgtttgtgccgcgcggcggtaaagcccaggacctgacgcagccccagcacattaataccatgctgtatgaggcggagacctttgcgcgcctggtggagacacaggatgtggatcacccgggcctggcggtgagccggatcaccgccaaactgtccagcgaaattcgtcgccagaccggagtgatcttcccggccgatacgcagccgctggcgtaa

SEQ ID NO: 251779 - DNA, 708 bp, Klebsiella pneumoniae
atgcgtagcgtaacgccgtcaatcgaatctgcggtcagccgcctggcgccgggctttcgggcattaagtattgtggtggagagcgcgccggtggccgatcccgccgtcgcggagcaggcgctggccgaggcctgcctggcggtgcagcaggatgatgtgccctgggcgcaagcgcacctggcggcatgggatgaagcgttcagcgccttcggcgcgaaggcgaaacgtaccccctgttcggcgcaggcgctgcgcaagcgggtgctgaaagaggggagcctgccggccatcgatccggtggtggatatctacaacgcgatcagcattcgctatgccgtcccggtcggtggggaaaatctggccgcctaccgtggcgaaccgcggctggccattgcccgcggcgatgagccattcgatacgctaaaatcggcagagccggtagtggaatatccggagccgggcgaagtcatctggcgggatgatataggcgtaacctgccgacgctggaactggcgacagggcgtgcgcacccggctggacagcggcgcgcagacgatgtggtttattctcgaaagcctgccggcgatgccgttgtcggccctgcatgaggcgggagagcggctggtaggttatctgcagcagctgatgcccggcgcccgcgcgtcgataacgctgctccgagccgatgacgagggcgatctacgctga

SEQ ID NO: 251780 - DNA, 309 bp, Klebsiella pneumoniae; identical to SEQ ID NO: 203959

SEQ ID NO: 251781 - DNA, 222 bp, Klebsiella pneumoniae; identical to SEQ ID NO: 203958

SEQ ID NO: 251782 - DNA, 1260 bp, Klebsiella pneumoniae
atgaagtttgattgcgcgattatcggcggcgggctcgccggcctgctgtgcgggctggccctgaatcagcacggcctgcgcagcgtcatcatcagccgcgggcagagcgcgctgcatttttcctccgcgtcgttagacctgctctcggcgctgcccaacggcgataacgtcactgacgtcgcacaaggtctgcagcagctcgctgaacagcttcctgaacacccttattcccggctcggcgccgaggcggtactcgaatacgcgacgcaggccgaagccctgctggccgcctgcggcgcggtgatgcagggcgatgcgcgccggccgcaccggcgggtaacgccgctggggacgttgcgcccggcatggctgtcgccccttgaggtgcctgtcgcgcccctgccgtcgcagggcgcctgtctggtggggatcagcggctttgctgattttcagccgcatctcgccgccgccgcgctcggtcaacacggagttaccgccgcggcggtggaaatcgagttaccgctgctggatgtgctgcgtgacaacccgaccgagtttcgcgccgccaatatcgcccgcgtcctggatgatgagaatatgtggccggccctgcatgcagcgctgctaccgctggcgcagcagtatgacctgctgatcatgcccgcctattttggcctcgccgacgatcgcctgtaccactggctgcaggcgcgtctaccctgcccgctgcgtctgctgccgacgctgccgccttcggttcccgggatgcgtttgcattctcagctgcaacgccagttcattcgcgagggcggcgcctggctcgcaggcgatgaggtggtgaaaatcagccatcgacaggacgccgtcgaggcggtctggacgcgcaatcacggcgatattgcgctgcgtccgcgctttaccgtgctggccagcggcagctttttcagcaacggtcttgtcgccactcgcgatagcgtgcgcgagccgatcctcggcctcgaccttcaccagaccctgccacgggaaagctggtaccagcgcgatttcttcgcctcacaaccgtggcagcgcttcggcgtgaaaaccgatgccctgctgcgccccctgctgggcgggcagccgttccataatctgttcgccatcggctcattgctcggcgggttcgatgccattcagctcggctgtggcggcggcgtctgcgccgttaccgcgctgcacgccgccagacagatccacgcccttgccggaggccggccatga

SEQ ID NO: 251783 - DNA, 1347 bp, Klebsiella pneumoniae
atgctgacagcgactcggatgctgacagcgattcggactccgacagcgactcggactctgacagcgactcggactccgacagcgactcggattctgactccgactctgattccgacagtgattcggactccgacagcgattccgattccgacagtgattcggactctgacagcgactccgactcggacagcgactcggactctgacagtgactccgattcggacagcgactctgactccgacagcgacagtgattcggactctgacagcgattcggactccgacagcgattcggatgctgacagtgattcggactcggactctgacagcgattcggactctgacagtgactccgattcggacagcgactcggactccgacagcgactctgattccgacagcgactcggattctgacagcgactcggattctgacagcgattctgactctgacagtgactccgattcggatagcgactcggacagcgattccgattcggacagtgactcggactctgacagcgattcggactctgacagtgactccgattcggacagcgactctgactccgacagcgactccgacagcgactcggattccgacagcgactcggactctgacagtgattcggattccgacagcgattcggactctgacagcgattcggactctgacagcgactcggattctgacagcgactctgactcggacagcgactctgactctgacagcgactcggattctgacagtgattccgattccgacagtgattccgactccgacagcgactcggactctgacagcgattcggactctgacagcgattcggactctgacagtgactccgattcggacagcgattccgacagcgacagtgattcggattctgacagcgactctgactccgacagcgacagtgattcggactctgacagcgattcggactccgacagtgactccgattccgacagcgattcggatactgacagtgattcggactcggactctgacagcgattctgactctgacagtgactcggactccgacagcgactcggactccgacagcgattcggactcagacagcgactcggactccgacagcgactcggattctgacagcgactcggattctgacagcgactctgactcggacagcgactccgactcggacagcgattctgactctgacagcgactccgattcggacagcgactcggattcggacagtgattcggattccgttgaggcaatacctgataccaatagttctgaggttgtgcagcagtacggcaatcttaatggtactgaaggcaatctctcgcaactggttggcgtctcgctgctga

SEQ ID NO: 251784 - DNA, 471 bp, Klebsiella pneumoniae
atgttgaagaagattatttttgcttgctgcttattctgcgtggccaatatagcctcagcttcagcagacgatagttcaatgcctcgggaaattgttgcaaatttttatcatgattaccttgttgcgtctgaaatgcctgatatggaatcagctgataaactaactcaaaaagctatttttgaatatacaactgagcatctcagaagtctgcgggataatgatgaatcgggtgctgattattttgtcgatgctcaggatatttgtgaagaatggaaagacagcattaatgtggaaactgtttcagagaacgaccaggtcgcacaagtgaagctaacattaggatatggtaagggtgtatccctgtatgccgttaacctggttaaagaaaaagggaaatggttaatggattctgttaagcccatatctcatagtagtatttattgtcctcgacaagcagagggaggagaataa

SEQ ID NO: 251785 - DNA, 156 bp, Klebsiella pneumoniae; identical to SEQ ID NO: 103079

SEQ ID NO: 251786 - DNA, 192 bp, Klebsiella pneumoniae; identical to SEQ ID NO: 103080

SEQ ID NO: 251787 - DNA, 423 bp, Klebsiella pneumoniae
  misc_feature (353)..(353): n is a, c, g, or t
  misc_feature (357)..(357): n is a, c, g, or t
atggccagagtgtctattagtgaagcggcacggcttgttaaggttagccgtcccacaatttacaagatgattaacagtgggaagttaagttacacctctgttgtaaagcacgggaaggctattaaagttattgatacttcagagcttattagagtttttggttctcttgatggtgtcatcgatactgtaaaatatgatgtaaaaagtgacgcagaatctacaagtattaacagcgttggtttacatgatttacaacatagaatcgctctacttgaagctgaaaacgatggtcttaaaggggctgttaaggctcgagatgagcatattgattcccttcgtcaggctatgcagcntctngagcacaagcgcgagccttcttcaccaccccattccccgtggtggaaattctggaaaaaatcctga

SEQ ID NO: 251788 - DNA, 1485 bp, Klebsiella pneumoniae
atgaaaggaagcgtagctaagacgggtaagtcttttaaaaatagagttgattatatattaaaggatgatcacagttttatttgtagcaatatggcaagtgattataataatgttagtgatttaactgatgagtttaaaactgtaagcagctttagacaagatataaaaaaaccagtctttcatgcgtttttatctcttccaaaaaatgaacatttaaccgatcagcaatgggaagagatagcaaaagactatttgaaagaaatgaatattgatatagaaaagcatcaatatatttgtgttcgtcataacgatacagataaagaacatatccatattgtagctaatcgtgttggccttgatggttctgtatggctcggtcagcactcagcatttaacacaatagcagcttgtgaacgtttagaagtaaaacacggcttaactattacacaaagtcttaaaggacaaaaatcagacgtatcagcaccaaccaagaacgagatcgagcaagccttgaggacaggtgagaaaccagcccgtatcgtgctacagaacgcattgcaggctgctatggtaggaaaaccagatctgcagacgtttatagacagagtgcaggccgtaggcattgaaccgaggttcaatgttgccagcactggcaacgtggcgggggtttcattcagtgttggagatgtggcattcaagggatctcagttgggtaaaaaatacagttggaacactataaaaaacaaggtgatatatgacaaaaatagagatgatgaactcgttaggagcttctcagcaagaaaagatgatgaaccaaatagtattagacgatcacttgctgaaccaaatatcaatgacagtggagccgttgacagaatcgatgatgatattatccgaatcagtcagcacagcattaaatcagacacaacagacacttacgagagtaaacaactcgttagaagcaacaaccacagctttaaactcagcgaaaaatataatagaccagcaagccataaagttagaagaacaacacaaaaagctgcacaaatactcaacagagttaaaaaacaatacaataaagaaccaatcaaaacttataataaaaatggcctcaatagttggcgtgataaatctgatagcagttctatcagtaggatacttgatcatgcagaaacagccaacgcagccacgaataactttagactcaaaggccgtggcaacatcaatagtagagcaactaagatcgaagagataagagaaaggttaggtataaaaaaacctattattcagccaaagaataaagaaaaaatagttaaagaagaaataaagaaaaagcctttaggttggagtatgaatgaaaatagatttaaatcgaagttaaaagaagctcttaaaaaagaaaaaccaaaaaatgaaacaacaccaacacaactacagcaggaagacgatcagcatttaaaaccacgcggttttaaaccaagataa

SEQ ID NO: 251789 - DNA, 867 bp, Klebsiella pneumoniae
atgttcaatatagaaaataacagagagatattaaaaagtcaaatacctttaaagccatatgctactaatgatcttgattttggattgactattcaaaataagaataaagctttagatatgctttatttacaagtaaatcacccgttgtatcttcatacaatgatatttgatttagacaaagaaaactgcttttatgagtttgaaaatgctcatttgcccatcccgtcttttataacaaaatcaccagactctggtagatgtcattacggttatatgcttaatgctccgatctcatcaacagagaaaagcagacagaagcctgtcaagtttgccagagcattatattacaatatggctactcgtcttggtgctgatcttggctatgcgggactgattactaaaaacccactgcatagccattggtcgccgttctggtctggtgctgatttatacgaacttaatgatttagctgattgttttgatgatttagaagaccctaaaaagcgagaaaatacagaacttgcttttggtcgtaatgttgagatgttcgatactcaaaggcaatgggcttataaaaatgtgctaaaatataagaatgaaagctcattcgatgctttttataaagagttattattgaaatgcgaaacattcaatagctttgctaactataataatctattaccttacaaagaacttgtatcaacggcaaaaagtatagctaagttttgttggaaagagtttagcaacgaaaaacttcatgatattcagagtaaaaaacagaaagcaagaagatctaaaagaacagaaaaacaaaagctacatacaaaaacacttttagaaaaagcaataatgattaacgaggagtaa

SEQ ID NO: 251790 - DNA, 216 bp, Klebsiella pneumoniae
atgcagaaaccaaagcgtagactcggttttatggttggtaagagcaatgcaacattgccaccagatgacgaaacagaagcagagcttgatcaggaagtcttgaagctgttttatcctaaccaagagacacaagacactatagaacgctcagaagccggtacagacgttttcatggcctccggttctgatgacctgttcaaaaaactgaagctgtag

SEQ ID NO: 251791 - DNA, 156 bp, Klebsiella pneumoniae
atggtagcggatagacatcaggacgtagcagagagcgatacggagcgtctcagtgcgttaaaaaagaatttgacattgaaatcatacgtgtgtcatattaagatggagaaatcaatgcatgccttggttgtgcttgctattcgcatgcgttcctga

SEQ ID NO: 251792 - DNA, 552 bp, Klebsiella pneumoniae; identical to SEQ ID NO: 246781

SEQ ID NO: 251793 - DNA, 861 bp, Klebsiella pneumoniae
atgcccagcttaggccagctctataacgataaagaatccgggttaactacccgtaaaacctataacgtcccgatcgcctcaatttacgcggaagaaggttacaacgttcgcgaactgaatcaggcgcatgtcgatgagttccgcgatgcgtttattgccggtgaatatattccgccgctggccgtagaagttactgagcgtggtgtgaaggtgatcgacggccaccaccgttatcacggtgcgctcgccgcaatcgctatgggacacgatatcgtgcgccttgagtgcaaagattttgttggtactgaggccgataagatcgcgtttatggtgactagctcgcaagggctggcgctaacacctcttgaacgtggcgcggcatatcatcggctgcaaaatcagggatggagcccttcagagattgcgacaaaagttaaacgctcagagtccgatattcttcaacatctgcagcttcatgaatgcaccccatacatcaaaaaactggtccgtgatggctccatgaactatgccattgcgattggcatttctcgtgaacatggcgtttatgcagaccgggaagccgccaggctgatgaaaaaagcagaagcagccgggaaaacgaaagtcacaaagagcatcgccaagccacaattcaacgcaggaaaggcgcggaagtttctggagatcatctcatcctgcaaagagaccaccagcggcgggctgatcattgaggtaccaccagcgatgcaggccgaagtgctgtcgattcttcaggaattccgctatgaaacatctgcgcctaaagatgacgagcaacccaatgatcagacctcatcatctgaagaaagtgatgccgcatga

SEQ ID NO: 251794 - DNA, 177 bp, Klebsiella pneumoniae
atgaaactgacgtttagcaattcaacgatggacgtaatcatgcacgagtgccgccgcacagggacacctgttgcaacgctcatcaataaacttgtggatgccgaggcagaacgcatccgaatcaacttgaagaaatccattgaaggagaaccaaatgacagaagcagcaaaaaataa

SEQ ID NO: 251795 - DNA, 567 bp, Klebsiella pneumoniae
atgacagaagcagcaaaaaataaaccctacgagtcaatgcctcagcctaatgaggacaaaccgatcaccattgatacgttttcatactggtcaatcccggtagcgcggatcaaatgcttcaacggagtgaaaaatgatccgttgatcatggtggtatacagccatctgcttggctggaagaaaacgactgggcagatccgtccctctcagcagtacattgcggattgttgttgcatgggcctttcaactgttcaaaagaaggtgaggctcctcgaaaaaatgggatgggtcaaagccaaaccagcttataaatcaggtagtaaggaaatcctctttacggattataccgtcaaagatcctgaggccatcctaaccgaacttaacgcttcacttattcagcagggagatgcagcggtaactattaagaaatccgaagccaaacctggagggcagacacaacgacaaacagcagccgctaatgatggtcaccacggtggacgtgtaccgcagagaatgaacgctccagcggaagcgaatgaaaacgacgatgaggattgccctttttaa

SEQ ID NO: 251796 - DNA, 438 bp, Klebsiella pneumoniae
atggaagaagcaccgcagagagccgtaaagaccgatgaagcagaaaagctgccgaaagaatgcagccagtgccacttcgtcaaaccagccgggatatacatctgcccgaaatgtggttttaaaccgctcgccggggaagacgtggaaacagataaatcccgtgggctgaaaaaggtaagcaaagcagaagtcaaatataccgctgagcagaagcaatcctggtggtctcagattcttttttaccagcgtacccgcgcagcgcagggacgcccggtcagtgatggctggtgtgcgcatacctacaaacaaaaattcgctgtatggccacgggggctacatcacaccccgcagcaaatcacaccggaagtaacgaatttcatcaaatcaaaacagatcgcctttgcgaagagaaaagagaaagaaggagatgccgcatga

SEQ ID NO: 251797 - DNA, 438 bp, Klebsiella pneumoniae
atggaagacgcgccgcagagagctgttaagaccgatgaagcggaaaagctgccgaaagaatgcagccagtgccactacgtcaaaccagccgggatttacatctgcccgaaatgtggttttaaaccgctcgccggggaagacgtggaaacagataaatcccgtgggctgaaaaaggtaagcaaagcggaagtcaaatataccgttgagcagaagcaatcctggtggtctcagattcttttttaccagcgtacccgtgcagcgcagggacgcccggtcagtgatggctggtgtgcgcatacctacaaacaaaagttttcagtatggcctcgggggttacatcacaccccgcaacagatcacgcctgaagtaacgaatttcatcaaatcaaaacagatcgcctttgcgaagagaaaagagaaagaaggagatgccgcatga

SEQ ID NO: 251798 - DNA, 276 bp, Klebsiella pneumoniae
atggccatcatcgctgtcatcaatttcaaagtgatagagcttgagcatcgatccatgctcgtcatgcatggggatcacttcgtaaaactggccttcgtaaccggtcttcagcgctttataaaaacgatcggtgtaatcgcacagcaaacgaatcagaatatcttccaggcgtttaatgtctgtaaaacttctcgcttcaaactccggcttgggcatatacagtgtgtaccagctttggttccccagacagaaatccaacaaccgttgtttatctaa

SEQ ID NO: 251799 - DNA, 423 bp, Klebsiella pneumoniae
atggcaaattttgtgatcagacttgttcaggatcttggacatgaagccgacattaccgatgagattgcaggtgtgcccatccatttcaatggaatctatgagggcagggaggctggccacaaacttcagggaagaatgaaaatcaaccgtagccggtggaagaggggtcaacatcaggtctgccgccccaatacagtttttcaggaacgcatcaaggtgaggaccactatcaaggaaaataaagtcgtagtcatgctggagcttatcgataatgttatctttaagcacagcatgaatatttttccctggaagatgttcttcacacaatcccttccagccttcagcaaggaatgcatcgtcaatggaagcggggattacatcaacaccagggataatagacggtactataaaatcggaaagtaa

SEQ ID NO: 251800 - DNA, 441 bp, Klebsiella pneumoniae
  misc_feature (367)..(376): n is a, c, g, or t
atgacattcaggttgacgcagattgatgagttgatccgggggcagcactatcaccttgatgctggtgacttatgctattttttcggcgaatataccgcccggcaacgcgcagcctacagcgaaaccaatcagctgatcatgaacctcaagaagggtaacgagcgtcgcgggttgcaggactaccactataaaggggttgcaattaatcgcgttgcacaaatgatcacccacacaattggtaatattagtgattatacgtttgtccccgtaccaccttccaaatgccggactgacgcagcttatgatgacaggatgacggccattcttcgtacggctcaggctatgaactcgtctctggatttcagannnnnnnnnngtactgcagaatcagtcaacgattgcttcccatgcttcaacagcaaaccgcccgacacccgatga

SEQ ID NO: 251801 - DNA, 264 bp, Klebsiella pneumoniae
atgcagcatcaccagcgtggcaataatggcggcaatatccacaggcaccatcacggaggcatattccgtgaatcccagatggaagaagtcagcagaaacaatattgaccaggttcgacacaatcagcggcaggctggcggtatcggcaataaaccctgcagccattacaaatgccagcgtagcgcttttactgaatcccagagccagcaacatggcaataacgatcggcgtcaggatgagagctgcaccatcattggcaaatag

SEQ ID NO: 251802 - DNA, 234 bp, Klebsiella pneumoniae
atgcaaaatccatatgtgcattatgccggcgacgggctcggtccccgcgatgtgtttgtgaatggaaacccgatcagacatgtcgtttacgcaaacgaggcaaagggtgttgtagagtttgctccgctcccgctgcgggttaaacgcaatggcgaaatttatacctgcaaactccacggtacagtgatcgttaaacctcagcagcgtattggtgggtgcaatgggcattcgtga

SEQ ID NO: 251803 - DNA, 384 bp, Klebsiella pneumoniae
atgggcattcgtgacgagctgcaaaccgaagtcgccgcggcattcgataccgacctgcaggatgccgttaaggatttcactgggtcatataccgttcggggtgcctgggacccggtgacggaaaccggcactgaaacgcaggtgacttactcggggcgtggagtgctggcgcgctataagctgcgccgtatcgatggcgttaacattctgcatggtgatgtgaagctaaccgcactggttaacgaggtgactgataagccggccgtcgggcatatcatcaccgcaccggatccggttacgggtgagcttcagcgctacgaggtcatcaccgcttctgccgactctgctggcgctgcgtactccattcaactgaggagggcgtga

SEQ ID NO: 251804 - DNA, 912 bp, Klebsiella pneumoniae
atgctgcggtttggcgcagatgtgatgctggcgcgggccgccagagaggcgggcatcggctatatacagagtacggtttcgacggcctccattgaagagatcgccgcagaaaacattccccgacactggttccagctctatgtgctgaaagaccgcgccgtcacgacagggttactgacccgggcccgggcggcgggttgtacgaccctggtggtttctgtggatgcggtgcactttggcaaccgtgaaaaggacaaacggaattaccgacggcccatggaactatctctgccgagcatgctggacattgcgatgcatcccggctgggtgtggcgagccatcaggcccgcaggcatccctggctttggcaacctgaaatcttatgttccggctgacaaacaacgaggcgcaggtggcgcgagctattttgccgaacagatggatacccacctggactgggccacactgcactggatccgcacacagtggtcaggtcccctgttaattaaaggtatcctggcgcctgaagatgcccggcgcgcttttgccgcgggcgtggatggcattgtgttatcaaaccatggcgggcgacaactggacggttcagtcagccccatggaagtactgcaggagattcgtcagtgctgcggtcctgatgctgtcatccttatcgacagtggatttcgccgtggcaccgatgtggtgaaagcactggcgctgggcgcgaatggcgtgctgattggccgacctgtgctctatggcgtcgctgcctttggtgaggcgggtgcgaaacaagcgctgaacattattttgcaggagatggatcgcacgctggcgcaactgggatgcacttccattgcccagttagggccgcatttgctgcgttttcagcctgctatggcggggttttaa

SEQ ID NO: 251805 - DNA, 372 bp, Klebsiella pneumoniae
atggcagtacttatctttccaggagcagaacgggttagtgatattgccgctattgccgatatagccccagcccatccccagggagaaatcaaaatccccccaggctttattggccaccaggtattcgctgtcgaacagccccgtcccgccgatgtcgcgcttaccgagagccacctggggcaggtaacgcccctcttcccacaggcgcagttttacatcgaaggatttatctttataggtctggtttccactgaagccggggtcattactgtatttacgggtacgcacatccgtatagcgcactgtcgtttccagccacgggaacagggccatagacaccgagtaaaaacggaacacggactattcctgtag

SEQ ID NO: 251806 - DNA, 210 bp, Klebsiella pneumoniae
atgggtgtcaaactcaccgatcaggcgataaaacgcgcactgctcaatcagttcgcgcgggtcgtccggctgagaaacgccccagtaaagcggttcttctttcaccgccagctcaaggatcaccgcctgggtgacatcggccaggcgcgagagcagacgtttaacttcatcgataccatgaaggtgaacaatatggtgaaacacgcttaa

SEQ ID NO: 251807 - DNA, 441 bp, Klebsiella pneumoniae; identical to SEQ ID NO: 235941

SEQ ID NO: 251808 - DNA, 609 bp, Klebsiella pneumoniae
  misc_feature (568)..(577): n is a, c, g, or t
gtgttactgatctttatttttaacctgccacaaattttcccgacaaccagcgggttactgtcgaatccattcgcagccggtttgctggcgctgattcttagcgaaaccgcctatattgcggaaatccatcgtggtggattgttgtcagttcagcgcgggcagtttgaagcaggacgggcgctggggctcaataatacccagatccggctaagcattattattccgcaggcattacgtatctctctaccaacgttggtgaatgaatttatcaccatcgtgaaaatgacttcgctggtgtcggttatctcgctgtcagaaatcctgatggtgggtgaacgcctttatactgacaacttcaaggtgatggagaccctgctggcggtggccttctattatgtgctgatcgttacgttgttcgagcgcctgtttggctggctggagcgccgctgggatgtgctgaatcgtaagcccgcaccgtttgatgtggcgcaggctcgcgccagcttgccagtacagcccgttgccacgcgcaaaagccacagcgcatcggcaaaaccgattttgaagnnnnnnnnnncactaagtccttcaatggcaagccggtactga

SEQ ID NO: 251809 - DNA, 309 bp, Klebsiella pneumoniae
atgggggtatttcgtagcgtgttccagcatgccaactttatcaagcatggccaggctgcgcttatacagatcattagggttatcgaggttatgcagtcgcggggccagcatcaggttttccagcactgtcttatggggaaacaggttgaagccctgaaaaaccattccaagccgggttatctgggcacggtaagggagtgcgttttcgcgctgtcctgcatgaataaatgcacgtcccagcagctcaacactaccctgatccattttttccagaccattgatcatgcggatcaacgtggtttttcctga

SEQ ID NO: 251810 - DNA, 378 bp, Klebsiella pneumoniae
gtgcgtttcaaggatcactttggccggaaccggcgcggcggcttccaccacgcggcgcaaatcttcgcgcacatagtcataatcgccggagagcactttgccgatattcacgaccatatccacttcccgagcgccgtcggcaatcagctgccgcacttcctgaaccttggtatcggtggtatgcccaccgccgggaaagccgaccggaccgccaatcatcacctctcccgtaccctgctgcggcagcaacgtactgagaaagcgcgtccagcaaggcagtacgtggacggaaataatgttgtatctggcagccagctcggcgcaggcgcgaacatccgcttcggtactggtggcctgaactgcgctcagatcaactaa

SEQ ID NO: 251811 - DNA, 363 bp, Klebsiella pneumoniae
atgcaacagcgcacagccattgcccgcgccctggccaacgacccgaaaattctgctgatggatgaacctttcggcgcactggataaccagacgcgcgtcatgatgcaggaactgttgttgtcgatatgggaatcttcccgcaaaacagtcctgtttgtgacccacgatattgatgaggccatttttatggccaataaagtggcgattttcagtgcgcgccccgggcgaatcaaaacggaagtggcggtagattttccgcacccgcgtgattataccctgaaaacatcaccagaatttatggcattgaaggcgcgtatcacggaagaaattcgtacggaaaccctgcaaaccatcgatcactaa

SEQ ID NO: 251812 - DNA, 174 bp, Klebsiella pneumoniae
atggacaaattgttaaatatgctgcgttataagagtgatgggtctgatattgacttcaaatctacccagtaccgctttaacaatggttctgagggtaatgactccaacttattgatagtgttttatgttcagataatgcccgatgactttgtcatgcagctccaccgattttga

SEQ ID NO: 251813 - DNA, 228 bp, Klebsiella pneumoniae
atgacgacgattttaattaaagatgcgctacgccagtcggttgaggctgccagcggcggattgcagacggtgatttatacggcaaaaggccagccgtcatttatgaatattattgagaaattcgacctgtcggttattgacccgaccctgagcgggacacatccggcatttattatcaatggcgtcgaagtgagccggattttggtcggcacctacaggcgtcgttaa

SEQ ID NO: 251814 - DNA, 168 bp, Klebsiella pneumoniae
atggccaccggagtctctgccgccatggcggtgtttattgccccgcaacccaatgtcactgccagccctaacatggataacgaacgcttcagcacagtcctggaaatcatgttgctcatctgccactcctgccaaattacctgtctcggggaaatgcctggccagtga

SEQ ID NO: 251815 - DNA, 345 bp, Klebsiella pneumoniae
gtggtggaaaactcgtgggtactgccggagggctttccgaaggacaacgacgggcgtatcgatattctctgcgaggcaacgtatatccgcagtacttcccaacatcgcgggctggaaatcaccacgccgggcatgacgctcacgcccaacagctatttcatcaactaccgcaacggcatcgccagtggtttcggtatcgacccgatcaatgactttgttcactccgtcagacataaagcgccgtacccggtcaccgcaatggacggactggcggtcagccggatttgtgaggcagtgcaccgcagcctggaaagcggcaaacctgaacgcccgataaagccataa

SEQ ID NO: 251816 - DNA, 414 bp, Klebsiella pneumoniae
  misc_feature (377)..(386): n is a, c, g, or t
atgcggttttttcaaggcaatcagattgccgcactcaagcttcgcttgggcgatgatcagcacgaaggcatcgatgaagacggacaaaccctgttcttccatgagctgacgcgcaacctctttgaagtggattggatttctgaggccgatttacgccgttacgacctgcatatcgttgagcattggcaggcgattaccaaacatcgtaatcaactggaaggccatgtgcttaacatgaaatacttccagtatttgtctctgttgttcactgaaatatatctggattggtacttttccaagccacaggccttgttggatggtttaaacgaagagatggccatttacagcaaagagcaaggtgcagaaacctttcagcnnnnnnnnnntttcagccatatatcgccagcgacttaa

SEQ ID NO: 251817 - DNA, 354 bp, Klebsiella pneumoniae
atggcgcttaaagctattgcgcgcaaccgcccatgccagaccaagacggtcgacttcgctcagcgcatcgattttctgcatcgtctggatacgggaggcggtcacgctttccgcctgcccggcattcgcctcttgggacgactgcagcagacgagtgaaaccctcgatcgccagatgggcggtattggcccaggagaatttggccgactgcgcgagagcatgcgctttcagctcacgataaaacgcctcatcggtcagcgccttttccatgacccggcgaatgtcctgcacatcatgcggattgaacatggcatcttcccagccaatgacttccggcaggctggtaatgtttga

SEQ ID NO: 251818 - DNA, 192 bp, Klebsiella pneumoniae; identical to SEQ ID NO: 219231

SEQ ID NO: 251819 - DNA, 420 bp, Klebsiella pneumoniae
atgcagttttacacgcccgttgagttacgtgagatcatgctgatcccgttgtacagtgaccttgtgcaatgtggttttccaagccctgcacaggattacgttgagcaacgcatcgatctgaacgagttgctcgttaaccaccccagtgcgacgtattttgtcaaagccgccggcgacagcatgaaggatgccggcataggagaaggtgatcttcttgttgtggatagctcaaggacagcagttcatggcgatatcgttatcgctgcagtggatggggaattcaccgttaagaagctgcagctgcatccgcgggttcagcttaacccaatgaaccctgcatattcgccgatagtcgtcggtagtgaggacactctcgacgtgttcggggtggttacatacatcatcaaatcagctggctga

SEQ ID NO: 251820 - DNA, 426 bp, Klebsiella pneumoniae; identical to SEQ ID NO: 231620

SEQ ID NO: 251821 - DNA, 228 bp, Klebsiella pneumoniae
atgcaaactgtggcagcattggaattaattaacgaggatagaaagcgtggcgcaatgacgtttaaagttgttggtgatggtacaggcgcactgccgaagcaaataacattggctaaaaatctcccccagtttaagtctgatttcaaagagttgtccgattattgtgcagaatcgccgatgagattctggaaggattattatcagaagcaaggcaaaaaattcccatga

SEQ ID NO: 251822 - DNA, 144 bp, Klebsiella pneumoniae
atgcataacgaacagcgcaacacggttaaatttatcgccgtatttacgcaggccacgggtcagcgttttcttaccatcagtggcaatatccgcggataccgtcatgtcagcattttcgccaatggctgcaacaagaccctgtag

SEQ ID NO: 251823 - DNA, 228 bp, Klebsiella pneumoniae
atgaacgccatgttctgcaatggtaatggcgatcgccggtacaaggtgaatgtggcccgttgcccggtctatgccgactgcctggaacaacaggtgtgggataaaaacggcgaaccggataaaaagagcgataacgatcaccccaacgatggcgccggttacttcattgtgaagcaattcccaatcgttcgacctgcattctctatttcactggacacgacattctga

SEQ ID NO: 251824 - DNA, 123 bp, Klebsiella pneumoniae
atgcccgctttcccaatccgcagaataaacaactttttgcaaccgtggcttgagtaccgtatcaaaatattctccttgctctatgattgtatattttctttttccattatcctttcgatttag

SEQ ID NO: 251825 - DNA, 291 bp, Klebsiella pneumoniae
gtgtacaccaaagcgccacttccggaaggattccgccgccgttttcgcaacacgtttaaaggcaccatcatcgctgccggcggttttacccgtgatatcgcagagcaggctctggaagatgatgagctggatctggtggcatttggtgtgccctacatcgctaacccggatctggttgaaagaatgcaaaacggctggccgctggctgaaagtgaccgcgccacctactacggcgtcagtggttccccggaaaaaggctataccgattacccggtctggcaggcgcaataa

SEQ ID NO: 251826 - DNA, 144 bp, Klebsiella pneumoniae
atgcaggcgtttcacatactgcatcacctccgccggaaccttgggggaaaaattaagcacaatctcttcttcctcaccatgccagagcggcagcgtggtgacttctacatccgcatgaatgcgctgccagtcagtcatccttaa

SEQ ID NO: 251827 - DNA, 375 bp, Klebsiella pneumoniae
gtggattttgtttcgaatctggcgaacagcgtgaagatactcaatgcatcagcggtgggtaataactacacgctcaccgccactgacggcgctgcgttttcatccatggccaacgctggcgcgatcccggtttcggcaacggcactggcggtactgaaaaagtacggcctttatccgctggtagccaatgccgccacgctgggcggcgacaaaattgtgatttccgccacccccgcaacggctgcgaccgaacgcatgttgcgtcgccagggatcctatacggatggcgcactcgccggtgtctggatggctagttttaacggtgttcgtgctgcgagcggagtatcggcgtttcgtgtggcgtattacgcataa

SEQ ID NO: 251828 - DNA, 204 bp, Klebsiella pneumoniae
atgaggcaaataggcgtcaagattggtatccaccgatttggcgaccatcatctggttttacagttcgcagtactcgacctactctatcctgtgcagaaaaaacgtttgacacacaaatcgaaggtgaccgaaccgaagttcgatttgattatctccatccagaattcactgaaagatatggtgccaatgatgctcgctgggtga

SEQ ID NO: 251829 - DNA, 132 bp, Klebsiella pneumoniae
atgcgtcgtctggcggcctttctttttctcgatgtaagaaaggcgcattggtgtccggctgttgatctcgtcaacacttgcctgcaggaaacggcggcgaaagtccggcatacgctggtaactttgaggtag

SEQ ID NO: 251830 - DNA, 387 bp, Klebsiella pneumoniae
gtggattccgctggtgcctttgaagagcaaaaaatcgatttggtggaaacctttaactacttaattggcttaaccgtaaagcatatcgatgcccagccagagcgtggttttgtaactgtgactggcaccctgcctagtggtgaaacctgtttggtcttgtggcgcgactgcgaacaatttgactacgaaggcttaaataaattgtgcgacaaactggcattaaacccagcggataacgagtttgatgtggtgtatatcaatggtgaccacaatattccctctgttctgacgcaaacggctgaggaaggtggcgaaagccgtgtattaaaactgcgccagattgagccggaatttttagagcgtatgtttgccgaggaggatgcctaa

SEQ ID NO: 251831 - DNA, 321 bp, Klebsiella pneumoniae
gtgcaagaattcccgacctcgccagaagcaactcaggccctgctgtcggcggcggttgatgtgcaatatgaggatgccgcagttgcaaaagcgacattagagaaaaccgggcagcgcctgaaaatttcctctcaacaaatgatctatcccgtggtggtggggctggcggtcaataaagacaaccctgaattattgaaggaactgaaagcatccttggcgcagagggtgagcgatggcagctaccgtgcgctgttgcagaagtacaacctgcaaatgccgggtgccgatgaaatatcgaaagcgctggcaggtagtctttga

SEQ ID NO: 251832 - DNA, 201 bp, Klebsiella pneumoniae
atggtgaatcgcgcagagcgccaggccgttagggatttcacaggggccgccgtgctgcttccatttgatatgagccgcttccagggcgacggaggtattatcatggcgcatattgaagccgcagatagcgcactcatagttataggcgcgcagcacctgctggcggaaatacgggtcacgctctttacggatctgatgtag

SEQ ID NO: 251833 - DNA, 171 bp, Klebsiella pneumoniae
atgtcctgcaccattaagccgatgtgggatatttttttgccctcctgcggcgcggcgctggcggcggggataaatcctgtcatggtggtgattaccgcagtaaccgcgacagccagccatgctttgcgaagtttggtcatattctgctcctttcattatcgtgtggtatga

SEQ ID NO: 251834 - DNA, 222 bp, Klebsiella pneumoniae
atgatactccccggcgaccgcctgctgctggcgggccatgattatctggtgaccagtgttggcaaaggggcacaacaggcgctgtttgaactcggccacctgacgctggtgtttaacggcgacctgaatgcctgccatgtcggcgcggttcatctctccggcccggtgccgaaactccgcgacctgcacggcaatctggtcattgaggagggacgcccatga

SEQ ID NO: 251835 - DNA, 183 bp, Klebsiella pneumoniae
atgtttgccctggttctcaccgtcagcatgctgacgggcggtaatcaggatgtcctgctcggcgtttacgacactgagaatgactgcaaggcagccgcagaagagcaacacgtgaaagctgaatgttatccgctgaaaggtgtactggacgagcatccggccgggttcacggtgcaaatgtag

SEQ ID NO: 251836 - DNA, 162 bp, Klebsiella pneumoniae
atgcgacctgtcggcatcctaaccaacctgaactatgaatcgctgaaggaaacactgggtatgcggatccttgaccgtctccagatggacggcggtatgtgggtgaattttgaatgggacagctatcgcaaaaacgtgcgccatttgcgtgtcgttaagtga

SEQ ID NO: 251837 - DNA, 210 bp, Klebsiella pneumoniae
atggcgaatggctttgtcccgcatcgcttcgccaaccgtatccaccccacacagccatgctaccggtaccagcgcggtatgcgcgccgttaagaatggcaaccttgcgcgctttatagggccggatatcctctacgatacgaatattcagcgggcagcgatccagccgcagcatttccgccagcccctgcggcccctggattacaaataa

SEQ ID NO: 251838 - DNA, 228 bp, Klebsiella pneumoniae
atggagttgatagcggcaatgacagcggccgcagccgggccgctgaggaacagggttggcatgctccacaaagggggttttgatgcgctaatccccacggtgaccagcgttaaggcgaccattacggtaaacaatgtgctgacattaccggcgtatatcagcccggcagccgccagcaggcaggcgccaatgacgtgccagctgcgctctttggttcgatcggaatga

SEQ ID NO: 251839 - DNA, 162 bp, Klebsiella pneumoniae
atgctgattgtaacccacgagatgaggttcgcgttcaccatttccgaccgggtggtgtttatggagcaggggcgtatcgaaattgatgcgccgccggaagaaattcgccaaatgcgcaatcaccggatcctccgctttatcgacgatatggctacggcctga

SEQ ID NO: 251840 - DNA, 1086 bp, Klebsiella pneumoniae
atggaaagtaatattttaggtcatgctcaaagagaaacttcaggagcaaccacattcgggaaatatgattttcaatatcattgggctttatgtaaaataattgaaaagcataagtctaattctgactatgcactattaattgaatatcatgaggatgttgtcatcgcagactcattatatggaagttctgcaagatttgaattcttccaagtaaagaacactggaaatccctttacttctgactccttaactaaaagagaacaaggtgctaaggggcctaagagttccattctaggtaagctattatgctcatgcataggcactagttatgaatcacgcattacagaaataggtcttgtatcttcaggtggtttctcatttgatcaaaaagataataagttaaagttagacgttataacttctggtgaccttagcatagattgtctatcgggattaacagggaaattaaaagctgaacttgggatagatatcttgccagaaaacctaaagttcattgttcctaaaataaaattagaaaatcaagaagaatttgttattggaaaatttgctgaactagtaaatgaaattttcccaaatagtcattgtaatgccgttaacatttatagagcaatcatcgatgaaattcatcgcaaaggacagaatacttacgactttactgtttgggagaaaatggtagaagacaagtctctcacgtctcataaggtaaaggatgtaatagctatcaatacaacaagcccaaaattcgaagattttgagaaagactttgaatatttggctaaaaacgatatgagatggaatacattaacttatagaaagtttaataaaaaaataaaacaacttttcttacgccgagttggacacgtttcagcttttgatatgaatataatgagaatagttcggcaggcgctcaatagcgtttcggaagaaaactatacagaaaccagagattacattgattcagttattatgaaagctaaagaactgaatattgaaagtcaaattccagaatatgacgatatactttgcgagataatttattgttttttaaaggtgatgcatgaataa

SEQ ID NO: 251841 - DNA, 327 bp, Klebsiella pneumoniae
atggataacaaaaaatttaaagacaccttgttgactatcagggatatcattcgtgaaacattactggggaacgcagcaattgttacattgctatatgcaatttcattctgtctcccggccaaagatatcgctgatgtaattttcatagcatttctggcactggttgtaatttttatatttttctggatgatgtttatcatatttgattataccgaaagcatcatcaaaaaatcatcagacttcatattcataatatggtttttttgtgtgcatgtgaatttattaataaaggtctatgagatattcacaaaaaaacctgttcactga

SEQ ID NO: 251842 - DNA, 390 bp, Klebsiella pneumoniae
atgagcaacgtaccagcagaactgaaatacagcaaagaacacgagtggctgcgtaaagaagcggaaggtacctataccgtagggatcaccgagcacgcgcaggagctgcttggcgatatggttttcgttgacctgccggaagtgggcgccaccgttgaagcgggcgccgattgcgcggttaccgaatccgtgaaggcggcctccgatatctacgcgccgattagcggtgaaatcgttgccgtcaacgaagagctgaacgactctccggaactggtcaacagcgacccgtataccgacggctggatcttcaagatcaaagccagcgacgaagcgcaggttgccgcgctgctggatgccgccgcgtatgaagctttactggaagacgaataa

SEQ ID NO: 251843 - DNA, 1092 bp, Klebsiella pneumoniae; identical to SEQ ID NO: 120880

SEQ ID NO: 251844 - DNA, 1248 bp, Klebsiella pneumoniae; identical to SEQ ID NO: 120881

SEQ ID NO: 251845 - DNA, 648 bp, Klebsiella pneumoniae; identical to SEQ ID NO: 120882

SEQ ID NO: 251846 - DNA, 2115 bp, Klebsiella pneumoniae
atgaacaatattgatgaaataatttcgctttatcataattatggtttcgattacaggcaagatttttcggatgaaaacaatttagtacttacaattactcaaggtgtttttgataatgcgatcatagtttcaactgagccctcaaatagtgacgatatcaaagaagaactgtcttctttaggttatcacgtgaaccttgagcattttacatcattaaataatattgaaaaaaatctatttaaaggttttttttctgttaaaaggactaaggcaaattttgaacgagattataatttacatatatcaaatataactaaatcctttcctacagctaatatcgcttatgaatatattcagtctccttaccataaggatggggaatatttcgaaaatgaagtggatatcttaagtgatattagatctgacataaatacaaatgggccaaaacttattcttattgaggctcctgcgggatttgggaaaacgtgcacggcgtacgaaatagggagaatcctttctgagcaagatgatgaacatcttgttttatttgctgagctttctcgtgacagacatgctaaaatattcaatcacgttctacaaagagagcttgctcgttccttccctgcagtgccccccatgttagtaaataaagaaataaagaatggaaaaatcacagtaatattagatggttttgacgagctacttaatgaaagagaagatgagaaattccaatttgaaaagtctcaagccatgctcgaaactattggaaagatgttggaaaataatgcaaagattatattaacaacaaggaagactgcaattttacaaggtgatgattttgatgagtggattggtgagaactctacaaattttgaatttatgcggtatacacttaaggagccctcagcaaaaaactggttaagtcttgaaagatattcgatgcttaacaggctaaatattaatattaaaaacctttcaaatccagttttactgacttttttgaaattcattcctagcgaacaatttaatgaagtaattagcatgccggatgagattgttcacaaatattttaatcttatattgtatcgtgaaaaagaaagacagaatttgaagcttgaggttaatgaacaatctgcgcttcttactcgattagcaagacatatgattaagcttaattataccaagacatcaaaggagtcattaataaactacatttcctatgatgagcttgaattaatcgaagagtgtcgaagtcgatatgaacatgatttgaggcctacatttgaagagatgatcgaaaaattgtcaaatcatgctttacttgataggtcaggtattgatgagaaaattgggtttgttaataactttgttttagggcattttgttggcactgatataataaatactgacgaagagtggcttgctgatagtatttttattgatgcagttattaacgcattttcctccagaaccttacaaaccagagagtttgtctggaatagattgaaagatagtctcatactactttcagatgaggaaaaggttgtatttgagcagactttacttgatagagtatcaggtggttacaagaactcacaattcaaagagataaattttgaatcaagtaatctattcattaatggtggtgtccattcatctttcttttatgattgtactttcattaactgttctattgatttggaatgttttaaaaacaacaccttcatttcttgctcattttataattgccatgtacatggtgattataactcaaatgagtttatatcacctgtcatggatgaatcatcgaggttatctttgtcatcatgtttgatgatggcctcaacgaaccagccagtggttacagaggaaaatcagttaaaagcatatgtacttgaaaaattctggcctattggtcgggaaacgattgtattcgcccacaggccgttgttcattttttacagaggaagtaattactccgcgcaagaaattagtaacactatagacgaattcaggaaggaaggcgttatcatttctgcgaaaagaaaaaactgggtaggtttagaattctctggacaaaatatgcaaatcatcaaagatattttggggcgctaa

SEQ ID NO: 251847 - DNA, 867 bp, Klebsiella pneumoniae
atgaacaataatcaattattaaaccttattgcactaatcgagagaactatagattcactcggcattatgtatagaattttctatagagaaaagtctttatactcattagagtcaaaaataaagaataatcccggcaagtataattgcatgaaaaaaatacaagatattgttggtgttcgaatagcattgtattttattgatgatattgaaatacttaaaaatgccctagtgaaaaaatttatatttattgagaaagactcacaaatagacaagccagcaatcgaaacattttctgcaatacgatgcaatttgattttcaagctaccagattcatataatttttcctcattcgttccagaaagtttactagaagttatcgatgatacatttgagttgcaaatacgaacagttctatctgaggggtggcatgaggtagatcatgatttaagatataaatgcaaaagtgactgggttggattagacaaggaaaacagagcttttaatggtgtctatgctactttagaaaccagcgaatggacactccttaaactttttgatgaactagcttatacacattataaaaataaaaatatcaaagcaatgttaataaataagtttagattaaaattaaaaccatcggcgaaagatgatgaagttatacattacttgagtaataatcctaagttgataaagccaatgtacagatatgagagggaaaagatgatcttaaatctatcacttcggccgaaattacctctaaatttagcaaatttagtttttataatgaatttggattcaataaatgatatcggtttatccgagcatatgccgtcactgttgcaaagttggtggaatagtagagcgtaa

SEQ ID NO: 251848 - DNA, 303 bp, Klebsiella pneumoniae
atgaatacatattcccatgaaagcgagcgcgtcccggtttctcttgaagcagtctggcaggcactgatcgctctcggccatcaacagctctggctccgccctcctgaagatcacgatgtaaacacctggctaattgtcacctgggacggtctgacggtggctgaacgtatcctggtctcaggcttctggtggctgaccggggatgccagcgccatctacactaatcctgagaggattgttccgggcgatctggaagaactcacatggcagtcagtgcagcggcgaatgaaggacggattctga

SEQ ID NO: 251849 - DNA, 390 bp, Klebsiella pneumoniae
atgcaccactattacgaccaccggatgcagcagtaccggcagcagacgctgacccaggaggagatgctcgggcgctatatcagtcatatcccggcgaagcactttaagatggtgcgctactacggatttttatccaaccggaaacggggcgagctgctgccgaaggtgtatgaagccttggagatggaagagcggaaaaaaccggagcagccgggcttcgctgcacttatgaaggcgttcctgcgcacggacccgtacaaatgcatcctgtgcggcaaccgcctgcgttttgtcagcgcgcaggccggcaggaatgcgtcggaactcgtggccgaaaggctgcataacattgaccgtaaacgatggcttcaggcacaggccgcaggataa

SEQ ID NO: 251850 - DNA, 1266 bp, Klebsiella pneumoniae
atggctcgtattacgaaagaacagcaagcagcgacggattttgtggatcaactctgttttgatcaactggtcgttcattgcgaaatgactgttgctgagcggcaacagacaaaagatattgtcacgcgtgtaagtcagatggctgaagaacgctataccggtgctaatgcagaagccatcaaacatatggcttactgctttctggaagtccacctggcgaatacgcgtgatgagctgagagaagcgattcctgtggatgttgaagcactggatcttcctgaagaaaccatcgcagctgttgaccgctataataccaattaccaattggcgtttatgcttgttgtcgtcaagaatgcgacaggttttgatgctcgttatgcgctggaaatcgctgacaccctaaagggagagtttgctggctactcggcgctggttcggcgcgatctggtgaaacgctgtctggcctgggagtttgtggatgcaccactgaaggcctactgctggttgacggtcacaggggtactgccagcaagaaagaatggtcctgaacggattaacaatcccgttacgccggaatttgttacccgcctgaccttactggccagtcatgaaatggtaatgcacaatctgaaggtaacgctcgggaaaacgagtgctgcatctgtgctggttcgtaataatgaattgaaattagccgaaaattatattgatagcttacttgaggtcgaacgctcattcaatgaagccagtctcaggccaagtttgagaggcgtgccgcagatcactgccggtgatttcaataatcagagacgggtacagaagttcttcagtaactggggcgaccgcaagacaagattacgtatgcacacaggaaccctggccagctggccagggttcctcggcgctgcgatgcttgaaatccgcctgaccgacgaatacctttctgcagcgcaggaaaaatttcgccaaggcatccacagtgttaccatggctgacctgaaggttccgccgattttcaatgcctttgataatcagggcaccctgagcgcagaagtgcagggaaaacttgccacatttggtctgcagattaacgcagacactctgtaccgcacgcatgctatgatcggtaagacgaccctgaagatactttgcagttactgtcagctgacacgtacaaaaggtgtggtcatgtcagccatcgaagatgacatttggtatatgtctctctttattcatggcgacaaggtggctgctcagcagctctag

SEQ ID NO: 251851 - DNA, 417 bp, Klebsiella pneumoniae
gtgattaaaacctatatgctggacactaacatttgctcgttcatcatgcgtgagcagccggaagctgtcattaaacgactggaacaggcagtgctgcgcaatcaccgcattgtggtttcggccatcacttatgctgagatgcgtttcggtgcaatcggaaagaaggcatcccctcgccacggcctgcttgtcgaagctttctgcgcccgtctcgatgcaatcctcgcctgggaccgcgcagcggtggacgcaaccacggagattaaggctgcgttgactgcagccggtacacctatcggtcccaacgacacagcgattgccgggcatgctatcgccgctggcgccgtgctggtgacgaacaatgtgcgtgagtttgaacgtgtgcccggcttggtcctggaagactgggctagctga

SEQ ID NO: 251852 - DNA, 264 bp, Klebsiella pneumoniae
atgatatttggaatcgttgtcggcgtactgttagctctaatgtttggccgggtcttgctcccggccttaaccgccatcgcctttgtgataggcataccgatatacttctctttccgctttatctgtgcctttatctgggctctggtgacgcaaaacagaagacgtagtgccatgacaatagagacacaaaagacgacaaagcctgaaacactaccggataacgtaatcaactttagccgcgaaaaagagaaaagagttaagtag

SEQ ID NO: 251853 - DNA, 606 bp, Klebsiella pneumoniae
atgaatgctcttgatcttaaagccgctatcaaagtaaagcgctatacctcctggcgtggcgaacgtgggtgtgctgctgacaacctccagcaacgtaacttcaaagccagccggcccaacgaaaaatggttcacagatgtcaccgagttcgccgtcaacggccgcaaactctatctttctccgatcatcgatctcttcaacaacgaagtcatttcctacagtatctcagaacgcccgacaatgccgatgattgacgacatgttgattaaggcatttgccagaatggacgcaaacagcaaaccagtacttcattcagatcagggctggcagtaccggcatcggtggtatcagtatcagttgcgggagtttggggttctgcaaagcatgtcccgcaaaggaaactgtctggataatgcctgtgcggaatgttttttcgggacgttaaaatcagaatgcttttacacccgtaaattcaacgatgtcgacgaacttaagaccgttcttgaagattacattcattattacaacacccgacgaatcagccttaaatttcatgggctcagcccggttgaatatcgcctgaaaacctatccgctacgaatttga

SEQ ID NO: 251854 - DNA, 510 bp, Klebsiella pneumoniae
atgcccggacgtaaatataccctcgaagaacgccttgaagtcgttatgcactatcttgctagcgatgaaggctatcggttaacttcagcccgtttcaacattcctagaacccaggtgagaatctgggttgcagcctatgatgcttatggtgaagagggactaaaacccagagataagggcgtatccatcgatcctgaaatcagaattgaagctgtgaaagcggtgctatccggtcagatatctcagacacaggccgcgactaaattcaatgttgcaggtgcgtcatctgtcgccaaatggctaaaagtgtacaaagagcagggtgaagaagggcttcgctcactcaaggtaggcacaaaaagggtatcttacatggctgaacaacctgaacttattgaagccgcagaggaacgatcaaaagagcagcgaattcttgaactggaaaggaaggtcaaacgtcttgaattacggatactttatcttcaaaagctgaaagccttagttcggtaa

SEQ ID NO: 251855 - DNA, 186 bp, Klebsiella pneumoniae
atgccatacagaaccatccagcccaaccctatttgctacaatatgaatatggtctttatctgtatcgttatgacgcacacaaatatattgatgtttttctatatcgatattcatttctttcaaatagtcttttgctatctcttgccatttttcatctgtgagcttctcatcttttggaagagataa

SEQ ID NO: 251856 - DNA, 657 bp, Klebsiella pneumoniae
atgacctatgttaaagaaattgatgacccattgggcactggcaagcagaaagcaattagtttttccgcgaaatacagcatgccgtctttttggggagtggcaaagggacaatcgacagtcaaattacagtatggtaaaggggttattgctccttatctgaacaccagtcgtattaccgtccttagcgaagagggcgattgttcaatgcgtttttccaccgacggaaacttgacgttatttgatgattttgccgtctcgccggctttcatctatgaatataccaagcgtgaaaaaactgctgaccgaaccacctttatacctgatacaggttattcagggtgggacatgacctatggttccgcaaatgaaaccgggatctttaccggcgtaaacgttaaacaaaatattcatcaccaaaatctctccatgttgtatgaagtcatggtgaataacactatcaataaaaatggcgtcgaaggtgccagcggcgtcggctacaaaattgccgccggcccggccctgcaactggatgttttaccgtatgtcgcgccgattctcagtttgacggttacctacgcaggcggggacaaagaggtcacgttattgccggaagactcggagtggcgagtcgggtatcgaatggaagtctggttctga

SEQ ID NO: 251857 - DNA, 195 bp, Klebsiella pneumoniae
atggccaagcaatgcaagccacgaatacagccgacgctggcggggtatctgacgggttgtattgtgcagcttgctcctgagctgaatgatacccactgtctcctgttgtctttccagacgaattttttcttcaagctgaaggattttctccagaatcgtttcccggattgcaacctgttcttcaggctcgcatga

SEQ ID NO: 251858 - DNA, 573 bp, Klebsiella pneumoniae
gtgaaaccgcgcattgacgcactgccgctgccccacggctaccgtatcgaatggggcggcgatgccgagaactccagtgaggcgcagcaggggctgtttacaaccctgccgcttggctatctggtgatgtttatcataacggtgctgatgttcagttcgctgaaaaacgccgtcgccatctggctgaccgttccgctggcgctgatcggggtcacacccggctttctgcttaccggcatccccttcggctttatggccttaatcggcttgctcagcctgagcggtatgctgatccgtaacggcattgtgctggtagaagagatagagcaacaaaaacaggagaaagatcaacgacaagctattattgatgcggcaacctctcgtctgcggccgatcctgctgaccgccttcaccaccgtacttggcctggccccgctgctgcgcgatgtctttttccagagtatggcggtggtgatcatgttcggcctcgcctttgccaccgtgctgacgctgctggttctgccggttatttacgcctgctttcaccataaggatatgacgcctcaacgatga

SEQ ID NO: 251859 - DNA, 345 bp, Klebsiella pneumoniae
  misc_feature (311)..(320): n is a, c, g, or t
gtgcgtaatgactggcagaaccgcagcaaagtgatccgcccgcagtattccccggcgctgggacgcgagctgggggtggataaacaggatattgataacgcgctggagatgaatttctccgggagtcgcgccgggttatatcgtgaaggggccgatctgctgccagtgatcgtccggccgccggaagcagaacgtcaggatgccaaccatctgaataatgtgctggtctggagccagagtcgccagcaatatatcccgctgagtaacgtcatcaatggtttcgccctggagtgggaagatccgttgatccnnnnnnnnnntcgggtgatattctcgcgcgggtga

SEQ ID NO: 251860 - DNA, 345 bp, Klebsiella pneumoniae
atggaccatcttaacataatgaccagcaccgtcagcaccaatataggcgacacaaggctcgccatcttccgcacgggcagcgatctgctcgagaattggagccacgagctcataagcttctttctgtccaccaggcatgatagagggccccttcaacgcaccctcttccccaccagagacacctgtgccgatgaagttaaagccttcagcagacaattcacgattgcgtcgaattgtgtcctggaagaaggtgttaccgccatcaataatgatatcgcctttatccagatagggcttaagagaatcgatagcgctatcagtgcctgcaccggctttcaccattag

SEQ ID NO: 251861 - DNA, 384 bp, Klebsiella pneumoniae
  misc_feature (337)..(346): n is a, c, g, or t
ttgcccaggtcgctcttaatcatcggttcaggggcgattggcgtcgagttcgccagcctttataacgatctgggctgtaaagtgacgctggtcgagctagcgtcgcagattttgccagtggaagatgccgaggtgtctgcagcagtgcgtaagtcattcgaaaaacgcggtattcagatccatacccagaccctggtgacgcaagtacagctcaccgatatcggggtgcgctgcacactgaaaaacaccggcggcgaatattctcaggaagtcgaacgtgtgctgctggcggttggcgtacagccgaatattgaagatctggggctggaagcactgnnnnnnnnnnttcgtgcctggcgcacaaggccagccacgaaggcgtga

SEQ ID NO: 251862 - DNA, 423 bp, Klebsiella pneumoniae
gtgatctgcgttgagacactggccggtgtcgaaggtgcccaccctctcgatcgcgactatgtgcccggttgcacttatgcccggccccaggttgccagtctgggcctgacggaatcgacggccctggccaggggacggcccgtcaggatcggtaagttctcttatcagagcaatggtaaggcgctggccagcggcgagacagagggttttgtgaagacgattttcgatgctgaaaccggcgagttgctgggcgcgcatatggttggcgcacaggtcacggaacagatccagggctttggcatcgcccgtcacctggaggccacagacgaaagtctcctgtcgatgatctttgcgcatccgacactttccgaagcgatgcatgaatcaatcctcgcggcctgcgaccaaccgttgcatcaataa

SEQ ID NO: 251863 - DNA, 582 bp, Klebsiella pneumoniae
gtgtataagagacagctatggttttttgggctgcatggccacgctatcaccctcggtatcgtagcgccgatctggtttgccatggatgcccagcagcttgctgcgtatgctgcaggcgtcgacttacccaacatcaccggctttgcgttctttatgacttatggcgctgctggagatttattgccgctggctataatgctcgcttttttcgcgaagagcgcacgctataaaacgctcggtaagatcgccttgccgccagctatcttcaccattggcgaaccgatggcttatggcgtgccgctggtaatgaattttactctggcgattccttatatttttatcaatggcatcatgctcggcattgcatggtatctaacggtcattggcgtattgcctcgcgtcgctggggtgagtaccccggccggcatgccgatcattatttctggttttatgcaggggagctggaaaattgccgctttccaatttataggactttttgcgcgatttgcaggatggtatttcttcttcaagactgccgatcttgtcgcttgccgggaagaaaatcagacggataccatttga

SEQ ID NO: 251864 - DNA, 459 bp, Klebsiella pneumoniae
atggcgcaagcgctaaaagtggccaaagagtatccagactcaaaaattatcgttaccggcggcgtaccccgcaataatcgtgttgaagcggaagtgatgtggaaatactttaccgaaaatggaatcgctccatcacgcatcatacctgaggtgctctcttacgacaccgtacagaacgctaattacacagcgatgatcatgcgtaatttcaatatacgggaggcgacgatcgtgacccgagcaggtcatatccgcagaggtacggtactaatgaataatgcgctaaaactgtatgttccatggcaggtaaatttgacatcaatggcatggaaagacagtaatttcgccacagaggacgacgcaaaaaaaccgccaaaactcggtagcggcgattaccgctccacctatcgggatgtattacggctttaccgtcaggaatatccaggcttcgccatgtga

SEQ ID NO: 251865 - DNA, 432 bp, Klebsiella pneumoniae; identical to SEQ ID NO: 139525

SEQ ID NO: 251866 - DNA, 183 bp, Klebsiella pneumoniae
atgcgaatccccatagtgctcgaatctgggggtatgcaattgagacaatggttcaaggtgctcaaacagttctttcgcgcggtcaaaatcaccctgttccaaaagcaggtcaacaacttcatagcccgcattgggaaagtcctggacgaaagagatcgccgcatcaatatcgccaacttttaa

SEQ ID NO: 251867 - DNA, 183 bp, Klebsiella pneumoniae
atggctcgggacggggtagaaaagggtatgctgaccgactcggtaaaaaatattactggatcgccttacatcgactactgggcattctggccagtaatgttcccgcactggaagacccatattccgactacgaacctacaagtgatcatctatggtcagtcgacgtccgtaaagtcgacctga

SEQ ID NO: 251868 - DNA, 195 bp, Klebsiella pneumoniae
gtggatgcttatcgtcagcagcagatacggcgcgaaaaatcgcgccagaccattcagttcagcagtgtggattacaccggcatgttggtggtgaacgatccagcgttatttttgcagcgtctggcgtcgggatacggtaaaagccgggcttttggctgcggaatgatgatgattaaacccggggatggcgagtga

SEQ ID NO: 251869 - DNA, 240 bp, Klebsiella pneumoniae
atgtaccgtttcccccatgcgggtgcgccagaccggccggccgctaatatggggcgcctgaatcagcatgccggtatcaagcaaaccctccagcacctcttcagaatcgtcatcaggcgctatccgagcaataatctccagcaactcctcaagattaaaaaaaccgccggtatcaccccataccagcagcgcattttcctgctcttccagcgcatccagcacgcgatgcagcagagatag

SEQ ID NO: 251870 - DNA, 132 bp, Klebsiella pneumoniae
atgaacattgacccgatcgcgccatggcgcagcgcgaagcgtatcgacgaaagcattactgtcggcgtcgtgaaaacagtaatgcagctgccagtcagcctgccgctgttccagttccggaatatgcgataa

SEQ ID NO: 251871 - DNA, 159 bp, Klebsiella pneumoniae
atgatcgtggaggttgtaaagaagcgtttgtccttcgttatcagtgctgtggatatcaacgcccgcgttaatgaggagttccgcacaatctatgtcatagtgctgccagtgaagacaggactggcctttattatttttgtggtgaacgttaatacctga

SEQ ID NO: 251872 - DNA, 174 bp, Klebsiella pneumoniae
atggtattgtccaaagtcatgtgttcggtgaccgccagttggccggtccgtttgacgatttccagtggcgtagcaacggaggacgaagagggcgcggcagttactgttgtcgatatcggctgcaagggcaccaacgaggctgcttttcgccgttctgcaagcgccagatgttga

SEQ ID NO: 251873 - DNA, 171 bp, Klebsiella pneumoniae
atggataacaatcagtttgatgccaccacatttattcccgtgattggactgctgacagggggttcacagacgcaggccaaaacgctggaaatcgaatttaaaggcgaaacggtcagcaagtggacgttctctgaaaacaacagcaagatgaaaaccggtcttattcaataa

SEQ ID NO: 251874 - DNA, 231 bp, Klebsiella pneumoniae
atggcttccagaatcagcagcacctcgcctgcggccaccgtctggccttcgctggccagcaccttccagatggtgcccgccagcggggcggtcaccggggtgccggcgccggccggggccggggcggcagcgggcgcgctggctaccggcgcagtggcgctgagctggctgacgtcgccgccgtcgctgaccttgaccacaaaggctttgccttccacttccacggtgtag

SEQ ID NO: 251875 - DNA, 228 bp, Klebsiella pneumoniae
atgggctgtgaccattgcagttccagcgcgttactcatatgccccagccgcagggcccgtatctgttccagcaggttattgtgcattatggtttcctcagtggtagtacccggcaccgcgtacattgctgtgctcgacaggggattcatccggcgcttcgtctttcagccggtcccggtggttggtcagcagattcaggatcacctgccgccatggtcgctccagtaa

SEQ ID NO: 251876 - DNA, 2157 bp, Klebsiella pneumoniae
atgccctcagtaactaataagtctcaagtaaaagaatcagatgattttgatctaggtcgtttgattggtgagttgattgatcatagaaagctgattatttcaattacagctttttttactgttattgctttaatttatgcattatttgcaacacctatatatcaagctgatgcattgattcaggttgaacaaaagcaagcgaatgcaatcttaggtaatttaagtcaaatgttaccggatagccagccacagtccgcaccagagatagctttgttacaatcgagaatgatattaggaaaaactgtagatgatctaaatttacaagctaaagtcgagcaaaaatattttcctttattcggtaaggggttagcacggctattgggtaagaagaagaatggaatacatatatcacacttgtatgttgcaagtgatcccgagcaagatgctgaattttcattaacaatcaaggataattctcactacgtaattaccaagggggattattcgacagttgggactgtaggttctctacttgatactgggaaattttcaattaaagttgatcagattgattcggagccagggaccgaatttatggtctcatatattccaaaactgaaagcaattagtgatattcaagatgttttgaatatcactgatcagggtaaagatacaggaatattaacattatctttaactggagaagacacaaatttaattaagaacatattagacagcattagtagcaattatcttgcgcaaaatatttcaaggcaggcagctcaggacgagaaaagtttagaatttcttaatcttcagttgcccaaagtgagaagtgaacttgatgcgtctgaagatagattaaatgattatcgtcggcaaagtgattctgttgacctttcgttagaagcaaaagctgttcttgaccaaattgtaaatgtagataatcagttaaatgaattaactttcagggaatcagaaatatcgcaactttatacaaaagagcatccaacctataaggcactgctagagaaaaaaaagacacttcaagatgaaaaatcaaaactgaataagcgtgtttctgctatgcctgaaactcaacaggagatattaaggcttagtcgagatgtggaatcaggacgagcagtatacatgcaattgcttaataggcagcaagagctaaatattgcaaagtcaagtgcaattggtaacgttagaattatcgataatgcagttacaaagactaaggcagtcaaacctaagaaagccttgattgtattaatgggttttattttaggcttagtagtttcaattggtcttgttctgttgcaaatattcctgcgtcgaggtatagagtcaccagaacaactagaagaattagggattaatgtttatgcaagtgttcctgtctcagaaacatttgtaaatcaaaaaaatcctaaatctaaaaatcagaaagaacaagagtatagtagtttcttggcagttgataatcctgcagatctagctgtcgaagctattagaggtttaagaacaagtctccattttgcaatgatggaagcaagaaataatgttttaatgatctctggagcaagtcctaatgctggtaagacatttataagtacaaatttagcagcagtaactgctcaaacaggtaaaaaagtattatttatagatgctgatatgcggaaaggctatacccataagctcttcaatacagataatgataatggattatctgatatattggcagggaagtcggacattaatactgcattgaaaagaataagcacaattggttttgattttatctccagaggaatggtgccaccaaatcctgcggaattattaatgcatcgtcgctttggcgaagttttaaaatgggctggtgaaaattatgaccttgttataattgatacaccgccaatacttgctgttacagatgcggctataattggtaattacgttggtacaaccttattagtatcgcgctttgaattaaacactgctaaagaaatagaagttagtattaaacgtttcgagcaaagtggcgttacagtgaaaggttgcattctaaatggcgtcgttaaaaaagcaagtagctattatagctatggttataaccactatggatattcttatagtgaaaaaaaataa

SEQ ID NO: 251877 - DNA, 1056 bp, Klebsiella pneumoniae
atgataacaaagagatacggcgatatcgctgcagggcatgattctaattccttcgatctgataagacatgccgcagcattctttgttttatttagccatcatttcgctttctatggactggaagagcctcttgtatttggcgttacaaagcttggcacttttgctgtgatagtatttttttctatttctggatatctcataacgcaaagttatataagaacagaaaggctcgcttcatatgtaaaaaaaagagcactgcgtatattcccagctcttattatatgctcatttgtgatgacgatattcttttgcggcatctttggtaaactgcctgccatcgaatatttaacgtcatttgaagccctgaagaacctgttgatgttcccactatttggcgcccatgcaacacctgcacaaattaacttttttggagaaaactttatccatgaaggagcattaaacggcagcctttggacgcttttctttgagctatttgattatgctcttgttgttttgtttattaataacaaaaaattcccattgcttggaatggtaattttactccttggaagcacctctgttcaggttatgattttaaatggcatgcatggtggttactatattgacaggtcaacaatattaacaataccattttctattggagctattttgcttcttacaaaaacatactggtttagaaaatggatttctgtcgccctaattgcaacgggcatcattctcattctgctatcaaacaaagctgatgagagaagtatcttgttttttattgccattcctattctcacgataattattgggacgcatgtaaaagaatcaataataaaaggaaggtttgacatatcttatggaatatacatatacgcatatcctgtgcagcaaatagtggtaaacaaaactaaccttgggttttggccatcaatgatagtgtcagccatcattaccatatcacttgcggcaagttcttgggtttttgttgaaagtaaattcttgaaaagaaaatcaagacttcatgacaacgaccgggccagggcataa

SEQ ID NO: 251878 - DNA, 1617 bp, Klebsiella pneumoniae
atgggaatggcggctccatctatctcaaaagatattctctcagatagaaagagtggtgtaatgctggatgtttcggaagcgatagtatataagacacctgaaatgtttggcgctgtcggagatggtatcaatgacgatagccaatatatacaaatggcatctgattggattactagccaatcatttagaaagttagtttttaaccctggcaaaatatatagaattacacagacaataaaatttgaatttaaaaaagatgtttttggatgttgtattgatatgcagggagccataaagccggaccctgatattggtgatggtttcattcttagcggggtagttggcggaactctaaatctatccgtaattggtgatggcgttaacgactataaagatataccagattactcaaaaccatcaccagaggggtgccaacaggcgttcgtaattgactccagcagggcgacaagaatatcatgcttcggttatggatataaaggtcgggttttaaggacgcagtcaactgggagtattaaaacttcattccttgagataagcatttggaccggtgataaacaactaatttataaaaatggtatatgcggtcaagctgcttaccttgaaggaggaaaggatgcatttggttttattacaaacgcctacacaaactgggatgcatatggaagcgtgctatataagctaaccgacctaacaataggtcattgggagtatggtgctggagaaataaacccagcgttaagcataatagggtgccagactgttcatgtcgttgtcctttctggaggggtttcatctggcaagaatgccgcccttagaatatctcatgccgatgatcaaaaaagcatagctataaatatacagaggctgtttcttaccaatggcgagaacaaccttgagatacatggggctggaaacgatgataaagacaggagagttgtttcaatagacagcttttatagctacaaatcgtcaaagtcatcgctattaataaatggtgtcagcaatattctggttaatgatatatactgcgatgatactgatactggtgttaccatgaatggattctgtgaaaacataaaaatatgtgggtacataaagaacccgaggaaaaatggaatactatcaggatctcgttcttatataagcaactctatattctcatgtaaaataatagttccagcaaaaaatgctatatgtattgacctgtctgaatcaatgcgggctcacgctgccatatcagactctatgctgtctggggcgggatttgcattttcattagggaaaggcaatgaaattgatgtcatcggtggatcagtaaagtgcgctagattttttcatggagagatgccaaaaaacatactcaatgtaagtggaatttcattgtcaagtaatggtataagtgagtctgcgagtggtgtaggtaccattatagttaatcacaacctaacaacaaaaccaagccatataaacataactccgctttcggataatagtggatatttcgtttccgatataaatgaagaacatttcattgttaattttaaagatgcagggaataataaaccattcttgattatgtgggaatgcagggtctaa

SEQ ID NO: 251879 - DNA, 1032 bp, Klebsiella pneumoniae
atgttgaacagtaagcaagcatggaaagtggttatattttacttttcaatactatttattttaataatggcatatattgcaggcagtagaaaggttggtctcgacaacgattctttaatgtacgcatatatagtaaaagatagcctttccggaaatgtcacatcgtttttaagtaaggagcctggtttttggttaatcgtatcaattaacaagcttatagatggcgatgttgggacattctttaccatttacgcgttttttgctttgtgtataaaggtttgggggatagcgaaagtttctccatcatttttctcaagcataatcttatatgttggattttattttatcgtgcatgaaatgatgcagataaggatagggttggcaagtggatttatattctttacattttactttgttgttgtcagtgagagattaaagtcatttttcgttagcttgctatcaataatgtttcactattctacagtgatagctctatttatgctttttttaaagccagacaaaagaattggtaagttatatatcattttgcctgttgctggactgattgttggaactctcataaagaatgatcaatctattgctcaggcctttttccagatcatgcctgaatttttaagttacaaggcatctctatattttgacctggcctcatcaggaagacttgacgaggttaagccaatagcattcggctttgggagtattatatattttgccctgatgcttgttatgtacttcagaattaagaaaaaggatctttctgatttatactacaggtcattgaatacacttttaaaaataacatctatacaactattccttggatttatgttgatgttcaacgtagagttctccaacaggatttatacctatcttggcgttcttactttcacaatactgcctgcatttcttgtgaaagagtttaaattcaaataccaggcatttgtttacgttgcaatatttatatatgcagccaggcagttgtatacgagctatactggtgtttttggttga

SEQ ID NO: 251880 - DNA, 2301 bp, Klebsiella pneumoniae
atgactgtatcatctgaagtaaactacatcgagtataacggagatggctctactaccaccttcgccattccgttctactttatcctgaatacagatatttctgtgcaaatagccgatgctgatgcaaacatcacgaatcttacgtatggtatcgattacaccatctctggcgcagggaatgcttctggcgggagtggtacgcttaacacggcatatgcgagcggatacaccattctattttttcgcaaccctcctgcaactcaggagaccgcttattatgagaatggtaaattcccggctaagtctcacgagaaagctttggataagctcactatgctggtgcaaggcctgataacaaatcttggccttgcactacgcaagccttcattcttggcgaattattatgatgcgctgaataacagaatccgtaatctgcgtgacccggaaaaggatcatgatgcggcgacgaaaaattatgtcgactcagctgatagtaatttagagcagcaaataacgggtaattttaatcgttcgttaagggttccagaagcatccatatctcaattaccatcagtccatgatagggcctggatggggctcgggttcgatggctcaggaaaccctaaactgcaggatcctgcaggtacaggactatggggatatgtaccggcaggagggtcatttgagattgggggtacattatctcagcgttttgaggttcttctgtgggaatccactggtgaatactggcgctgggatgggccaatgccaaaaatcgttttacctggaagcacaccgacgactgctggaggaacagggaaggggaaatgggtcgacgttaccgatgccgcgcttcgctcagacctcggttcaagcaaactaccaggcgctgatatcgtaatgacttcgctcggagtgacagtagaaaaatctacgatacaggttgatacgattgcaagcctgaaaaatttatttcctcaaggtagcgatcgcgtttatacaaaaggcgcgttttctgcgggtgatggtggcgcggattcttgggtgtttattttaacagaccagagcgcaaacgtagctgcttaccctaagctttttatcccccccgcttctgatcccacaggggcgtcaggtgcctggtttattaatacaggaaaagccattaacgcagtatcatttgggcttggctgtacaacagatgtgactataaacgacgccattgtaaatcagttaatcgcgtataataaaggtaaaaacgatattattttgcccgctaaaactatatttagcaaacaagttgttggagaatattcaccaaacttcaagggggtaaaaggcgcaacggctaatgaaacaggaggaaatggaacggtttttatattcaaaaatgctgattcaactgactcctgcatgaagttccagagagcaagcggttttataactgggtttttcatggaaggttttacgatggttggctacgatgcatttaatggcgtaacaattgatacttttggtccaagaaccaaccggaaaggattggatttgaaatatataggcggtaagattaaagtagatgaaatattcattatcggaatatcagaagcacttcatgtagaccgtctacaagatggcaaattatcaggtgttagaatgctatattgttctaacgcagacggtacagttcctgccgcatggattagcacatccgatgggacaaatacgaactatatgcattttgaagacatgcatgtggaattcagtccattcatgttgtttcttgggtattctaggcataataaattcaaccattgtaagttcgaatcacaacgtaaggttgacgccacacattattcagtgtatatcgatgcatcggcgtttgaaaatgcttttgatagtacgatgttcgtcactacggcaacaacattgcggcatttcatgctagaccgtgggacaaatataacctcggatatggcgtatcctggtatccgctggtattacgggaatacggttagtgttaaccctaataacactatatctaactgtaaatttacaagggtactgccggctgacggatcggacccacttgaataccctattgttctcggaaattatcagaaattctcagggcgggttaacgtagacaaaacggtaacgtacgcaggcggtacggtagaccttgtaaactctggtttgatttcattaggtaacaatgcgatcatcgacagcttaaccttctcgacaaatacaaatccaaagtcgctggtccggttctataatatagaggaacagaggctaacttaa

SEQ ID NO: 251881 - DNA, 873 bp, Klebsiella pneumoniae
atgacgccagacggtattgattctgttcctgatgatgtgattgctaagtatatcgcagataaaaacgtcactgtgaatgagcgaagcattgcgaatgctcgttctgaactaggtgataagctgcgtggatatattctcgatcgcgtcatggtagcgatgacggaaccaacggcaaggacgcgagcgctgatgaagcaaggaacacaacccggaactgttcagggtgagctcattcgctttattggacaatataagtcattcaccgcctctttcatgcagcaggcgctgggtcgtgaggtatttgggagaggatatacccctgcaccattgggacaaagccggtggggtagcgtgtcgaatgcgctatttaaaagtggcaaaggtgaaatggtaggcctggcgcaggttgcattatggatgacttttttcggctatctttcgatgcagaccaagctcatgctcaaaggccagacgcctcggccggcagatgcgaaaacgtttctcgctgccgcggcacaaggtggcggcttaggtatcttcggtgacttcttatttggtgaggctaaccggttcggaaacggtccaattacttctttggctgggccagtggcaggatctgctgaccagttagttacgctgtttcagaaggccagatctggagatgcaaaagccggtgacttctttagatttactgtagaccatacgcctttcataaacctgttctggtcgcgtccgatactaaattacttgttccttaatcagttgcaggagtcgctatcacctggctctcttcatcgatacgagcagaacattagaaagaatcagggtaatgacttcctgatccctccttcacaattcatgctcggacgttaa

SEQ ID NO: 251882 - DNA, 282 bp, Klebsiella pneumoniae
atgctgaaactcggcggtgccatgatctcctcgtttaacgatttggccagcaacgcccttgagttgcgctatcagggaaagaacttcatgtcagccctgacggaatcaattcaggggagactcaagcgctattcgacggaagagcagaaagagattcttagttcacttggcgtttacgctgactccatgcgtgatgagatactgcagcgcttttccggtgatgtaacgttgccaggaaaggttgcaagattgcaacgccagttttccgtcttaacgggctga

SEQ ID NO: 251883 - DNA, 204 bp, Klebsiella pneumoniae
atgcgcgagctacgcgatgactctctcattgacatgaagttcatgatggaggatgctggatttaccgcgaagtatttttattcgcaaattaatgccgggaaactcccaaagccgatcaaacttggtcgcacatccagatggatgtatgtcgactaccagtcatggaagctaagccacctcaccaacctgaaaaaagcatcgtga

SEQ ID NO: 251884 - DNA, 612 bp, Klebsiella pneumoniae
gtgaccaaaaaaattcaacatccacatcacttctggcttcctttactctgcctctttacaggcattcggccgaacgaggcatgtttactgtatgtcgatgacatcgagctggtgggaaaggtgtggtgtatccgcattgataagcgttttgatgaacaaaagttaaaaacgcccaacgccttacgctatatccctctacataagcgtttactggaaattggctttgtgaaatatgtacatgatctccgctctttggttggtggaaacagccgattattcccagagattaaggcgattaaaggctaccactcacataaacccggagagtggtttaaccgtaacattcgcgacaagcagtcactagctccaagctcaactctttatactttcagacacgcctttcgcgataaattagtgatgttgaacgcaactgatgaatacttaaaccgtctaatggggcatcaaggtagcccctacggaagctccctgttaagtgatgttacccgtatgaaggggctcattgataagattgagtttgcaagcattgttcaaaacgttaaaccttatgcaagcctacaagacttccgtagcgtagcagggagggcgaaatga

SEQ ID NO: 251885 - DNA, 2373 bp, Klebsiella pneumoniae
atggcagagtatgaacatttgcgtttggttaaaatgccacagcaattcgaaagacggaaaaaacccggatttggttccgcacctagccgtaacaatcagcaaaggattacacatggtacttcccttataactcagctagattctactgttgcttatatccgaagcaagcgaagacctggtaatattgatccctcactaatcatgaaagtcaagtatgagggttcagcagccgatgaagactgggaaagacttggattacatgtactttcacatgatgaagacaaaactttagtgttattttcatcaaacgactctctattatctcttaaagaaagaataaacgcatactcaggccccattcctgccaatcagaggaatccagcttacaataattttgtaggcaacttaacatctattgaacaaattactgcaacagatagaatcggaataagactcagggaagaggggttcgtttctttagatcactttgatgaaaacgaaagctatattattgacatcgaactttgggaatttggtggcagaatagagagagaggcaaaagttgaatcaataaaaaacatagccgatgcaaatggaggtgagtttattgattcttacatcggcccgtcaatttcgcttttaagaataaaatgtgacattgaatccttaaaagaaatactagaaatacctgaagtgtacacaattgacttccctccttcccctgatactgaaaccagtacatatctagacatcgatatagaaaatgcccctgaagttaatgatgcatatgaagacttgcccataataggagtaatagatagtggtgtaaacaatcacccgttcctagatggtgcattaattggcggaatatctttcttatcagatgatggcgaagatattttaggtcatgggacttcggttgcagggatagcagcatttggtgattttaggaatcaattcagcagcggaaaccaacttactcgctacgctaaaatttgttctgcaaaggtagttaacaatgaaggtaaatttcctgatgaaattgtgattccaaaattaatgtcgcaggcaattaatgcacttcatgagagatttggatgccgaatatttaacatctctttgggagatcctaaagcaccatttaacggcaagagaaatggccaatgggcttccatactcgacgatttggcacgtagcctcgatattctaataatagtttcagctggcaatggtaatgcgtggggcagcaatccagaggatgctataaatgaatatccacactttctcgtacatgaaaaaaacagattccttgagccagcaggtgcagttaatgcaattaccgtaggttctttatcttgtggtgatggtttgccaccgagcctagcaccttatgtaggagtccaaccgacagcaaaaatggatgaaccttctatcttcacacgtacaggcccaggggtgttggggatatgtaagcctgatatggtcgattatggtggcaccgctatatatgactctgcaataccaggcatacgatctggtggggatatttctgaggctggtatgataagccttaacaataaatttttaacttcgctactcaaaacatcttctggtacatcggtggccgcccctatggtggcccacaaagcagctatattattaaaacaaataccagattgcaccgctaatttacttagagctcttttaataaactcatcgacttatccagaaattaaccaacaaaggattaatatattagacgagatatctaaaaacaaaatatatggaaagggaatcccaaagctaagaaaccttatttcatccgaagataacagagtggttctgtactcagaagattcattacaaccagattatttttctgtttatgaaatcccaataacagatattttcaaaaatacagcagggaagaaaaacttaaaaatcactttgacatttgatcctccagtaagacatacgagaaaggattaccttggctgtgaaatgaatttccggttaattcgtgggaaaactgccgatgaggttttcgattttttcaaagtcaaagaggctaatgacaatccatcagagatgtcgtcgagtaataattgtgaccttaaaccaggtgctaactcaagagacttcagcacagttcagacggcatcagttacatatgatcgtgctatgcaaaaatacggagacacgtattatttagttgtaagatgccaagctggatgggcggactttatccaaacacaacgttatgccattgtggtagaaatgacacatgcacaagatataaatatttatcaaactatacagcaaaggatccaaccaagaattcaaccaaggatccaaaacagaaatcgtgtttaa

SEQ ID NO: 251886 - DNA, 987 bp, Klebsiella pneumoniae
atggccagaggcgagttaatgaaaaaacttttggctagctacggcaatgattcagaatttcgctcagtagctgaaaaaattattagtgaagaggaaaaaaagaataataaagttttagctaatagtctgagaagaacgcttgaaaacagcccagctttcggcacaaattgttcattgaaaggcttagaaaaattctctccagttttggaagggaaaaatgattttgtcgaaagagttgaacccagtaactcccacaaagaattagttctttcattcgaaaatgtaagaattctcaaagggctaattgaagaatatagatatgctgaaacaatacgtaaaaacgggctatctttacgtacaaaactccttttttgtggtcctccgggctgcggtaagaccctaagcgctgaggttttcgcatcgacacttgggctacctatgtttattgtaaaattagacaaactaatatcatcttacctaggagagacagcaaccaatattcgctccatatttgaatttgcgaacaacaaaccttgcgtgctttttttagatgaatttgatgcaattgctcgttcacgtgaagatggtaacgaacataatgaacttaagagggttgttaatagtcttttactttttattgaacgattagcaccaaagggttttatgattgcggcaaccaatctagacaaaagcattgaccctgctgtatggcgtcgtttcgacgaggttatttggtttaaaaaccctgacaaaggaatgattaagcggttcttaaaaagcagactcaaaaatgttaattacgacttcaatccagatgattttatatcaagattagataacatgagtttttctaacttagaaagagtacttaatcaagctattaagtccatgattatagcaaagaaaaagacactaactgaacgttatttagttgatgcgattaatgatgaatatcgcagaaatagtggtgttgataaaatgcgttaa

SEQ ID NO: 251887 - DNA, 186 bp, Klebsiella pneumoniae
gtgaccacactgagactacagaaagcctttgaggcctgtcaggcaaataaatccgcctggctgcaacgccgggatgaactgaagcagaccgaacaggcataccgcgaacagcttgccggtaacgaccacagcggccggaacctgaaaaccctgcgcgaaattatcaacgtgaaaaatgggaaataa

SEQ ID NO: 251888 - DNA, 1323 bp, Klebsiella pneumoniae
atggctaagtataaagcgtatccagagtataaggattctggggttgagtggttgggggaagttcctagtcactggaaaaccgtttccatatctagattgttttccaggattaagcgtaccggatatacagagaaagaattgctttccgtatatcgggattatggtgttataccaaaatcaagcagggatgataacaataataagccttcagaggatttatcaccctatcaattggttgagccaaatgatttggttatgaataagatgaaagcctggcaaggttcaatcgcaatttcagagtatgaagggatagttagtccggcatattttgtctataaacccaataatgtcctttttgaactggcatacccaaggtatgtgcattatttgctccgtaacccgatttacattactcaatatctgagccgctccaaggggatacgcgtcaatcaatgggatctagatcctgatgagtttagaaatattgagctactgcttcctgacaagactgagcaggaaaaaatatacagtttcctcgatcacgaaaccgcaaaaatcgactacctgatcgagaagcaacggcaactgattgagctgttgaaagaaaaacgtcaggctatgatatcaagtgtcgtcagtatacgcagtaatataatgaaaactaagctaaaaaacttagttagcattcaaactggctatccattctcaagtacaaaattcaaattttcacctgataatagtattcctcttttacgaggggttaatgtcggtgttaactgcataaaatgggatgacgttgtctattgggatgtttgtgcactcgataggctcagtgattatttattagcggctggcgatattgtttttggcatggatagaccatggattagttctggagcaagggtttcagaaattaaagaacaggacttaccttgcctcttattgcagcgagttgcaaggattaggtcaaatattaaatcatatcaaccatttataaaattatgccttagtagcaatgaattcagagaatatgctgaaatagacttgactggggttagtgtgccgcatattagtccagagcaaattagtaatttttacgtgagagatattccttttgatgatcaggtttctctagcaaaaaaagtactggaaaagatagacaaaatagaaattactcaagaaatggtcgagcagactattcaaattctccaagaacgccgcaccgcccttatctccgccgccgtcactggaaaaatcgacgtccgcgattgggtagcccccgatacgcagaacgttgaggagccacaggaggccaccgcatga

SEQ ID NO: 251889 - DNA, 828 bp, Klebsiella pneumoniae
atggtgaaatgtcattattgcattattggggatgatgcatctcaacaatatatgaggcgtaaattggaaagtaagaatgaagttgttgtttatacggcgctatttggctcttatgacaagttactagaacctactattaaatcatcaaaatgtaaatttatatgtttcaccgatgataaaaatttaaagtctgacttttgggagatcaggttggtcgatgggattgttgaccccatagcggcaaacaggaagatgaaattccttcctcaccaatttttatctgacttcaagtatagtctttatattgattctaatattaagataatacatgatccatatgatctgattattaattatgtacagtcttttaaaataaatatccctcgccattttgaacgccaatgtatttatgatgagttaaatgaatgctataatttgaataaaattaatgaaactgaacttaataatataaatcaactatttttatcggaaggctaccctccaaataatggattaggtgaaaataatattattattcgtgagcataacgatccttttgttataaatctcatgcaagaatggtggcgttttttctctaatggaccaaaaagagatcaactcagtttaatgtttttagcatggaaattggatattccaataaatttaatgagagaatcttctaggaataggaataaatatttccgttaccatctacatttgaatgaagaaaaattaccattcataaaaaggaaatatctatatgttagggcaaatagagatagacattttatttatcaaatgctctataaattgcgaaatttcttttga

SEQ ID NO: 251890 - DNA, 852 bp, Klebsiella pneumoniae
atgcgtttcggagttgtcgttgtactatttgatccgaatgaagaaaatataaataatcttgctcaattcactacgcttggtgttaaagtttgtgctgttgataacagcgcatatggtaatgtaatacctgaaaattatcattatattcataataataatcaaggcgggatagccggtgcctttaataaaggtataacctaccttttgcaaaacggttgtgattttatttttactttcgatcaagattctgttttaccacataacttttttgattcgatgcgggatttcatatcgaagaataacgctaaaatggtcgtgcctgattttattgatacaaattctagaactcatgcttcttttataaatctagataaatggtcatacaaagttacaagaactgataagaataccgcctttgctatttcttctgggatggggttcgatacttctgtctgggcgttaatcggcccatttaccgaagattacataattgatcatgttgatacggaaatttgtttaaaagccctgcgtaataatataagtatattcgttaattatgatatatgcttggaacatcagattggcaatcgaagtgtgcataaatttttgggcgtgacttttaaacctaaccatcacaattataaaagaaaatattatatagttcgtaacggaacacatttaagtcttaaatatttaattgattatccctcatacttctttatgaattttttgcgtatagttcacgagttgctatgtgtggtcttgtacgaaaaagataaattaagaaaattgagatatatgctcaaaggattgtttcatgcaatatgtggtaaattaggggctgtttcgtaa

SEQ ID NO: 251891 - DNA, 642 bp, Klebsiella pneumoniae
atgtttattgccttaaagaacgatgctatctttcataatgacaaagcatgcgtggcagacatatcatccaagttatcatgggttcgcttagaaagtttaaatggcattaaaaagccagagtggtatggatgcgttggcgatggaattactgatgattccgatgctttcaacagcatgttagattccttacatgaaggtgatactatcgttttaggagaaagtagacattatcataataaacttcctaaaagagattcacgctggataataaaaaagagcaacgtcactatcattggtaatgattcaattttatcacggcgtgccaccagtcaagaaacaatgaatatcgacggagcaaatcttgcaaccttacagatatctaatgtaactaattttgagattaggggaaaactactaatcacttcgtttgaaaacaaatcaccactagcggataaaaatggaaaaatcattagtacccagacttatccacgggcttatgttagttcacatggtctattccttgaaaaggtaaataaagcaattcttccaacaacactaacgtgtagtaatgcagtctttccatgctatataacagaatcaagcaaaattaacatttcagggacttacattaactcaggataa

SEQ ID NO: 251892 - DNA, 1233 bp, Klebsiella pneumoniae
atggtctctattaagtttgttagaaattttgcttcgctaggtacaatgcaggtgataaattacattgtacctattcttttaactccattcttggttatgaaaataggaatcgcgaatgtaggtatcatagcaacatcaatggctgtagcaacgtacatccaactttttatagattatgggtttaatttaacagcgacgagagaaatagcaaaagatggttacaatgattttaatgcctctaaaatcacaagcgcagtatataatattaaactattgttaagttttataagtctggtttttatatgtttattggctgtttttgttccttattttcgagagtgtttttgggttttatttttttcttttcttctcattgttactcaatcttttttccctgtgtggcatttccagggagctgaaagaatgcagtacattgggttatgtaatagtatccctcgaattatttcggcaatattgattttaatatttgttaaaaaacctagtgacgcatggatggttcagtttattctctttataggttctttttttgcgttgttgatggctatttttattctcatctcgagatttaattataaatattatttctcacatgatgagattagaaagcaatttaaggtgggaaagtcaatatttattgcaagaattgcttcagggctttataagaatttcaatgttctgatattaggttattgtgcgactccttctgcagtcggtgtctattcaattgcagaaaaaatacttcgtagtatgcaaatggttcaaaatgtcgtaggggatgttttataccctttcttctcaaaaaacacgatgagttctaaggatttctttaagatacaaattaaaaagtacaaattaatacttgtcagtgtatatttgattgcttccgcagtcatatatttattttctgattatattgcatatatactagcgcacagcgcaagggcagatgtttctctttcaatgaagataatgtcatttgcattttttttcggtggaatgaattatatatacgctattctcggtctgacatcatcaggttattcgggctatttttcaaagtgtgttgttattacaggtttttttaatgtaatagttgcttctgtgctttcataccaatactcttttattggaacgtctattgctttagtaactagcgagtttttccttctagctattgttttattttattcaaaaaaagcagggattgtataa

SEQ ID NO: 251893 - DNA, 1008 bp, Klebsiella pneumoniae
atgattaatttcacagctgtaatggtgacgtatgcaaaccgtggagagtttgtaaaaagagttgtctatgaatgtattaatgctggttgtaatactttttttatcgttgataatggtagttctaatgatagtaagaatattattcatgatctccaggtacattatgctcatgcagattttaatataattgagaatgataaaaatatggggtctgcttttgctttttcccaggcgatggatgaggtgtgtagcgacagtaataacaatgagcatatattatttcttgatgatgataacgtggctgaaaatggtgcgattcaaaatgcgttaaagctatcagaagaggacggaccaggcaacgtatattttcttcttcgtaaagatagacagcattatattaatttcattaatactaataatgaggccgcattaataggtgaaagtaattcatttttgacttttacaacctcaaattacattaaaagaatcattaataaaatcttcaaaaaagaaaaaaaacagaaactaaagccagatgcatcattgaaaatatctgttccatgtggtccatatggtggaatgcttactacaaaaagcatactaaaaggaggtgtacgaccttttagagaaatgtttttatactttgatgatactaattatacaatggatctaaagagaagtggggtgcatctgtggttgctaccttattataacataatagatatagacaactcatggactaatgaaaaaccccgcaatattttttcatctcctctttttgaagcgagtgagtataaaattagatatactttgcgaaatagaatctttttcgagttaaatcatacagtcactaataaattgatatacgggtttaatattttctcatttatgatgattcattttgtaaaggctttgttgtccggtaatattaaaagatatttccctttatatgtttatatttataacgggatcgttttttataagaaaaaaagaagtaataattcataa

SEQ ID NO: 251894 - DNA, 2544 bp, Klebsiella pneumoniae
atgccaaataagaataatggattattcaaactatccaccgtctttctcgcaatgcttccggcattgctttctggtttgaataataaagcgcaagcacgtgactttttcgatccctcattcattagctcattgaatggtagcgatccatcaaccactcccgatttatccatatttcagactcagaacgcgcaggcgccaggggattatcgggtcgatattatgtttaatggccgctacctggataccaggaccataaagtttgtcgccaacaatcgcgccagcagcgataaccgcgaacccgctctggttccctgcctgagtctaaaagcactcgcggaatatggcgtaaggataaaagcctttccagagttagccgaggatcaaaacggctgtgcaaacttttctgtcattcctgacaccaaagcagattttgactttaccgcccagcgcttaaatatctctattccgcaggcggccttatccaccaccgcacagggatatattccaccggatcagtttgatgacggcatcaacgcgttattggtgaactatcagttcagcggctcaaacgacatgcaggccaatgatgaatactacagtctgaatctgcagtccggcctcaacgttggcccgtggcgcatccgtaacctcagcacctggaataaaaacaacagcggtgccggggactgggattccgcctatctctatatgcagcgcagcatccgctccatcaacagtaaccttgtgatgggtgagagttcatcgctcaacggtatcttcgacagcgtgccgtttaccggtattcagctggccaccgatacgacgatgttgccggaaagtatgcgcggctatgcgccaattattcgcggtatcgccagaaccaatgcccgcgtcatcattaaacaaaacggctatcaggtataccagacctatgtcgctcccggggcgtttgaaatcaccgatatgtacccgagcggcggtagcggcgacctttacgtcacagtggaggaatccgacggatcgaaacaagaatttgtcgtgccgttcgccaccctgccggtgatggtccgtgaggatcaactggaatatgagatcacatctggtaaatatcgcccgtacgatggcggagtcgatgaaacgccgtttacccaagccaccgcgacctacggcgtctccagcagcctgacgctatatggcggcatgcaggcggcttcgcgatatcaggcgctgtcgacagggcttggctataaccttggtgaactgggcgctgcctcggcagacgtcacccaggcctggtcaaaaatgaaagaggatgaaaagacctccggacagtcctggcgtgttcgttacgggaaaaacattcttgaaacgggtacaaacgtgaccatcgccggctaccgctactccactcgcggatttcatactctctcagaggtcctggatagctactctaatgacggctactacacttcgcgctcgctgcgcaaccgtaccaatttgacggttaaccaaagcctgggtaaaggtctcggtagcctgtcggtaagcggattaatcgaagattactgggatgataagcgtaccaacaagtcgatcagtgtggggtacaacggcggtttccgcaatgtgaactactacctcggctacagctataaccgctatacctggagcggagataactccgggaaagacgcccgggacgaccagcgcattacactgaccgtaacgctgccgctgagcaattggctgcctggcacctacaccagctatcagttaaccaacagcaatccgggatcaaccgatcagtcggtttccatcggtggtaatgcgctggagaacgatagcctggagtggagcctgcagcaagggtacagcaaccgggaatactacagcggcgatatgcgggcgacctataacggtgcccgcggcagcgtcaacgctggctacagctatgatcgcagcagcgagcgcattgactacggcgccaacggcagtatcgttgctcatgccgatggcatcactctgggtcaggacatcaccgacgcagcggtactggttaaagcgccggggctggataacgtcagactgactaacgacaacaccatttctaccgactatcgcggctacgccatcgtcccatatgtaacaccataccgtcgcaccgatattacgctcgacagctccacgcttggcgaagatatggagctgccggaaaccacgcagagcgtcgttccgacgcgcggcgccatcgtgcgtgcaaactatgccggcaatatcggccagcgggcctttgtgcatctgacaaccgccagcggtcaggacgtgccttatggcgcgatggttctactcgtcggcgacagcaaatcgcagccaagcatcgttagcgatgccggtatggtctatatgtccgggttgcagcagaccgggatccttaacgtccagtggggcaaaagcgcagcacagcagtgcaatgcttcatttactttaccggccagggaaggcaaagcgactggcatcagtcaaatcgaagcggtttgccgttag

SEQ ID NO: 251895 - DNA, 2688 bp, Klebsiella pneumoniae; identical to SEQ ID NO: 201306

SEQ ID NO: 251896 - DNA, 432 bp, Klebsiella pneumoniae; identical to SEQ ID NO: 144875

SEQ ID NO: 251897 - DNA, 1086 bp, Klebsiella pneumoniae; identical to SEQ ID NO: 201308

SEQ ID NO: 251898 - DNA, 3057 bp, Klebsiella pneumoniae
atggatatctctcgtcagtttattaacaacccgattcgcgtctggctgactattttactgctgggcatcgggggtattttcgccctgctgaatatcggtcgcctggaagacccggcgtttaccatcaagaccgccgtggtcatcacccactatccgggagcctcggcgcagcaggttgaggaagaagtcaccctgccgctggagaacgcgctgcaacagctgccctatctggacaacgtcagctcaatttcctccaatggtctgtcgcaaatcaccgtcaatatcgcctcgaattatcactccagcgagctgccgcaaatctgggatgagctgcgccgtcgggtaggagacgccgcccggatgttcccgcccggcgtggcctccccctttgtgaacgacgattttggcgatgtctttggcttcttctttgctatctccggcgagagctttaccaaccctgagctggtccgctacgccgagcagctcaggcgcgaactggtgctggttcccggcgttggcaaagtcgctatcggcggtgcgatcccacaacaaatcaatatcgatatctcgctggcaaaaatgaccgcccgcggtatcacgctcaaccaactggcggcaatcctcagtcgcttgaacgtagtgtctaacgccggtgagattaaatccggcagcgagtcaattcgcctgcatccaacgggggagtttgaaaatctcgacgagctgggcgatttgttaatcagcccgcacggctcaggttcagcgacgcgattgcgcgatattgccacgctatcgcgcggactcagcgaatctccttccagcatttatcacgctaatggccgccaggcggtcactatgggggtgtcgtttattcccggcgtcaacgtcattgacgttggtcgcgcgctggaaagcaaactggatcagatgtcggcggaaaaaccggcagggatcaaaattgacctgttctacgaccaggctgcagaagtggctcactcggtgaacggctttatcactaacttcctgatggcactggccattgtcgtcggcgtgctgctgatctttatgggcgtgcgcagcggtatcattattgccctgtcgttagcgcttaacgtgctcggtacgctgctgattatgtatctgtggggcatcgagctacagcgtatctcgctgggggcgctgattatcgccctgagtatgctggtcgataatgccatcgtcatcgtcgaaggggtactcattgcccgccagcaggggtcgacgctgctcacggcgattaattatgtgattcgccgctcggcgctgccgctgctgggggcgacggtgattgctattctcgcctttgcgccgattggcctgtcgcaggactccaccggagaatactgcaaatcactgctccaggtgctgctgatttcactcatgctgagctggttctcagcgttaaccatcacgccagtactgattaaatggtggctgttcaaagggcaacagccgcctgctgaaacctcggataccgacccctacagcgggcgcttttatcgcatttatcagcagattctgcacaccctactgatgcgcaaagcgatcaccctgaccgtcatggcggcgctgctggcagcttcaatatggggattcggctcggtgcggcagaactttttcccctcatcgaacacgcctatcttctttgttgacctctggcttccctatggcactgatattgcgacaaccgaaaagatggccagcgatattgaaacctcgattaacggccagccgggcgttgtcaccaccatcgccaccgttggtcagggcagtatgcgttttatcctcacctacagcgggcaacggcaatacagcaactacgcgcagatcatggtacgcatggacgaccagcgcagtattaacgctctgacgcagcatgttgacagctatattgcgcgcaactatccgcaggttaatgccagcagcaaacgcgtgatgttcggcccttccggcgatagcgccattgaagtgcgcatcaaaggcccggatcccgaccgcctgcgcctgctcgccagccaggtgggcgatattctctccgcagacccggccaccgacggcgtgcgcaacgactggcagaaccgcagcaaggttatccgcccacaatattccgccagcttaggccgcgaactgggagtagataaacaggatatcgataacgcgctggagatgaatttctctggtagccgtgcgggactctatcgcgaaggggctgacctgctgccggtggtggttcgcccaccagccgccgagcgccaggatgctaaccacctgaataatgtgctggtctggagccaaaaccgccagcagtatatcccgctcagtaacgtggtcagcggctttaatctcgagtgggaagatcctttgatcctgcgccgcgaccgcagccgcgtactgaccgtgcagaccgaccccgatccgctgagcaatcaaacctcaggcgatattctggcgcgcgtgaagccgcaaatcgatgccctcgccctaccgcacggctacagtattgagtggggcggcgacgcggagaattcccgcgaagcgcagcaggggttgttcaccaccctgccgctgggttacctggtgatgtttgttatcactgtgctgatgttcagctcgctgaaaaacgcgatcgctatctggctgacggtgccgctggcgctgattggcgtaacgccaggctttttgattaccggtattccttttggctttatggcattgataggcttgcttagcctgagcgggatgttgattcgtaacggcatcgtgctggttgaggaaattgagcagcagaagcaggaaaaagcgcagcaggaagccattatttatgccgccacctcgcgtctgcgccctattctgctgaccgccttcaccaccgttctcggtctggcccctttattattggatgtcttcttccagagtatggcggtagttattatgtttggtctgggttttgctactattctgacgctgctggttctgccagtgatttacgcctgtttccataataagagcctatcccagtag

SEQ ID NO: 251899 - DNA, 966 bp, Klebsiella pneumoniae
atgaacagtaccggattaaatattattaaaacgctgggatgcatgacggcggtgaccttcttcaccatttataacaccagggatcactatgattacgactatcactggatcctcggttttctgacgtttatttcgaccatagccacgccgctgttttttgtggtggcgggctatctggattcgcagtcacggcacgatgcgcagtggcaaatgggtaaaatcaaaagcgtagttatcgtcttcctgttctggatgacagtgtactatctctgggaaccctaccagcgcggttatcttatccagccgtggtttgtttttgcctttattgtgatttacacctttcatccgcttatcgagtggctcagccagcgacgcaagctatttttcggcgtggtatttgcgctgctgttgctctcatatggctacgatctgctgtccgcgctgtatcctgatgttcatgcgctgagcctggccccgcagtaccgtttgtggacctggctgctgttttacctgaccggccagctgttcagcgatccgctggtcgccagttggctgacccgcgagagagtggtgaaaggcgcgatgatcgccattccgtttatttatctcttcacctggttttacgagcgccatttcttcttcgccctgtttaaggctgacagaaatgcgttcattcttaccggatcacaaatttatattttggtggtggcgctggtgattgccgccaacggcgtgcggtttcgtaaaaacagcgagtttaaagagaccattctggcgactatcagcaaaacgatgaccggcgtctatattcttcactactccgtttttcatctgctgaccgcgcttatcccaattagctcgctgggaaccaagttaatgctgattgtcctgacgttcatcgcctcggtgttaatttcaatgctagcgctgtccaattcgctggtgaaaaaggtgattacgatttga

SEQ ID NO: 251900 - DNA, 576 bp, Klebsiella pneumoniae; identical to SEQ ID NO: 144879

SEQ ID NO: 251901 - DNA, 1095 bp, Klebsiella pneumoniae
atgacggttattatcgctcccatttttgggcctattattggtggctacatttgcgataattacgactggggctggatatttttaatcaacgtcccactgggtgtcattgtggttgtgctgacctcctggttactcaaaggccgcgagacgccaactgaaccggttaaaattaatctcatcgcgttgagcctcctggtgctgggcgtcggcagcctgcaaattatgctggataaaggaaaagatctcgactggttcaactcaaccacgatcattgttctggcgattattgccgttattgctattattttactggtcatctgggaagcaacggacaataacccgattattgatcttagcctgttccgttcgcgaaattttactattggtattttatgtatcgcctgtgcctatttaatttatgctggggcgatcgtgttaatgccgcagttactgcagaccgtttttgagtacacttcggtatcggccggactggcttacgcaccgatcggtatcatgccgctactgcttgcgccgcttattggtcgctatggccataaaatcgatatgcggatgttggtaacgtttagttttatcgtgtacgccctgtgttattactggcgttccgtcacctttagctcggccattgattttacgtgggttattatcccacaatttatgcagggttttgcggtcgcctgtttctttttaccgctgaccaccatttcactttcagggttaccgccggagaaattcgctgccgctaccagtttgagtaacttcttccgaagtttgtccggctctattggcaccacgatcaccatgacgctatggagtcgtcgcgattccttccaccacgcgcagctaacagaatcggtcaccgagtataatcccccgtccgttgatatgttccataaactacaacatatgggttttgataagcagcaaatagccacctatcttgatgaccaaattactcagcaaagcctgctgatggcggccaacgatgttttttacctgtcagcaggcgttttcctgatgctcactctgctggtatggttcgcaaaaccaccgtttaactccagcaaagctggttaa

SEQ ID NO: 251902 - DNA, 600 bp, Klebsiella pneumoniae
atgaatgaccgtgaaacgcgctgttacagcggggaggtcagagccgagcaacgcaccgatgaacctacccgcattctgggctatggctcggtgttcaacagccgttctgaacccctgtggggattccgtgaaatcatcaagcccggagcatttgacgatgtgctgaatgatgatgtccgcgggctgtttaaccatgaccccaactttattctcggacggagcgctgccgggacgctatccctgtctgtcgatgagcgcggcctgcgttacgacattacagcgccggatacgcaaactatccgcgatctggtgctggcgccgatgatgcgcggtgacattaaccagtcatcttttgccttccgggtatcccatgacggtgaaaattggtaccaggacgatgaagggatcgttattcgtgaaatatcgaagttttcccggctgtttgatgtcagtccggtgacttatcccgcatatcaggaggccgactccggcgtccgatcgatgaaagcctggcaggaggcgcgcgacagcggtgcgctaaagaacgccattaatcaacgaatggcgcgtgagcgcctgctgacccttcttaacgcgtaa

SEQ ID NO: 251903 - DNA, 267 bp, Klebsiella pneumoniae
atgtcagcaaagggggggtcattccgtaacattgatggctcttcttctttgttggttcaatatgaagacactgagcataaaaccgtcgaatattacaaagtctcagttaagaacagcgactgtgataatggatatgggaaactgaactatttcaatttagatggtaagttcattactaaagtcgattatgtttcctctggtcgtagcgttggtgcagaagttggcgatttcatttgcggtgtaagaaagggattgagtcaaaagtaa

SEQ ID NO: 251904 - DNA, 834 bp, Klebsiella pneumoniae
atgcatttagctgcagaaagccatgttgatcgctctattgatggccctgctgcatttattgaaacaaatattgttggcacatatacattattagagtcagttcgacaatattggaatcagttaactaatgaggcgaaatcttcattccgctttcatcatatatcaactgacgaggtttatggtgacttacatggcacagatgatttatttactgaatccacaccatatgccccaagtagtccatattcggcatcaaaggcatctagtgaccatcttgttcgtgcatggcatcgcacatacggtttacccactatagtaacaaattgttcgaataactatggaccatatcatttccctgaaaaattaataccacttatcattttaaatgcactagaaggaaaatcgcttccagtttatgggaacggcggacaaattagagattggttatatgttgaagaccatgctcgcgctctatataaagttgttacggaaggtttggttggagaaacatacaatattggtggtcataacgaacaaaaaaatatcgatgtcgttaataaaatttgtgagttattagaagaattagtacctcaaaaacctgaaggtgtatcgaattattctgacctaattacctatgttacagatcgacctggtcatgatatgcgatatgcaattgatgcgaagaagatttttgatgaattaggatggaagccagaagaaacattcgatacaggtcttcgtaagactgtattgtggtatctcaataatgaaaattggtggcgcagagtaaaagatggttcatatgctggtgaacgtttaggtttggcaaattaa

SEQ ID NO: 251905 - DNA, 870 bp, Klebsiella pneumoniae
atgaaaggtatcgttttagctggtggttcaggcacacgtttatatcctattacaaaaggaacatctaaacaactgctacccatttatgataaaccaatggtatattatcctatctcagttcttatgctcgctggcatacgtgatattttaattattactactcctgaagatatgcctggctttaagcgccttctcggagacggttctcaatttggtgttcgatttagttataaagttcagccaagccctgatgggctagcacaagcctttcttattggtgaggaatttatcgacggagataggtgtgcattagttttgggggataatatttattttggcgaaagttttggtaaaaaacttgaatctgttgtacagagaacaactggggctacagtctttggataccaagtaatggatccagaaagattcggtgttgttgaatttgacgaaaccaataaagctatctctctagaagaaaaacctacaattccaaaaagtaactgggccgttacgggattgtatttctatgataatcaggtcgttgaaatggccaaaaaagttaaaccttcacaccggggtgagttggaaattaccacattaaatgaaatgtatttagagagtggcaatttgcacgtggagaaattaggtcgtggttttgcatggcttgatactggaactcatgaaagtttgcttgaagcttctcaatttatacatacgatagagcaaaggcaaggctttaaggttgcatgcttagaagagatagcttatcgcaagggatggcttaatacagaagaggtacttgcacaggctaagctgctagctaaaactcaatatggtaaatatttactaaatttagttgaggagaaataa

SEQ ID NO: 251906 - DNA, 591 bp, Klebsiella pneumoniae
atgaagactagcaatggtgaaatcagcaatataataatgaaagaaaatattatatcttcaagcctttttaggaccatattgataccatttattggggtatcaaataatggaacaactggaactccatttacttcttctgtcctagattggagaatattgaaagtaaatatatcaggaatcaaaattacggagcaagttgtgtcggtgagagccttaataagctgtttcattttcgattcatcactcatactcatcgctaagtatatacgatctaactccccatttttagcgtctttaatcaactgttctaaatcacctctatattgtatattactttcactttcaaacttttcattgtcatatactccaacgactgaaaaaccaagccacggttcttctatgaaactttttgctaaattaataccagcaggcatagacccggcaattgctattctacgggtattataccctaagtatctaattattcttgcacccgttcttattagtgagcgacaaatcgttattcctacgcaaacgaaaaaataccactctatcagtatcttaaatggaagagctaatacttctgaatag

SEQ ID NO: 251907 - DNA, 489 bp, Klebsiella pneumoniae
atgagtcaaactatgcgtgaaagttgggtcgactatgctaagggaataggtatcctactggttgtctttggacatgttaatagaggattgcaagcagctggaattattatgccatcaaaactttatcatttggttgatagtataatatattctttccacatgcctttgtttttttttctgtctggcttgttttttattaagtcgattgagaagaaaggaaagttgcttcttttcattgataaatttaaaacgattgcttatccttatttagtatggtcactacttcaaggcacgattgaggttttattgtcaaggtttacaaactcaaagacctcgtttaccgatctgttgatgctattttcacatccgcgtgcgcaattttggtttttatatgctcttttgatgatatttgtactatcaatcataatatactcaaaacgattttttgaacgcggcatggctttgttgaataaatcgaacttttgctga

SEQ ID NO: 251908 - DNA, 1284 bp, Klebsiella pneumoniae
atggcacagcagaaaccccacgacgtgaacgagccgtcacgtcgtcgcttactgaaagggatcggcgcgcttggcggcgcgctggccatcaccggcggctgcccggtagcgcatgcggcaaaagcggaaagttccccggggacgctcacacccgacgcgcgccaggaaaagcagccattctatggccggcatcaggcgggcattctgacgccgcagcaggcttcgatgatgctggtggccttcgatgtgctggcggctgataaagccgacctcgagcggctgtttcgacagctgacccagcgtatcgtctttttaacccagggcggcccggcgccggacacgccgaatccgcggctgccgccgatggattccggcatcctggggccgtggattgcgccagataacctgaccatcaccgtctcggtcggccattcgctatttgatgagcgctttggcctggcggataaagcaccgaaaaagctgcagccgatgacccgcttccccaacgattcgctggatgccgcgctgtgccatggcgacctgctgctgcagatctgcgccaatactcaggatacggtgatccacgccctgcgtgatgtcatcaaacatacgccggatctgctgagcgtgcgctggaagcgggaagggtttatctccgacagcgcggcgcgcagcaaaggcaaagagacccccatcaacctgttggggtttaaggacggcaccgctaacccggcgagccacgacagcgcgttgatggataaggtagtgtgggtgacagccgatcaggacgagccgacctggaccgtgggcggcagctatcaggcggcgcgaattatccagtttcacgtggagttctgggatcggacgccgctcaaggagcagcagacgatctttggtcgcgacaagcacaccggtgcgccgctggggatgaaaaacgaacacgataccccggattacagtaaagatcctaacggcgaagtcattgcgctggatagccatattcgtctggccaatccccgcacgccggaaacccagtccagcctgatgatgcgccgcggctacagctattcgctgggggttactaacgccggacaactggatatggggctgttattcgtttgctatcagcacgatctggaaaagggttttctgacggtgcagaaacgacttaacggcgaggcgctggaggagtatgtcaaaccgatcggcgggggctacttctttgttttacccggcgtagtggatgataaacactatctgggagagtcgctgctgcaggcctga

SEQ ID NO: 251909 - DNA, 195 bp, Klebsiella pneumoniae
gtgaacaaagtgactgcggcgcaaatggtgccgttcgataacatccagttcaccggcaactacggcaacatgaccgaaatctcctatcagacggcgaaacgcgcggcgaagaaaggggcgaagtactaccacatcacccgccagtggcaggaacgcggcggcaacatcaccatcagcgccgatttgtacaaataa

SEQ ID NO: 251910 - DNA, 633 bp, Klebsiella pneumoniae
atgttaaacatcagaatgggttccgatacgggaggtaaggcagctattgaaaggctgcttgaggcttatggattcacaactaagcaggcattaagcgagcacctgaatgtctcaaaaagcactatggcaaacagagtgttacgtgacagctttcctgctgactggataattcagtgcgcactagaaaccggtgtttcgttgctttggttagctacaggacagggaagcatgaaaggaggagctgagcctgagaaaagttctcataatgagaacaaacaagcaattaaaccgttatccaaactcataactccagctattcctaaaggaaccctggagaatggacaactcagtattgatgaagagattttcctagaccacagcatattacctgcagattatgaagaatcgatgttcttagaaacccctactgattgttatctcatcgataaatcaattaaacaggtcagcaatggattctggcttatcaatattgatggaatgattattgttgcaaaaatcatgcggattcccggcaataagattgtagtaaatcaagatgaagcgtctttcgagtgctctactgatgatgtggaagttattgggcgtgcagtcaaagtaataaagagtatctaa

SEQ ID NO: 251911 - DNA, 393 bp, Klebsiella pneumoniae
atgtccacaataaagcctgatgcagtctggtatcctccgcaatttccagcacagggacgatggttcacacgccttgtttttatcgctgtggcgatattgttggcaggctgtgacagacccgccagagaagagagtgttagcggcggcagcggtaccatagaagcggttaaccatacccactgggcgataaatcatttcagcgtagacgggcagtcagggctggatattatcggcccctggcagggcggaggcggtggctgctgttacggcgtgccaacgaaatggaaaccgggaatgacggtgaaagtggaatgggaaacgggtgtcggttattcaatggattttccaggatatggagatgacgctaaatatttagaatgggaaaaaaaataa

SEQ ID NO: 251912 - DNA, 273 bp, Klebsiella pneumoniae
gtgttctgcacggtgatggtgcatctgcatggagaacgccccacccggcttaacagtgatgcggttaacgttaaagcgaggcgtctgcactaccacgtcgctacgcccccaaggccggtatatttcgcgatgacgtttgtattcactacgctggttattcttcaggtactccacaacctttttcacatcctgagcgcgatttttattcatcaccagaaccgcgtccttagtgctgacgatcaccaggtcctcaacgccgatagccgccactag

SEQ ID NO: 251913 - DNA, 165 bp, Klebsiella pneumoniae
atgctcagtccgcatacccgcgccacgatgccaagcaccaccagcgcgaagaacagaatggcgaaatacaccagaatcaccagcttcgccagcggccacagtgaagcgaagccgaaggtcgccacggtcaccgagatcagcgcgaacacgcccaccggcgcgtag

SEQ ID NO: 251914 - DNA, 129 bp, Klebsiella pneumoniae
atgaagctggtgatgggcatttccgaccgtatttacgtggtaaaccagggcacgccgctggccaacggcacgccggaagagatccgcaacaacccggacgtgatccgcgcctatttaggtgaagcataa

SEQ ID NO: 251915 - DNA, 183 bp, Klebsiella pneumoniae
atggcgacgtcagcaagcagccaggccgattccggccatcaatctatccatgaacgcgttgtcgaacggattttaaaaccctgcgaaggaaaaaaagccggagataaagtggtcatcgttgaccatcacggcggcgagcatgaggctatctgcactctggcggcagtaccgctgccgcagtaa

SEQ ID NO: 251916 - DNA, 240 bp, Klebsiella pneumoniae
atggtgctcttgaccagcagtagtgcggaaaacgcccttcaggccgcggagcgaatcaggcagcgggtctacgatctgaaaatcccgcatatgttcaatgaaagcgtcgcgaccaatgtcaccattagtatcggcatgacgccgctcgtagatgccgatatcgatagcgccctgaaacgagcggataacgcgctctatgaagccaaaaatatgggacgaaacattattctcgccagctag

SEQ ID NO: 251917 - DNA, 210 bp, Klebsiella pneumoniae
gtggacacctcaacgccgaacgctgccccgccgccgaaacagccgccgcgcaacccgttccgtggcgtgaagcagtgcaaatctaagcgccctccggagccgatcaacgccagtcgcttctttaccattctgagcgaaagcatcagcaagagtacgctggtgcagtattaccagctgaagtggcagggctgggatacccccaccaactaa

SEQ ID NO: 251918 - DNA, 150 bp, Klebsiella pneumoniae
atggatatgcagaggggattcgcggttatcgattttgccgctctgtacttcaaccagcacatgtttcttacctgcctcgacaatgaccgcctcgaagacctgattgctgccgtcaaaaagctcgattgcctggcctttaaccatccgtaa

SEQ ID NO: 251919 - DNA, 234 bp, Klebsiella pneumoniae
gtggcgacttcgctatttggcgaggagctggtcggcgaagtgaagccgtttatgggcagcgaagattttgcttttatgctcgagcgtaatccgaacggctgctatttcaccatcggagccggggatgaggcggatcgctgtatggtgcataacccgggatatgacttcaacgatgccctgttgctaaaaggcgccgcgctgtggtgcgccctgacggaacactatttgcgttaa

SEQ ID NO: 251920 - DNA, 186 bp, Klebsiella pneumoniae
atgcacggcatatcggcgctcaccccgcggttccactcgaaccggttctctgaggctaacagagttagccacgccgcttttatcatttgcaggcgccacgacccagacttcatcggcaagctgttgtgccacatcctcaagcaatttaattcccggcgcgtcaataccgtcatcattgacaagtaa

SEQ ID NO: 251921 - DNA, 174 bp, Klebsiella pneumoniae
gtggtggatgttattttgcaggcctgccatacctatgcggtggaatcgctggcgataaaacgccacgtgcgccagcagcacaacatcccctacatcgccattgagaccgactattcgacggcggatatcggtcagctcagcacccgcgtggcggccttcattgagatgctttag

SEQ ID NO: 251922 - DNA, 159 bp, Klebsiella pneumoniae
atggtctggcaacgcctcgccggtctggctcaaagacggggtaaaacgctgtcggaaaccattgtgcagttgattgaggatgctgagcataaagagaagtatgccagcaagatgtcgagcctgaagcatgatttgcaggtgctgctaggtaaagagtag

SEQ ID NO: 251923 - DNA, 1551 bp, Klebsiella pneumoniae
atgaatagtagagtgcttattaacagttttgtcgtggatgatttatctgtgagtttagttcatgatcctgtaatccaaaatgatgataattatttttctgttcttacagggaagaatggagttggaaaaagtcgagcattggagataatgtcattctgtattttttttattgagctttatcctgttcacgaagaacagtttcaaaaacaatttaagtattcaaaacatattttaaggacaagtattcctttttcatcattaagtttcagctattatgtgggcggcatattaaatgatttaacaatccatgatgacggaagtgtttcttcgtcaattacagttgcagataaagaattgcatccgaaattaatatgtgtttccaatagcttatttaatcgttttattgaaggttttggtcaatctcattcgttcccttttcatgatcctgataagtataaaaacctatctctttctaaagatgttttaaaattcggtggtttttctgatgatagttttattaataaagttttaggtcatgaggtcataaaactgctatttactgataaagtaaattatattcgttctatggcttttatgcgaagttttggagtgactgaaaatgttactttagttttaacagtgaatcattatctcgcaggcgcaaatctagacggcataaaggatttggaaaaatttaaagaaagtttgaagaagatagtccctcatgatgaagaagggaatgcaacagttataactgatgaaatgattcatactacagagagaatgctgaaatatttttgtggattacttgatgaagaaactcggagtcattttcgtgatgatgaggatggtatgttttttgtgatgggttcgccatttgtaaccttttcttttgatgagaatacaattctcgaggaaggtttaataaaggatatgttatttttatcagaaatgagaatagtaaatgttgaacatctaacattcaagaaaggtgatcatttggtagaatcggataaaatgagttccggtgagttatgtatttttcttatgctgttgaggattaatagtgagattgaagataacactataatcatgattgacgagccagagataagcttgcaccctgcgtggcaaaaaaaaatcattcctgagttacagcgatgtttcattaattacaaaggatgccattttattattgcaacgcattccccccaggttgtgagtagtctccctagggataactctagtgtagcaattcttggtagtgatcagggtgctattcctgggtccattgttaggggtaaatcatcagactaccaactttttgcaacgttaaattatcccggagaacataacgaatatgtcataagaatgcttaccactataattgcaaagcaaaatatcagaaaagaattgtctggaaatgaaattcaatttttagatagagcaattaaaatgtttgaattaaataaggatgtttttagcgaaaggagcgagaataataccattgaacatttgttaaagcaggccattggcatgttctctatgtga

SEQ ID NO: 251924 - DNA, 717 bp, Klebsiella pneumoniae
atgaggatttcaaaaaaaataaagttttcaaaaaaaagtagaaagtttatattaaagtacaatcgatatgatcgggtggattttcgagtatgggaggggacgaagggaactatatctattatccgaaaagagataagaaagcattatttaaaagaacaagggcatttatgtgcttattgcagaatgcataatcatacttctcatggtttatcgtgggacattgatcatattttaccaaaggatcgttacccacagtttttatttcaaccattgaatttaattttagcctgtaaggagtgcaatggatttaaaagcaataagatcccattgatggatgaaaaccagtttttaagatataaatacccgcaggatgaaaaacaattctctattatccatccacactttgatcgatacagtgataacatagaaatagagaaggtagggaattattatgcgtatacataccttacagataaaggactcgagaccattattacctgcaaattatcaagatattcatttgttgagtcgtacggtactgaagatattgatacaattaatgcaattgaacagcaggttcttgtgaatgatagctatgagaacgatcaggattttattgatataccacaaatatacctgaatgaaataattaggaggttgcattcaaggcggctcgtaataaagaaatctgcagagtttcctagcgttataaggtaa

SEQ ID NO: 251925 - DNA, 435 bp, Klebsiella pneumoniae
atgaatctgcaacaggtaacagagctactgcccccggtagtcattcagatagctgaccttatcggcttcccggccaccgaacgcctgctttcagcgttcggtggtaccacctttccgatcggaaaaggtcttcgcgctctaggtgctcaacgagccgctcttcttcgcgataccatcggcgaccataacgctcaactgctattcaaaaactttggtggttttccgctttatcttccgcgttgcgagcaggcattacgtgaactgcggaatctgcggtttcttgctgattttgacgaggcaagccggaatggtacatcttcgctaatggccatgacgattctgtgtccgaaatatggctttagtgatcgcactggttggcatttgctggcgcaacgaagaaatgcttctgtggaaaatcaagggtctttgttttga

SEQ ID NO: 251926 - DNA, 2157 bp, Klebsiella pneumoniae
atgcgttctctacagcttgccatgaccctgctggcaaaagaccagggctctaagatattgcgccagacgctggctgacgtcctgaagcagaccaatgccaataaaaaagccgaggaagaagccgcgcgcgtacgtgagcagtcggcacagagcggcattcgtgcatcccgaaccctgcatcaggaatatcagcgggcagcccatgcccggtctgtgcttgggatccgttcagaacgcgacatccagcgagagatagcgcaaacgcaggctgcatataaccgtctcctgcgcaccggtacacttaccgctaacgaacaaacccgcgcgtttcgcgcaatgacgaaccaggtcgcgcagctgcgcaccgagcttaatggtgctggtcagtcaatgtcacgcatggaacgtgctcgtatgtggggtggcaatgtcaccgcgttcgccggcggcatcgcagctgcgggggccatcgtcgcgccctcggtgcgtaaccagatgacttatgagcaacgtcttgccagcatggcgaatacggcatttgaagaccaaaatactgccggccgtcagtcaggtatgcggttaatggataccttgatccgccgtgctgttgccgttggcgggggcaataaagagtcagccgcagagacgctcgatactttacttgcctcgggtgctgtggactataagtctgcggaacgcctattacctacattgcaaaaatacgccactgcatcgggtgctgattcaacggacctggctcaaatcgctattcgactcaagcaatcatttggtatcagcgatgagcaaatccctaccgcactgaacatggcaattaaatcagggcagttaggttctttcgaactaaaagaccaggctaaatggctccctcagcagcttgccgccggtaatgctctggggatgcgtgggctcggtgatctggccgtattgctaggcatcaaccaggcctcagcaataacggccggctcaaccgatgaggccggtaataacgtggttaacctgctggctaaaatcaacagccaagacgcagcaacctctgcagctaagattatgtataacggtaaggggattgacctcccggggtcactggtcgccgcacgtggtaagggtattaatgcgttagatgcgttcagcggtatcgttgacaagattgttaacaacaatccagcctatcaaacgctggagaagcaattgagtagcacctctgacgggtctactcgtcgggagataatggagtcacaggcgaaactgctggaaggatccgccgttggcaaaatcattgctgatcgccaggcattgatggccctgattgcataccgtgctaaccgtggctatatgaatgacgtggttaagggcgtcaatacggaacggaatctccctgcaaatcagcaggccggtgagcaaaatttcgaccttatcaaaggaacgaatttctacaaggtcaaccagctgaacaatacccgggactttgcgcagatggacgctatccagccactgtctgatgtgctgggtaaactttcgggggaactcaatgattacgccggcgcatatccgggactgacaaaggccctggctggtgctgaaacggccattaaggctatgactgctgccgcgtgggcgtttgctggtatcaagttcctttcctctgctggcgcagctgcaactgctgcaggaaccacggcagctggtgcaggcactgctgcggccactgcgacccgtattccaggctgggccggtcgtcttggccttggtcgcgtgctggctccctttgccgtatggcagggagccgaagccgtccctcttatgcaagtcagtcgtggtgatgccgaggcacgcgcgcgacttgaaaaaggaaattaccctaacgatcaggcgcgaatgctggatgcgctcaaatcccgcccaggtctgatggatgcctgggatgaggtcaaatcttggtgggcttccccttcaaacatccgcgttcctgaatcagcaaacggctacccggtgccaccgttcgcccggacgccgtcacagcagcagcccatcaatatcaccaccaaacttgaactggacggccgggttattgctgaggctgtgaatgaagtcaatggccagtcagccgcccgtggcccacagggaggaccgcactga

SEQ ID NO: 251927 - DNA, 225 bp, Klebsiella pneumoniae; identical to SEQ ID NO: 241498

SEQ ID NO: 251928 - DNA, 930 bp, Klebsiella pneumoniae
atgcaagttaaaagcttaggtttttcaataacaaatgagaatgaacatatcaattctgccgatgtcatgaacgcatttattgaggcatcgtctcgtgaatatgttcgggttgattatactcgaagaatactcatgtcagatatgaatgattattattatgggttagtcgtcaccttcaaaaaccaaaagaaaaattgcagatctcagttcatcgacgggaaatttcggatcaaagttgaagaccttcagggggacgaaaaactagcgaatttcaatctatttgtccttaacaaggataatctccgtggtctgtatatgtcccaccatggttcctgtagtattaacacccttttcagccatctccaaaccatcagcaatgaatttatcaggaaacagaacgctaatgaaattgcaggattaggtgacaaacctaagcaaaaagaaatcaccgctgtaaacaaaaaatacaagaagcgtttttcatttagcatcatgactactaaggaggacatcaaaacaatccttggacagttccgagaaattaaaaagacatcctttaaatttgattacatcgattttaaaggtggtccaatgacagcattagaaccatttgctaactcaacaacaatagacatgagtgttaatccagaggataaaacaaaagttcaagcactttcagaaacactggataaaatttatcatgcaatgcaaggtgggatttctaaagccagagttacagccgttgaccatgctgggttagaaaaaattattgattttatggactgtcccaccttctttgaatcttatgattttgatgaaattgcagaaaaaatcaatggcttgacaaatgaaaattatacatctaacccggtctttgatataatcaagaatgaaatgttgaacgggactaataaaaatgcctttgtatga

SEQ ID NO: 251929 - DNA, 540 bp, Klebsiella pneumoniae
atgcctttgtatgaatggcttataaacaaaaggttaaggtgccagtacattaccctgctcggcctgtcagccctagttttgctggggttgtaccttctctacaggaacacccctgacgtaagcgtcaaattctttgatttttatcataaaaatcttcgtggctatcttttctctggcttcatatcagtaggctcttttttattaagcctgcatactttcgtgattataaatttacgagataaagttttcgctactgctgaatataaagaaatatacagcaaagcaacacagacacctttagaaaaagtagcggatgaggatctttataaaccattagataatctttcatcatttattaatacttcgattttattttctctaaccaccgctatcgcccagttcaccatcggactttcaacgaatctttatgcttgtttgttttgcgtatggattgcgattcttaccgtcttcctattgttgcactgtctaatcattattagacaaaacatcaaaatccttctcaagcaaaataaaaaataa

SEQ ID NO: 251930 - DNA, 561 bp, Klebsiella pneumoniae
atggagctagatataatcaatcagcgagaagcactcaagatcgcaaataaagaattagaaaaaatggcggcatatgactcgttaacagatatatacaaccgcaggaaattcatgagcctatttaatgaaattaaagtagactcagagaagtatcagtcgcctttatcgctcgctgttatcgatatagattactttaaatcatataatgatgacttcgggcatcaggaaggagatctggcgcttaaaatcgtagctaccagcttaactaattcgttgactgaaaagggaattcttgcaagatttggtggagaagaattcattgttcttttaccaaacacaactgaatctgaatgcgtagcaaaatgtgaagtactacgaaaatgcgtccaaggcattttaacattgaaaagaacaattaccatcagtatcggggccgtcagtatctatcctaacgaaggctgtaatatttcattcgatgaattattcaaaattgctgatacaaaattatatgatgcaaaaaaatctagtagaaaccgtgttaaaaaccacagaattgattga

SEQ ID NO: 251931 - DNA, 999 bp, Klebsiella pneumoniae
atgtcagaagacaaagattcaataaaagatgttagtgacgagctcacaaaaccttttgttgatgagctatcaagtagattaaaaataccatttttcggcggctttgttttttcttggcttgtgataaattgggagagagttgcaattcttatttcatcaaaggaaaacatatacacaagaattgataaaataaaaaaaatcgaagagtttaattggccaataattggagattggcacacaagtactttttttgcaccactcttatattcaatcattataacttcgcttacgccatttattactcttggattcaaaaaaattcaaaaatgggctaacattagaataattgacactcaagtagaacttaaccaccgatatcaattatcctcagcatcggaacaattgaaactggaaactaaagaaaaggaaatatcagaagtaaaatattcaacaactgatattatacaaaagcacaataatttaattagtatcatttctgatactgaaagcaagttaaaacaagccaatgatgaattatctgagaaacaatcagagcttgaaaatataatagaagccacaacaaaactaaagtctgaatttgaaggctataaaaaaccaagtgatcttgtggatcagatacaaaaagtaaatgaacaccaaagagataatttaataaaagcaaataaaatcattagcgaatatgaaagcaatatcactacactaacacagtcaaattctaatttaaagagagaaatcagctcattgcataatcgccttatagaggtggaatcaaattatgaaatatctaaaaatgagctcaatagtaaccatgtatttataaatgaaatgttaactgacattgaaattataatccataaattaaaacaagagtcttcaccggacgaaataataaaatatttattagggcagatggagttatgggaagagaatctcaaatcaaaattatataaagtcaatcaagtcacatctattgagtga

SEQ ID NO: 251932 - DNA, 3057 bp, Klebsiella pneumoniae
atggtcaggcaaaagtgtagcggtattaggcgcagctatttaggtggacaggctttcgctaaagcaaaaaataatgagaatgaaagcttattaacagatgagcagttaaaacataaactttgtgatcattttttgggtggcgatgagaaaaatctagatctttccagtgtttttgatattgcagtagctgaaaatgatctcaatacggtacaagattatttgaggaatttgtattggggatataacccatcattagaacaacaaaaaatatctgagtacaactgggcatctatatattcaacaaactacaatttaataattgagaggatatattccagtgctactaagaaaaagcagcgtctcgtacctatttataagataagtgacaggattgactcattggtgaaaatgcctgaggacgtcgcatacgtaaaattacatggttgtattactaaaacttcagatattaactcaccaattttaattagctctgagcaatatataaaaagccggaacgaaagagctgttttttttgaaagaatgaaagaagttggttataacaaaacaatactgattgttgggaatagtttagaggatagtgatattaaatatatccttaaagaaattgaaggcatgacagaaagtcgacctagatattattgcctagtaaatggctttagtgaaagacaacaaaggatgtgggaggtgaaacgtgttcatttaatatcaggaacaatagactccttcatttctcagctaagttatgagatatcagatattgatttagagtttggtgctactctgagacaacatcccatagaaagagtatttgtatctaataattatgttctatctgattcagcattcagagatttggaaaaatcattgacatacattcatgaacaaattcctattgaacaaactaacccaaaacttttttatagaggatactcacaaggatggtcggccatttcttcagaactcgatgtaaggagacgaattgcggatgagattttatctgaggtaatccttacagatgaagtagatagaagtaaaaacttcgaattgtataatatatcaggaagtgcaggaacggggaaaacggtttttcttaaaaggctagcatgggactcatcaattgattttcgaaaaatttgtttttttttcgaatcctctgataaaattccagtaaatactcttatagaattggcagaaaaagtcggtgaaagaatatttctttttgttgatagagcatctttgcatgttcaggatctgatacatttgagtaattcgtttagtcgctcaacactaaaactgacttgtataattactgaaagaaacaatgagtggaatattgagtgtggtagtttagataatttgctcacggatagctttaatcttagagatctatctttcagtgaaatagaatctttgatcaataagctagagattaataactcacttggggttctaaaaaataaaaataaaaaagaaagagttgaagagtttattttaaaatccaatcgtcaattattagtagcattacacgaagtaactatgggtaaacctttcagggaaattattcaaaatgagtatgacaatatcatccctagaaaagcccaattaatgtatagaacaatttgtgtaatgaatcagtttcacgttcctgttagggctggtgttattaaaagggttcatgatataagttttgatgatttcaagaaggaattctttgaaccacttgaaaaaatagtacaagtccttaataactcctcagttcaggatattgtctatacagccaggcatccgacaattgcaaatatggtattcgatcattcactccctaatgagttagatagattcgaaacatatatgagcatccttctctcgttagatataggattcagctctgataggacggttttccgcgaattgattaagtacagacatctttctgatgtttttagaacgacggaatatattgagaatatatactcaggtgttagagatgtttgtgggaatgatgactattactatcaacagtatgctatatttaaaatgcgagtctctccacctaattatattagggctgaagagctattaaatatggcagaatattacggcccacacaacacgacaattcaacattcacgtgcggaacttgaattggcaagagccaaacactcgaaaggcttagaaagagagaggcttcttaataaagctgataaactttcgaaaagtattcaaaatggtacatctcatggtttggatacaagatgtaaaattgccttacaacgccttgaagattccatttctgcaggcgatccagaggtagttattgatgctataaaaaatgttgaagaaataatttctgcagcactgcaaagttatccggatgatgaggtcttgttgtccgaagagtctcgattcgctgaactgataaatgataatagcaggtcaatcaaagcattagaaaaagcctttgcaaaaaacaatgctaatggacatatagcatctcgcttaagcacttactatttgagcgttgaccgagagtctgatgccttcgcaacgctaaataatgctttaaaaatcaaccctacaaataaatctgttcacgcagccttggctaaaatatattcagaaaaaggggatgattataaagatactgctgaatatcactggaaacattcatttactgatggggataggaactctataaatcaacttttctattctagacagctttatattaatggaaaaataaatgagtataatgaacaagttaataaattaaagcagcttcgtctctcacccagcactagacacatgttaagaggaattattaaaactcctaatggaggaaatgcattatatactggaaggatttacagaaaagaagctacctatgcgttgattgatacattgggattttcaaatccacactatctccactatactaactgcccagacgacaagtgggatgaattaaaaattaatgatgaagttaactacaatttaggatttacttttagtggtactgctgctgtaatgtgttaa

SEQ ID NO: 251933 - DNA, 402 bp, Klebsiella pneumoniae
gtggtcggcgtgacgcagggcaatattgatgtcgtgcaccaccaccagggtcacgatgttgcgccgccgggtctcccggcgcaccagatccatcacgtgaaactggtagttgaggtcaagggcgctgagcggttcgtcgagcagcagcaggcgcggctggcggatcagcgactgggcgagacccaccagctgcttttgcccgccggagagctgatcgaggtagctcatcgccagatgggcaatccccagctgtcgcagcagcgccatcacttcctcctggcgctgcggactgtggcgtcctccggcggcgcgctgggcaacgataatcgactccagcacatgcagatgcacgccggcgggcagcgtctgcggaagatagaccacctgctctgtgcgacgtga

SEQ ID NO: 251934 - DNA, 420 bp, Klebsiella pneumoniae; identical to SEQ ID NO: 32215

SEQ ID NO: 251935 - DNA, 711 bp, Klebsiella pneumoniae
atgtcgggttttatccaacataaaccatttgagagcgtaaaaagcctgcgtaaaacaagggttaagcctgacccacttacaagagaggaatttgcagccctcatggcaagtgaacgaggccaaagccagaacatgtggaaattcgccgtctattctggtgtgcggcatggtgagctggcggctctggcatgggaagatgtcgatctggataagggcgtgatacacgtttgccggaatctgacagcaaacggcatgttcggcccaccaaaaacagcggcaggaaaccggacgatacaattgctcggccctgccctggacgcgctgaaagcgcagcatgaactgacagctggacatccggtatccactatcacgtttcaccacagggaatacggctcaagcgaggaacagaatttgcgatttgttttcatgccgcggagacggaaaggcgagcaaaaaccctgctattcgcacagcagcataggcagcagatgggaagctgcagtaaaacgcgctggcattcgccgcaggaatccgtaccatacgcggcatacttttgcctgctggctcctgacggctggcgcaaacccgtcttttatagccaatcagatggggcatgaaaacgcgcaaatggtgtacgacgtttatagtacatggatagaagaaatgaacggcgaccaggtttctatgttgaattcccggcttgggctttaa

SEQ ID NO: 251936 - DNA, 216 bp, Klebsiella pneumoniae
atgcgtaaaattaacaaatgcatctgcaattttctttttcattgtcgtctcaccctgattgttattattgatgatgatatcaaacaggatgacaaaaaaagccaacgtatcggtgggcttgttgtgacatgttactgcatcaacaatcgctatctggccttgctattgcacgacatacccacatacaggcttcctgcattttggtacgcgcgatag

SEQ ID NO: 251937 - DNA, 366 bp, Klebsiella pneumoniae
gtgttcgttgcactaaaaacagataacgacagttataccggtacaccgctgctggataaagacgcccgggtggtggaaacagaacacggaaaaaccctgtacaaaggcaaacgtaaggtcaacggccttgaaatttcagaatggtggattaaaagatttgtagttaatgacgcagacccatcactaagttatattttttatctcactatccatgaaaataaaattaatggcagcaaaccgcttgatctgaaaatgtcttaccgaattgatttcctaaaccctggagatgtattaaccgagaatgaactggtagcgctgtgggagaatataaccgaaacaattaaatatcaccccacccggtggtga

SEQ ID NO: 251938 - DNA, 207 bp, Klebsiella pneumoniae
atgcacctgatgaattttatcggcctcattcagtatctgacgccagcgatccttacaggtagtcttgactgccagcatgcgcagattttctacgggaaactcagtatcgtggtaagcccctgcggaagggaaaaggaaatcgggttttttattaccttctgtgatggcctgcgtcgcaaagtgtcgcaggccgtgctcaatgaatag

SEQ ID NO: 251939 - DNA, 528 bp, Klebsiella pneumoniae
atgaaatctgcattaatcagcccgctgctggcgggtctgctgctgttaaccggctgcgcgcagccagccgcacaggccggaggcggcggtggcaccattgacgccatcaaccacacaaaatgggcaattaaccacttcagtgtcaatggccagtcggggatcgacattataggcccgtttcaggggggcggaggcggctgctgtttcagcgtgcccgcccgctggacgccgggtatgacggtgcgcgttgactgggaaagtggggaggcatcgactgaaggttttcctggatttgctgattcaaaaaaatacagagagtggagagataatttaaaacaaaacaaccgtcagcacagcaaaactgtcccgctacccgactataacggccaggatgtgtgcggcattacagtgcactttttgccctgcgatgacgtgaaagtgaccaccagctgttacacctacggcagtccgtcgtacccgataaaagagcccgtcaggatgaaggagcccgccgtatgtccgaagtag

SEQ ID NO: 251940 - DNA, 600 bp, Klebsiella pneumoniae
gtgatcggcctcgatcacgttattgagatacttcacctgccggtgggccgtctcccggtccagctttccttcgcgcttcaattcggtgatcgctgcaccatagctcggcgctttgtcggtattgagcgtggcaggcttttcccagtgcttcaggcctcgcagggccttgcccaggaaccgcttcgctgccttggcgctgcgggtcggcgacaggtagaaatcgatcgtgtcgccccgcttgtcgactgcccggtacaggtaggtccacttgccccgcaccttgacgtaggtttcatccaggcgccagctcggatcaaagccacgccgccagaaccagcgcagccgcttctccatctccggggcgtagcactggacccagcgatagatcgtcgtatggtcgaccgaaatgccgcgttccgccagcatttcctcaaggtcgcgatagctgatcggatagcgacaataccagcgcaccgcccacaggatcacatcaccctggaaatggcgccacttgaaatccgtcatcgttccgtccgtccaatctccgccaagcatgctcaagcttcacgatttttgcaacagagcccacacgagtattga

SEQ ID NO: 251941 - DNA, 483 bp, Klebsiella pneumoniae
gtggctctgcacagaaacaaaggatgtcagcccttcgcgttcggcaagggcgtttgccttcgccagctgccaggcatagcaattggaaatgccaatcgcgcgcaccttgccggcggtcactgcggtgtgcagcgcctccagcacgtcgataaccggggtgttgtaatcccagatgtggtagatgtagaggtcgatgtagtccatcccgaggtttcgcagactctggtcaagcgagcgggttatagcctgttttccgctgatcccctcggcaatctgcgcggcggttcgtggcagaaacttggtggccagcaccacctcctcgcgttttgccatctcccgcagcgcccggccaacgtaccgttcgctggagccgttctgataggcgatggcggtatcgtaaaaattgatgccctgttccagagcgtggcggatgatgtcccggctggctgtttcgtccagcgtccagcgatgctgacccgttga

SEQ ID NO: 251942 - DNA, 204 bp, Klebsiella pneumoniae
atggaccagttgctcgtacaacttctggtcattgctcttggactgctcaatctccagctgatccagctcattactgcgtttaaggaggaaaaaaccctggtttggccgcgcttcaaccgcccccattcgggtcagttccttgagcccggcacgtaccggcgtacgcgaaacacccaacgcatcggcaagatgttgctcacgtaa

SEQ ID NO: 251943 - DNA, 291 bp, Klebsiella pneumoniae
atgacgttccccgccgccaccgattccgccgtggccgtcgcccagggacgtgccgatgccgagttcctctccacgccgggcaccgtcgccctgtttaccgaaaaagccggcatgttcgaagcggttggcgctgagttcgaagcgaatactcacatcgcctttgccgtgcgtaaaggcgataccgcaacccaggccctgctggagcaaggtctgcagagcctcgtcaaaaatggcacctacacgcaactgattaagaagtggaacttcccagactccgttgcccttttctaa

SEQ ID NO: 251944 - DNA, 399 bp, Klebsiella pneumoniae
atgcggctgcagcatgcgcatgccaatatcaacgatgcgataagttaccccggcgattttcaccagcccggtgctatcggctccgcaatactctttcagaaacgccagcacctgctgcgcactctcttcgtcatagtcctcgaccgccagagttgttttaacctcccctacgtgctgcccgccggcagtgatagtcggcatcggctcgtcagttgtctggccatctcggcaggtaccgcggagttttatcaggtgggacgtgaccattgcagcatcagcctttgtcgtcatggtctgcagtggctcgctaacgtctcgcggcctgctctgcccagcacgaccaccaacaccaacaatctgagcagtaaccagcgcgtgatgatcgacagtggtaactga

SEQ ID NO: 251945 - DNA, 180 bp, Klebsiella pneumoniae
atgaccagcggggtaatgatgctcgccaggttgccgcacatattgaacacgccaccggcaataccgagcatctctttcggcgaggtgtcgctcagcacgcaccagccgaggttcccgaaacctttggcaaagaacgccagactcatggcggcgatcaccaccacttccgaggaggtgtag

SEQ ID NO: 251946 - DNA, 279 bp, Klebsiella pneumoniae
atgattgtcgccaaacagcagggtctggaccgcacggcgatagggcgccagcccctccatcggcagataaaggctggccttttgctgctgactctgcagccggtcagcggcctgacggaccgcctccagctggggaataatggcctgctcgttatagtacagcccgatgctgaggttaactttgtctgcccggggatcctgttgaaaggcttccatcagcgacaggataggatcgcccgcataggcgtcaacgttctgaaacacagtggttactcctga

SEQ ID NO: 251947 - DNA, 393 bp, Klebsiella pneumoniae
gtgtactgggtcaatatccaggagacgcctcccgcagccgtcggcacgcatacgctgcaatttgtcgtccgtacccgcctgaagctcttttatcgtccgcccgccatcaccaccaccctcgccagagaggtgcaaaagctgcagtggcagcagagcgggaatcacctgcgctttaccaactcaggcccactgcatatcaccctggtcaacgggacgctgatcgataataaaggccacctctcgccgatgagaaacgtgatgctccggccatacagcagccataccgtgatgaccaccgacagcactcgcctgtaccagctgaactatatcgacgactacggcgcggtggtgcccatccccctgcagaatgcccatgcgccagcgtcaggctag

SEQ ID NO: 251948 - DNA, 282 bp, Klebsiella pneumoniae
atgagaatagatatatccaagatagggaaaatttactttttactcgtctccccaatcaaactctctgtcgcgcaggatttggaggcccgattcggagaccgcgtaatcattgcagcttttggtactgatatcacgtccatgggcctggcaccaggtgatgaaatcgtaagtgctggctaccaccttcacagcctggataccgctgttttcgtagcgctccaccatgctatcggtgcggatacgccagtcgtggtagtcaaagggaaggacgtaagcatctga

SEQ ID NO: 251949 - DNA, 318 bp, Klebsiella pneumoniae
atgcttgcgaatttgcaaatgcaggacggcctgctgctgtccgaaaaagtgatgtttgaggtcggtaaaaaactcggtaaacaaaccgcgcatcatctggtttatgaatgcgccatgcaggcgtttgaaaaacgacacgcttttaaaaccgttctgcttgcgcatccggtgttggcggcctgtattactgaacgggatcttgaccactggttagatccggctcattacaccggctgcgccgcgcaaaaagtcgatgacgtcatccgctttgccgagcagtccggtcatctgacttctactgagggatctgggttatga

SEQ ID NO: 251950 - DNA, 231 bp, Klebsiella pneumoniae
gtgaatagggcgcaatacgggctcaccatcaccctccgtaatcaatgtttgcagtggatgcgcccagccatcgaattcatcgactatgcgttgcacgtcaacctgtgcattagcggacgtcacgtcagcgaaccaggcctggggttggcacagagcaatgtaaacgtggatcacgccgccaggctcccggtgcgccatgatacccttgcctggcgagagcgcaaaaaatga

SEQ ID NO: 251951 - DNA, 261 bp, Klebsiella pneumoniae
atggtgaccgcgcaccgcggaatggggctgaccgaagtgcactggaaagccgtattcgaggctattgatgaatgctacgagaacttcaacgttccgcaggatatccgtgaagaggttaccgcattcctgacccagttcaaacccgccgtcatcggcagcccttcataccgggatgtggtactcgcgcaccctgacatggacgtcaccaaagggatgaaaagcgtcggcattcactggccgaaaacagataaaccgtcttaa

SEQ ID NO: 251952 - DNA, 210 bp, Klebsiella pneumoniae
gtggcgggctggataagcctgtttaccctgcatgctatctggccttttctgtggatctgggccaccttgtaccgccctgaccgcgggtgggggatggcttcgcagaccgaggatagtctgcaacgcaaggaactggagcaacgtatcgcattactcgaagcggcgttaaaaaacagccagcaagcgtcagcggggaataaagataaataa

SEQ ID NO: 251953 - DNA, 162 bp, Klebsiella pneumoniae
atgctctctttgtcttgcatacgcttagccatagttaccgcctccgatgaaagatcgggaagctgtgagtttgaagaggttcaggcccatcaggctgatttgacaacgagccgtatcgatgatgactcccgcgagcctgaaatgaaaaaggccgcgcaatag

SEQ ID NO: 251954 - DNA, 237 bp, Klebsiella pneumoniae
atgattggccagatgaatgaaggccatgctgccaccgccgccgcgctccagctgtgtcgtgtcgtgcaaccggcatttgccgagctgtatggcgccgatggcttaacggatgatcccgtcagcgggctggaataccgcaatggcctggtcaccgtcaatgactcacccggtctgggcgtgcagtttaatgccgcgcaggcccacttactccaggagtttactcatgcaagatgttaa

SEQ ID NO: 251955 - DNA, 282 bp, Klebsiella pneumoniae
gtgcccagccatctcctcggccagcgcggcgtagcgcagaatatggcgctgggaagcttccagcaggatcagtaccgcctgataaaaggggttctccggttgccgggcgcagtgcgttttgagttcggcgaccagggcgccaaggccatgattcagcagccgtggatagtcgatgatgatatggccctggcctttatcggtctggttcacgctgaatatctgggtgttgacggcggccttgacctcttcagtcatctggccgttgatgaaatctttcattga

SEQ ID NO: 251956 - DNA, 198 bp, Klebsiella pneumoniae
atggagctgtttaacgtcaagcccgccgagaatgcggtggcggagctgctggtgcggggcatgaccccggatgaatgcgccttacatctgggcgtatccatcgccaccatcagaacccacctcagcgccctgtaccggaaaacccatactcgtcatcaggcagaacttctgctgatcctccgcgcgattcacggctga

SEQ ID NO: 251957 - DNA, 225 bp, Klebsiella pneumoniae
atgattatcaccaacgtgaagatggcggcgacgttgcccgccgggacgaaatacatcgcgattaacagcaccgcctccagcgccattgacagcttgaagcccttcactttatcgatgttcttaaatatgaacggcgacagcatggctcccaccactccggaagccagcgtggtggtcagcaacaagctgccaagatccgcgcgccccataatgttattgacgtag

SEQ ID NO: 251958 - DNA, 243 bp, Klebsiella pneumoniae
atgctgtttacggtacaacgctggcttcagcccggcggggtcgtactcattgatgagccagatcttcatctgcatccatccctgatatcaccgttgctggcatccattgagaacatcgtggccagcaaaaacggccagcttgtgattacttcacatgcaacggatatctggcaacgctacgacaacatggggttgcggatagatttaactaatggcaaggatgctgaagatggccaatgttaa

SEQ ID NO: 251959 - DNA, 198 bp, Klebsiella pneumoniae
atgatcccagatttcctgcttctgctggatttcagaaaatggaggcgacgcattatctgcctggtgataaccagcctgcggtgcaatgaccactacgacaacacgcagaacagcctcagtggtggcctgggctacaccttcggcgccgggtcgtggtcaggggagcctgattgtcagccgcgacaaaatgaccagtga

SEQ ID NO: 251960 - DNA, 207 bp, Klebsiella pneumoniae
atgaagggacagaacatcggcctgcatcagcaggtctttgagttcgtcaacacgttcacattccggcgggaccgttttcgcgtagggatcgtaagccagaaccttcataccaaaggcgccggcaattttcgccacacggctgccaatggcgccgaggccgaccagtcccagcgttctgccctcaagttcgagcgatttatgcgttga

SEQ ID NO: 251961 - DNA, 192 bp, Klebsiella pneumoniae
atgcgcagctacgatccggacagcagctggaacccgtatctggagctgtcggctaactatcgcttcctcggcgactggagcgtatacggcattgcacgctatacccgtctgtcggatgaaattaccgacagcccgatggtggacaaatcctggagcggcctgatctcaaccgggatcacctacaccttctga

SEQ ID NO: 251962 - DNA, 162 bp, Klebsiella pneumoniae
atgttcggccagaatctgcatccctatcaggatctggtattcagcgacctgtaccgcatcacctcggtgacggtctcgctggtggtgacgctgactttggtctttctcatgcaccgtcttctgaactgctttgcggcgacgcgctttgtggtgagcgaatag

SEQ ID NO: 251963 - DNA, 123 bp, Klebsiella pneumoniae
atggcggatcagggcgtcgccgacatcatgaccatagttatcattgacgtccttaaaaccatccagatcgataaacaccacgcactgaatatcgtgtttccccgtctcgcatacctggcttaa

SEQ ID NO: 251964 - DNA, 144 bp, Klebsiella pneumoniae
atgttcggcccgctgctcctcaaagacgatattgtcagtgtgccactcacctttgccgacggtcaggtagcgctcccgcagacgctagggctcggcgtggagctggatgaagacaagctgcgcttctattcccgtaaagcataa

SEQ ID NO: 251965 - DNA, 165 bp, Klebsiella pneumoniae
atggtaaagctctggctgcccatcttgtctatcatggcgctggcgctttccgccagcgaggtgatcatcagcaccgtggggatgacgatcagtaaaatacctaacaacaccagcaccactgacgccagtccctgtttgcccgctaacaatccggcaaaatattga

SEQ ID NO: 251966 - DNA, 615 bp, Klebsiella pneumoniae
atgatcgagttcttgagcaaagtggcaagctctacggagttttggagtggtcttggaggggctgttgtcggtggtggttttactctcttgggtacaataattgaaggtagacggcaagaaagacagaatgctaccaatgctaaagaagaacgtttgaatgttttgataggtatcaaagctgaattagaatgcttatttaacatttataatgcacgaatggccgaacatatgagtagttacgatgggaatagtccatttcttgttcaattcccagtgactcaaaattattttacattctatgaatccaattcattagctttatcaaaagtaagtgaatctactttgaatgaaattgtagcattatacgcaacttcaagaagtcttgttgattctttcagaggaaataatgaaataatcgaaaaactggttcaggcacgcagaatatatgatagcacaggtttggaacatcataaggagcagtttaatactgattatggcattgccactgattatggattggggttaaaagaaatacatttgcagacgatggaaagataccaaagctgtttaggttcaataacgtctgaagtagaatctattaaattaatcaaataa

SEQ ID NO: 251967 - DNA, 165 bp, Klebsiella pneumoniae
atgcaaatcagatttgaacctgaactattcacgaaactgtacaaactggcccacgaggaggatatgcatatcccggcactagtaaataaacttttaaacgaaatccttagcgaagaggaaaaaaatgcaaaaaacggaacaatccctaacagtaaaaatcgttaa

SEQ ID NO: 251968 - DNA, 198 bp, Klebsiella pneumoniae
atgccttttgatactcgcaacaacgcattcgaatatgcatcaccatttgaatattccaacgaacctaacctgattattagcaacctgggattgttcgaggaagagaatcatactaaaaactcaatccttctggataaaatcctggttgagtcaaatgaaactgctcctgaaaagatgccttatgctcaaagtgactga

SEQ ID NO: 251969 - DNA, 399 bp, Klebsiella pneumoniae
atgggccggcgtcggccggtattcgttacaatgcgaaacatctggaaaaactcaaaaaaggattttgcacataatgaatatcgcaatcaatatcatttgcgtttatcttgcgcgagaaaagataataaaatcaatctattttgtggggataaagccaacaggagagcggatccggcggcagaataccgccggaagcagggcgcatcaggactcgaggacctgcggccagagacggagagtggtatcggtgatttgcatcagcttgtcgaaatccgcgccttcccgggcgctaatcgacatcccctgcagaacgcagttaagaaattgcgccagctgcgcgacatcgcggcccgcgggcagttcgccctgcgcctgccgctgctgcagaaactgggttag

SEQ ID NO: 251970 - DNA, 171 bp, Klebsiella pneumoniae
atgagcaacaacaaaaaaactcaggcaagctacgctaagccgtctcgtgctgacatcgttcgctcagttacaacatctacggctgttgaaacaggacagtcctccgcgaagatcgaagcttcacttgaagccacgcgcaaaaaatttgctcatttgcgtcttgcggtttaa

SEQ ID NO: 251971 - DNA, 810 bp, Klebsiella pneumoniae
atgcgttggatttgtaaggatgagattgaggaatgcttgactcaggcgtggaaagatatggctgaccaagcgaaagctgaattgatagctgctccggatgaagaatcaaggaaggcaatattaaaaagagtcgcttcctcaaatgtttggcgtgaattctataaattgctacctgactctttaaagcgaaaatgttggtattgcgaagctgaggagattcggtcagacatgccagttgatcatttcagaccaaagaataaggttgaagatgataagcaacatgatggctactggtggttagcattcgattggcaaaattatcggtgtgcttgcacgtattgtaatagccgtagagtttttgatgaaacggagggggggaaagcttgtcgtttcccacttgaaaaccctgaggagagggtttttgcaccagcggaccaaagaaaactgagcgatgaacgaccttattttcttgatccttttaatccggatgatgaaaaactgctttggtttgataacgatgggctgccactcgctaagccatcggccacagttgagcagcaaacaaaagtacaaaattctattgaaatatttcacctccacgaaagcagaatagtcagagctaggaacatagtacgcctagaggtggagaggcaggttagaagaataaagactaatgataatgcgcaagaagccaaagctaagctgcgtcgaatggtaagagatacagaaaagttatcgcgtgcagcggtagtgtacttgcgagcgcatagagagcttcctgaggtgaaagacatattgaacttggattag

SEQ ID NO: 251972 - DNA, 1602 bp, Klebsiella pneumoniae
atgaaagtcgacaaactgcatatccgctcacgattcaaaaatcttgaaaacgtgaaagtggactttgacgaaggccatctgatgacggtagtcgtgggccgtaatggttcaggtaaatccaacgttcttgaagctttggttgcaatatttcgcaatctcgacttaggtgaagcgccacctttttcttacgagataatttatcgattaggtgagccccataaacccgaacaacctagtgaacgatggttggaaataatcattgatgccgatccagatcgcggcacgttagcaaaacaatatgaagttcgtgtgcgtgaccttttaagtgacgctacactaaaggacatttttgatgagctgcctccaggtaccctaatcccattttcaaaagttaaacgggataaaaatggtaatgcaccatatctgcctaactatgtttttgcgtactattctggccccagtgatcgccttgaaaaccattttaaaaaacaccgtacggacttttatcgtaggctactagaggataagctggatctaaaaggtgacatccgcccattattttacgctaaacctcatcatagccaatttgtgttacttgcttttttcttatcggagcaagacagcacagaaaaggcgtttttgcgagaacacctaggcattgaaggattggatagtattcattttgtgatgcgccaacctgggtgggctaaacagaaaggcgaattattttggggggcacgaggcgttgttcgtcgatttttggatgaactgatacagcacacactcgcaccaataaaagtggttcgccaagaagatacctcgttaactggcaataatattcgtaatgaattctttcacctatttttaccagatgtaaacgctctacgcgaatttgcaagtgatctcagtgccgacgaactatttaaaatgctcgaaagcactcttctgtcggaaatcatctccgaagtcagcatacgagtgaaagtatctagcagcaaagatcctcttactttccgtgaactcagtgaaggcgaacaacaactactaaccgtattgggtctgctcaagttcaccggcggtaaagattccttgtttttgctcgacgaacctgatacgcatctgaacccgtcatgggccgttaaataccttaaattcctgcgtgagtttgtacctaatcacgaaacgagtcacttgctgatggttacacatcatcctctagctattgctgagcttaagaaagagcaagttcaggttatgaaacgcgatgatgaaaagcaaatatctgccaagatgcctgatgaaaacccgcgaggaatggggatcaacttaattttgcgtagcgatatgtttggcctgcagacaacgctcgacgatgatactaaccaaaggcttacgagtaggaatgcactcgctgcaaaggagattttatctaaagagaagttagttcgcgagcaaggatttccccctgaggatgaagagcagtacttggctaggcttaatgttcagctcgagcatttggggttcaacttagcaacagatgacccagattaccttgagtttcttcgtagtaagtaccacgctaaacatgaggaaagtcattaa

SEQ ID NO: 251973 - DNA, 1551 bp, Klebsiella pneumoniae
atgggtggtattaattcaccaaaagaatggtgcctaacaaatctgggaaccgtaattgagttaaaatatggtaagcctttaccttcttccgaacgggatggaggaatatttcctgtgtatggttcaaatggcatcgttggaagccattcagaaccattagtaaaaacagaaggaattatagtgggccgaaaaggctcatatggagaagttcagctatcctattccccttttttcccaatcgatacaacttattatgtagatgatctatttaaccaaccattgaaatattggtactatcagcttaagtctttgccgctaacaaagttgaatagatctacagcgatacccggtctaaatagagaagatgcttatagccaagatatagcacttccacctctagctgaacaaaaaattatcgctgataaactcgatgtcctgctaacacaagtgcaaactaccaaaactcgtctcgaacgcatacccgagattcttaggcgttttcgtcaatccgctctcaactctgccgttaatggaacgttgacatcagaaataccggaagaaattgcaagggatacggtaaaattcgagagcatcctcaaggataagaagcatctttcctatggagtcttgaagccaggtgattttgatcccaatggagtccctatgttgcgtgttatggacattggagaatggggccaatacaacgacacggagatttttaaaatctcaaaagagctgtctaacgaatttaaaagaactattgttgaaacaggtgatgtaatattgtctgtcatggcaacaattggaagatcggctattattccgtctagattaaatggggcaaacgtaaatagagctttagctgtaataaaattaaagaatgatattgttcctgaatatattcagcttcaactgctttcaccaaactttcagtctgcatttgtggataaacaaattggctctgcacaaaaacgaataaacttgtcagatttacgtcagtttgatatttggattccagatattattacccaaacagaaatagttcgccgcatagaagagcttttcgattttgccgaccgtattgaaaaaagatccaaagccgcattagaacgagtcaataatatgactcaatccatcctaaccaaagctttccggggcgaactcactactgagtggcgcgtcgcaaacccagagttaattagtggtaacaacagcgctaaaacgctgcttgaaaaaattaaggctgaacgtgaggctatcacaagacagactaagataaaacgtcctgccgtaaaaaagaagacaggtagtcgtatgagcaaacagatcattaaagtggttgaagcgttaaaacaaaccggagagccgcttagcggtcagcaattattagcggcagctggttactccagcgacagcaacaccgagctacttgaacagttctttctagatattcgcaatgctcttactatagaaaaatctattgtgaagactgaacgtgatgatgatggtcaggattggttcgccttagccggggtaggcactgatgaataa

SEQ ID NO: 251974 - DNA, 1536 bp, Klebsiella pneumoniae
atgaagcaagaagcaattgttcaaaagatttggaatctctgtaacatacttaggggggacggaatcacctactatcagtatgtgtctgaactaagttatctgctgtttctcaagattgctcaggaaaatggttcagaaaaactgataccagaaggctatcggtgggctgatcttgaaacccatccagagaaagggttgctaggattctatcaagaaatgctcactcatttgggtgcaaatgttgaaaatgaagtcataaaagcgatttacgcatttcctacaacagttttctcccattccgaaaatttaaaagctgttgtagatggtatttccaaaattgaatggcatgaagtaggcaaagatggatttggtgatctctacagcggtttaattgataagagtgctcaagatactcgttcgggggcagggcagtattttacgcctcgctcattaattaatactattgttagattaataaagccaaatctcggagaattaattcaagatcctgcggcagggagtggaggtttcttagtttctgccgatagctatattcgaagcaaatattcaagagaaaaataccaagttactcctcctaaatatcaaggagtagaaatagagaaaaatactcgtagaatttgcttaatgaatacctttttacataatttagatgctgacattatttatggtgatgcactgactgatgacgcatttgagctggatgaagcagatgtaatcatagcaaaccctccctttggtaataaggctgggagtcaacgtcctctgcgaaaagatattccgttccccgatacaaataagcagctagcctttttacagcatatctatttgaggcttaaagctggaggtcgggctgctgttgtgttaccagataatgtactttttgaatctggtgtcggaacagacgtacgccgtgatttaatgaataaatgcaatctccatactattttgcgactacctacaggtattttttatgcccatggagtcaaaactaatgtgttgttttttaccaaaggttctgccaagaataaataccaagaaataaactgcacggaaaaagtctgggtatatgatctgcgtaccaatatgaccagttttggtaaacgcacaccctttggtaatcccgacattggttttgcatcagaggacttcggcacagatccacatcttggagcgttcgagaaagtttttggagacagagctgacggaaccagcaagcgtaccgaaggtgaatacagttttggtgcgcaagagattgaagtagaaaaaaattctgtagaaggaaaccaggatacagatgagtttctcgcgcattctcgttggcgctgctttagccgcgagtggattagcaatatcaaaggggactcattggatatttcttggctgaaagacaaagacagtgtagatgcagccaatttaccggacccggagattttggcgcgaagtgcaaaagaagaactggaaacagcattgaatgagttagatgatttgttgacagtattggaaggggctaattaa

SEQ ID NO: 251975 - DNA, 360 bp, Klebsiella pneumoniae
atgcgagtactgaaacgctggaagcaccttctgaaacccctgaggcgagatctggctttactgctggatcattatgaaggcactgctaaaatcaatcgttacggtaaatgcgttaccaacgcggtagggcaacccttcaatatcacttacaaagatatggtagcgcgtaagcgttggaagttggatgtgatgcgacgtaaactgctgtcgcacatattacagggtctggaaagccgggctgtttacgattacgttgccagccataagggcgtttgcgcactggagcacgatgggtttgtttcctatgaagaggtaactgactggtctcatccatacctcttgattgagaaaaaacattaa

SEQ ID NO: 251976 - DNA, 873 bp, Klebsiella pneumoniae
atgaaatcatacattacgcataacaatatctatgtgacaaattcaacgctggactatttcaagtcggtcgttttcagtattccttataatggtgtgccaagtcttcggcgtccattttatcgtaatatagcagtatttcttcagcatgttatttgtgtgtcgacctgtagtcgtaaaaacaagaaaaaagcaaagattaaggcgagtaaaaaatggtcttattctgtgcctgttccatttgaattaggcagggcgaagcttcctggagtatttaagaaaagtggggcgaccaatgagcgtgcaatggaagcgctgaaaaatgccgggatcataaaactaaccgggtattccaatgcccaacgttcttgccgggaatatgctgtttctcaacgtttcctgcgtaagttgtttggcaacgaccgcgaggcataccttagccgtaaggatcgctaccattatctgtcggatattttcaccaagcgtaaaagctactcatttgatgaattgatcggcgttgcgatcgaccgagggcagaatgctaaacatcagcagtctaaacgcgatatccctaacgctgccttcagggagctggtagtgagtgtctggaacaaccttgagccgcttgaaatcaatctggatgcactgctggattactataacgagaattccacgaagaagaacaaaatattcattttcaacttcctgtcgcgactggctgaaacaggtgtggatttggtgaaggaatcaccgctaacggtttcttacaggcagtcgtataaaacagcgtacatcggcggaagatcctttgaggttggtacaggcttccagactctaccgtctaaaatgaagtgggcgtgtctggcacgtgtgtga

SEQ ID NO: 251977 - DNA, 438 bp, Klebsiella pneumoniae
atgcccaatttctggaagctgtcacatggctggaaggagttctcattcctggatatggtcgaatgtattgatgaaaagctcgtctacattcaccgcacgaccgctggtaaagggcagtcttccgtcagccaggcagaggagtttgtaaacgctccgattggtgattacttctacctgacccacggtaatcagggtgtatacctgcttggtcagttcactggtccggttaactacttcacaaaacacagtgatggttggatggacagaccattccggctgattcacaaagctaatgccagagaagcatattatggtgtcgagaaatggtggacacctaatcacaactctacctttgttaaggttccgcaccacgaatatgatttatttgaagaactgatattgacgccctatttcaatattaacctaaaagatttttaa

SEQ ID NO: 251978 - DNA, 750 bp, Klebsiella pneumoniae
atgaagggagttttagagaaatgtactgtggaagactttaactacatatcggccactctggatagctatgtatctttcacaaacgataagcgcagaaaaacactattatctgcatatcaaaacaacccagcattgcatgctgaattaatatcacttattgacacacaaataaaatacttcggttcttccgatttggcttatctgaagaggcatttaactaatggggaaggttctattccagccacggagatcattgatgatgtatgcaaaaaactaaaggtcaatgttaaagtcggcggctcgatagaatcaaaacttgaaaagctggtgctctccgttgttgagaaggaactattaagcaagacgccagaagaattatcaaaatgtttcaatgagctgggagtaggtgatattgacagagaggagataatctcccatatcaaaaagaatggcaaagtggcaattttgcctattgtatttcagatccttggtcccaaaattgcacttgggatcgtagaaaccattatcgtcagtctcatcgctcagatgattggaagggaggcggcgaaacaactcgtcaaagagttactcaagcgtaacccctggattaatagcttaggacccattctatgggctatatctggagcatggattgcttatgatctgcaaggtccagcctatcgcaaaaccgtgccaatttgcctgtatctggggatcgtagctttgcgtgatggcgaagaaatgttttga

SEQ ID NO: 251979 - DNA, 936 bp, Klebsiella pneumoniae
atgcagaatcgcgtgtatacgttatcgggtggtaaagggaaaacacgttcggcaatttatgagaacaaagttgctgaatggcaggtaagcattttcagtacgggcgagtgcagccttcaacaactggctgcttccgggaacattgagcgccttgaaggcgaaaatgtgcgtgtaatcgacgttaatgcagatgctggtgctgaaatggggatcttcgaatcattaccggatggtgttaattctagcaacgaacttgttcatgcgatcaaggatgcaactcaccgatattgcggtagtgccaaacctgcctttctcaagcgcctgatagcggatattcaggatgatcgtgagagtgtgaaacggaagctcgaaaaagggattgagttctttctgaataagcacaaggtagatcgtaactccggcattcaggtacgtattgccaaacgttttgccatcgcttatgtagcaggttccatggctgtgaaatatggtgttttaccctttacaaagcaggatgtgatgaaggggatctcaacctgctacctggactcccttgaggtggttttatctgaacctgaggtaatgaagtcaccattaggtcgttcgtttgatgcaattattgatttttgcaaaaaggatgatcttttaaatctgattggaaatgatcgcgtaacccaaacggcgattaaaaaggcaccggtcattatccacaaagttaaaggacgtatggtatatgcagttgataaggatctggtacataactgcttgccgaaatctcagcgcaaaggcatcctgatgctattaaccaagcaaggggtattattatccgatacgaataaggagtacagtactattcagattatctataagcgtaagcaagttggtcgtcgctactgttttgtatgcagcaagttcgataagtttatgacagaatag

SEQ ID NO: 251980 - DNA, 696 bp, Klebsiella pneumoniae
atgaaattatataaaggaaagttaagtgacaaagaggaaaaattgcttgttacattgttggctcgtacaaagatttccgaatcatgtccagttgcataccggtttattaaaatcactgattcgcaggggctggagtcgacatgtgtacttattcctgctttggcacttgtcagtgtattagagttaaagaaaacattattaaaatgtgggcataatcccaatgtaactaaagaatactggagtcgggcgcatcaggaggtcgttaaggaaacggataaggtaatcacactgtgctataagcctggtttttatggtgatgcttatttgcgtgctaatgataaagtcgttggtgagataaaaggggataaaccaatattacaccccagcgcaaaaaatcatttacctgtcgagagaaaacaggaaacattaaaattatggaaaatgaatgtcgctccatacgcgctacatagctcgcgcattatgctggctctgtgctgcggattttctggctttctccttaagctttcaggtatggaagggggtgggtttcatttgtgggggatgagtagtataggaaaaacgtccagtgcctacatgctggcatcattagcaggatcaccgaaagatgttgtcgtactgtggaacaatacggataaagggcttgaggagattgccgtggcccataacgacagctaa

SEQ ID NO: 251981 - DNA, 879 bp, Klebsiella pneumoniae
atgaaaattccgtcagtgatgataaacgaagcggtgatgccgccccctgttaatcctcaacttgaggcgttcgcaaaagaaattaaaagacaggtgcctaagttcgaaactatcgatgatgtctacgaagaaagagtaaagcgtagaaagtcattacgaactattgggaggcgtctggataaaagggagtatctaaaattagcaataaagattgaaaactgttggctcggtgggccttgtgggagcgcggcatgtccggaatgcttcagacggcaccggctggaaatgattggagaggtacttcgcttatgtaagaaacggaagcattggagaggcttaaccttaatattttatcaggatgcacttagtgacagtcaactgcttcaatggcagcccgatacattaatagcacggcttcgtcgctggttaaatgaatgtggcttctctggaatggtgattggtgggttcgaaatggattatcacacagatattaaaaagtggatgccccattttcaccttatcattcccaatgacaaacaggctattaaaaggctacgtatcaggatgaagaacaagaagaacatgaatacgcgggaaaatgtagtaaaccgccctatgctcgtgagcaagttaaaaaatccaatacgacaggtgagctaccgttttaaagctatctggtggcgagtcgaatcaatacagtatgatgattatcatatacaagggagcaaggaaaggaaaaggaaacgctggactaaaaaataccgtctattgcgtaagcaatatgttgattctctgattaagctagattctattggaatagctggattaacctttatgtataaagtaaggaagtatggtgaccatttgacattaaaataa

SEQ ID NO: 251982 - DNA, 207 bp, Klebsiella pneumoniae
atggcacttacccgcatcttaaaaattcaggaagttctgcaccgttgtagcatttcaagatcgtctctttatcgcttaatctccaaggggcacttcccctcgcagctccgcttgtcaccggaaggtcgtagtgtcggctggcttgaagaagacatagagggatggatttctagtcgtaagtctatcaacgatggaaagcttacatga

SEQ ID NO: 251983 - DNA, 528 bp, Klebsiella pneumoniae
atgacggaaaagaatttaataccagtttaccctgagctgggcgcggattcacttagaaagctgacaatgattgcttcacagcattatccgggctgggcaaaagaagaaaaaaagagtggtgaaccgctgaatatgaccctgagttattgtattgaggtagcctataacctgctggaaaagtcccgcacaacccatccgctttatgatgctttacccccaccccaaacggtcaaagcccggaccctctacgatatttatcaacgcattacgaccctgaaaggcaaaggcagcaccgcagcacagatggtgtcgtaccttaatcaggcgcaatttcctaccccggatgacctgttcgcgaacaaaccactgacggcaacggcctgtaatccatcacgctgggataagcgcgatttggccgcaattatcaccccgaatgggcagcccaccgggcgactgagagaatacctgcaggaactgaataaacgcagtcaacgcaaaagagcacttggagcgaatagcgtacgttag

SEQ ID NO: 251984 - DNA, 897 bp, Klebsiella pneumoniae
atggtgcaaacaaccgtgtttgatgcgtatatcaacggtcttgctcattcggggcgacggggcatcaccagcctgttaaaccgcagcgctggtatacttaagcgcggtgcggatgcagcaggttatccatgggaacaacttaactacgccgccgttgccaaagtacgtgcggcactgctggatgacggttacgccgtgtcatcggtcaacatggcgctgtcagcactccggggtgtggcgcagacggcctttaacctcaattgtatcaatgccgaaacgctggcacgtatccggtcagttaagcgcgtgagcggcgatatccagcgcaagggaagggcgctggacaggcaggaaatccgcgcgctgattcatgccgcaaaacagcatccgcaaccggtacggcgctaccgtgatgccgctattgtgctgacactttgcggaacgggcttgcgggccggggaactggttaaacttgagcgccgggactatgacaacggcatcctgacggtcaggcaagggaaggggcgtaaataccgcgaaattcatgtggcggatgcggtggacaaggccatccgcgcatggcttaaagtcagtgcaaacgaagctgaaaacgcactgttcagccgtattcagcgcaatgggaagactgccacccaatctctgacaacaaccgggttaacgggtatcctggctgagttacagcaaacggcaggcatagcacgttttaccccgcatgatatgcggcgcaccttcatcacccgtttgctggaacagggcgtggatatcaacaccgtccgccagttggcaggccacagcgacatatccacgacgacgcgctatgactatcgtggtgaggagatgaaaatcagcgccagtcagcagcttaaatgctggtaa

SEQ ID NO: 251985 - DNA, 801 bp, Klebsiella pneumoniae
atgaatcctattgaatatgaaaaaacgataaaagacttatacaaaactctattgaaaatgtatccgggaagtattgatgttaaacataatgttaaacttggaggcaatcagatcgatgtcatgtgggagcatgaacttgctgatgttagatataaaactattgtcgagtgcaagcaatataccaagccagtttccaaaaatgttgtaagacaggttcatgatacaatgcagtatcttaaagctactggtatcattgtaactacgagtaaatttcagtccggagcaatagaattagcaagggaatacaagaatatacatttactcaaagtcaatttctttaaaaggaaaggagcaacattagaaatgtatattacagagaaaatggaacctatgatcgtctttgatgagttgacgtctagtcagacagcattgcaaagcttgtatgaaatggataagtcactggtcagttcgttatcagttattaatgataagaaagagcatttatataaccttggtgaatttatggagtttgcaacttctgatgcgcacgaaggggaaaacgtagtgccatttgaaaatcattatatttctatctttgatggtgtatatttgaggataaagcaagttgagtttaagacgatatataaaaatatgcttcctgaatttgcaaaggactgtgctccaacagaaattaaaactattgctaaagtgacaaatgttataactggtgaggagaaagagattgaattagaggatttctggtatgaagaaattgatttttctactcaagtaataggttag

SEQ ID NO: 251986 - DNA, 915 bp, Klebsiella pneumoniae
atgcaaatacaatttgatgcgcttaagaatcatgatataaataacagcaatgtccatctttgggtttttaaaagaagtacaactgcgaatcgttttacttctcattatgttcaaactgataataaattaaatgatcagttaaaattaattgcccaaggtgaatttcggcgaatcacagagtttcatgcctatagttacttggctgaaacgaatgataatagctgcctttctacagtcattgctggtagtgattttgccgaccttaaaactcttgttgacaggcctgaaccagattgcagactggcaaatatcaaagatttgaagaatgttagtggctatgtagttaaattcactcataacgggcaaactgtttatgccattaaacgaagtgcaaaaaactggaaggcatcatttttaaaaactcatgtaaatattgtttttaaaaatggagagctatcagcagcagaagatgaagctttcgtaattgagcggaattttgatttttatgctatagatacggctctgttcattgcgaataagcgagcctttgaatcagttatggagcatagagcatcttatacacaagcctttacaaatcttcaggcgacagcttctttttctgacctctttactgatatgactactataataaactatgtggggaataactcaattcaacttcgtaggatggctagagttgaggaacgagcattatacctatcccctctgtttttaacggcggtgcaaagtgtgaataatcttcgcgcttggggacttaattttgaaccacagacaggtaaaattatcccttgtgaccaaactgtaaaaacaataatacaggttttattagaccaccgtttgctgagtgaggttactaatctgatatatgatgttccagacgcaacacaagtttaa

SEQ ID NO: 251987 - DNA, 582 bp, Klebsiella pneumoniae
atgcaatttcaattaataccagggtttcttatttttttaggctcctacctaccgcttgcactcatattagcattgcaggatattcctaaggcatggtggaacaagacactatgcacagctcagagcttctctaatggaacctgtgtatttgtcccttttgcgaatccgataatttccacttctttcttgttagtaacgttggttgcaatgctaattgttcggatatcccttaagaagatagattatcctttcgctgttaatgtaaaaaaatataaaccgataccgaatgaaattataaattacacatttccttatgtagtgtcttttatgggcatcagttacgatgaaccgcaaaaactaatagggtttttagtttttcttctatggatgttcgcaattacatataagtctggtcagattcttatgaatcctcttcttattattatggggtggaggctttatgaggcaactatagttatcagcaatgtggaaaaagatgtgcgtatacttgcttatggagaattaaaggttggaaatgtcactgctcaaacaatacaagatttttatattgttaaaggataa

SEQ ID NO: 251988 - DNA, 306 bp, Klebsiella pneumoniae
atgaatgataatccagaagagcacctattccagaccctatatttattaaggaaaatgaaaggtgggtacacgttttattcaacaattgatgaagtgctgcgccagtataatgctacatctgcgggggcggtgataaataaagaccagttgctggctgtaattagtaagtattcattaaagcaaaaaacatcgttaggaaggcctgtccctcctttcgaaaccaggggtggtgaaggcaacaacattacccatattggtatgattgatagggcttataaagtgccttcggaatggtccaacagataa

SEQ ID NO: 251989 - DNA, 1107 bp, Klebsiella pneumoniae
atgaagacaattataaagtttgatagattgttcgttgtctctgaaagtcataatttatatttcgaccaaaagttttcaaataaaataaacataataagtgggtgtaatacctcgggtaaaagtactttaatacagagcgttttatttacctttggaattaatgatgttaaagatggtttgagcgaaattattcgatacaaacctacgttcagattggatttcagcatcactaaaggaggtgtagataaaaaatatataatagtaagagagctcggtagcatatatttaaaagaggatgggggggatctttttagttttcatggtattgactctgatggtcgagttgaacatgtgaaacttaaggaaatgttatctcaattatttgattttaatatgcttttagaacagaagggggagctaaaaaaagcatcgatagaatgtatgttcctgccttactatatttctcaatctgtagggtgggtttatttaagagagtcattctctaaccttggtttttataaggactttaaagacacgtatcttgattattatcttggcatagaaaattcttttgataaagaatatttttataagttaacaaaagagcgggcgcaacttcagtcgaagatctcctcattgagtaaatatagcactgagcctcactttgttgtttctaaattactggatgaagaattcggcgatgaggcacagaagtatattgatggttatataaatttagttgcatcattagacgaagaacgtgatgtatatacgagtttgtgtaataaattatccttgactaaaaatcatgtcaagatcctaagaagaactaaaagaaatatcaaaaaccaaaactataacaatattgaccgttgtcctgcatgtacgcaaatacttccttattccctagaggggttatatggttattatcaaaaaatcaatgatactgataaactatcagagcaaataaataataaaatacaaaagatacagtctgatattaatagttcacttgcgaagattaaaaagttagaaattgatatatcttcaaactattcatattttcttgagaaaaaatcacaaaatatatctgttaatacatggtga

SEQ ID NO: 251990 - DNA, 771 bp, Klebsiella pneumoniae
atggcgttaacagatatcaaggtcagaacagccaagccaacggataagcaatacaaactgaccgatggtagcggtatgcaccttcttgtccatccaaatggttctaagtactggcgtttgcagtaccgttatgacggcaagcaaaagatgttggcacttggggtataccctgaaatcacactggcggatgccagagcacgtcgtgacgaagcgcgtaagctgctagcgaatggcgtcgatccgggagacaaaaagaaaaatgataaggttgaacagagtaaagctcgaacctttaaagaggtagcgattgagtggcatggcaccaataaaaagtggtctgaagatcacgcccatcgtgtgctaaaaagtctggaagataatctcttcgcagcgcttggtgagcgtaatatcgctgagttaaaaactcgcgatttattagcacccattaaagccgtggagatgtctggacgtcttgaggttgctgcccgtcttcaacagcgcactacggccatcatgcggtatgcggtgcaaagtgggttaattgattataacccggcacaagagatggctggggcggttgcttctggcagtcgacagcaccgtcctgcgctggcgttaaagcgtatcccagacctacttcaaaaaatagatggctataccggaagaccattaacccgttgggctgccgaacttactctgcttatctttattcgttccagtgagctgcgttttgcacgttggtcagagatcgattttgaaacgtcaatgtag

SEQ ID NO: 251991 - DNA, 432 bp, Klebsiella pneumoniae
atgcgtaccccgcatctggtgccgctttcaaagcaggcgctggcgatcctgaagcagataaaacaattctgtggcgaacatgagctgatttttattggcgatcatgatccgcgtaagcccatgagcgagaacacggtaaacagtgcactccggttgatgggctatgacactaaagttgaggtttgcggccacggcttccgtacaatggcctgtagttcgttaattgagtcaggactatggtcgaaggatgcggtggaaagacagatgagccatatggaacgcaattcggtgagggcggcgtatatccataaagcggaacatctggatgagcgcaagttgatgttgcagtggtgggctgattttttggatgcgaatcgggataaagggattacaccgtttgactatgcgaagatcaatcggggtaatatgtag

SEQ ID NO: 251992 - DNA, 2931 bp, Klebsiella pneumoniae
atgacacccatcaaatcccccaaaaaactgatcgaagtggccctgccgctagacgatatcaacgccgccgcggcgcgggaaaaatccatccgccacggtcacccctccactttgcacctatggtgggcgcgccgccccttggccgctgcgcgggcggtgatttttgcccagatggtgaacgaccctggttaccagcagggtgatggctttaagtacggggtgaacaagcaagaggcggccaagaagcgcgagaagctgtttaatatcctgcgcgagctggtgaaatgggagaacaccaataatgaggcagtgctcaatcaggcgcgcgcggccatcatggagagctggcgcgaaatctgcgcccttaacaaagaccacccagatgcggctgaactgtttaaccctgaaaagctcccaggttttcacgaccccttcgccggtggcggcgcactgccactcgaagcccagcgtttaggattggaatcacatgcctccgacttaaatccagtggctgtcaccatcaacaaggcgatgattgagatccctcccaaatttgctggccgtgcacctgtgggaccagagccggtcgccgataaaatcagcaagaaaaaggccaccaaagatgcttttgccgattggtccggtgctaagggcttggcggaagatgtgcgccgctatggtgcctggatgcgcgatgaggcgcaaaagcgcattggccatctctatcccaaggtcttgattacagctgacatggtggcggagcggcctgatctggcaccatatcttggcgatgagctgaccgtgattgcctggctgtgggcccgtaccgttaaaagccccaacccagccttttctcatgtagctgtgccactggcgtctacctttatcctgtcttccaaggctggaaaagaggcttatgttgagcctgtggtatccggtgatagttaccagttcacagtgaaggtgggtcaaccgcccgaatcagccaagggcggcactaccgctggtaaacgggctgcttttttgtgcctgatgtcaggctcaccggtggactataagtacattcgtagcgaaggcagcgtcgggcgaatgggccaacggctgatggcgattgttgcagatggcaaaaagggacgggtgtatttgtccccttctgagcagcaagctaatgtcgctagggaagctaagccggaatggtcgccagaaatgcttttgccaaataatccacgggattttaaaacgccaaattatggccttgataagttcggtgatctttttaccccccgccaattagtcgccttgaccaccttctctgacttggtgggtgaggcaattgagcgctgccgacaagatgcgctctcaggcggcatgtccgataatggcataggcctcgatgccggtggcaccggtgccacagcgtatgcgcaagcggtgggggtgtatttggggtttgcaactaacaaaatggcagatttagggaatagcttatgtagatgggaacctgttgctcaatgtccacggcagctttttggcagacaagcgatacccatgatttgggattttgctgagtctaatccgattggtgaccgctcaggtggatggagtgtttttattgacggtttaacaaaggcttttagtggttgttttgataatgttgagtctcattggtatggactggtacagcaggccgacgcacaaactcaaacaatcagccgaaataaagtgatctcctccgatcctccttactacgacaatatcggttacgccgatctgtccgatttcttctatgtttggttgcgtaaatctttgcggccgattttccctggtctctatgccactatggcggtgcctaaggccgaggagctggtcgccactccctatcgtcacggcggaaaggagggcgccgaagcgttctttttagatggcatgggcaaggcgatccaccagttggcagagcaggcgcatcctgcttttccggtcactatctactacgcctttaagcaatcggaaaccaaggccgatggtacctccagcgccggatgggagacttttttacaggcggtgatcgacgctggttttgccattaacggcacctggcctatgcgcactgaaaatagctcacgaatgattgcgtccggtacaaatgcgctggcctccagtgtggtgttggtatgcaacaagcgggtggcgaatgccgacagtatcagccgccgccagtttatccgcgaacttaaccgggtattgccggaggcgctggatgaaatgacccagggcagcattgatgccctgggtatcagccaatcagcggtggccccggtggatttatcacaagccattattggccccggaatgggcatcttcagtaaatattccgcggtgctcgaagctgatggcagcaagatgagcgtgaagactgcactgcaactgattaaccgcttcttggccgaagatgactttgacaacgatacccaattctgcctgcactggtttgaacagcagggctggcgcgtgggtaagttcggtgaagccgatgtattagcccgcgccaagggcaccagcgtggcaggcttgcaagaggccggagtgataagtagcggccagggtgaggtgcaactactcaaatggatcgaactgcccaccgactgggcgccagagcgagacaaccgtaccccggtatgggaaggactgcatcagctgatccggatcctgaacagcgaaggcgccagcggtgctggtgccatgctgggacgactctcagacaagagcgatgcgatccgctcgctggcgtatcgcctctacaccctctgcgagcgtaaaggttgggcacaagaagcccgcgcctataacgaattggtcaccgcgtgggatgcgattcaaagcgccatggccaacagtgggcaagtgggggaaagttatagcttagacctctaa

SEQ ID NO: 251993 - DNA, 240 bp, Klebsiella pneumoniae
gtgtctgaacaagagatctatcagcagatcaagcaagccttgtcagttgcacctcgcaaccaatatacagtcgagctacatctgcaaatgctcaaatatgcagatgagcttaaacacgtgacttcgcgggagttttgtgaaggggttgggctcaaagagagccttggtaccgaattcagcaagatgcgtaatctgactactcgactaaagcttgctgggctcgatacctacaagctctaa

SEQ ID NO: 251994 - DNA, 549 bp, Klebsiella pneumoniae
atgccttatccggcctacgttccttcctgcgggctccccccccaggaccggcaagcgcagcgccgccgggcaggacacttcaagctccatacctgcggtagtgccggatggcggcatacatgccttatccggcctacagaaaacctccttccccgtaggcccggcaagcgcagcgccgccgggcggtcaggctccatacctgcgatagtgccggatggcggcataaatgccttatccggcctacgttccttcctgcgggctccccccgtaggcccgcgcaagcgcagcgccgccgggcggtcaggcaccgtacccgcggcagtgccggatggcggcataaatgccttatccggcctacgttccttcctgcgggctccccccgtaggcccgcgcaagcgcagcgccgccgggcaggacacttcaagctccatacctgcggtagtgccggatggcggcataaatgccttatccggcctacagaaaacctccttccccgtaggcccggcaagcgcagcgccgccgggcgatcaggctccatacctgcgatag

SEQ ID NO: 251995 - DNA, 345 bp, Klebsiella pneumoniae; identical to SEQ ID NO: 81398

SEQ ID NO: 251996 - DNA, 1155 bp, Klebsiella pneumoniae
atgcaaaaggtcaaaagtattggtatcattgctgattggttagttacttatgcaggatcggaaaaagttataagggaatttttaaatgtttaccctcaggcaaatttatattcggttgttgattttttaaacaagcaagaccgtgagtacttttatggaaagcaagcaactacgacttttattcaaagtcttccttttgctcaaaaaaaatatcaaaaatatcttccactaatgccttttgcgatagaacaacttgatgtttcaaatcacgatattatcatatctagtagccatgcagtcgcaaagggtatactcaccggtcccgatcaactgcatataagctatgtccattcaccgatacgttatgcatgggatttacagcatcaatatcttcgcgaagcaggcctaaccaacaatatcaaggggctaatagcaaaatggatgctccataaaattcgtatgtgggactatcgcactgcaaatggtgtagatcattttgttgcaaactctcaatttattgccagaagaataaaaaaggtatatggacgacatgccgatgttatatatccgccagtggatgtcgaaaggttttctctttgtgaagataaggaagatttctatttcacagcatctcgaatggtgccgtacaagcgcattgatgtcatcgttgatgcatttaaattgatgcctgataaaaaattagttgtaattggtgatggctcagagatgaataaaattaagaaaaaggcaggtagtaatgttgagattctcggatatcagcctaatgatgtaatgacagaatatatgcggaaagccaaagcatttatttttgctgcagaagaggatttcggaataacccctgttgaggctcaagcatgtggtacgcctgttatagcttttggaaaaggtggtgcacttgaaacaattcgaccttacggcgagataaatcctacaggtgtattcttcaaagagcaggaaccgatgtcaattaaggaagcagttaatttttttgaaaaaaatcaattaatgtttacttcaatcaattgtaggcataatgctcttcgtttttcggagaaccgctttaaaaatgaggttaataattatatttctgaaaaatgggagttatttgagaaaggaaagaaaataaattattaa

SEQ ID NO: 251997 - DNA, 312 bp, Klebsiella pneumoniae; identical to SEQ ID NO: 200104

SEQ ID NO: 251998 - DNA, 222 bp, Klebsiella pneumoniae
atgagaacacaagaccgcatcacttggcggaacgggtttcgccggaacggggtgcaagtcccgatggaagatatcgaatcgattttcgaggaacgtcgcgctgctgcgctgactatctgggaacgctatgagctgcgcaaggcagaactacaggaagcgggcctcacccagaaagaatacgaaatcgcctgccgtcagttggctgactcgctggggatctga

SEQ ID NO: 251999 - DNA, 483 bp, Klebsiella pneumoniae
atgctcgacaatatgaatgaatatgaggaattcttgttccataggattgatgattcggatttattgacaggatttgttattggccatttagtgattgaacatcttcttgaagagataattctaggctatgacatcaagctcagaaaacattttcttacattgagtcatagtaaaaaaataaacttcataaattctttggaactaatacctgataacgtagcaagttgtttgcaaagtattaacaaaataagaaataaatttgctcatcaattaggttacaagccgaataaaggtgatttattgaacctaattgagcaatgtatagatagttttaacgatatgaccgacggacttgaacaacttcatggtgctctaaaacaatgtgatgatctacttgaaacacaagaaaaatacggagttgggctagctgatctctttatacaagtggtctacgatctagaggggtacgccaaaaaatattga

SEQ ID NO: 252000 - DNA, 1245 bp, Klebsiella pneumoniae
atgaatactaaacttttagcctatttaaacaatgagttacatggagtttggctagatagtgaaaatcgtaatatccacataatacttaaatcaagcattcctataattaaatccgtctggtcaggggcacctatccatcttttggtaggtttatctactaaaaaaaatatactagtgatcgggatgttgattgaagataatgtcgataatccatttttactggcctatccaccaagagaggaagatgaaatcaaagggctggatttgttattatcaggtgattatgatggtattcaattaacattttttgactcgcatacaatgcgtgttatggatctgaaaataaaagtctcggaaaatttaccggataaaaatttaaaaaaacttcatgctaattcctattctctcaattcaggatttagggaaggcaatgaagcaatggatgaattttgcaacaatactttgactggtaacgagaaaataatcagtcttccactaagtgtaattgataaaaaatcttaccttgcaagtgttcatgaaccaaacgataccgaattaacatatgaatttagcaccagcaaaaacggctctgagggatatgagcaggaagctcttataaatcatgctttgcggcagattttttcacatgaagaagtgtttttttctcccgatgttattgagggtaataaaaaaagagaactagttgatattcttgttgtagaaaatgactacgtattatctatacagtctaaagcatcatcattgattgaaatgggattaaaatctcatgagaagctttgtagcatgtataagaaaaaagcattgcaaggtatcgatcaggttaaaggagttatcccaattctaaataatgatgtagttattaatcatggcgggatggaatatttaataaagcgaagaaggggcatttatcatttagtgataatctcagatcttgttttagagaaagaagatgctgaaaagatttatgacgaaattagcaaccttaaagagtcaaaaggggcgagagttttagttatgagtcttgatggtcttgtaaattttataaaactatcaagattaaataaaagaatgttttgggcaatgctggagactaaatacaagttcagcataaaaaaccgtacaattttaattagagacatcgactctagccaagagaataatctaccattacttgccactgatcaatacctatcacttcttcgaggtaagggaaaattaaaataa

SEQ ID NO: 252001 - DNA, 426 bp, Klebsiella pneumoniae
gtggtggccctcgagcaggtgccggacgaagccttcgccagcaaagccgtcggcgacgggatcgcggtgaaaccgaccagcaacatcgtggtggccccggccgccggtaccgtggtgaaaattttcaacactaaccacgcgttctgcctcgaaaccaacaacggtgcggaaatcgtcgttcacatgggtatcgacaccgtggcgctggaaggcaagggcttcaaacgtctggttgaagagggcacggacgtgaaggcgggtgagccgattctggaaatggatctggacttcctcaacgccaacgcgcgctcaatgatcagtccggtcgtctgcagcaacagcgatgaatacagcgcgctggtgatactggcgagcggtaaggtcgttgctggccagacgccgctgtatgagattaaaggcaagtaa

SEQ ID NO: 252002 - DNA, 786 bp, Klebsiella pneumoniae
atggctaaagactcaaagcttgtatacggcgccagtggcaaaacgaacgttttgacgttcgaacctgaaaacctgcacttggttaccgacaaaacgcacccgctttacgatgagcgtatccacctgcctatcagcgaggcaatggtgctgaacatcatggaccaaggcgttcttgagccggttatcgtctggaaagacccggagacagggctgtcttgtgtagtcgatggtcgccagcgtgtgcgccatacactggaagccaacaagcgattgttgaaagagggtaaagaaccgttactggttccggcagtcgctaaacgtggctctgccgttcgcatggcgcaggcgatggtaagtgctaacgaaatccgccaggctgatacgccgctgggccgagcaaagaaaatggctgatgcgctggaccgcgggcacgacgaggacgatttatcgctgatgtttggcgtgagtgttcagacagtacgtgcaacgctgtcgctgctggatgccacccaggctgtccgcgatgcagtggaatctggaactgtcaccgttacccaggcgcgtcagctggcatcgcttaaacctgaagagcagcgggagaaggtatctgaaattgaagcggcaactgctggcacaaccggccatgaaaaagcccggcgtcagcgtcagatcctcggcgaggcaaggccgcgcctgaaaacccgcaaagaaatcaccaaagccctggaatcagccgagggtgagtatgcaagtgcacttcgttgggtgcttggggaggcgcaatga

SEQ ID NO: 252003 - DNA, 1092 bp, Klebsiella pneumoniae
atgtacgattatcttattgttggcgcaggtttttttagtgcagtttgtgcgcacgaattaaataaaaaaggtaagaaggttttggttatagagaagagagctcatttggcaggtaatgcatatacagagaataataatggtatacatgtacataaatatggtgctcacatattccatacaaacaataaagatgtatgggaatatgtcaatcagttcgctgagtttaatggttttataaattcccccgtggcttttcataaaaattcactatataatctgcctttcaatatgaatacgttttatcaattgtggggagttaaaactccagcagaagctaaattgaaaattgactctcaaaaaagccatgtttcttcagagaatgctaagaatttagaggaaaaggcaatagcattagttggctcagatatatataatattcttataaaaggctatacggaaaagcagtgggggagaagtgcaaaagaattgccagccttcattataaaccgactacctgtgcgttttacatttgataataattattttagcgatcgatatcaaggcattccgattggcggatatacgaagctgatacaaaatatgttcggtacagttgagataaagttgagtactgactatttcgaagataaagactattttgattccattgctgaaaaaattatttatactggcccgatagatcaatattttaattattgctatggagaacttggttatcgctcccttcgttttgagcatgaagtattagatagtgataatttccagggtgttgcagttgttaactatactgagtttgaaattccttatacccgtattattgaacacaaacatttcgatccagtagatacatcacacactgtaattactaaagagtaccctgttgattggacgttaggtgccgaagcctattatcctatcaacgatgaaaagaatatgagtgtttatagaaaatatcgtgaattagctaaggctgaaagtaaagttatttttggcggtcgattagcagagtataaatactatgatatgcatcaagtcattgcttctgcgctcaacactgtttcctcattatga

SEQ ID NO: 252004 - DNA, 1293 bp, Klebsiella pneumoniae
atggctaataaacatattaaaaactatttttatattcttttcgttcaatgtgggaattatattttccctctcattactatacctgttgtttctcgtatatttggtcctgaattgatggggaaatatgtactattaacatcaatagttggttatttttctctttttgttaattatagttttaactatactggtgtaaggagaattacgagaggatttgaacggaaaaatgagattttttacactatatttttttcccagtttattattgctcttgtgatatcgtcttttttcttagtatgtgtatacaacattcctctgttatcagaaaataaattactttcttttatttgctttataagtgtttttgcttgtctagggcagcaaaattggatttttcaggcttatagtgattttaaactaattacctatatttctgttctcacaaagatctgcgccttgatatttattcttatttttgttaagcataaagacgatatggaactttatgcctttatagttcaacttagtatttttgttggtgcatttattgggttcattttgtctatattaaaatataaaataaaatgggtgccccctgaattttcagtgtgtctacaatacttgaaagatgatttctacatttttatttcgagtattctatcaaacttatatacgactacaggggttgtgattctgggcatgatgacttcaaacacagaagttgggctttattcctctgcgcaaaaaatcatcgatttaatgcgtaacttctctttactcccgcttaacatgcttatttttcctttgttatctgctgcatttggtcataataaagaaattgctcttgaacatatcagaagagtcatgcctttattttgtgttttttgcttattatctgctgtgtttatttttctatttggtgatttaattattttagccttttttggtgagcagtttagtgctagttcactcttattgaaaattttatctattgggtttgttgctgttttttttggtgttgttatcggtggtcaggttattttaaatctgcagttcgataagcaatttgttataatgcaacttatcgttgctatagttagtttgattctgaatttcatgattcttcccagtggaggtgccattacaacagccatcatatggtctttttcagaggtgttaatgacaggcttacaaattatttttttaagaatgaagggtattaatctcttttatattcaatattttaagcctaagttattatttaaaaccgccattggattaatttctaaataa

SEQ ID NO: 252005 - DNA, 981 bp, Klebsiella pneumoniae
atgaatagtaaattgattgatattatttgtcctgtatataatcaagaaaaaaacataaaaaattttttacttccatttttacacatggatttgaataatgtaaacatcattttaattgatgatggctcaactgataacactccatctataatagatgagattattagtgtaaataaaggcgtgccttttcactactttaaaaaaaacaatggaggagctgcatcagctagaaattatggattaaaaatagcttgctcggaatatatttggttctgcgatcctgatgacgaagttgttgttgatatgaagtatatatatatgattttgcaaagatctcattctgatatctatttctttaattatattcattattttgaaggaaagaatgttagtatctctaagaaatctcttgttaaaggttgttttcatattaatgatataagggggacgcttgttaatcataggttaaatattggaggcgatttgaactcctttctaatctacccatgggataaaataataaaacgaagtgttatcacctgtccttttaacgaaaaagtgtctgtctatgaagatcagttatttaattttcaattatttttctcttcaaatgttaatattgtcgagtttatagattgcgaaatatataagtataaaacttataaaggtggtaactcattaagttctacttggtccaagaccaaaacatcggatttttatttttttataaatcaattaagagacaagttccatttagaccctcgaaatctattcaaacgtgaggtgttttatataataggcaaaggggagagggctgaagcttttaaaacatatgttaatatgcataaggacctcggatataaaatccaacctttatcctctaaaagggaattattcaaattgtttttaatgtctatcaatgtgtattattatgccataaacttaatgagtttggtaaaaagtaaggttaaacatggctaa

SEQ ID NO: 252006 - DNA, 894 bp, Klebsiella pneumoniae
atgtttataggtgatgtaaatgcacaatattacaagagtgaaatggattcaacttacacattcgaaccattaggtcagattgcgaatgttgtaactctctgggcagtatatcattatctcttttttaaagataaattaactaaatccaaacgttacactttacttttatttatagtttttattttccttgtttgtgtttttcgtgcatttgtaaagattgctcgatatgaaatgatgccgcttatttttggatttattgttatttatattcattataagtatcaaacgcgttcaacaactcagattctaaaatattatacactattcttttttttgattgtgataattttttctacatttagcttttttaggaaggatggtaatatcgatgatataattaaagatctattgggatatactatggtgtcttacaatcatatggccgcattacttgccggtcatctcaaactgtttaatcctggcgatggttattatttgtttagttttatatcgagcattccatttgccggtgattctttctcgagcagtcttggatgggctagcaaggatgttatatatttacgttcgttccaagatacattccagtctggtcttaatgggtattatgtatgggtttcatgttttggtgatttatatcaatccataggatatttttcggttatttatttattcctcaatggttttgctatgatgtggtcatggtgtaaatttcgagcaggaagtctttcaggtattattttgtacccttggtttttcttttgcgtatttttttggtttggtgttaatatggttcttacaagatggggattttatacattattgacattggcttttttcagttgttatgatcttttttacagaaaaaaaagataa

SEQ ID NO: 252007 - DNA, 135 bp, Klebsiella pneumoniae; identical to SEQ ID NO: 239987

SEQ ID NO: 252008 - DNA, 1140 bp, Klebsiella pneumoniae
atgacaacaatttcagtaaaagactctctccgcgcagcaacagaagccgcttccggtggccttcagaccattatttatacagataagggtcagccgtgcttcatgaatattattgaaaaatttgcaattgaagacagactaccatcgctcggaattacaggaacgcacccggcattcatcattaatggcgttgaagtcagtgagatcctggttggaacctacggcgcggtgttaaaagacggtgagttcgtttctcagcccaatctggcccccagcgcattcaatatcggcccggcgttccagacgatattcagtcagggtgaggggtttcatccgctgacgaatatagaattttgtgcaattcaattactgaaccttgctgaatcaatatctcctttcgggaacacagattacgggcgctcacgccttaatactgactatcgtggtcgggtagtttctggcggcataccgggcgatagcactaaatcgtcactcatttacaccggttcgggtcctgtgcagttcagacacaacctgaagtataacgggatcagtgatctggtcggcaaccaatcagaaaccgtcggtggccttcgtcttatgaagggtgaattgcaggtttacaccaacaacaattacgcagccctgacagcgagcgaagtttcatggggaactctgggggacacaaactggaaagcgattgacgcggcaacaggtgaattgattacgcctacttatactggtacgtcaggaatggattacaccccgacaacgcctcgatcagttcgtgtaatgggcggggtgtcatcaggctcagcagactacacgatctatctcaacaactgggcgaatctgataagcgtaacaaaaaccgcgagtacaacggcaccagtctctgatgccgcaattgctactctgaaactgatgggaatatatccgctgggagtagacctgaacaccacacctggcaacgctacgttcggaggtagtacctgggataacgaacgttggttcacgcgaggcggtagctacgcatggccagcaaacaactcgggggcaacgctgaactcattttctccaatctggccaaactcatcacaaccggtctacggaacacgtgtttgctggtatagtaattaa

SEQ ID NO: 252009 - DNA, 255 bp, Klebsiella pneumoniae
atgtctgactatgaattaccagtcgctggcacaacgctgacctgcgctgaagccagggggtgccgcgtggggtcactcactgagggcaatgaatataccgttgttttatcgggtagcggggatgatgaatcaccaaatattcacccatacactaaactccgcatggctccaaatttatttaccgtcacaggagatgacggtgcggcagttttactggagggtctggacagtaatattgcactgttctcaatttaa

SEQ ID NO: 252010 - DNA, 174 bp, Klebsiella pneumoniae
atgtatttcagcttgatttatttattgattggactggccatgttttttctgctgtttatattcggtagagtacattgctatacacgatttgatatttttttaagtgcctttctgctttgcattctgtggccgattctgttaatcaagtttgttttttgtttcaggattttgtag

SEQ ID NO: 252011 - DNA, 846 bp, Klebsiella pneumoniae
atgaaacatggaatgatattaacaagagaaataaaaatcaaagatggtgttatatctgcaactggaggttatgacccatcagcgataagattagcgatactataccttgatggcatatgcataccgcaatctgatatgataggctttggtttgagccccgaactggaaacgcttaagagttccggctttttatttgaaaaatcctacccacttacaacaaatagtttttctagtggggccgacgttttgataaaagcttatggtgactgcttttctgatttaaataatacgcataatgaaacttgggttgctcatcagtctctcaatacttatttacaacgaaaaagaataactgacgataatggcgaatgcattcaacttttaaatgcactgccaatgccgagtgaaagctttccgattggtgaccttatggaattcaaagaaaaaagaaaagacaacctgaaggaactactattaaaaattgaagatataaggattgaaataataacatcagagaacaaagatattgcaataaaaaaaggaataatggaaatagaacaaagcattattgaactacataaattggtaatggaaacaaagaatggatggtatctttcaagctttgcaatagatttatcctcacaagatttgttggatacgttcaaaagtgtatatggagaagcgaaagagattggcatgcaatcattagatgctttcttactatcagcaggaataagcgtggcgagtcgatttaatgtaaacgcagggtatagatacacagctggctcacctaactcaccatacctatatgcggttgacgttaagaatagattcaaaataaaataa

SEQ ID NO: 252012 - DNA, 876 bp, Klebsiella pneumoniae
atgtttaacctccagaccctgacagctaaagcccgtgagctgcgcggcaacgtggtaaaagccactaccacgaaaggcacccgcaccatgacccccgtttacgaacgggaagagcagcgcaaactgcgcgagcgcatccagcagacccagccggactgggttttactctggtgggatattgcgaccgttaccggctggcgtaccagtgacgtgtgcaacttccgttactcgtgcatcaactgggaaaccggcattgcaacaatcatcgtagcgaagcagaccaaagcagcagaagccagagcgacccgaaaggggatcgagattgttcgccagcatcgtaaggacgctgcccggcttgctggcgatcacattgggtacatgcactgggatagcgtgacctgcgacgatctggccgccggtatgacggaagaagaacaggcgatcgtgtttgagctggtggcaaaggctgaggttaagcatgataccaaacagctgccgccgggcatcatcaaacgactgcgtgaacgcatggagcgcaatcttatcggtgacgacctggtattttcacgcagccagattgaaagtaaccgttgccagtctctggaaggtagcgttagccgtcagacgatctggaagaaactgcacaacgtcatggtgtggtttacccgcgtagtaaacacgcgtctgcgcctgagcgcctacagcgcccgcaaaatagccgcattcaacatgatgcgccgtggtggtgagcaaggcctgcttatcgcgtccgaaatgctggggcatagcaacccagcagtaacccgaacatacctacagttaggcagtcaggccggagaactccaggcagaaatggcaatggaggtgatggcatga

SEQ ID NO: 252013 - DNA, 528 bp, Klebsiella pneumoniae
atgaaatctgcattaatcagcccgctgctggcgggtctgctgctgttaaccggctgcgcacagcctgccgcacaggccggaggcggcggtggcaccattgacgccatcaaccacacaaaatgggcgatcaaccacttcagtgtcaacggccagtcggggatcgacattttaggcccgtttcagggcggcggcggtggctgctgcttcagcgtgcccgcccgctggacgccgggtatgacggtgcgcgttgactgggaaaccgggcagggttcatccgcgggtttcccggggtttgctgatgaggcgaaataccttgtctggaaaaaagggattgatgcccaaaagaggcagcacagtaaaactgtcccgctgcccgactataacggccaggatgtgtgcggcattacggtacactttttaccctgcgatgacgtgaaggtgaccaccagctgttacacctacggcagtccgtcgtacccgataaaagagcccgtcaggatgacggagccggccgtctgtccgaagtag

SEQ ID NO: 252014 - DNA, 294 bp, Klebsiella pneumoniae
atgacggtgcgcgttgactgggaaaccgggcagggttcatccgcgggtttcccggggtttgctgatgaggcgaaataccttgcctggaaaaaagggattgatgcccaaaaacgccagcacagtaaaactgtcccgctgcctgactataacggccaggacgtgtgcggcattacggtgcactttttaccctgcgatgacgtcaaggtgaccaccagctgctggtcaccgagaaatgcgaactatccgataaaagagcccgtcaggatgaaggagccgaccgtctgtccgaagtag

SEQ ID NO: 252015 - DNA, 207 bp, Klebsiella pneumoniae
atgacgatgttgatcgggagctgcgcgaaaagtttacccgccccggtagtcgttgatacggcctgcagctgggtgcggatcatctacctgactgaccacgatatcgatgtgctggataagcagaccaagcgcgacatcctggcacacaacgaatcagttcagactagctgcataaacaagaaaaatgccccgaaaggggcacggtaa

SEQ ID NO: 252016 - DNA, 162 bp, Klebsiella pneumoniae
atggatttcacgatacttcgggatcttgcggtgggcgtaaatatcaataacattctgtactgtaagagcatattgctcaacatttccgacgcgtttcttgttgaaatcgtagcctgcatcttccatttctttaatggcctgctccacgatgcgacggcttag

SEQ ID NO: 252017 - DNA, 396 bp, Klebsiella pneumoniae
gtgagcacccttgtcataggtggtaaaggcctgacgcacgttctccgggtcgttcacaaagtcgatgataaagacctcatccttaccgggcgccgtccggttgagacgggagaaggtctgcacaatctccacatggttagcgattttcttgtctacatacatggcgaccagtttgggttgatcaaagccagtctggaacttgtcagccaccaacatcacccggtattcaggtcggtcaaaggcaaagcgcaaatcctgcccttggacatccgggttcatgctctgctcggtgaactcttcgttctcatcgacgataaacacatcatccttgaactcgctgtcatcctggtgcatcacctgcttaccggtcatcttgccggagaaggccaccagtga

SEQ ID NO: 252018 - DNA, 231 bp, Klebsiella pneumoniae
atgggctaccacaccactaaagctgaactgctggcgtacaacgggaaatcggacccgattgctgagcgcattgcggcgcatatttgcgatcaggacggagccccagtgtttaccgcggctgacattcttggaactgctaccccggagcgtggggcgctggacggcccaatcgttatggccctgctggctgcaattcatgatgtaaatgaactgggaaagactacgagctaa

SEQ ID NO: 252019 - DNA, 261 bp, Klebsiella pneumoniae; identical to SEQ ID NO: 76460

SEQ ID NO: 252020 - DNA, 255 bp, Klebsiella pneumoniae; identical to SEQ ID NO: 76456

SEQ ID NO: 252021 - DNA, 264 bp, Klebsiella pneumoniae; identical to SEQ ID NO: 76455

SEQ ID NO: 252022 - DNA, 483 bp, Klebsiella pneumoniae; identical to SEQ ID NO: 76453

SEQ ID NO: 252023 - DNA, 234 bp, Klebsiella pneumoniae; identical to SEQ ID NO: 76445

SEQ ID NO: 252024 - DNA, 417 bp, Klebsiella pneumoniae; identical to SEQ ID NO: 76439

SEQ ID NO: 252025 - DNA, 213 bp, Klebsiella pneumoniae
atgtctgctcagctgcgcccctacaaagcatttttcccacaaatcggtcttcgcgtcatgattgacgcatccagcgtcgtcatcggcgatgtcagaattgccgatgacgtcagcgtctggcctctggtggccattcgcggcgacgtcaactatgtatcgataggtcaacgcagcaatattcaggacggtagcgttctccatgtgctcttataa

SEQ ID NO: 252026 - DNA, 447 bp, Klebsiella pneumoniae
  misc_feature (376)..(385): n is a, c, g, or t
atgagcaacgccgcggggtacttttttgatctcgctttgcaaaccacggtaccggagattaaaaccgcaaaggacttccttcaaaagatggccactgacatgaacagcatgaacctcagttcctgccaggctgctcagggaattgtgggtggcctgtttcctcgtacccaggtcgctcaacaaaaggtctgccaggacattgccggtgaaagcaatatcttttcggactgggccgcgtcgcgccagggttgtacggtgggcggcaagatggacagcgtccaggataaggccagcgataaagacaaagaacgtgtgatgaaaaacatcaacatcatgtggaatgccttatcgaagaaccggctcttcgacggcaatnnnnnnnnnnaaggagctgaaggaattcatcatgacgctcaccggtacgctgattttcggggagaacagtga

SEQ ID NO: 252027 - DNA, 468 bp, Klebsiella pneumoniae
atgcaaaagcccaacagtctgcgaaaagccttaactgatgcggtgccggtactgcgtaccaaccccgatatgctttgccttcgcctggacgatggcaacaatacggcgacgctggcgcgctccctgtcgtttgaaaagcggtacacgcttaacatcgtggtcacggatttcaccgacgatattgacctgctgtttgtgccggttatggcctggctgcgggtcaatcagccggacatcatgacgaccgacgaagggcgaaaaaagggcttcacttggtatgcagacatcaacaatgacagcagcattgatgtcagtatcagcctgttgctgaccgagcgcacactggttaaagaggtcgacggcgcgctgcacgttgagaacatcccggagccgccaccgccggagccggtgacgagccctgtcgagatgtggagtaatggcgaactggtgagtaaatgggatgaatga

SEQ ID NO: 252028 - DNA, 885 bp, Klebsiella pneumoniae
ttgtatgaacgcgagcagagcgttacgtcggtagaggcgttcctgcagaaaataaatgaatttaaggctcaggaagggcaggaagtcttttaccgcggacacagcgactataagtacaagctggagccttccctcttccgtgaagaggaggccgtgcctctctataggcataaagaaaagaacatgattaatgagatcctgacggcccatccggctgaattttatcaggaccatttcatgatagataagctggttcgcatgcagcactacggtctgccaacccgcctgctggacgtcacagccaatccgctggtcgccctctatttctgctgcgcggacatgctcgataaaaacgcggaggaagagaaaacaggggatgtgaaaatttttaccgtccaggcggacgacatcaagttttataactctgacaccgtaagttgcatcactaacttgtccctgcttagtatggaagataaaaataaaatcattccggaaactgacattccgattcatcttcgaaacaaaaaatctacggaaatgaagaggctaattcatttcatccgctccgaaaaaccgtacttcgaagacgcaatacgtccaggcgacttgagccgtatactttttgtgcgcgggagaattgccaaccagaggatttcatcccagtccggtgcatttctgcttttcgggcatgaggctgtcctgccggataccggccacagcggtcttaaggtagaccgaatctatatcagcaacaagaaagcgatcctgcaggaacttagcaggcttaatatcaaacctagtaccatctaccccggtattgaagagacggcgagagaaattgcccgcagaacgaagggtgaagagatccttaaccggctaaaatga

SEQ ID NO: 252029 - DNA, 462 bp, Klebsiella pneumoniae
  misc_feature (447)..(456): n is a, c, g, or t
atgctcaatgatgaacatgaagggaagcccgtgataaatctgataatgaaagtgagtgatgaagactggaacgttcccgtgggccaacttgcccacagctcgatgcccctgagtcgttatctggaatacacgaatgacagactctcgatcatctacagagaagtgaataaaacggtcctcgataaacttaagctcataccctgcctgctgatgactgagtttgtgaatgaacagaaccaggatggacggtcgcgcatggtatccaatatccgggtgggtatgcttgagagtgtagcagtcaaagggaaaaatttagagtatgcagtccgcatcgattatgactacgagaaagtgacagtcgataacttcaaattgctgggtgatcggttcttctttcatctatttgaaacgtcgaggacccactgggccatcaaggaagtcagcctnnnnnnnnnnggttaa

SEQ ID NO: 252030 - DNA, 1743 bp, Klebsiella pneumoniae
atgcagaactccggttacaaatacagtgatcaggcaatcctgtgcacaggcaatgagaagctttcagaaatcgggcaacaactcgagctcttaggcatccctgtactttacttaggaagtgtatttgagcgccccgagattaaggattggctgacactgctctcactcttagtagatcgtcgtgcaatgggcttggtgcgaatagcttgcttacctgagtttacgatgtcactagatgatgttggcagtattcttacacatctgcgtgaagatgaaaccggaagtgactggagaaccaaaatcgatgacttccagctctcagacgatgggcgcataggtttagttcggcttgtcaaaacactgagcggctttagcgccaatgactctccctggaacgtcctggcaacggtacttttagacaggacgcgaatcgcagcccgtatggcaacagcaacggattgcaatatccgctcccaatgtatagcaacttggcaattgctcaattttttacgagcacaaccctccagtggtgaaggggtatttatcactcgtacattagatcgtatccgccgtttggttcggctaggagatgatcgcgatcttcggcagcttccggcggcagcacaaagcatagatgcagtgcgcctcatgaccattcatggagcaaaggggctcgaattccctgtaattcatgtacccggcatgaacgctgacactttaccaggtaatccgcagaagcaagtttgtccgccacccaatggcatgattgcggggagtggatccaactccaaggagcaatttaatctggagtataaggcggagagagaatgcttattctacgttgccttatccagagctgaagatcggctatttctctatgctactacgcggaacgctgctggtagcgcccgaaagttatccgactttttaaaccgtattgggcccagcccggttcaaaataacgtgaaacctcaacatgcagtaatcgaaaagcccgaatcattaccagtggactgggttgtcagcggagacctagttctaagtggtgctcagatttccctatatgagtcctgccctcgccgtttcttctatacacatattctccaaatcggaggacgacgaactccaactccattcctaaagatgcacgatgcagttcgtaatgtattccaagagttggtcaacaccgctcccataaaaataactgacatagaagacagagtcacactggcatttgctgtcgaaggcctagctgaacacggttacgcttctgaatttaagtcactggctattggtatggttagttatttcgcttcgattagggaaggccacagctctgaagcaacttgtgcctttacaatgaagtttgggaaaaccgccatcaccgtacaacctgacgatgtattggtttatccagatggacgcaaaacatttcgccgtgtgagaacaggacataaaagagataaagaagaatttgacttaggcgcggctgcctttgtactcgcagcacgacaggcttttcctgatgcaatagtggagctagtacatctttctgaccaaacagtgaccccaatcattctgaccgctaagcagttggataataggcataaaaaaatccttaacacccttgactcaatagctaaaggagtatttccagcagaatcatcatctcgagtatgcccctcctgcccggcatttttcatctgcggattgcttcctgcaggcgtgctaaaaaaatcttaa

SEQ ID NO: 252031 - DNA, 138 bp, Klebsiella pneumoniae
atggtattcgtgaacggcctgattgccgatgcggcgcagcttatggaaaacggacagaatgctgtcgtcaatgaaggcaattttacccagttcacgcagcaggtcgtgttggttttcgcagggaggaatatccagtaa

SEQ ID NO: 252032 - DNA, 390 bp, Klebsiella pneumoniae
atgaatgccagcatctgcattactcgtggagccctgcggtcgaacgtgctccttagccgcctcctgtgctactcgcagcagggcctcagttgcccgtgcgcgcgactcatattgcaagtggcctgcatggccaaccgacggcttctcaccctcaccgtcttgctccaggaaggtaagaagcagatagagggttgtaagtcgttgttgtccatctatgacctcgaactcatcctctctaccccgcttgattacaacaaggttcccaagaaaatagttgtcctggccccctaccaccgagtcttgaatatcgctaataagttgctcaatctgttcggcccgccaagcatagttccgttgataaataggaatcagataattgtcagtgaataa

SEQ ID NO: 252033 - DNA, 204 bp, Klebsiella pneumoniae; identical to SEQ ID NO: 246603

SEQ ID NO: 252034 - DNA, 219 bp, Klebsiella pneumoniae
atgctggaaactcacgcacttcaacactttcttaatctgccggacagcgatgcccgctggctgcaggccaaaaccctgcttgagcgccaccgcactctgcgggacagcattggcgacagctttcgtatgttctcccagctcgatcgtgattttcattcgctgctgctttccgccgcggataatatatttttaatcaatcccttgagattatctccgtga

SEQ ID NO: 252035 - DNA, 258 bp, Klebsiella pneumoniae
gtgctgggttccgtacatctcctccagactctggaatatatctactacgcgaaacgcgttggttttagtggcctgatttatttcgataccttcccgagccgcgaagatccggtcgcggagtgcgctcagaatatccgtatgtacaaagcactgtctgactttattgaccgtctcagcattcctgaaattgagcaaatgatccaaagccaggacgccctgaaagtacagggtatgttactgaaaatgatcgccgaataa

SEQ ID NO: 252036 - DNA, 402 bp, Klebsiella pneumoniae
ttgagtcagatcttcaacacctttactcatattgctcatcaacagattttgcgcctggttttgctgctgattgagttgctgctgaccattttccagttgtgcgaacaaggttgccatatggctgccaagcgtatccacagaggccgccattttctccatagtttcattttgtccctgttgaacactggactgaatggcttcaataaaggcacgcatctgttctgccatcgctttttcacgcacttcactgtcggcaaagattttttccagctgttgggccatgcgttcgccagcaccttcaccttctgcgccaatgcgggctacagattcctgcaggcttcgcagcatgtcattcatacccgcctgcatctcttgctggccgcttttcatttcgctgagtaa

SEQ ID NO: 252037 - DNA, 396 bp, Klebsiella pneumoniae
ttgggcactgccctgacgcgaatcatccccagcctgacgcatatcctgcagcagggtagcgaaaccgctttgcatgctctggatcgcctccacggaacggcccatcatctcctgcatcgtggtaaactgctgaccaaacgtgttatccattttgttcataaaagcagtaaggacgttctcaagcatcgactgcactcgatgactctgatcgccggaggcggtttgcaccacgcccgcaattttgtccaacggatttttcagactagtttcgatggcaccgctaacctgctccgcaatctgctgaccggattcccgataagtagaagacaatgtctctgccattttctgattttctcgcacctgactgtccaccaggttctgcagcatctctcttaa

SEQ ID NO: 252038 - DNA, 1080 bp, Klebsiella pneumoniae
atggatctatttgcgcgtgagtttctgcttccccggcatgtagtaaaagcgctttatctggatgggatgagtgcgttaagtattgcagagaagcttggtgctccattcgatgtggttgcgcaacagatctttgatgcattgttactaccaccacctttacctgaagatacagaacccgcgattgaatacccattgaacgcagagcaggagaaagccgccgcccatcgaggcccggcctttctgcttgaggccgggcctggtacgggcaagactcagactctagtgggacgggtaaaaggattgctctccgatggcgtagatccacgaaaaattcttttgctgacgttctctaacaaagctgcgggagaaatggctgaaaggatcgctcgcgttgacacggaagctgcagctgcaatgtggattggcactttccactcattcggcctcgatctggttcgtcgatttcacgacgaactgaatttgccgctcgaccctcgcctgctggaccggacggaagcagtagaactgctggaacatgagtttcctgtattagatctggttcattatcgcaatctttacgatccaacccgggtgattgcagacatcctcaccggcatctctcgtgccaaggacgaggtagtcgatgcaaatacctacctcgcgttggcacaggccatgcgcgatagagctgttggtattgaagatatagcaacggcagaaaaagccattgaagtcgccaaagtatacgccacttacgagaccctcaaaaagcaggctcgatgcattgactttggggacttggtttcattgccagtgacgcttcttgaagaaaatgaagccattcgatctcacatccaatccacttatgagcacgttctagtcgatgaatatcaggatgtgaaccatagtagcgtacgactgctaaaagccctttgtggcgatggcgaaaacttgtgggtggttggagacgctaagcagtcaatctatcgcttcagaggcgcttcgtcattcaacatgactcgttttgggaatgaggatttcccaggcgggttgcgatatcgtttaaaaacgatctactaa

SEQ ID NO: 252039 - DNA, 843 bp, Klebsiella pneumoniae
atggacgatccctgccatcttcccgacgttgaaatccatcccgatatacagcgcttcacctggctgctcttcctcactggaattattcagcaccctgtcgaactgatgataaatggtgccgctggtcaggttagtaaactggccattcagatatgccttgatcaattccggcgggtaactcgccaggagcgaaggaatatagtcatccggcaggttcttttcgttgtcgaatgtcgaagcctgtaccagaccatacatcgacctcagttcaggcttttccctcacagccttaacaaactggttatagacgaacttaaatccttcaggtgtggtggtcacgtcaatgccattacgcagaccatcaaccttataacgcatacgcgcgattatttttcgccacgcctgacgcgccttatccgctttcagaacgtcgagttcatccaccagcgcattgccgattttaaagcctactatcgtgtcgggcttttccatcgaccgacaaattgtcgtgccgcggtactggcgcccactgtagaaatggacctctttgttgctttcaacgattttgactttcagcccccagtcgtgagcaacttcttccaccgtggggtagaagatatcgcggatctgaggataggtcggggcaaagtagccctggtttattttggggaactcccaaaaccctttgcatattccaccgcagccaacccatgtctttccggatccaaaaccagctacataggctttgaacttctgctgcatagccagaaaacgagcctggggaacgttaagcgtcggagctatcgccatcctcttccctcactcgcgcatcgactacgttga

SEQ ID NO: 252040 - DNA, 330 bp, Klebsiella pneumoniae
ttgttctaccggtttaccctgctggcggcggactttgtcccacaccgtctgggctttcaggcggcgctgggtggcgtcggcgaggtggtttatcacaatccccaggcgttcggtttcataaccatccatgctgcggaaggtcagcaggccattctctttgagaaagtggtcgatgtccgccttttgatgttccattttgctcttcaggtcgtccatcattttttcattccaaccctgcgcctgaagcaagatgttttgcttctgttgcaggctgtagtcaatgaaggcctgggcgacgccgttggcgatatcagcggctttttgcggtga

SEQ ID NO: 252041 - DNA, 552 bp, Klebsiella pneumoniae
gtgaaaaccattctccagcgtttctctgatgatgaagaggcgcaactgatcgccgccgggaaaattgacgaggtactggataaacgcactgagcggctacgtgctgatgttgataagcaaatcaaagccgctaatgaacgcgctgaaaaggcggaagcgttctccaacaaattccgtgatcgtgtcctgggtgatgctatccgcagcgcagcgcttaaggcaggcgcgctgccagaagcatccgacgatctgattcttcgtgctaaaggcacattccagctcaacgacgaaggcgaggccgtagcagttgatgcaaatggcgatgttctgttcggtaaagacggcaaaactccgctcaccccggttgagtgggctgaatctctgaaagagacggccccgcacctgttcccgcgcgccgaaggctccggggctggtggtcataaacccggtggcggtggcggtagtctgaaacgttcagaaatgagctcaagcgacaaagcggactacatccgcaaacatggccagcaggcctatctcaaattgcctaagtaa

SEQ ID NO: 252042 - DNA, 228 bp, Klebsiella pneumoniae; identical to SEQ ID NO: 234480

SEQ ID NO: 252043 - DNA, 489 bp, Klebsiella pneumoniae
gtggtcgaggttgccttcaatgtcgtgcagcaggcagttcatcagcgccagacggcgggtgccgggcaccagttcaaggccgataaacgcgcggtggatctggaaatcctgggtgtcgccgtcgagatcgtccagatcgtgagtctgcgacttcacgtagcgatccgcttcaatcaggaagcccgccgtacctgcagccggatcctgcaccacttcgcgcggctgcggcttcagcagatggataatggttttaatcagcggacgcggagtgaagtactggcccgcgccggatttggtttcgttggcgttcttctgcagcagcccttcgtacatatcgccgaagtcgtctcgggacttcccgtggttgccgttgtaccagtccagcgcgtccatatagctgaccagctcagtcagctgtttgggttgctcaatggtggtactgacattatggaacaccgcctgcaccagctttttctcatcagtgcctaa

SEQ ID NO: 252044 - DNA, 936 bp, Klebsiella pneumoniae
atgccacgggctgtcagcctcgtagaccccagtggcctcggtcatgtagccaccgaggtagctcttcagctcagcacggttcagacacaagttggccgctttgcgcacgcggatgtcctgccacggcgatcctttttcaaaggagaactgccagggccacagatgcggctgggtgttggcgtagaggtgaaaaccctgagacttgatctgatcgatggcgtccggcgccggggcttcaatccagtccacctgcttcgacaacagcgccgcggtacgggcgttggcctccggcaaggggatcagcaccactttatccacccggggaatgcgatctttgttccagtagtcggggtttttatcgaggatcagctgctgacgcggcaccagcttctccagtttgaacgggccgctacccaccgcgtgggcggcgaaggcggtccacgcctgtttgctgcgcgcggcgctatctctcacgttggccggcaccgcgtcatactgcttctgccacgccgtcggcgagacgataaacaggttggtgatgttgtacggcagcagcgcatccggttccgaggtggtcagcgccacggtgtggtcgtcaattttctctgcgccggtgagggtcggcatgcgcgacagggtgttgccgatctgacccggggcgtactgcggcgccgctttattcagcaccttatccacgttccagacgatggcgtcggcgttcacctccgtcccatcatgaaacttcacccccggacgcagggtgaaaatccagcggctggtgttctgcggatcgatgtgccactcggtcgccagccccggcaccagaccgctgggcttttcaccttgcgacagatcccactccaccagcgcgtcgtacagcgggatgccggtaaagcggttgccctcatagccttgatccggctggccaagggttaa

SEQ ID NO: 252045 - DNA, 927 bp, Klebsiella pneumoniae
atggatcccttttctgatgttttgaatctgctgtctgcccgcagctatgccactgcaggtctttccgccggcaatcactgggctatgtcttttcccggatataacggactcaagttcatttttataaaaaaagggatgttctggttcagactggaagcggaacctgaatggacccagctgagtgaggggcaaggcctcgtgctgacccgatatgcccgctttttaatggcgacggacgttaacatcccgccagctgagtcctctgagaaaaaaaggcctcgcgttaacgagaccgtcaactatggaggtgacgaaaacctgttactggctggaaagatggaaattgatcttacttcttcagatattctgcttaacggcctgccgcttgttcttcattttaatacgcagaccgatgacagttctgcgctgtgcacgcttatgtcgctgttctttagggaaaaggtagctaataagccaggctctgttcaggcctgtgactaccttatgcacctgatcatgattgaagtgctgagaagtggatacgaaaagtcatctgaaggctgcgtagtcatcgacaaatttagcgatgcccgtataaacaaggtacttagcgcaattcatcaggaaccagaaaacaactggagtttgcttgagctggcaacaatatctggtatgtcacgagctggcttttcaaaaaaattcagggaggtaacgggactcacgcctcttctgtatctgacaaactggcgtatgcggcttgcgagtaaatccctgagatatacccgtgagtctgtaaagctgatttgttttaagctgggctacagttcagaaagtaccttcagtagtgccttcaagcgcgtttatggcgtcgcccccagaatttatcgtgatcaacactttcaggcaggcttaaaaaaagacgattaa

SEQ ID NO: 252046 - DNA, 786 bp, Klebsiella pneumoniae
atgggtggcgatctccaggtggaaagcatccgtggcgaaggcacaacgtttaaactcaccctgatgctgccaagctatagcggggatgcctaccaacccgccgagcctgcggtaatcaccggatatccaggcaagcgacacaccctgctggtagttgacgatgatgaatcccatcggcagctgatgatggatttactcacgcccataggcttcacgctgctaacagccgaaaatggtcatgtcgcgctacatttagcccggcaaaatcatatcgaccttcttcttctggatgttgcaatgcctgaaatgtcggggtgggaactgctacgtcagttacgtaataagggacaattagcgccggtaattatgatttctgcggaagcggatgagggtaaatgccgccacttcactggcgaaggggaagttcgctacctggttaaaccgctgcgtttccctttactactggagaacatcggtgaaatattgcatctccagtggcgcacggaatgtcagccgccaaagcagccggaaatacatgaaccacgctcgcagcttacccgtgtccagattgagtcgttaaaagagatggccagattgggttatgtgagagggtttcgtgaactgctggacaaacatatttccgctaaccagatcagcaaagccgagggcgaaaaatttgccgagttgctgaggcgctttcgattcaaagagatagtcgagagtcttgaacgcccggagggagagaaaaatggcaatagcaaagccgacggtacttatcgtcgatga

SEQ ID NO: 252047 - DNA, 282 bp, Klebsiella pneumoniae
gtggtggatgatgcggtggtcggcttcgctatctgtgttcttcatgagggaacctgggttaccacgccgatctgctatctggaggatctgtttgtcgatcccgccttccgtggacaaggtattgccagaaccatgattaagtcgctgcaaagcgaaggggcggacaaaggctggtcgcggctgtactggcatacgcgccgtgataatcctgcccgtcatctgtatgatgagtttaccccggctgacgattacgtacgctacaggatcacgcttgagtcctga

SEQ ID NO: 252048 - DNA, 261 bp, Klebsiella pneumoniae
atggtggaagatgtgaactacaccatgatcaccgatgtacagatcgcggaaagaaccaaaacacaggttcagactgataacgtggccgtattacgtcagggaacatccggagcaaaagtgcagacaagtactgaaacgggtaatcagcataaataccagactcgcgtcgtctctaacgcgaataaagttaacctcaagttccctgaagcccagcctgttcttgaagaccagctggcaaaatcgatcgctaatatcctgtaa

SEQ ID NO: 252049 - DNA, 288 bp, Klebsiella pneumoniae
gtgcagattggtggcaacgatggtatccagggtctggggatgcaacgtcatacggtgcgtcatggcatcgaccaacattttgtcccactgcacatccgggaattcctgcgccacttcagcggcaatctcatcccacatcaccataccatggcgctgggcgttggatttggtcaccacggtcagcagtttacgtggacgagactgtgccagtctgaaggcatagcgcataatgcgtgtcaccccaacacgggtaaagattgccacttcggtaccgacttcttcaggtaa

SEQ ID NO: 252050 - DNA, 429 bp, Klebsiella pneumoniae
atggacagtaagcgtgattattctgttcagcttggcgcccggcttatcgagcagaacggcgcggttaaaaccgccacgcaatccagcggcgagcaaaccgcatccacatcggtgctcggcatttgcgtttccaatgtctcggaggcctatacgctggcgctcggctggtgcgccagatatctcggcattaaaggcgaggaatatcgttacagcatcaatcaggagtttatcgccaaagtcgcagaatccggcatggtaacggcaatcgtcaatgcctggcagtacggtgcgattcgcgacactgatatggtcagagctctgcagaggcttgacctgatagatcctgctgacgaccctgaaactgtcattgacgctattcgtaacggcgcgcctaacctgattggtggcaataatggcaacggcgaatga

SEQ ID NO: 252051 - DNA, 558 bp, Klebsiella pneumoniae
atgggcgttggtgacgcagaacaccagcgttttttgctgcccggtgggatccaggtatttggtgagctcaccgcataccgcacggttaaaccctgggatcaccagactgcggttaaagtcggcgacctcaaagtcctgatcgtcggccagcgtgtcgttgatcagctcgcccagtgggttcaggcgttccacctgttcgccttcggaaagatagaccccatcctgcgcattgcgggtgacgatctgaatagggggatcctgatcgatcaggtagccatcgatcaccgccgtacggtaggtgtagcggtaaaccggttcgccgaaaatctccactgtatgcagcgctggcgtggcggtcagggcgatttttaccgcatcgaaatggtcgagaatgcgacggtaggcggaaacgtaatccagctggctgcggaactgcaactcgccctcggtttgctctttatcgagaatgtagccgcggtgtgcttcatcgacgacgatacagtcgtagcggccaaccggcattggctcatcggattgcagcgtgcgcttgaccagtga

SEQ ID NO: 252052 - DNA, 354 bp, Klebsiella pneumoniae
atggcagtggctgtacatcagggcaatctgttccgcacgttgatttccggggtcatcattatgggaatcaccctgtggatcgccacccagaccattggcctgcacacccagctggcggcaaacgccggggccctgaaagccggcggcatggtggcctcaatggaccagggtggttcgccgattacctggctgctgatccagctctttacctggcaaaatgtggttggcttcgcggtcatcggcatcatctatctggccggcgttctactgacctggcgtcgcgctcgcggcttcatcgccgcggaaaaagcagaaaaaagcgctgccccgcaacaaagtacaggcatgtcttga

SEQ ID NO: 252053 - DNA, 132 bp, Klebsiella pneumoniae
atgttctgggaggtagccgtgtcattcctgacctggcaccgtgcaagcatctttctctatccctggatgagcttgagcatattcctgattctgatggggaggggattagccttgagcgctacaccgcgctga

SEQ ID NO: 252054 - DNA, 261 bp, Klebsiella pneumoniae
atgttgaaaattctcaaaactccggaagggaaaaagtttcttattgctgtggcttgtgtgtttatcgttgcggtatgcgtggtgtcaaaagccgcgttccagggcgtggaagaccagtacaatctgccgatggatacctgggacacatccctgtttatcatccagggcgcatgggtggccatttacagctttatgttcaccattgtgggggcgctgcctttcgggttttactttctcagccctaaagatgattcagaataa

SEQ ID NO: 252055 - DNA, 510 bp, Klebsiella pneumoniae
atgaagtttctcatcatgactggctgccggagtacagagatcagaacagcaagatgggagtggtttgatttccatgagcaaacgtggaccattccggcaagcgattataaaaccgggaaatcggtcagaagggcacttcccgaggcagtagtaagaatgatgttagcagagaaggaaacgtcagtttcaaaacatgttgtgacactgtcacgttacagggggccagaagatgacagaccgccactacaaccaaacgtcgctctgttttctgctcagattatagctaaaacaggcatgaagccctggtctctccatgacctcagacgaacagtggcgacacgcctttctgaattaggtgcgccgccacatgttgtggaaaaactgcttggccatcatatggcaggtgtcatggcacgttataacctgcatgattatctggatgatcagcgtcactggattgctgtttggcaggatcaccttgagaagctggttggtcagcctctggtttga

SEQ ID NO: 252056 - DNA, 429 bp, Klebsiella pneumoniae
atgtccgtgaaaatcaacgccgtgcttgtttgctccctctctttactcctttccgcctgctcgggtcgtgcttctgcgccgggcagcgccgaagacgctaaaatatcggctgaagtggataagatacttcgcgattatcaaacgggttccgatacttcaccccaggccaatgcctcacgctatctggcacggatccaggcggctatcttcgctaacatagaccagccggcctcctggcaagggcaaaaatgctcggtgcgctttatgctgcagcgtgacgggacggtgcaggatccaacggtcgagagcggcgatcggccattctgcgcgcaggtgatgtccgcgctgaaaaaagccaacatcccgcccgcgccggacgaaaaaacctatcaaaccttcagtcatgtcgtgctggacgtgaagccctga

SEQ ID NO: 252057 - DNA, 171 bp, Klebsiella pneumoniae
atgacaaaagccgagtgggcgaaattacccgctgattataaaggcgtgcggggtgctgcagaaaccgaaacacacggcgcctaccgcttccgccggtgcatgacgcacggttgtacgctcgtgaatgtgtatatcacagacatgaaaaccgttgaaattccgaaaaaatag

SEQ ID NO: 252058 - DNA, 339 bp, Klebsiella pneumoniae
atgcgtcaggttgccagcgagatggggttgccggaccgtggacgccagccgttactcccgcccgccgcctggtacgatctgctcagccgccagggttgcgaagttgatatctggcgcaccacctattttcatccccttgcttctcatcaggcgattgtcgactggctgcagggcaccgggttacgcccctatctggcaggcctggacgagcaggccggaagcgcgtttctcacacgctatctcgcattgctggccgcacactatccgttacagtgtaacgggaaggtgctcctgcgtttcccacggctgtttatcgtggcgcgaaagatcgccgcctga

SEQ ID NO: 252059 - DNA, 204 bp, Klebsiella pneumoniae
atgacaatcgtaaaaacccataccggcaccgtgatcaccaaagacggtccgaaggtaaaaaaactgcaccagacagagcggatgtgggtcgtcggcaaaaacgagttttaccacaaagaaaccgggcgccgtcactttgcagaaaatacgcgccgccggttgttgttggaaacgattgagacgataggtggttcacatgactga

SEQ ID NO: 252060 - DNA, 264 bp, Klebsiella pneumoniae
atgacacaaacgcacgcccaaagcagtaaactgcgaaagctcatgcaacagctccggatcatcgacgccagcaggaatgacaaggtcgaccgcaacattgtctttaatccggtagttctgaatagccgcccggaattgacgggcataaagatcccactcattgagtggcccattcatccacagtgtgagtttttcagcaccctcgttaatcgcccgacgaagggtatcgccaatggctcccgggcaatatcgggcatccggtag

SEQ ID NO: 252061 - DNA, 183 bp, Klebsiella pneumoniae
atgaacaccagcgccacgacggcgactttgccgggtggcgtgcgggcgaaagagatcagttccgctttgtaccagccgcagcacattcccagcacaaagataaattgccaggccagcaggggaaaggcgaattcaaattcgcagggcgtcacccgtaccggccagcgttgccagcagccgtag

SEQ ID NO: 252062 - DNA, 426 bp, Klebsiella pneumoniae
  misc_feature (268)..(268): n is a, c, g, or t
atgctcggcgcgcccgaagcgggctggcatctggaattcacccactgccgccaccatcccgtcaccccctcggcaggcgatgaagatctgctggtgctgtactatccgcagcaggcggcatgggaggcacagtgcgcagccatggacgccgccggatttctgcgcgttacggcgtttaacccttactgggaggtcaatggcgtcactttcgtcgaccgggacggttaccgcacggtattgcaaaaccgcgcctggggcatggtgtgtnattcgtcgggtatgacgctgagcgaggcgggcgttatgcgatgtaaaagcagttatttacattcgtacaaatatcgttcccgtcggttaccgataaaacgctgtcgcgcctcgccagcgtcctcacggcgcgctatgctacacatcccgttgtattaa

SEQ ID NO: 252063 - DNA, 243 bp, Klebsiella pneumoniae
gtgggtgacaatgataaaggcgcgtttgccgtcgcgcagggcattcactccctgcgagacgattttcagggcatcgatatccaaccccgaatccgattcatcgagaatgcacagctccggctcaagcaccgccatttgcaaaatatcgttgcgctttttctcaccgccggagaagccaacgttcaccgagcgggtcaggagatcttccggcatctgcagcagcttgatcttttcttccattaa

SEQ ID NO: 252064 - DNA, 303 bp, Klebsiella pneumoniae
atgcagaaccagcggaacgtcaacgcagtcgcgaatagccgccaggcgctcaaaatcaagcttcggttcggcggtgtaaaggccgtgcgcggtaccgatggcgacggccagcgaatcaataccggtacgagcgacaaattcgcgggcctgttcggggttggtatagagcgcatctttagcatcgaccaccagatcgtcttcaactccgcccagacggcccagctcggcttcaacgctggcatcatagcggtggctcaactccaccacgctttttaccagtgccacattctcctcgaacggtga

SEQ ID NO: 252065 - DNA, 318 bp, Klebsiella pneumoniae
gtgctgctgtgcgatgaggcgaccagtgcgctggatcccgagaccaccgcctcggtgctggccctgctggcggatattaaccagcgcctcaatctgaccatcgtgttgattacgcaccagctggaggtggtgaaaaccatctgtgaccacgcggcgctgctggaacagggcgagattgtcgaaagcggtaaactcgccgacctgctggtgaccccatggtcgcggctgcgccagtcgctgctgcacgacccgcaggctgaacaggaatttcttacccgccacggcgttcaggggaggccattatgcggagtagcatga

SEQ ID NO: 252066 - DNA, 471 bp, Klebsiella pneumoniae
atggccgcaattcctttcctgtttggtgccgccggtatgctgatcaatggctacgtcaccgactggctggtcaaaggcggcatggcaccgatcaaaagccgcaagatctgcatcattgccgggatgttctgctccgcggcgtttacactgatcgtgccgcatgccactacctctttcgcggcggtgttgttaatcggtatggcgttgttctgcattcattttgccggaacgtcctgctggggattgatccacgtcgccgtggcatcaagaatgacggcttccgtcggcagtattcagaatttcgccagctttatctgcgcttcatttgcaccggtggtgaccggatttattgtcgataccacccattccttccagctggcgctggttatatgcggctgtgtgaccgctctcggcgcgctggcctacattttcctggttcggcagccaattagcgatccgcgtaacgactaa

SEQ ID NO: 252067 - DNA, 228 bp, Klebsiella pneumoniae
atggaatacaccttctttatcagtgcgcttataggtgtgcgcaccaaagtaatcacgctgagcctgaatcaggttagcgggcagaacagcggaacggtagctgtcatagtaggcaattgcggcagagaacgtcggtaccgggataccattctgtacggcataggctacaacatcacgcagtgcctgttgatagtcatcagcgatctgtttgaagtatggagccagtag

SEQ ID NO: 252068 - DNA, 390 bp, Klebsiella pneumoniae
gtgcggattacgcagggtaaaggtggcctcttcgtcaaattgcggcgcgggttgtggttcttcgcctgctggcagaggaatgtcgccggcgagaatttccagcaccgcctggggggtatcagcgcgcgtcagcgcctcaggtactcgatcatcgcccagagcatgggtgagctggcgcaaaatatcgagatgctcattgtcctgagccgcgataccgacaatcagataggcggtttgctcctcaccccagtcaaccccctgcggacaagccagcaccttaacgcccgttttaagcactgcgtcgcgactgtgcggcgtaccgtggggaatggcaatgccgttgcccagataggtgctgatttgcccctcgcgctcgcgcatgccttgtag

SEQ ID NO: 252069 - DNA, 246 bp, Klebsiella pneumoniae
gtgcatgaagccgtgacgaccgtcagtgaacatgtgcaggaaaacctcactgccactgaacagcgtcttgccacgctggaaaatgcctttgcgaccctgaaaaaggacgtcaccacgaaggctgaccagaccagccaggcattcagcaagttaaaaacgtcgctggataacaccgaaagcaccacgcagccacgccgcaagctctccaccggtggcggtggcgatgatctgctgaccgactgctaa

SEQ ID NO: 252070 - DNA, 174 bp, Klebsiella pneumoniae
atgattcactaccgcgccgtaatcattgatggtggtgaagctgaatttggctggcagcgtgcgcagcgcgacccctttaggcgcgatctccagcgaggaaaacggggcgaccatgccgacagcgtgtttttgtccgttaagggtgatgctgtcgatggtgatatagcgcgctga

SEQ ID NO: 252071 - DNA, 186 bp, Klebsiella pneumoniae
atgaccgtggtttgcgcgccaacggatgctgacgccagcgtgctggctaaaagcagggagcgaaacaggctagctctgggcagagacaatatcgccatactcaattcactttgtcatgtggtcatgaagattaacaaaccacgtccagataccgacgtggaaatttttaaatacatcaatgcctaa

SEQ ID NO: 252072 - DNA, 360 bp, Klebsiella pneumoniae
gtgcaggccgtgctgcgtcgtagcggtggcagcagagatccgcaggaagaggtgttgcgctggcaggggatggaggtcaatacgggagcgatgacagtcactgtggctgacagtaaaggcagggtaaccagtgttgacgttacacccacagaattcaatctgctggtcacaatgatgcgcgccccggttcgcgcgctgagccgtcagtttcttctggagcagtgtctgccggacagcgacgcgctggaacgcgtggtggacacccatatttataatctgcgtaaaaagctcgagtcagccgggcagtctgacgtgctgctgaacgtgcgtggcgtgggttacaggtttcgtcagccatga

SEQ ID NO: 252073 - DNA, 309 bp, Klebsiella pneumoniae
atgagtcttaaacatcgattacccgagctggaagccagcatcgacccggcagcattgcgtgcagccgccgacgaatattcggatctgcttctgactttgtgcttatgcatgaagatggccggccccacccgggcgaacgtgcgcgcctgcgccagcgagcttaaaaaacgcctgacaacctggcacagccataaagagctcaatgcaattctgtccagttgggatcccgttggctatgttctcggcctccgccgtgaagcgaacgacaacgcgcgcgcagctggcgatccggtagatgtctttgtgtga

SEQ ID NO: 252074 - DNA, 351 bp, Klebsiella pneumoniae; identical to SEQ ID NO: 215847

SEQ ID NO: 252075 - DNA, 192 bp, Klebsiella pneumoniae
gtggtgccggtttacaccctgccgcccgagctggcgcgtgaagcgcgagggccggacagcgacccgcacaatccgctgctgcgcgatgtcggctggaataatctcaagggccgtctgcgttcccatccggacgtggcggaacgctactatcaggacgtgtttcgcgaacgcgccgagcaattgatcgtttaa

SEQ ID NO: 252076 - DNA, 177 bp, Klebsiella pneumoniae; identical to SEQ ID NO: 139670

SEQ ID NO: 252077 - DNA, 216 bp, Klebsiella pneumoniae
gtgacctttgaagatggtcagacgttaaaaatccgcttcgatcagggaatgggatactggcgtatcgacttcccgtatgcatggcgtaactttgactttactgacgatgtgacttatcagctagtaaaactggcgcaagcctgccaggagggcaaagtccttaatagcgaggaaagctgggcaacggatgtgctggtagaggtgatggcgtcttaa

SEQ ID NO: 252078 - DNA, 138 bp, Klebsiella pneumoniae
atggtagtggacgcctgcatcgtcaccgcctcgctgtgggtggttagcctgccgatgctgctggtctctgtcctcggcgccgtgattttgaattcgattatcgccatgaaccaccgccccggacgctatgcggtgtaa

SEQ ID NO: 252079 - DNA, 303 bp, Klebsiella pneumoniae
atgaatgtcggcttctggcttctcttttttggcggcatcgaaaaatacaggtacctgatctcctatccagtgtttaacgtcttcatgcttgacaaaggaatagggtttgtagcctttgcattcaataaaccttacctcctgataccccttagcgatgaatacatcactttcagcttttttaccgtcaacagaacggaaaacttttcctatctcaacggctccttcatgtttcatcacttcagcaacaagatattcgaagagcgccccctgcagctgcgccgcggcacctttaacattcgttag

SEQ ID NO: 252080 - DNA, 138 bp, Klebsiella pneumoniae
atgctcaatacgctgcgcacggcaatctatacccagccgtgggtggccgccctgccgggcctgatgatttttatcacctccatttcgttcaatatcctcgcggaccgcctgcgtgcggcaatggcgattaaggagtaa

SEQ ID NO: 252081 - DNA, 240 bp, Klebsiella pneumoniae
atggcgggtactgatacgaaaaggagaacccgatgtcgcctggagggcaagataattttgccccagggaaaagagctgcttttgcccgttacgcacggccagggcaatgtagaagtcgggattcacattcaggacgttggcaaacgtcagcgcaggagatactactgcaatattatgttttatcgttacggttccggggttgcgaagatgaacattgtcttttctgaccgggtacaataa

SEQ ID NO: 252082 - DNA, 162 bp, Klebsiella pneumoniae
atgttggcctccgccctgctgcgcggcgtcgcgccggatgcgctggcgctggcgcacgccagtcgcgctgccgccattacggttagccgccgggggacgctcagcgcgtttcccggcagccgtgagctcgccgccctgttaaccacggacggggcgcgctga

SEQ ID NO: 252083 - DNA, 195 bp, Klebsiella pneumoniae
gtgccagcgaaggatgccctggggctggaaagcgccgagcataacccgtacgccaatattctggtgaccaccccagccctggcgaatgacccgcgcattaaggcgctggcgaaagacctgacctcgccgcaggtggcggagtttatccgtaaaacctacaacggctcggtgatcccggtggcccctcagtcatga

SEQ ID NO: 252084 - DNA, 231 bp, Klebsiella pneumoniae
atgcacggaaaatcgaaaaaagcgggtggtatcaggggaaagaataactttctgctgaaatggctgcgccgggcgcaggataacaacatttttcctcccgatatcaccagtgaaatcgaatggctgcgaggaaaaattattcaggctggctatgacaccgatctcgagccgatgctggattttgtctacgccaccgccagccgcgccgaggcgctcaaaaacgccgaatag

SEQ ID NO: 252085 - DNA, 180 bp, Klebsiella pneumoniae
atgcgcggtcacccggtgtttatcgcccagcacgcgaccgctacctgctgtcgcggctgcctggaaaaatggcatgccattccccacggccgcgcgctgagcgagccggagcaggactatatcgtgcaggtcatccaccgctggctggtgctacaaatgaatgcgccgtctgtgcgctaa

SEQ ID NO: 252086 - DNA, 180 bp, Klebsiella pneumoniae
gtgccgctctcctgcgagatggggatctgcggcgcctgcctgacgccggtacgcgagggaaccgtcgaccaccgggataccgtgcagtcggaggcggaaaaacaggccgcagagcagcatattgcgctgtgctgctcccgcagcctgtcggccaatttagttatcgatctcgcgggataa

SEQ ID NO: 252087 - DNA, 1263 bp, Klebsiella pneumoniae
atggaaaaaactaaactttctctggtagatcgacttttagccctttgctttgtaatatcgataattttcactgcgcgtacctttgaactactagagcttccattatattattttattgaaataggtgtcctcgctgggatcttagttcttttaatagttatttatgtgatggggcgatcaactaatgtttctctcgataaaaaagtgctatttacggctgggttgactctatttttaaatgtgttttctccaattatggctaatatcaattttggacaaagcattatattaggtatattagctttcagaataccaattatggctgctgtaatatatttattatattatggtatatttaaatataaagtaaaagtagataatgagcggttttttgaatatgtaatttcgtggttatttataatatctttattgataacattagtgtggatatatcttacttataccctaaatgcagaatattactacttttcaagtggtaatttattagtcgatacgcgtagtgatggatcatatcgttttagattcgatatattctttccatttatgttgttatgttgctcgtggtataaatcatcaaaaaataaatcaagatatccaattgtttattggtttactttaggattgtctataatttatttgattttttattttcagggccgagtttttataggtgccctagcattatcttttttcttatgctatataagaacgtatgtatacagcacaaggtacgtaatcctttatcttttagtctttatttcagttttattatcaattgtggtgtatttcacttacggtgaactcatagagttataccagaacatgcttcggtcgctttcgctcaatgacagttcatctttagtaagactaagaatattaagggttatgcaaaacaattttatagataactttctccttgggaacggatatctcagtaaccaagctgatataaatatgggggatacgaaattcagtcctctagatataggtgttttaggcgtgatttatacgtatggctttattctatttttaataacatttagttggtttagtaagctatggttagattcatttaataaaataaatgcaaagctatatacattttgctttagtgtattatatttaaatatgctatttacaggtgctttcttttttagaccatatcaaatcatggtgttacttattttccacatgctttttaaccgaaataaaaaaaatttgaaaaaagggagtgtttattaa

SEQ ID NO: 252088 - DNA, 1500 bp, Klebsiella pneumoniae
gtgaatttatctgaaatgaactggggtgatgactctgctgaaaaggattcactacttagtgaatactttgtggagtctgcatcttataggcgcataaagagtggggcaaaaaaaataattgttggaaggaaaggcgcaggaaaaagtgcgctaatgaagatgatgttaaaaaatcatcaagaagatggttttatagttataaaaataacgccttccttagatgttttgaaaagtgctttacagacagcaagaacgatacatagtgaagacaataacaataacttattgcatataagagatgttatttacacccatacttgggtctcatatatatatgagttaatattgtgtaagtttggagaaaagataaacaaggaagaaggaataaaaattgataaactaactggaagcaggaagtttgccagtgatttgagtaaggatttgggactctaccaaaagagtttgtcgggctatcttcaaagcatcattaatggattgaaaatcgatgctggtaaatttgggaagataggcatcactgttggagaggcagaagatcttgaaaaggcgctgtcggatatctctaaggcgaatgtatacaaatatcatgttgatgaacttcttggaaattataaagtcgctatattagtagacgatttagaccaaggttgggatggaagcgacgagtctaattcttttacaaaaggggttatgtacgctatcgataggataaacaccagtcatactgacataagaacatccttattcataagggaagatatgtatgcaattattctttctgaaatgcaacactccgataaatatagaaacgctgaaaaaataacatggtcagtggattccttgaaagagattttgacaaaaaggatagccttcaattttggtgtggaacctactgaagagggcttataccataaggttttccctgagaaggtaggtaaaacatatagtgacaactggattttttctagaactctttttagacctagagagttgttgcaattttcaaggatctatacagaaagtctagatggaaatgaaccagatgcaaaaaaactgaaagcagctgaattacagtactcgcagtggaaacttagcgatttatgctctgaattctatgagcaataccctgatttattttccattcttgaatggtggcgaacaaaattctatcgccataaatatcacctcgattatgaagaagtgcgtaatgtgatcgaaagtgttttctctggagtaaatgttaaatatgagtggtacacagaattaaaaaattcaggaaatgttttaggattgctgaccatattatataaaataggttttataggcgactattccttaggcggtaatggaggtactaaggtcaagtactcgtatgaagctgacggcacacctgtgctttcttctgtacaaatccatccttgctttagagtggctatgaacactatcgagcgtgatcgctcaaagaaaaaagcgataagctag

SEQ ID NO: 252089 - DNA, 906 bp, Klebsiella pneumoniae
ttgaataacgcagtactcgaacttttcaacgaccgcttaccgcacaagccgtacttttcggacgatctgcactttggtgtacgcattgccggtaaggaacgcgccattctggcgaaatacatccagttcaatcagcctcacgccatgttctggctgggattcgacgtcgatcgcgtcggtgccgccatcgactggagcgaccgcaacgctccagcgcccacgctgaccatcaccaatcccgaaaacggacacgcgcacctactgtacgcactggaaacttcgatacgtaccgcgccggacggaaaaatgaagccattgcgctacgccgcctccgtggagaatgcgctacgtaaaaaattagaggctgacgcagggtattcggggctaatctgcaaaaatccgaaccacggccactggaaaattgccgtatggcagccggaactctacacgctggactggctggccgactttctcgacctgaatgcggcgaacgataaagaaatcgtcgtcgactatggcttaggccgtaactgcaccctgttcgacaaaacccgcaagtgggcataccgcgccattcgtcagggatggcctgagtatgagcagtggctacaagcctgctatgaacgagccagtgcatacaacctgcaatttgcagcgccgctgaatgaacatgaggtgaacggggtagctaaaagtatagctaaatggactttcaagaattttaatgaatcttctttcgaagaatatgtgaaaaatagccactcatcggcaattcaatcaaagagaggaactttatctggcgcttctcggagaaaaggttctgctgaagaaagaaagccatgggtagacatgggtattagcagaagaaaatattactacataaaatcaaaggcaggagaaggatag

SEQ ID NO: 252090 - DNA, 390 bp, Klebsiella pneumoniae
gtgaaaaaggcgttgaaagaccttcagaacgggccttacaacctgctttataaaatgtcagatgaagatgaatatcggacagtggccccggtaaacgtttgggataatttccgcttcacatacttcaaattccctgcaaatgccgatttacccgttgtgttctatatcggtgacgatggtaaagaacacaccgttaaccagcatccagccggggaatataacaacattgttgtggctgaaacggtagcaaaagaatggcgtattcgttacggaaataaagtcgtgggtgttctgaatatgaattacaacccaaatttaggggcgatcagtaccggcactacgtcaccagatgttaagcgcgtgaaaaagggtgagggggataaatcatga

SEQ ID NO: 252091 - DNA, 894 bp, Klebsiella pneumoniae
atgtccaccgatacagccgaagaagagccagagcaacaggataacggccagagcagcacggggggaacagggcaggtggctccggccgccccgccagaactcaacaaagccagcttccttattcgccgtgatggttcggccaccacacagaacccggtaaaaacccggcagcaggaaatgacgctgacatcggcaacgaccaccggacaacaggacagcagcgcggccacaaataccgccgcaccgccgccgggacaaagccccgcaccagtgcgccgcataccctataaccctgacctgtacatcccggaaaatacctcgatcccctgctcactggatcgccgctttgtatctgaccgggcggggaaacttcgctgcacggtcactactgacatctggagcgccagcggcaacacgaagctgatagagaaaggcaccaccgcatcattactttaccgcgccatagcggaagaaggtatgaagcacgggcaagggcgggcattcatcattgcgacgaagctacgcacccgccagccgccttatctcgatatcccgttggttgataccagcgcggctggcgatctgggcgaggctggcgttgatggctggatagattcgcacttctgggaacggttcggcggcgcgttaatggtcggcatgatccccgatattggcgcatgggcatccaacagcgcgggtaaaaaagaccgcaatacggactatacggaaaacagccgccaggctatggcagatatggcacgtaccacgctggagaacagcatcaatattcccccaacgctctataagaatcagggcgagatcatcaacctaatcacaggcgaggatattgatttttccaacatctatacactgaggttgaaaaatgaccgctaa

SEQ ID NO: 252092 - DNA, 462 bp, Klebsiella pneumoniae
  misc_feature (406)..(415): n is a, c, g, or t
atgtctttcggtaagcgaccgctggcgcatacgttaatgcttggacgttcgggggcaggtaaaactacgctgcttaacttcctgctgacgcaagcgatgaagtataacccgcgcatttttgcctttgaccgcgatcagggcatgatgccgatgattaaagcgttacacggtcactacacggttctgaaagagggcgttgcttccgggtgggcacctctacagatgcctggcaccaaagttaacattgcattttgtaagcgcctgatgcgcctgtgcgctgaaattaccaaaggcagcgtactcgatgctgatcaggttaatgaccttaaccgcgccgtcgatgctttgatggatgagaactccctcattccgacagatttacgcaccgtggatatgttaattcagnnnnnnnnnnaaacaaacactggcgtcattgcttgttccgtggactcgcggccatga

SEQ ID NO: 252093 - DNA, 189 bp, Klebsiella pneumoniae
atggcttgtatcaaaggtatgctgataaaaatcgccgcaacagagcacagtgatttccgcgcggcagagctccagcagaaaattaaagtcatgtccggcaaagtcctggacttcatcgacaagcagttcatcatagtaacgggcaagccggatacggatatccggcagcaacccccgggctgtcagtaa

SEQ ID NO: 252094 - DNA, 312 bp, Klebsiella pneumoniae
atgccgggcattcgtgcgcggtattctgggtgggggctggtcgaagctcaggccacgcgatgccagctgctcctgcaggaaaggccggaagcaaaaaccgtgcagaaactcaaaccaggtcatcaccctgatcccttccgggataaagccaaaacgtctgataatctgtgcccgcagatgcgcttcattattcacggtgaaggtcaggagcagcgtcctcctgtcctcactcaaccgtcgtatcagcagcgtggtcttgcccgagccggcaaccgcaaatatcactctcttatccatgccagtgcctcctga

SEQ ID NO: 252095 - DNA, 279 bp, Klebsiella pneumoniae; identical to SEQ ID NO: 250624

SEQ ID NO: 252096 - DNA, 225 bp, Klebsiella pneumoniae; identical to SEQ ID NO: 216173

SEQ ID NO: 252097 - DNA, 684 bp, Klebsiella pneumoniae
atgggtatcattatttgcctgcggttcggtatccgaatcggaatcggaatcagagtcggagtcagaatccgagtcgctgtcggaatccgaatcgctgtcggagtccgagtcgctgtcggagtcagagtcgctgtcagaatccgagtcgctgtcagaatccgaatcgctgtcggagtccgagtcgctgtcggaatccgagtcgctgtcagagtccgagtcgctgtcagagtccgagtcgctgtcagagtccgagtcgctgtcagaatccgagtcgctgtcagaatccgagtcgctgtcggagtcgctgtcggagtcagagtcgctgtccgaatcggagtcactgtcagagtccgagtcactgtccgaatcggaatcgctgtccgagtcgctatccgaatcggagtcactgtcagagtcagaatcgctgtcagaatccgagtcgctgtcggaatccgaatcgctgtccgaatcggagtcagagtcagagtcgctgtcagaatccgaatcgctgtcagagtccgaatcactgtcggagtcagagtcgctgtcggaatcggagtcggagtcggaatcggagtccgaatcactgtcggaatcagagtcggagtcagagtcggagtcgctgtccgaatccgagtcggagtcggagtcgctgtccgaatccgaatcactgtcggagtctga

SEQ ID NO: 252098 - DNA, 240 bp, Klebsiella pneumoniae
atgtctgttgtcatcatctctgtcatcgtcctgccggcgcggaacgtggcggaagccgtcacgcgtcccaaaggagttgcacagcgcccagagcatatgcagggcatctgggccatcatcatggtctgccataggaaaatggcggagctgctctatcagggtgacctgggtcgggctgagccgaatcagtttgttgaacacgtaaggctgcagggactcgatacgcagtattttgtctga

SEQ ID NO: 252099 - DNA, 213 bp, Klebsiella pneumoniae
atgggcggcatgtttttatgggcgaagtttaaatatgcgatggataccacgcaatggcttcagaaaacaatacgcaacggcgtggtgttcgtgcctggtgaatttttctactgcgaagaacctgatcattgcactctgcgaatgtcgtatgtcagcaccacggaagagaatctgatagaagcggttaagcgcctgaaaatttcgcttaattaa

SEQ ID NO: 252100 - DNA, 189 bp, Klebsiella pneumoniae
atggcgcaattcaacctggccccgcgcgttaagacgccggagaacttcaggaagctggataagatccttagcatcctgtcaggggaaacccaaaacgccgaaacactggcgaaaattattgagcaaattggggatgataaccctgataaatggctcgaaccctactggaaatctgtactcgcagcgtga

SEQ ID NO: 252101 - DNA, 186 bp, Klebsiella pneumoniae
atggcaacgggttcaactaacaacaagtcgcagcaacttaatgctcgtttcccacatgatgtagttgcagaattagaaagcaaccttgaagatggggaaacgaaagcgcaatttattgttaccgctgtaaaaggcgagattaaacgccggcagcgcaggaaaaataagccagagcaagtaagctga

SEQ ID NO: 252102 - DNA, 219 bp, Klebsiella pneumoniae
atggcaaaaattgaaatatctgtaacccgaaaagggaaaggcatagatatccagtgccgcatgattaaagacgattctgactcagaactggttaagaaagcagcccgggttattctggtttcactcggcggttttatccattcaattctgagaaaaatgttaggaacagttaacgatttatcgactgttccagtgaaaggcaatgattcatttcattaa

SEQ ID NO: 252103 - DNA, 327 bp, Klebsiella pneumoniae
atgaagtggcgctattctctgcgctggaaactgccgcacaggccctgcccgggtccacgggaactgatttccgttgtcgtggaggctgggcaggcggcacctgaagaggtgatgtcacgctgggtggctggctcaggttacgctgtatgcgtggattttcacggccagaaacagatccaacgctggagcgatgaacggaaagcagcggtgagaaggcgcaacatgcaggcacgtattcatcgtgttgcccctttgtttgccgacgagttaatcgagcgtgaactggctgcgcgtccggagtatttcaatggcaagtccgcccgatga

SEQ ID NO: 252104 - DNA, 375 bp, Klebsiella pneumoniae
  misc_feature (314)..(314): n is a, c, g, or t
atgttgcgtatggtggttgatgccgacgggcagcagcgaatcctggcgacaacgccggagtatcacatcccgcgtgacgatctgcgcgcgctttccccggaagaacagcgcatcgcgctggaaaaacggcggcatgaactgagctatcgcgttttgcctgccgaccagtggcctctttttgagctggtggtcagcgaaatcgacgattgccattaccgtctgcatatgaacctcgaccttttgcagtttgatgtgcagagttttaaagtcatgatggacgacctggcgcaggtctggcgcggtgaaacgctggngccgctcgctattaccttccgtgattatgtgatggctgaacaggcgcgccgacagacatag

SEQ ID NO: 252105 - DNA, 159 bp, Klebsiella pneumoniae
atgtacgagctagggggtcggatgtacgtggataactttatgtttcaacagcttttttacaggcttattcaccttatccataacttgactcaaagcggaggtgtggcattaacccgaaataaaaaaggcccgcatgggcctatttttttgcttccttga

SEQ ID NO: 252106 - DNA, 186 bp, Klebsiella pneumoniae
atgaaatccgtactcatcttcaataacgacatcattactgcgggatgttttgtatttcccactgacatcctcgcgtgcatcggccgtgcggcgttcgataataaatccgtactcatcctcaagagtcctttcttcccgctgagtcgcagcatatttcccggtgatattttcaatattgccggatga

SEQ ID NO: 252107 - DNA, 162 bp, Klebsiella pneumoniae
atgcgcaccaaacccgcgaaccgctctgacactctcctgccgggaggcagtcccgatgatgttcacccgactcagagtgcgggcaagctgtatagccatacaagggactccgcccgcaccgccaagcatcaacagggtctgatcagcatctccgttcactga

SEQ ID NO: 252108 - DNA, 294 bp, Klebsiella pneumoniae
gtgctggcattcctgcagaaatactgcggggaggatagcaccgggctggtggatatcggcggggtgacttaccgcattgtcgacatcggcatgcgcatgctgcagccacatgagctctaccgggcgcaggggttcccggagtggtacatcatcgatcaggattaccgcggtgtgaagtatgcgaaggataagcaggttgcgcgttgtggtaatgcggttcctccgccttttgctgaggcgctggtgagggctaatttaccggagatgtgcctgaaaaaagacattgcagcatga

SEQ ID NO: 252109 - DNA, 144 bp, Klebsiella pneumoniae
atgaccgaagcggcgatcaactcgctggccggcgaagcgctgaacgacatgtactcgcagtgccagaccagcaccggtctgaacccggcattccaggggaatggcgctcagagtgaaatcctttctatggaggctcctgaataa

SEQ ID NO: 252110 - DNA, 150 bp, Klebsiella pneumoniae
atgaactcaaacctggaaaatgagaagcgaaaactaatggctgaagcctcacagttcagggattcagcagagcgtcgtagtttctggactttaatcgttatcgcgattatttcaacattagctatcgccatttttaactttgttttatag

SEQ ID NO: 252111 - DNA, 189 bp, Klebsiella pneumoniae
atggctgtcagtgatggtcgacaaaataactttggcgccgccaaacgccttaatgacttcaacagcctcttctttgttggtatcgatgtagtaatgggcaccgagcgcaatgacttcgcgtgcaatatcatcacccctgccaacggcgataacgcgaaaacccattttgcgtgcatattgcaaagctaa

SEQ ID NO: 252112 - DNA, 234 bp, Klebsiella pneumoniae
atgaccgatgcggccatccatcatgtcgcttggagcgacaatatctgcgcctgcttcggcgtgggtaagcgcctgtctggtgagaatttcttttgtcggctcattaagtacatatccattttcgtcagtgatgccgtcctgaccatgtgtcgtataggcgtcaagagcaacgtcagttatcaccccgagttcaggaaaagcctttttcagcgcccttacagctcgcggtactaa

SEQ ID NO: 252113 - DNA, 153 bp, Klebsiella pneumoniae; identical to SEQ ID NO: 102426

SEQ ID NO: 252114 - DNA, 219 bp, Klebsiella pneumoniae
atgctcgctgtaatctttgtccagaagattatcgacaccggcgctcactttaaagtacttgttcacgcggtaagcggcattggcggaaaccacggcaaaaccggcgctgctgtcaaaatctttgcccaccacattaccttcattaatcgccacccgatgctggctactgaccagacgtaccagcccggtactgctccagttaccactttcccaggataa

SEQ ID NO: 252115 - DNA, 147 bp, Klebsiella pneumoniae
atggaagcgttgtttgaagtcattactggccgggctgtctacttcttctatgtaattagtcgtgacatacatgtctttcagcgccggggctttaaagcgtttatgctcataagcctggccaacgttgacggagctcgccattggtaa

SEQ ID NO: 252116 - DNA, 168 bp, Klebsiella pneumoniae
atggtagttattcttggatggggaatttctattgtcaccccgaaggtggttacctgtactaatgattgcatcactactgtttttgatgccaaaccctttggctggcttctgattgtgttttcattaaccatgatgttctttattatcaggggtatgattaaacgttag

SEQ ID NO: 252117 - DNA, 144 bp, Klebsiella pneumoniae
atgaagataggcccaaagcacacagtgattgccagcagtaacttcgccatcagtaccagcccggccccgataccacagatcaacaccgtggaaataatgaccgcgcaagccaggaataatgacgccaacccggaaccgctataa

SEQ ID NO: 252118 - DNA, 243 bp, Klebsiella pneumoniae
gtgcttaaaccgcactactcaaaagagtctgtggagaagtttattgatagcctgcagtatttcggcattggtttttcgtggggcggttttgaaagcctggccattccatttaacccgcgtaaagatcgtccggaatatcactggccgtacgaagggcactccttccgtttacaaatcggcttagaagatccagtagatttagtaagagacctggatcaggcgctgcgtcatctgaaggggtaa

SEQ ID NO: 252119 - DNA, 153 bp, Klebsiella pneumoniae
atgtacaagcgcatgtcgcaggccagtcgcaaggggaggatttttgacgatgtgttacgccacgcaaagctgtgggctgagaagcagacattaccgtctgacaagtttgaaaagaaaagggcaaagcccgttaagcagcaaggtctgttctga

SEQ ID NO: 252120 - DNA, 285 bp, Klebsiella pneumoniae
atgaacgcataccgcgcatacgacgctatcgaagaacggaaatgggctgaacagtcgctcaccgaagagaagcaaaagtggattgacgatcgggcgcaggaaattatcgacgccctgccgaaagagccgtcaggcctgttccgcttctctgtaccgatggacaaaagcccatacgaaggcctccgcagcgatgcagctggcgaggcatataacgatctcatctcggtagtagcttacgcccaggcggaatacgactgggatcaccgcaccggctgcccgttttaa

SEQ ID NO: 252121 - DNA, 159 bp, Klebsiella pneumoniae
atgatgcgtaatcgccgtactggcgccgcctggctggtcagcttcgactatcgcgacggcagctactggcatgagccgcagggaaatctgcgccacatccgccggccatatgcttcacgcagcattgagccgaacctggttccagccgggacgcattaa

SEQ ID NO: 252122 - DNA, 921 bp, Klebsiella pneumoniae
atggataacttacctttggcattatctggtcaccagctacaaatggaactatacccgataaaagaagccgatgttgatggcatacaaatgggcgttatgaatgatgggtctccatttttaactcagcgaggtttggctagattatgtggcgtggaccatgcagctctccttcggctcgcctcaaactgggacgatgaaaggacgaaaccaagaggccaattcatagaccaaaagcttagagagcaaggattaaatctcaaccgattatttcataagacagtaattcaaggcacagagacaaacgcattccctgatgttgtctgcatggcctttcttgagtattacgcatttgaagctactcagggtagtcgtgaagtagctttatctaactttcgtaagttagcgggttctcaactgcgtagattcatatacttaagtgtagggattgacccagagaacccacagcggggcgctcttgagtgcttccatgaaagactattaatgaatgatcaggttccatttggatatttttctgtatttagagaaatggcagatctttcattaaaaatggttaaaggtaactttgactttggtccctcggcaattccagatataagtgttggcacgatgtggtcaaaatactgggtcgccaatggttgtgacgaaaagtatggccagcgcacaaagtcgccacatgtttatccagactggtttcctcaacatcgtgcaggccctgttgacgcctggatctacccggatgacgcattagggttgtttagacggtggatgcaaaatgaatacattcctaatcgtcttggagattatttatctaagaagtccgccgatggagcgatttcagcagtggatgcattaagaattgttgaggcagttaagaaaccagaacttcctaagccacactga

SEQ ID NO: 252123 - DNA, 228 bp, Klebsiella pneumoniae
atgacgaataaaaccatccagaaggcaattgatatcgctggaagtcagaaaaaattggccgatctgtgtggcgtagcacagccgacagtttggcgctggctgcatggcggcggaatagatgcccgctatgtgatgaaaatcgtgtctgcgactaacggcaagattaaggcggcagagatccggcctgaccttgcacagttgctaagtgcgcattcaccggccgcctaa

SEQ ID NO: 252124 - DNA, 321 bp, Klebsiella pneumoniae
atggagaatgcaatagcccgaaagttagagccgccaatcctcaacccaattgagattgaaggcattttgttaaaccggcttttatccattggccaaaaggtttttgcggaaatgcgaggggttagcgagtcgacaatcagtcgccgcaagagcgaggggtattacgccgaaatggcgaaagagattgctgcgttaggcctgcaggttgttccgccagaagcggttgtggtttcccgccactacctgcagtcagtagaaacgctggcagatatcggtttgcgtgcagagcggtgccgtccaggtccgttagggtgggattga

SEQ ID NO: 252125 - DNA, 153 bp, Klebsiella pneumoniae; identical to SEQ ID NO: 252119

SEQ ID NO: 252126 - DNA, 201 bp, Klebsiella pneumoniae
atgacatgtgaaacgtgcgaaaaacagccaagaggtcgacgccaacctccattggactgcatgcagtatcttcctgaggagcagggcgaatacattgacatcaatggacgcggtacacaggaaagctactatgtttgcagagagtgcgggcacaaatggattcacgaaaccggtaactgcggtatgggctggcaaccttaa

SEQ ID NO: 252127 - DNA, 243 bp, Klebsiella pneumoniae
atggcggaagataatatctatgagcatggagaaagttttagtagggatatggaggtaggcaagacgaccattatccgccaaaaccgaccggtaaaattccgtttggaaatggttaatgggactgttgtggagggaatcatcccagccaactcggaatttaaagtcacaccacaaataggtgatataaaaaaattcgacattttcatcgaagatatccctaagtcgccgcaggcaattgaataa

SEQ ID NO: 252128 - DNA, 321 bp, Klebsiella pneumoniae
atgctcgccctgaattccgggcacactgtaggttatgtccgttacccaacgctcatccggagtatccggattgaactgtcgctggagcctgttgggcgacacgatactggcctcgcctttacgtgccctcgggctccggtatccgacctgagcctttatcccgacacgtttcatcagtcgccagactctgttcactccgcactgttgtccgctgtcccgcagatccagatggattttgcgataaccatagacgcatcccgattccagccagaactgtttaatctgtcctgtcagtctcaggtctgcctgatggcgttgtga

SEQ ID NO: 252129 - DNA, 207 bp, Klebsiella pneumoniae
atgcccgtcggagttacggctggcaccaagcccttctgtatagccgtaatcgagcttgagtggctgatccatccgaaccttgatggttttaccattagcagtttcaaggacaagtttctcgcgaaacagccagttaccgttacgcacgccactcactctgaagttatcgccggcattcatttgagaggatgcacctgttgcctttag

SEQ ID NO: 252130 - DNA, 1962 bp, Klebsiella pneumoniae
atggccgaacttaacccgcctttgggaacgacgacgcctgaaatattcctggataacgtcaagcgcgctgacgaactggtgaacggtccggccggaacgattaacgatcgcggcggtgaaccactcgatacctggcgccagatgatggcgaaaaacgatgagatcaggcagaacctgatccctctcagtaagcaatatatgacgctggaagcggcgcaggcggatatcgcgaatattccggcaggttcaacaacttatgtccgcagtcaggacggaagctctctggccgatgagtatatcaacctcgctggaacgctgcagccaaccggacggcggatggttcgtgacgactacgcataccaggtatcgccagacagcgtgaccctggcagcatatgatccggagacttcccgcgtggctccatttttaaatacaagcggcagattaattcaaatcggtcctgacggaaaatattacgaacttttaacccaacaagaatcagaactttatgcgctgggccgggagagttctataccgcaatttatcggcggtgaaaaagtgtggcggatgacggttgattcaaccacaaaacagatcgttgaagcctatacagttggtggaaaacactggatttactcagacggtggcctggtagctgttaataacggaaatggcggtggcggtggtgacgataatgccaaccagctccctcagtatggacttcatttgtcagggtctacggtatatccgtactcagagacagtgcctgtatgttttatctttgtgactgctgggcagtccaacgcacgtggttattgccctgacgccgatcaaaccattgtcgcagcaacgccgatatatcctgataacgctttcatgctcagcggaggggttaggcgcacagggacacgcagcactactctggtgccgctggttgaggcggtaagcgggacagataaagaaacggccgcaagcggcctcgcgaacaccttcattcgcgatatggctgcagctaccggcgtcatgccgcgcacgctatcaatcgtctgtgctcagtctggacaggcttacgagtaccagaaacgcggtaatgccgtgtaccaatacatgctggactcaatcgaggactgcgtaacggcctgtaaagcacgcggctggctgccgattgttctctgcgttgactggatgcagggagagtccgacgaggactggtcaggattacgagaaggaatgtatgaatcacggatgaggcagtaccagagacaaatcaccagcgacatcatcgcaagaacgggtcaaaacgaaccgccgattatcgccattacccagctggggtatgtcaatgatgggcacaccgcatttacagggcaatatgcgagactttctgctaccaaattgcataatcatggacaattcagatgcgtaaataccctgtaccagtacgattttatttcagacggtctgcacctgacatgcgcaggacagaaccggcgcggtgctgctgtagcgagagcaattatccaggaatggtttaccagcggctggtatgggatggttccgaccggtttcgtgtggaactcaccaacgcagatacaaatcaatgtcccagcgtatacgaacctggtgctggacacgactacgatcaacacctccggtctggccaattacggctttagctacacggatgagactggtgctccacctgctatatcgagcatcgcgattagctctgacggaaagggggtattgattaacctggcgtctgctcctactggccgttttggacgggtttcctacgcaaccgtcgaaaatgcactccagagtggggctactgtgaaaccgtctggtaggaccttgggcgcacgagggtgtgtaagatcttctgccggaatcacgtgggtatacgatacatctgtaaccctctacgactggctccccgcttttcggattaacgttttctga

SEQ ID NO: 252131 - DNA, 285 bp, Klebsiella pneumoniae; identical to SEQ ID NO: 252120

SEQ ID NO: 252132 - DNA, 159 bp, Klebsiella pneumoniae; identical to SEQ ID NO: 252121

SEQ ID NO: 252133 - DNA, 204 bp, Klebsiella pneumoniae
atgtcaaatgaggatgagtttttctcagagatgcacccgcagatagcgcaagttatcgggatagtggttatgcagctgctggttgagaagcgcgagccctcaagagaggcgctgatagagatgattcaggtgctgtggcagggtgaccagttagatctggcagtagagctggcactggatgtgctgatgctcagggaagagtag

SEQ ID NO: 252134 - DNA, 921 bp, Klebsiella pneumoniae; identical to SEQ ID NO: 252122

SEQ ID NO: 252135 - DNA, 420 bp, Klebsiella pneumoniae
gtgctggaccttatggttagtgccggtccgggcatcgtgaaccaggagttcgtggagatcctccgctccgtagaatatgcaccggcggaagcgcgccacatgttcgatgggcgcaaggctgagaacatccggatcatcaacgtccggggcgacagcatgtctggcacgattgagccgggtgatctgctgtttgtcgacatcagcgttaagagcttcgacggcgacgggatatacgcgttcctgtacgacgatactgcacacgttaagcgccttcagaagatgaaggataagctgctggttatctcagataacaaaagctatgcagcgtgggaccctatcgagaaagacgagatgaacagggtgttcgtgttcggcaaggtgatcggaagcatgccgcagacgtacaggaagcatgggtag

SEQ ID NO: 252136 - DNA, 228 bp, Klebsiella pneumoniae; identical to SEQ ID NO: 252123

SEQ ID NO: 252137 - DNA, 321 bp, Klebsiella pneumoniae; identical to SEQ ID NO: 252124

SEQ ID NO: 252138 - DNA, 153 bp, Klebsiella pneumoniae; identical to SEQ ID NO: 252119

SEQ ID NO: 252139 - DNA, 729 bp, Klebsiella pneumoniae
atgtcacttatggcgaaagcaatgggggtcaaagtgggaaactcactgcgtaagctcgttcttatcaagctggccgacaacgccaacgacaagggcgaatgctggccttcgtatcaacacattgccgatcagtgcgaatgcagcaaatccgctgttcgcaaccatattgatgcgcttgaggatatggggttactcaagcgtgaaaatcgcgttggggtcaacaacgggaaaggtaatacatccaacgtatattatctgaaccttgatgccaccactatgccaccaaaaagcacaggggtatgccatgaaatagcaccccctatgccatctgatggcacaccccctatgccaccagatggcaccagaaccagtcactcttttgaaccagtcactgaaccagactctctctctgcgcgagggcagtttatcagcgaggctgcaaagcgacggatcgggatttcacccaacggggaaatacctttccctcctgccttcaagccatcggcagatcacattgcgattgcctcggagaaagggatcaacattgaaaccgagttgctgaactttcgtgattatcaccaggcccgcggcacaaagctgatcgactggaactcggcattccgggtgtggctcaggaacgcgagagttaatccgctttccgggcgccagagaagcgaacctgattccccacactggaacagccctgaaggctggaaggacttcatatga

SEQ ID NO: 252140 - DNA, 777 bp, Klebsiella pneumoniae
atgaccgctcagcttatgactgcgatcagcaatcgcgatggtgatgcgctggccagaatggccgcaggtagcacggagccgcagaggcttctggatttcgaagctgaaagactggttgactctctgttccgtcagttgaagcagatcttcccggcgtcaacgcagaccaatctgcgcaccgacgccgaagagaagacagcgaagcgccagtggattgcagcttttgccgaaaacgggatccgcactcgcgagcagttatccgccggagtgcgacatgcgagagccagcgaatcgccgttctggccatcgccgggccagttcatcaagtggtgcaaggacagcggcaccgtgctgggagtgactcttgtcgacgtgatgaacgagttccaccgctacagccgtgaaaaagggctgcataccggcggtgctgagcgcttcccgtggtctcaccctgtcatgtactgggttgttaccgatacccggcgagcaatgtaccagcgccagctcagcgaggcagaaaccgagaaatatgccgctaaaaagctggaagactgggcgctgaaagtcgccgccggagaacaaataccgtcgccggtactggcccttgagaataaccaggaagccattccgacaaaccatgtcagccggcagcaggggtttcaccctgaaggcaaaagcttcggatgtatgccaagcgcggcatcgctcggtgcattaactccagctcagtggctgcgggatgaatacctgcgcgggaaagagagagggcttatctga

SEQ ID NO: 252141 - DNA, 303 bp, Klebsiella pneumoniae
atgaaaaagaactcgggcaaacaagctgtaatcaattacgtcggccagcatcctggctgcagctttcaggatatccgccgcggtaccgggcttgactcttcagtagtcaattcctccctgtggcagatgcaccgtgacggccaggttaagcgtgagggtgagtgcaggagctaccgctacaccctgattgacacaacagccgtaaccgaaagcgatccgtctgttcagtatcgccagcgtcctggcggtgtaaacccaatgaccaacctgtttaaccagtgcctggcgggagtaagaaaatga

SEQ ID NO: 252142 - DNA, 465 bp, Klebsiella pneumoniae
atgaacatcgaaacagtaaacgagctcatcgcctccctggagagcgcaggcgagctgtcgattagagagcagaagttcctgaagctggcgaaagcgtaccagcagctggcggcggagaatgtggcgctgaaagctgcattcaacaaaccagatgcatggttgtcctgccattcgattccgccgacatatcaagagccagatcgcggtggtgagtatcttgcagtgcatcagcagccgggggagaaaaacgatgacggcagtgattcgtggcctgtttacgccaagcctgaaatcgaaacccccgccaccgatcgcatcgtagccgggattaaggctgatggggtggaggagttcattggtcgcctgcagcagcatgtcgatgagggtgattttgtaggcgatgaagttgccgtaattgttggcgctatcgactgcggtaaggagttttgcgagcaactgcgctag

SEQ ID NO: 252143 - DNA, 705 bp, Klebsiella pneumoniae
  misc_feature (688)..(697): n is a, c, g, or t
atgacggaacaaaccaacgataaaaggcttcatctctctttaccaaaaaattctacagcacagccctatacagcacattctcttggtgggggtggctctaccttactacctgagcgggatcgacaagcacatggagtagccctaagaactcaactgcagcaggttaaggaaatgtcggcccaaattcgtgaagggcaagaaaaccttgagctaattagcggtctcggaatgcaaattgagtttattgggcaacctgatgttgaattagcatttgaaagcttgggtaatgagagggggcggaacaaagatcagcacatagaagttttaagtatacataaggagggcgatataacctctgcaaatgtatttgtgcctgatggaaagctagtgcatttcgaaaattacattcaggattatttgactgagaaacgccgcgcagacggggtttccgctgaccataaatcgttaataaatacattatcagcaatacgtcttgcagaaattaaatctctttggacagacgatttgagtttattgccatctgacccggatgaggcattttggtgggaagtatggctaccagtgaggggtaatagaaatgccgttgttactgattttcatcgaataagccatgcgactggatgccaggtcagcgaacacaaagtcgattttcctgagcgaaccatannnnnnnnnnaaccataa

SEQ ID NO: 252144 - DNA, 474 bp, Klebsiella pneumoniae; identical to SEQ ID NO: 220663

SEQ ID NO: 252145 - DNA, 270 bp, Klebsiella pneumoniae
atgctctttcttatcattataagaatttttgaaatcatttccttttgttttgtggtcattttccagttcagcattctcttttttcacttcaacgccttgctgttgtatgttttcacgggtttcctgatgctgttgtttattctctgcaatcatcccatccactttctgacccacattatccttaataccagcgtcttgcgtcatggcatcgatacgaccagaattttgtccatagtcagcgattaccgaaccattgtccccaccacctga

SEQ ID NO: 252146 - DNA, 1266 bp, Klebsiella pneumoniae
atgtttgcgctttgtgatgtgaattcattttatgcatcgtgcgagaccgtatttcgtcctgacctgaaggggcggccggtggtcgttctgtcaaacaacgacggctgtgtgatcgcccgttcgcaagaggcgaagcccttcgtcaaaatgggcgagccttatttcaagcaaaaggacatgtttcgccggcacggtattatcgcgtttagcagcaactatgagctttatgccgatatgtccaaccgagtgatgacaactctggaggaactctctccacgctgcgaaatttacagtattgatgaggcattttgcgatctgactggtgttcgtaactgtcgcgatcttaccgattttggcagggaaattcgcgagacggttctgcgcaggacgcacctcacagttggtgtcggcatagcccagactaaaaccctggcaaaactggccaatcatgctgcgaaacagtggcagcgacagaccggaggagtggtggatctgtctaatctggaaagacagaggaagttgatggctttgcttccggtggatgaggtctggggagttggccgccgcataagtaaaaaactggaggccatgggcatcaaaacggtgcttcagctggcggataccgatatccgttttatccggaagcattttaacgtcgtgctggaaagaacagtgcgggaactgcgtggtgaaccctgtcttgggctggaagaatttgcgccggtaaagcaggaaatcgtttgcagccgttcgttcggcggtcgtatcacggaataccatgaaatgaggcaggctatatgttcatacgcatcgcgcgctgcggagaaactccgtggcgaacatcagtattgcagatttatttccgcttttgtcaaaaccagcccctttgcgctgaatgaaccgtactacggaaacagtgcatcggtaaaattgcttaccccaacccaggatagtcgggacataatcactgcggcgacaaaatgcctcgacgcaatctggcgagacgggcatcgctatcagaaagcaggcgtgatgcttggggatttctacagtcaaggcgtagcgcagctcaacctcttcgatgataacgcaccacggaagaacagcgaaaagctcatggaagtactcgatcatctcaatgcaaaggatggcagggggacgctgtattttgcagggcaggggatccagacagcctggcggatgaagcgagaaatgctatccccgcgctatactacgagattctgtgacctgctcagagtcaggtga

SEQ ID NO: 252147 - DNA, 1806 bp, Klebsiella pneumoniae
atgagtggggatgaggcccagctgaagcctcttgaatccggcgttccgttttcactgacgttaaatcgtagcgcagcggatgtggccattatgaaagaaattgtccgtcagacccctgaactgagacctgcagtggaacacatcattgcagggcaggtgcaggaagcgctgaatgtggccgatatggttagcccttccattgtcccgcgtgacaaggatgcgacggttccggagaggagcatcattgatctgaaagacagcgataaaatagcagtcgatgagatcgctacggatttcgctggccgaaccagtgaagcacgggataagaccctgatagttgcggaactgaaccgggaccgcatggcgatcaacgaaagtgtgcatgacctgctgcaggcgaaaggtgagctgggtgacagtgtcacggtaaatcatcttgtccgtgtcagtaattcgatggctgatttaaaccgcccgggattctggagtgaaaattataagaataccgttcgtatcggggagcaatatctcacgattggcctggtagatccgaaaagcaaccttgtagagcttaatcatcaggagacggggagcagccgctggatatctccgcttgaactgcgtgcgtcaaacgtagcagtgttcgagacaaaagaaatggaggtttctgtcggtgaacgtattcgatttacggccacagaccatgacagaaaggtgaagtcgaatgacttagctgttgttaccgaaattgataaggttggaaagatcacgctcgatgccggcggtcggaaagtcgtcctcgatccccgggagcagaaagaccaacatttcgattatggctatgctgtgaccacctatagctcccagggtgcatctgtaccctatattattgggctggttggcgttgacggtgccagagagcggatggcctccctggacagcacgtatgtacagttgtcccgttccgtcgaacatatacagctatatgcagatgacctcaataagtgggttgagaaggtgaaggagcgttctggagagcgtgaaacggtccatgatgtgatgttgcgtggagaagatcttaaggcaactaacgaacttaatatatggaaacgtagccaacctgtttctgcgacccggctggctgcaaaaatcgaagacggaaccgcagatgccgcacatttccggagtggaaagacgccggagctgctgtacgcggtactgaatgaacatgggcgccagaggggcaactggcatgtgccagtttcgccaacgactggcagactcgatgttgagaatgcgtactatgctggggcgagtgacggtgtaatggttgtcatgcagcagggagagagtgaagggaaaccgatttatacagataacctgccgcaggcgctgtccgagatggcggagcatcctgataaggctgtcattattctcagggatagcgacagaaatgaaacgaccgacgtcagcgcagctgaaacgattgatataaaactggaagacgaaattgaaaaagaaaaaattaaagaactgctaaaaatcgacacagaagaaccgctaaaaggtgatgagctaaaagataaaatagagtctgagagagacactaaagagctgaatgatgagaagcttatagagcaaatcaacagagaaattaatgaagaggaaaacaaagagcggcaggagaactatcatgttgagttaatgaatgacgagcttaatattgtccgccatgataaagagaaagattaccaacctgattaccaacccgaaatcatcagagaagtacaaaagacgattgaataa

SEQ ID NO: 252148 - DNA, 366 bp, Klebsiella pneumoniae
  misc_feature (33)..(42): n is a, c, g, or t
atggggttcagacccgtgagcatgggcataccnnnnnnnnnnaccagccgtagcaaccttgatgaggtggagacggcgatcggcttcaatttgcgtgactggtggcagcccactgctgaaaacttcctcggcctgctcagtaaaaaccagatagtggaggcgttacaggaggctgggctggattcagtcgccgtcgaagcggcgaagctgaaaaagggagatgcggcgatccttgcagagcgttctctgtcagatacccgctgggtaccaggctggatgcagccacgggatacggaaaaatcgggttcgacaacgacgcccgagcccgatgctgacaacgaagacaacacggcttgcgccgcctga

SEQ ID NO: 252149 - DNA, 372 bp, Klebsiella pneumoniae
atgataaagaaatcagctgttgtttttactgtaatacttttaggtggctgcgttagtgcgccagataagacggagttaagtcgggcagattatggtaagttacctgagaattatcaggaaataattaaaggcagtatgtcggcgcgccttaaagacccttattctgcacgatatgatttcaatgagcctttcaaggggtggtgcaagtcaggatttacaacttattatggatggttagttccttttactcttaacgctaaaaacagttatggcggttatgtcggtaataagtcatacctttatctggtgaataaaaataatgccattgactatacggcctccttccaggtgggagggtgcgggaaaagttag

SEQ ID NO: 252150 - DNA, 1959 bp, Klebsiella pneumoniae
  misc_feature (1247)..(1248): n is a, c, g, or t
atggcagcaacggtaattgacgccctcctggtgacgctgggccttgatacttctcagttccgcaaaggccagcaggaagtcagtgacgacctgaaaaagcagcgcgaagacgccaaaaacaccgccaaggaaatggcggagcagggcaagaaagccgcttcgttcttcagcagcataaagacggaattgctggcactgactggcgttaccgtcactgccggcggcctgataagctttgtgaaaagcaccacttccggcctgatggatttatcgatccagtcgaaagcgctggggctgtcagcccgtgagcttgacggctggtcgaagtcagcagaggcagcagggagttcagctgagaagataagcgcttctctgcaggggtttcagggcgccatacagggcgccagggtcggcgattacagtagctctatttttggtggacttgcgcagttaaatgcgctgacgggccagaattttgacgtgtggggacaggacgccagctctctagccaaaacatcccttgatgcgctacggaaaatcagcgatccaaaccttcgccggcaggtcgggttaagtcttggatttgatgatgcaaccttgcagcgtaatcaggaagggaaattcctgcctgacgttgatcgcctgaccaaaagctccggcattacagatgcctcaaccaaaggcgcaaaggaatttacagccgcatgggcggagctggggcaaaatctcgacacggtaaaaaaccagatttacgtgggcttgataccaaccattcgcgatctgaatggtctcctcatagagtggtcgtctggtaacgcaaaatcctcttcattcttcaaagagctgaagcgggacattaacgacattactggtattgaccttggtagctggacgctatcaggcgatctgcgcaacctcaaagataacttttccatgctcggaaaagtgctaaaccacctgggtaacgctttaaacgagctcaataacggcaacttctccaaggctgccgatgaatttaaaaaggcgtggtacggcactgaagacggaaagcctaccggtaatgatgcgctgcccggagtgaccaaggcagccgagcaggcgctgaagaaaaacggcggcacactggattttaaacctgatcaggactctgcgtatctaagcccgcagcagcaggcaacgcagaaaatgctggatgcagttaagtttcagccgcttcctgaacagcgcaggcagcagcaggatgaaanngactactgggaaagcaccaaaaatctcctttcaaaaatcgctgacgccctgatctctccagctggcgcggcaacaatgcagccagatacctcgggataccagccaaatgtcccgcttaacgcgcaggccgctcgccttggcgctaaaggaaaggcatttcttcaggcaatggccggcgaatttggggctctggaaggtaaatatggacttcctgccggtctgctgtcttcggtatctgctactgaatcaggtggggacccgttagcagtatcccccaaaggggcgaaaggcccattccagtttatggatggaactgccagagacttgggtttgaaggggatggacgtttatgacccccacaagtcagctgatgccgctgcaagatacctgcgctatctgctggatgctactggtggcgatctggaaaaaactcttgcctcctataactgggggctcggaaacgtccagaagaaaggcatggataacctgccgtcggaaactcgcaattacgtccctaaagtcatggccggaatgcgccccggcgccgggatggccgtagaccgcgcgatgcccgggcagtccggtgcgacttatcagttttatggcaccaaaatcaccacccaggcccagaacgtggaacagcttaccagcgacatcaaaaagcacggcgacaaccgtgtcatgcttttggctggctactcaggacaataa

SEQ ID NO: 252151 - DNA, 252 bp, Klebsiella pneumoniae
atgggcgatgtgcggaaaatcagcgcagtagccaacccgttcgttaaacaccttcaggaagactttaaggatggcgtcttctttgtcatcgacgttagcacgagaatcaatattgaacagaatcacttccgtcggatgatggaccgctttgttgatatcagcgaggaacagagcatctttgattttgtcttcaaagaaggagtatgcattacgttctgtaccgttatggctgactttgcggttagacaatag

SEQ ID NO: 252152 - DNA, 315 bp, Klebsiella pneumoniae
atgaatcaaaatactatattaactgatgaaaaaataattaatctcccaagaaaaatacagtctacatatttattgtggaagcagggcgcgaacataaaagagatgttaccgaaacctacattctaccgacaccgtaaagaattactttctttcggaatagatattaacttttattgtgagtcaccgtattctaataacgttgttccgttggttcgtactcttgaagccaaaccagccaaaattccatcatgggtttatgagaaaggtttaattttcgattataaccgtatttcacatgccagtaactggcattaa

SEQ ID NO: 252153 - DNA, 300 bp, Klebsiella pneumoniae
ttgggcttcgtaaacgtctttcttctgattgagctttaccgatactttatcgatgatcttgtaggatcctcgctcacgaatgagcgatttcactttctctgcttcatcagggcggacgtagttatcagccagaatacgcttaacgttctgcaacccttgctcgacgatctggtcatcgtcggaagcgcagtacataccgagcagatactccagcacatagaccgggacgttagccccttccttgagctgcttggtcagatctttacgcactacccgaccacgaaaatgctgattcagtaa

SEQ ID NO: 252154 - DNA, 1371 bp, Klebsiella pneumoniae
atgatcctgaaaagcctggatgactatatcgaagcgctctattccaactggtatctggcagaattgagccggagctggaataaggttctggaagccgaaaaccgtatgcaggagtggcgtattgcgggcgttccacggcagcagaacttctacaatgaggtggttaagccacagtttaacaatccacaaatcaagcgcgtgttcgtgattatctccgacgcgctgcgttatgaagtggcagaagagctgggcaaccagatcaataccgagaaacgctttactgccgaactgcgttcccagttgggcgtgttacccagctatacccagctgggaatggcggcattgctgccacatgatgagatatgctaccaggcaggcagcggtgacatcgtttatgccgacgggttgtctacctcaggtacgcctaatcgcgataccattctcaagaaatataaagggatggcagtaaaatcggacgatctgctgaactggaaaaatcagcaagggcgggatcttattcgcgattacgaggtcatttatatctggcataacactattgatgccatgggcgacagtgcatctacggaagagaaaaccttcgaagcgtgccgcaacgcggtggttgaactcaaggatttagtgacccgagtaataaaccgtctccacggcacacgcattatcgtcacggcggaccacggcttcctgttccagcagcagcccctgtccgggcaggataaaaccacgctgcagatcaagccagacaatacgattaaaaaccacaaacgctttattatcggccatcagcttcctgccgatgatttttgctggaaaggaaaagtggcggataccgcaggcgtcagcgataacagcgagttcctgatcccgaaagggatccagcgtttccatttctcaggcggcgcgcgatttgtgcatggtggcgccatgctgcaggaagtgtgcgttcccgtattgcaggtgaaagcgttgcagaaaaccgctgccgagaagcaacctcagcgtcgtccggtagacatcgtgaactaccatccgctgatcaaactcgtcaataacattgataaagtcagcctgctgcaaacccatccggtaggtgagttatacgaaccgcgtactctgaacatcttcatcgtcgacaacgccaataatgtggtatccggtaaagagcgaatctgctttgacagcgataacaacacaatggaaaaacgtgtgcgtgacgttacgctgaagctgataggcgcgaatttcaaccgccgtaatgaatactggctgatactggaagatgcacaaacggaaacgggttaccagaagtaccctgtgattatcgatctggcatttcaggatgatttcttttaa

SEQ ID NO: 252155 - DNA, 192 bp, Klebsiella pneumoniae
atgctaaatcagcaagatatgacagaaacagccaaagcggttttgagcgccttaagcgacaagcctgcaacggctggagagattgcacagaatacgcacctgacgcgcgaacgttgccagttaatactgacgcagcttgtgatggcggggttatctgattaccagtttgggtgttacaagcgcctccagtaa

SEQ ID NO: 252156 - DNA, 198 bp, Klebsiella pneumoniae
atgtttaacgcgctgacggccaacaactacgcaggtgagccccaattcggggtctttccagacgatgataggttccagtacaccgagctccgcaatgttcagtaccatcccttcgtcgatcggcagatggacccgctcatcgtagagcgggtgagttttgtcggtaatcagatgcaggtgttcaggttcaaacgttaa

SEQ ID NO: 252157 - DNA, 1434 bp, Klebsiella pneumoniae
atggctgagttcatgaaggatgacttcagagccattttcgacaacaagcatggtacacgtcgcgcaatcatcagtcgcgggcgaaaaaacgccaaaacggtggaaaccgccatgctgatgttgctctacctggtagggcccgaggctgcaccgaactcgcagctgtattctgcggcacgctcacgcgaccaggcggccattctgtttaacctggcctcgaagatgtgccggatgaacccggtactaatgcagtacgttgcgatcaaggattcagctaaagaaatccactgccctgagctgggttcttattaccgcgcactgagtgccgaagctaccacggcctatggtttctcgccgcgatttgttgcacacgacgaactgggccaggttcgtgggccgcgagacccgctttatgaagcgctggaaaccgccaccgctgcacaggataaccctatttcgataatcatcagcacccaggcgcccgatgcgagcgacctgcttagcctgctgattgatgatggcctgaccggagccgatccccggacggtggtccggcttcagaccgcgccggaagatatcgatcctttctctgtcgaggccatcaggctggcaaacccggccttcgatgtgttcatgaaccagaaagaagtgctggatatggccgccagtgcgaaacgcctgccgtctcgccaggcagagtttgagaaccttgtgttaaaccgcagggttgaagcgaaaagcccgttcgttagccagagtgtctggcatatgaacaaggaggaacccggcgaacttgcgggggctaccgtatggggcgggctcgatctttccagcgtgtcagacctgaccgcactggtgctgaacaccacgcagggcgatgtgcactgtaaattctggctaccggaggaagggctggcagataaggcgcgtaacgatcgtgtgccttatgacatatgggcgaagcagggctggctaaacacgacacctggtaaggctatcgagtatggatttatcgcgagggagctgcggcgcgtttttgatctctgtaacgtcagggcgctggcgtttgaccgctataacatgcgcttccttcgcccgcatctcatcgatgctggtttcaccgatgtggagctcgaacgattcgtagagttcggtcaggggtttgtttccatgtcgcctgctctcagggagctggaagccaaactgctcggtgcgcagctgaagcacggcaatcatccgatcctcgaaatgtgcgccaaaaacgccacggtaatcactgaccctgccggtaaccgcaagtttgtgaaaggtaagtcgagcggacgtatcgacggcatggtagcgctggcgatgtctattggcgcgcagaccagtgatgaggtagaggagcagggtgacgttaatgatttcatttacaactttttgagcgtgtaa

SEQ ID NO: 252158 - DNA, 162 bp, Klebsiella pneumoniae; identical to SEQ ID NO: 251220

SEQ ID NO: 252159 - DNA, 201 bp, Klebsiella pneumoniae
atgacgtcaatcaacccagtgacgcgttgcaaccagatgtcgagttcgatttttctaacttatcagattttctcgatttggaatctggaatatttgactcagaggtcgaatcgaagccacaggtcattattcttaccccggaaaagcttctttacatacttcgacaagagccagacattgttcagaaagctggactggtag

SEQ ID NO: 252160 - DNA, 1770 bp, Klebsiella pneumoniae
atgtctgcacatgttacaatcttaagaaatacagtacttccagtgaaattcaataccatgaatcgtccacgcttatattcatatatccgttactccagcgaacgacaaggtaaaggtagttcgattgagcgtcagaagagctacattgctgaaatggcaaaacagattgctactgagtacgatctggagattttcgaggaataccaagatttaggggtatccgcgtacaagggtaaaaacgttcaggaaggagctttatcggatttcatagaccaagttgaatccggtttgatcccaaaggggtctttcctcttgattgaatcccttgatcgcttctcacgccagaacgccatgcaagcggttaaccttttcaccagcttattacttaatggcatcacggtaattaccgggattgataaacaggtttacagacagactgaagtaaacaccgagacattgcagcaactgatgtttagcgtgatgttgttcagccgtgcaaacgaagaaagttcaaccaaatcacaccgcaccattgcaagtgctctgtccaagatcagacgtcaccaggaacggaaaccaggtgatcctgtagtcgcaattaaagagttaggctcggataaatggtggacagattcaagtactggatatgtcaatccgcatccagtcctgttccccatagcaaaaaaaattatccagttaaaacaagacggttggtcaaatcggatgatccttcaacatctgaaaaacaactacgatggaccggttattggcaacaaaaaatcaaaaggtatatggaatatgcagcattgttccagaatccttgaacctgccatttatggacgaaaagtaatcactgtaaacaatgcagaatacgttctggatgattattaccctgcgatcatcagcaaagatgaatatgaagcgttaaagctccaagttggaaacaaaggatttgccccgaatcgcgagagtaatccagaaataccattactttccggtattggtattttgcactgtgcgcactgctcatgttacatggttaaggctaaatcaacccttaaaaaccatccacatgcttaccgttaccaatgtgcatccagagatttacatcaagattgtaataagtggggattcagggcaagcacccttgaaaggacgattttacaactaatagccgatagaatattcttacagacgaaatatcaaccatctggtttagaagggaaaatagcggacatacaatcgcaaattgagaactatgtattggctataggttcagctaaaagccctgagatcattaatagcctcacttcgcaaattgatcaactagaacaagaaaaacaaagtctgatagtggaaaaaagactatacgatgaatcaatcgtgcaaatgaacactgaaggttgggacaagttcaggaagtttgacattgatgacgcacttaaccctttacgcacaaaaataagagcaaacattaagaccgttattatgcgcgtagattgctccagaatagataagaaaaacaacttgtttaccatcacataccgcgatcagcataaacagcgtatcgttatcgaaaacaactcaggctggaagaagggtaagatttatgttgaagcgcagactatcaacgatattcaaattcttgaatctgaaggtttgatactgcatgaccatattgacatattgatcaaccgagacaagttcatgacggaagcgaaaaaacgactagatcatccccgaacactgatcgatgaactgacggaataa

SEQ ID NO: 252161 - DNA, 201 bp, Klebsiella pneumoniae; identical to SEQ ID NO: 214892

SEQ ID NO: 252162 - DNA, 615 bp, Klebsiella pneumoniae
gtggttctggctgtttgtccagagagcaaacgcattagcctggtctttggtgacagcgaacgtcgtggagaatgttacccagtcctgctctttggccagaatggcagtaaagatatcgtcaaccactgccggcgccgcaccctgagagatcacctcgccggtcgcttcggtcagtttcagacctgtggccagcgtaccttcatcggcaaaggtaatggtgctatccacgcccgtggtggcagaggtgatgataaatttcttcagcacgctatcccaggtcactacaaccgaggagccaatgccggtttcaatcagctctgccgcgttatcaaaactggtggcgccgctgaggttgatagccgcagaagtctcctccgtaccgtcaacggtcagagtcagcgtacccgaaagcaacttgagctgtgccagcgtggtcgcggcgtgcgatccggaacgaaggaatgccgccactgctgcagtattgaatcggctaaaatacagcttgccaggcatctgtgttttaccggtgaatgcggcgaaatacagcaccgcggcggtgtactcaatcgacgcgctgccgaagtacgcctttacctcatccgcactggaaaatga

SEQ ID NO: 252163 - DNA, 762 bp, Klebsiella pneumoniae
atgatgtcatattctatcggttgcatgatgggccgctactccctcgatcgcgaaggccttgtctacgcccatgaaggcaataaaggctttgccgaactggtcgccgaaggcgcctacaaaaccttcccggccgacaacgacggcatcctgccgctgatggatgacgagtggtttgacgacgacatcacttctcgcgttaaagagtttgtccgcaccgtctggggcgaagaacatttgcaggaaaacctcgattttatcgccgaaagcctctgtttatacgcgatcaagccgaaaaaaggtgagtctgcgctggagaccatccgtcgctatctttccacccagttctggaaagatcatatgaaaatgtataaaaagcgtccgatttactggctgttcagctccggcaaagagaaagcgttcgagtgcctggtctatctgcatcgctacaacgacgcgacgctggcgagaatgcgtaccgaatatgtggtgccgctgctggcgcgctatcaggccaatatcgatcgcctgaacgaacaggtcgatgctgcctccggcggcgaagccacccgtctgaagcgcgatcgcgacaatctgagcaagaaattcaacgaactgcgcagcttcgacgatcgcttacgccactatgctgatatgagaatcagtattgatctcgacgacggcgttaaggttaactacggtaagtttggcgatcttctggcggatgtgaaagccattaccggcagtgcacctgaggtgatttaa

SEQ ID NO: 252164 - DNA, 291 bp, Klebsiella pneumoniae
gtgggggaaccacagcaaaaactgctgttctggttcatcgatttcaatgcgctttttaaccgccagctgcgactggtcggtcatatcgagcagcgtgacgttctccagttcgaggttatccagctcttcgaggaaacgcttatcgggatcgtgccagaaaacgatgcgatgttcggcgaattttgctttaaggccggcaataaattcctgattttgcaaggtcacaatcccatgttgattctgtatattcgaagatgcctgaacgcctggaaaccgtgttccgcgttctga

SEQ ID NO: 252165 - DNA, 1947 bp, Klebsiella pneumoniae
gtgaatgttgcgcttccgaccaatggctttaagtttgtcgtggctgaagggactgaacaggatgtgacgttaggcgtttcggggtccactgcccttagcatcgcgctaggcgccgttaccctggatctcattctgatcaataccgacactaaccagatagtcggcgttattaaggatggaattacagcaacgccgacaggtttccttggattaagccttgaatacgcgggaggaggggaatttgaaagaattggcgccggtaactatatggttgttatttcgtcgccgactactgaaggattgattggttcgatactgaatctgaatttgggcaccagcattagtatggaggtgacagattcgactaaatacgtgacggggaatgttctgcacaccgatagcgatggcgatgttggcgatacaggtaatgaaattaccgtaagcagcattcagtttggatcgcagatcgaaacagtcactgccggcggcgtcacgattaacggtacatacggtactctgataatcaagtctgacggtagttatagttaccatgctaatggaacaacaggggtgggtcagagtgatgtcttcacctacacgataacggatgggctgggttatacatcgtcgactacgctgacgatgaacattgagtcaacgccaccggtagcggttgatgatatcgcctccctgtcggcggcaacggcaatgcagtcggttacctggacgcaaagcgtcagcaatcttgcagtgccaaacacggcagtagcggctaatgcgacatcggcggcgaaagtcaccagtcagaactttaccatcgctgaaggtcgggaggtggatggagcatctatcactctcaacttgagtggtaaccgaaccagtggtctctcactactgaatggcgatctttctgggacggtctctcttatccatcatgtcactgttgatggtgtcacaacagatgtaacggtgtggacgagttctctgacgatggctctggatggttctctccttagcccgtcatccgatacggatactgtgacgctgaacatggttaacggcggcatcccggtacaactggcggcaggtgattatactctgagtattagtcatacgatgcatgccggcacggcgttgtcctacaacctgtcagcgagcgtagcaggaacagagattcttaccgatgcgcatctgacggtcgggcaatctgtggcagggaatattctcgacggttccgatgcgaatggaacaccagacacgcttggttcgctgcatagcggctttacgataagtggcgaaaacaatctgggtatcgcgaccaactggaccttccattctgatggcacagtaactaacgatacgggaaccagcgcatctaatggaaatgcggtgctgtatggtgaatacgggatcctgaccattaatgggcaaggtggttacacctatcagttgaacgggggtgtgaataccgatgcaataacgtctaaggagacatttacttatacccttatcagtagtgatggcggcagttcgacggcgaatctgacgatcgatctgcacccgcagatcgccggcagcgtcaatgacgatagcgttcatagtaccgcttacgatgacaccttcagcatgggtgtgggagccgatacgctggtttacaacctgctggcggatgacaacaccggaggcaacggtagcgatatctggagcgatttctcggtcgcccagggagatcatatcgatgtttcggcgctgttggtcggctggaatggttccagcgatacgttgggtaactatattactctgagttatgtcggcggaaacaccgtggtgtctattgatcgcgatggaacgggtggaaacacccatcaacctgcgacgttgattacgctacagggggtccatatcaattcgctcgatgagctaattgataccaataactcgaactaa

SEQ ID NO: 252166 - DNA, 1569 bp, Klebsiella pneumoniae
atgcagtttggcagtaagccgctgttcgaaaatatctccgttaaatttggcggcggcaaccgttatggtctgatcggcgccaacggcagcggtaaatcgacctttatgaagatcctcggcggcgatctcgaaccgacgctgggcaacgtttctctcgacccgaacgagcgcatcggtaagctgcgtcaggatcagttcgcctttgaagcgttcaccgtgctggatacggtcatcatgggccacggcgagctgtgggaagtgaagcaggagcgcgatcgtatctacgccctcgctgagatgagcgaagaagatggctacaaagtggccgacctggaagtcaaatatggcgaaatggacggctactcggcggaagcgcgcgccggcgaactgctgctcggcgtcggcattccggttgaacagcattatggcccgatgagcgaagtcgcgccgggctggaagctgcgcgtcctgctggcgcaggcgctgttttccaatccggatatcctgctgctcgatgaaccgaccaacaacctggacatcgacaccattcgctggctggagcagacgctgaacgatcgcgacagcaccatgattatcatttcgcacgaccgtcacttcctgaacatggtctgcacccacatggcggatctcgactacggcgagctgcgcgtgtatccgggcaactacgacgaatacatgaccgcggccacccaggcgcgtgagcgtctgctggcggacaacgccaagaaaaaagcgcagattgcggacctgcagtccttcgttagccgcttcagcgccaacgcctctaaatcgcgtcaggccacctcgcgcgcgcgccagattgacaaaatcaagctggaagaggttaaagcctccagccgtcagaacccatttatccgcttcgagcaggataagaaactgttccgtaacgcgctggaagtggaagcccttaccaaaggctttgatgaaggtccgctgttcaaaaacgtcaacctgctgctggaagtgggcgaaaagatcgccattctgggcgccaacggcgtgggtaaatccaccatgctgaaaaccctggtaggcgaactgcagccggacaacggcagcgtgaaatggtctgaaaacgcgcaaatcggctactacgcgcaggaccatgagtacgagttcgaaaacgacctgacggtcttcgaatggatgagccagtggaagcaggaaggcgacgacgagcaggcagtacgcagcatcctcggccgtctgctgtttagccaggacgatatcaaaaagccggcgaaggtactttccggtggcgagaaagggcgcatgctgttcggtaagctgatgatgcagaagccaaacatcctggtgatggacgaaccgaccaaccacctggatatggagtcgattgaatcgctgaacatggcgctggagatgtatcagggcaccctgatctttgtctcccacgaccgtgagtttgtcagctcgctggcgacccgcgtcctggagatcactccggaccgcgtgatcgacttcagcggcaactacgaagactacctgcgcagcaaaggtatcgagtaa

SEQ ID NO: 252167 - DNA, 1758 bp, Klebsiella pneumoniae
atgccgttcctgtttgaagcagtcgatgatgaagctgaactgctgctgccggataacctgacccgtactgactctattctacgcggtctggtagacggcattccgcctgaagactgggaagacgttgaagttatcggctggctgtatcagttctatatctctgagaaaaaagatgccgttatcggcaaggtggtaaagagcgaagatattcctgccgccacccagttgttcaccccaaattggatagtgcagtatttggtgcagaactccgtcggtcgccagtggttgcagacctacccggattcgccgctgaaaggcaaaatggactattacattgagccagccgaacagacgccagaagtgcaggcgcaactggcagccattacgcctgccagcattgaaccggaaagcatcaaggtgctcgacccggcctgcggttcagggcatattttgattgaagcctataatgtgctgaaaaatatctacgaagagcgcggctatcgcgcccgcgatattccgcagctgattctggaaaataatatttttggtctcgacattgacgaccgtgctgcccagctttccggttttgcattattaatgatggcccgtcaggatgaccgtcggatattcacccgcgatgtgaggctgaatattgtctccctgcaggagagcctgcatctggatattgctaagctgtggcagcagctgaatttccaccagcagaaccagaccggcagcatgggggatatgtttgccgaaaataccgcattagcgcataccgacagcgcggaatatcagctgctgatgcgcacgctgaaacgctttgtgaatgccaaaacgctgggctcgctgattcaggtgccgcaggaagaagaagcggaactgaaggcgtttctcgatacgttgtaccgtctggagctggaaggcgattttcagcagaaagccgcagcgaaggcttttattccgtatattcagcaggcgtggatactggcgcagcggtatgatgcggtagtggcgaatccgccgtatatgggtggcaagggaatgaatagtgagctgaaagagtttgccaaaaataacttcccggatagtaaagctgatttgtttgcaatgtttatgcagcatgcattctctttgcttaaagaaaatgggtttaatgctcaagtcaatatgcaatcatggatgtttttatccagttttgaggagctacgtgaatggctgatcgaaaacaaaacgtttgttaacatgattcacctcggatctcgagcatttgcggagatttcaggcgaaattgtacaaacaactgcatgggtaatgaacaattatgagatcaataaatatcagcctatatttttcaggttaattgaaggtaacgaatttcaaaaaaataaaactttaaaaaaacgtgaaagtaactataaagacatcactattgatgatatgaaaaacatacccggagcaccaatcacgtattggttaaagggcatacataacttcaagcgagctaagctagctcaatatttcttatcgggtggaagaaataaaactcataacaacgatctttacgttagatacttctgggaagtttctttgaaagaaaaaaaatgggttgcctatgcaaatggtggagagtctagaaaatattatggaaatgatcaatatgtaattaactggagtgatgaagcgaagctttactatgactcgcatggtggcctttccaattctaagttttggaatctgtctcttatacacatctga

SEQ ID NO: 252168 - DNA, 276 bp, Klebsiella pneumoniae
  misc_feature (5)..(5): n is a, c, g, or t
gtggnttcagtctccgtctgctgtccctcctgttccgctactgaaggcgtgatgcgtaatggcaaaagtactgccgggcatcaacgctatctctgctctcactgccgtaaaacatggcagctcaccttcacttatgccgcttctcaacccggtacgcatcagaaaaccattgatatggccatgaatggcgttggatgccgggcaaccgcccgcattatgggcgttggcctcaacacgattttacgtcacttaaaaaactcagaccgcagtcggtaa

SEQ ID NO: 252169 - DNA, 549 bp, Klebsiella pneumoniae; identical to SEQ ID NO: 244982

SEQ ID NO: 252170 - DNA, 429 bp, Klebsiella pneumoniae
atgcagtatgtgaatacatgcccggtcctgaatgttgaggagtccgaccgcctgtcttttatgccgtacctgttcggcacggatttcatgctcgcggaattacaggtgtacgctctggccaaaaaatggatgcccgaatatgagggcggcttctggcattttattcgcctgccggaggggggcggctacatgatgccggattgtggccgggtacatctggtcagtagcgaaaactggtttgatcgcactgtcagcgccgacgcggcgggcattattctgaccagcctggcgattaatcgccgtctggccgcccatcatgacagcagtaacccggcactgactcgcctttatatgctgcgtgatgcacagctctggaatcacattacctttcacccggaatgcagtgctatctacgccgcgctggactga

SEQ ID NO: 252171 - DNA, 1242 bp, Klebsiella pneumoniae
atgaaagacgatgaaaagacctccgggcagtcctggcgcgtacgttacgggaaaaacattgtcgaaaccggcactaacgtcaccatcgcgggctaccgctattccacccgcgggtttaataccctctccgaggtgctggatagctactctaaagacggcaactatagtccgcgttcgctgcgtaaccgtaccaacctgacggttaaccaaagcctgggtaaaggcctgggtagcctgtccgttagtgggttaattgaagattactgggacgataagcgcaccaacaagtcgatcagcgtggggtacaacggcggcttccgcaatgtgaactactatctgggctatagctataaccgttacacctggagcggggatagctccggtaaagacgcccaggacgatcagcgcatcaccctgacggtgaccctgccgctgagcaactggctgccgggtacctataccagctatcagttaaccaacagcaatccgggatcaaccgatcagtcggtatccatagggggggtcgggctggataacgacagcctcgagtggagcctgcagcaagggtacagcaaccgggaatactacagcggcgatatgcgcgggacctataacggcgcccgcggcagcgtgaatgccggctacagctatgacaataacagccaacgtattgactacggcgccaacggcagcattcttgctcatgccgatggtattacgcttggtcaggatattaccgacgccgccgtgctgattaaagcaccagggctggataacgtcagactggccaacgataacaccatctccaccgactatcgcggttacgctatcgtcccgtacgttacgccttatcgtcgcaccgacatcacactagacagcactacccttggtgaagatatggaactgccagaaaccacgaagagcgttgttccgacgcgtggtgccatcgtgcgtgcaagttatgacggcaatatcggccagcgggcctttgtgcatctgaaaaccgccaatggtcaggacgtaccttatggcgcaatggtcctgctcgccggaaatagtaaatcgcagccaagcatcgtcagcgacgcgggcatggtctatatgtccgggttgcagcagaccgggatccttaacgtccagtggggcaaaagcgccgcgcagcagtgcaatgcttcatttactttaccggccagggaaggcaaagcgactggcatcagtcaaatcgaagcggtttgccgttag

SEQ ID NO: 252172 - DNA, 177 bp, Klebsiella pneumoniae
atgttcaaccagcacgtcaaagccctgttcctgtgcgcgtttgaccagacgatcgcggcgggtgagggtggatttggggtagtcgaactgaccatagcgcacggcctcgccgacgatctcggcatcagcaatttgcagagtgccttttttatcgacggaaacccccagcgtggttag

SEQ ID NO: 252173 - DNA, 756 bp, Klebsiella pneumoniae
ttgctggatttcagcgaagatcgcgaagatttggtcgatttctaccgcaagcagttctccacctggcaaaagctgggggctgcgctgaacggaagctttaaatccaaccgcagcgcactggaaaaagacgccgtggcggtaaaagcgttaggtgagctggaaaacatctggcagatgccggagccttacaagcatctcaatcgcatcacgccgctgattgaacaggttcagaacgttaaccatcagttagttgaacagcaccgccagcacgccctggaacgtattgacgcccgcatcgaagagagtcgtcaacgcttgcaggaagcgcatgccacatcggagctgcaaaacagcgttctgctgccgatgcaaaaagccagaaagcgcgctgaggtcagtcattcgattccggaaattctggcggaacagcaagagacgaaagcgctacaaacggatgctgagaagaagattaaccagtggattgacgagctgcgtaaaaagcaagaagcccagctacgagcagcgaatgaagctacacgcgctgcagaatcacagcagacctatgttgtggtagaaaaacccgttatccaaccggtaccgaaaaaaacacatctggtgaatgtcgccagcgagatgcgcaaagccaccggtggtgaagtgctggaaaccgccgagcaggtagaaaaagcgctggatacgcttcgtgctgccctgttggcagccattgaggcaggtgaccggatccgtcttcagtaa

SEQ ID NO: 252174 - DNA, 177 bp, Klebsiella pneumoniae
atggactgtatggcatccttgtttatggccctgacactgaccagtaacgcttccagacgcgaaacggtaaagctctcgggatccagcgtatcgatagccaccagcagcctggcggtaagttcggcgtcgctgtcattcagaacttttatcatcctgttggcaacgccggtgctgtag

SEQ ID NO: 252175 - DNA, 624 bp, Klebsiella pneumoniae
gtgccagtccgccgggttcagaatgatgccgtctgcttcgaactcactcagcgatacctgatagatggcgtgtgccagaacatcagcgccagtatctccggctgcgttgagtgtggtttcgtagtcattcgctactacgttgagcccctgcaggttatcgccggtaccgtccccgttcagcatctggttctcttccaccagtgccagtccgtacatcatgcgggaattgaggtaagactcgagcgccggggcatcatccatgatctggcgcgatgcctggatccagtgggcgatagttttcacgttcgccgtttctttggtgaaggtaatattactttccggcttgagggtaccttctgccactggtgctgcagcgttggtaaacacgttttcgcgcacgtattccagcgcgttactggtgatacgcccctgtgccagcaagtcacgcacggtcagacggcgaagacccggcataagaatacccggcagctgctgcggctggaccagggcgcctgccgacgctgcgccggaaccaatcgctttatcaaaactggtgactttcgctttggtacgcgagccgtcccagcccttcatcaggtcttcagatacgcgctgagcaaatga

SEQ ID NO: 252176 - DNA, 519 bp, Klebsiella pneumoniae
atgacggggaacatcacgctccgtcagcgtcgccgtcaggttttctatcgtcaaccacaggtcgggatggtgctggctcagccagctttcgcaatagtgttcaaacaggtcgccggggttgttaacgtagcgctggatcagcgcaaagtccggacgttgtcccagcacgaccagcgcccgggcaatgatattgacaaaacgccatgcaaattctttaaacgcggcggagttccctgcatcgctgagctgcccggcgacccgacttgctacttcagagatccgcccaaaccgccctatcgcattgtagcgcgcagagatatccggccagcccagatgaaagacatgaaactcatcaccgcgcccggcacgctgacactcggcgtacatccttttcagcaggtcagcatcccctttggggtcgaacacgatcaccacatctccccggcgaatatcctgagtaacgcgcaggtccatcagcacattggtttcttccagctcaataccgtgcagcgccggtaa

SEQ ID NO: 252177 - DNA, 882 bp, Klebsiella pneumoniae
atggcaaggaagagcgatccactggcgtttggcgggttggcgttattaacgctgatctggagctttagctggatcgcgatgaagcaagtgacgagctatatcggcgcttttgacttcacggcgctgcgctgtatttttggcgccgtggtgctatggatagtgatgttgatccgcggtaaagcgctcaagccgacgcctttcggctacaccctggcgatcgcgttattgcaaacctgcggcatggtcggtctggcacagtgggcgctaatgagcggtggcgccggtaaagtggcgatcctgagttataccatgccattctgggtagtggtgatggccgcgttattcttaggtgagcgcatgcggcgatggcagtatatcgccatcggggtggcatgcgtgggcctgatactcgtacttcagccttggcaactcgattttacctccctgaaaagcgccttgctggcgatcctctctggcgtgagctggggggcaggtgcgatcgtcgcgaagcgtatgtatacccggtatccgcaggttgatttgctggcgctaacgacatggcagatgctatatgccgccgtagtaatgagcgtagtggcctggctcgtcccgcaacgggcggtagactggcagcccgacgttttctgggccctggcttacagcgcaatccttgcaacggcgctggcctggagtctgtggctttttgtactgcgtaatttaccggcaagtatagccggtctgagtacgctggccgtaccggtctgtggcgtgctattttcctggtggctactacatgaaaatccaggaaaggtggaaggttgtggcattgcgttgatagtactggcgttggcgatgatcagtatcaagagacgaggggcatag

SEQ ID NO: 252178 - DNA, 417 bp, Klebsiella pneumoniae
atggaagtcggcggcggcgcgctggggatagagcttccaggtttgggtccgctggtgggccagcgcccggtcgaaatggcgctgaaaccacaggacgctccacagggcatattcgaacatgccgtggcgaaaatcttcatcgatcacccggcacagcgggatctcgctggcgaacagcgcgggcggcagatgatcgaccccggcggacgcggcctggatcagcttcagccccggcgaacgggtcaacagctgcgggtccgggaaccagcagctggcgtactgggcgtcgcgcgccgcctggtgatggggcagaagcgccgtgacgtcgggaaactgctgcagggcggcgcagatatcgcgggcgaaatccgcgtcgttacaatccaccacgatagtgatatcagacataggcgttag

SEQ ID NO: 252179 - DNA, 504 bp, Klebsiella pneumoniae
atgtacgtgacgccggagcgccagaaacaggccgacgccatcccttacgccctctccggcgcgtcgatcatcgccctgaagggcggcgcggtgcagccgaaaaccgaagatgagctgtgcggcgtgaaggtcggtctgcaggcgggcaccacctgggtgaccagcctgaaaaaacactccgatgagtggtgcctgaaaaacggcaaaccggccatcaccattcaggagttcccgacggcgccggaagcctcgcaggcgctactgtcgaagaacatcggcgctcagcttgagattgccccggcagcgcagatcattgtcgacaagagccgcggccgcctggcgataagctctacgcgcctggtctacccgctgccgctggggatctacgtcgccaaaggcaacaccgagctggcggaggcgatcaaggccaccctggccacgctgaaggccaacggccaatatgccgcgttgatcaaaaaatacaacttagaaagcatcgattaa

SEQ ID NO: 252180 - DNA, 903 bp, Klebsiella pneumoniae
atgaaaattggtatcgttattagcggcggggatgtttctggaatgaataattttatattccagatagccaggcaggctaatgctgatatcacgctgtttaatggcggtattccagggctactggagaaaagtcatcaggatatggcgtggcgcgatctggttgattattcaattaccgcggtgccgatcattacctcggggcgaaccagtcgcaaactgcagcgcagtgaatatgaaagcattgctaaaaaacttaaatctctgcgtattgatgtgctcattatggccgggggggatggcagcctgcagtttctgaatacccttagtgaatttgagattaattgctttggtgtgggaatgactatcgataatgatgtgtatggcagtgattatacgattggtttttccacggcctgtgagcaaattattaaagaagtctctcgtttaagaaataccggaagagcgctgcccggtcgggtttttatggttgagatattaggaggctattgtggagaactaacgttgcagtccgccattaaatgtaatgcggatattgccctgatcccggaggcacagatgccgttggccgtgctcgcggaacggattacccggaagctgagtacgcagaatagcgtcgttatcctctgctcagaaggctataccaaagagtactctcctggctttcagggggcgattgataccatgattaaacagctggaaccacaaataggtgtccgtatccgtaaaacgatcgtcggctatggtttacgcagcggtgatccaacctgcgaagagatttatcagggcactattatggccagtgaagtggttcgctgtattcagtcaggtatgaaaaataaagccataataattaattccagtctgtctcttatacacatctga

SEQ ID NO: 252181 - DNA, 693 bp, Klebsiella pneumoniae
atgattgatattcatggcggcgatcgtcatcacaatggcgataattatcacttctggccgacggatatttccagtgcgacagaggtgcaacagactatcgatgccattattcagcgctggtcgcgtattgatggtttggtcaataacgctggcgtgaatttcccgcgtttattagtcgacgaaaaagcaccggccggccgctatgaattaaacgaagccgcttttgaaaaaatggtcaatatcaaccagaaaggggtgtttttcatgtcgcaggcggtggcgcgtcaaatggtcaaacagcgcgccggtgtaattgtcaatgtctcttcggagagcggcctggaaggctctgaaggtcaaagctgctacgccgcgaccaaggccgcgctcaacagctttacccgctcctggtccaaagaattgggtaaatatgggatccgcgtggtcggcgttgcgccggggatcctcgaaaaaaccggtctgcggacaccggaatatgaagaggcgctggcctggacgcgcaatatcaccgtcgagcaacttcgcgagggatataccaaaaacgccattcccatcgggcgggcaggaaaactctcagaagtcgctgattttgtttgctatctcttgtcagcgcgcgccagctacatcaccggagtcaccactaacattgccggcggtaaaacgcgcggttaa

SEQ ID NO: 252182 - DNA, 204 bp, Klebsiella pneumoniae
atgatgcttacccttgagcgctgcgagccctgcgaaggggctggcgtggcctgctattccgggtcgaccgtcacccatgtggggatcgttgtcagtatcggtggcctgctgcatgtggcggaatgtaatccgggaacgaacgtcaccttcctgccgttgccgcggtttaagcgccgatttgtcaaagtggagttctggcaatga

SEQ ID NO: 252183 - DNA, 207 bp, Klebsiella pneumoniae
atgaacggcctgctcaacgccatcgcgcgaaaattcaaggttagcgagcactcgctcttctacagcaatctcgttttccaggcgggcaatctctgtagcgacttcgttaatcaaatccgcagcgacatttttattcagcgcctccagggcacgtgcttccagcgtgtctttacgcgcacgcagatcttgcagtttatcgttgcttag

SEQ ID NO: 252184 - DNA, 315 bp, Klebsiella pneumoniae; identical to SEQ ID NO: 235757

SEQ ID NO: 252185 - DNA, 294 bp, Klebsiella pneumoniae; identical to SEQ ID NO: 210056

SEQ ID NO: 252186 - DNA, 300 bp, Klebsiella pneumoniae
atggccctggtggtggccgccctggtcatcaactgggcgatgatctgcatcactcatcttaagttccgccgcgccatgcagcgggcggggaaggtaacggctttccagagtttcgcctatcccctgacaaactggctgtgtctgctgtttctcgccgcgatcctcggggtgatgtatctgaccccggacatccgcatctccgtctgcctgatcccggcatggctgctgatccttgctgcaggctatctgctgcgcaggaaaagcgcgccggcgccggtggcggcgcttgaggagcgttaa

SEQ ID NO: 252187 - DNA, 219 bp, Klebsiella pneumoniae
atgcgcctcatcgcaaacgatgacaatcgggtggcgcgcatcgccgtcttcgcccgggctgctccagaactggatttggtagatcagccgcccgaccaagcccacaaccactggcaagatgtccgagggcacctcggaaaagtcgatgattttgatgcccggattgacgccatcgttgacgttgcctgtaccgagcagtttcttggcgagatcgtgtag

SEQ ID NO: 252188 - DNA, 414 bp, Klebsiella pneumoniae
atggtgctgacccatgacggaccagaaatcaaaatccggctccgggggcgagaacacataggcattcatgaccagattcccgcagtgttgtctgaggaacaacaaaaaatctttcaggtttccgtatcctcccgaccccataccggcaccaaggaaaaacgcctctgttaccacgccggcagtgatacgaccgttctgctcatgctggcgcaggatcatcagggtgccatcatggcgcccaccgtcgatgcggatgaactcaaagacatacctttcatcatcatccgggaagaaaaattcctcccagctgacaccggaatacgttcccagtatcaccagcgggaacatcatcccgtcaccggtagtcagccagtccgcactggtgccgaaccggctttcaatccgttcagctag

SEQ ID NO: 252189 - DNA, 504 bp, Klebsiella pneumoniae
atgaccattattacagtggcagagccaaccggcgcggatggtaatttcccgacctggtccactacaggttcgccgattacaaatggagggagtttcacgtcacaatcctttatgcgtcagagcgccaccacgcgaaacccaacgctgtcgctgagttattccactgatggtttcatcacccgacagaacctgtcgtatggggtatcgtcgggtgttgataatatcaggctccgtgccatagcatcggcattcagtcagacagcaaaaacatccagcctttatgatctgacgaataataaaaatgcccaagcgcctctgccagcaaatggtgtttatggaaaggcaggtaatatcctgctgggttcgcattacaacgccgcagagagctcgcagggtaatttgtacgcagccgcgatttacagccgtatgctctcaacagctgagatcaatcaggtatatgctgcgttaaaagcttattactcaaaacgtggcttatctacatga

SEQ ID NO: 252190 - DNA, 282 bp, Klebsiella pneumoniae
atgcgcgccgcggtggcgctgatgcaggcgaaaaaggtccagacggcgaaagtggtcacccatattctcggcctgaacgccgcgggcgaaaccaccctcgatctgcctgccgtcggcgggggaaaaaagctggtgtataccggaaaagccttcccgctcacgccgctgggcgagatcgccgatcccgaactggcagcgattgtggcgcgtcaccatgggatctggtcccaggaggctgaagcgtatctgctggcccacgcggaggatattacgcatgattaa

SEQ ID NO: 252191 - DNA, 204 bp, Klebsiella pneumoniae
atgatgcttacccttgagcgctgcgaaccctgcgaaggggctggggtggcctgctattccgggtcgaccgtcacccacgtagggatcgtggtcagtatcggtggcctgctgcatgtggcggaatgcaatccgggaacgaacgtcacctttctgccgttgccgcggtttaagcgtcgatttgtcaaagtggagttctggcgatga

SEQ ID NO: 252192 - DNA, 546 bp, Klebsiella pneumoniae
gtgggggaacaggttgaagctctggaagaccatgccgatgcgccgtaccccggcgcgcatctggcgtttgtcgacgatagctccgcccttaagatagtcctcgccgtagagaatgatctccccgccatcaaggctttcgagggcgttgatggtgcggatcagggtggttttgccggagccggacgggccgatgatgctgatcacctccccgttctccacctgcagatcgatgcctttcagcacctcatgctgcccccaggatttgcgaatgccccgcagatcgagcgccggcggcgcgccgttgacggccggggtgttgctctcttcgctcagcgccggcaggctctggcgcagcgcctggcattccgcctcgctgagggtttgcggacgcttacgctgaatatcgagacgattttccagcgcccggaacagccaggtgaagacggtaaccaccatcacgtagtacaccgctaccgccagcagggtctccatcacaaggaaattctgcgcatacaagcgctggccggtgagcagcagctcgggtaa

SEQ ID NO: 252193 - DNA, 330 bp, Klebsiella pneumoniae
  misc_feature (315)..(324): n is a, c, g, or t
atgctcagcgagtcccggcgcaaaagcgcgaatacgctgttggtaaacaccatccgctcacgtcgcggcgataagtcgaaagagcacccgactccgtttgtgagcattcagcagcgcctgcacaccgacgatgcaacgggcttcatgcttgccggcggaatgggcgtaccgtttcaccatgtcgccatacccgccatgatcgacgagaagtacatccagtcgctcgatgagccatggcgttcgctttgctgggaaacggtcaaagataccgattctgtggtcgttggtggcgttcgctactggtcctactggccnnnnnnnnnncgttaa

SEQ ID NO: 252194 - DNA, 483 bp, Klebsiella pneumoniae
atggatggcaaaattagtgtcatcagtgaaccaggtaagggaagtatatttacagtatcactacccgttgaaattaatagcatcgatagtacgacaaactccactccattgaacgtcatggagacttctttgaagggactgtctgtattacacatagatgatagcgaattaacatgcagaacaatggcctcaactttaaggagtgttggatatagagcagagtcaaccagctctgttaacagagcaattgaaaagcttatgcgtattccttatgacattatactatgtgacttacaaatgcctatcatgaccggtgacgagctggtagactacattcgtactcgtgaaggtcctaatagaaatacacctgtaattttcatcagcgcttatcctgacaactacttacatgcagagataccgcttattgttaaaccagctagaattgcagatatcaataacgagatatccaaagccataagataa

SEQ ID NO: 252195 - DNA, 246 bp, Klebsiella pneumoniae
atgactccggggctgagctggcgcgctgcccatacctgcgccaatcggcagaatatgggggtaaagccgtttccacgccgcgtcgacctcccgctgaaacgccagctcggcctccacgcgcttaaagtcctgctggacggacagttcggcaaagcggcggcgctcttccgccgttctggcttcaatgcccagcgccgtaatcgggtccagatcgggagagaatacgccgcgccgtccattcattaa

SEQ ID NO: 252196 - DNA, 270 bp, Klebsiella pneumoniae
atgcgccggatgttaaccgccggacagtcggaacctcacgtcgcagaacagcaggaagcgctgacggaagccgatcgccggctggagtttctggaccgggaaattgtggcactgaagaacgagatggagctgcgcaagcagatcagcaacaacaccattgctacagcgctgtcgcgacagacgcagcgcggtcttgagaacagcgcccgccagaaaaatcccgatgccgatgaagctgtgcagcagttgggtacggaggtgacgccatga

SEQ ID NO: 252197 - DNA, 255 bp, Klebsiella pneumoniae; identical to SEQ ID NO: 211934

SEQ ID NO: 252198 - DNA, 225 bp, Klebsiella pneumoniae
atgggatttttaatgatgcctatactcgactgcaatgggagcaagccggaggtttctatacattcgactctgcattttcggcagctatcggtggatacccaaaaggcgcgattcttatcaattcagccagggatggattctggcaaagcactatcgaaaataacacgacaaatcctgatgctggcggtattggatggattaattattcatccggacgactcctga

SEQ ID NO: 252199 - DNA, 264 bp, Klebsiella pneumoniae
gtgcagaacaatgtcgataacctgcaggcgctgcggcagaaaacggccgatatgatggtgaccgatctgattgaaggcgactattaccagagcaaagagcccggcgtgttctgcgttgctaacgaaacgccgttcgccggtaccgccagcaacaaggtgtatatgatgagtaaagataacccggcgctgctggagaaagtgaaccagtggctggatagccaggacaaagaggttctcaaacggaagtggaaaattcgcggttaa

SEQ ID NO: 252200 - DNA, 345 bp, Klebsiella pneumoniae
atggttccgctaactcgtgacggcattatcgtctccacgcttggccgcaacggctcaattcatcttggccgtccggcggacaagatcaccctgcgtgatatctatctttcggttatcgaagataaaaaactgtgggcgtcgcgtcctgacgtcccggcccgctgcgtggtcagcgccaacgcctgctggtacttcaaatcggttgccgacgaagcagagcaggcttcgttaaacgtcctcgctcgccataccgtggccagcgcgctggaggcggtcaaaaacgccgataccagcggctgcgacccggtgccggaaatgatcgcccgctttaaaaaagcgcattaa

SEQ ID NO: 252201 - DNA, 171 bp, Klebsiella pneumoniae; identical to SEQ ID NO: 211392

SEQ ID NO: 252202 - DNA, 168 bp, Klebsiella pneumoniae
atgcgacattaccctgaggtagaaaaggtggatttgctggtccggcagacggccctcttgttccgccaggcgcaaccattagcgatccaaatgagcttgaaccaccaacagagccaaccggagatgctgcggtgcctccctgcccgccagcgccaacaacgatgctaa

SEQ ID NO: 252203 - DNA, 228 bp, Klebsiella pneumoniae
ttgctcgactggtatacctcgtatgagctgcaggtgcgcttactccccacaaccaagctgccggatggccgcaacgcattgcatagcagcattattgatgtgtttaacgaattcggcgtgcagattatgtcgccgaactttgtgatgcagccaaaggcggcggtagtggtgccgcaggaagcctggtacgccgccccggccgtcgcgccgcagaagcctgagaaataa

SEQ ID NO: 252204 - DNA, 159 bp, Klebsiella pneumoniae
atgttcagttacaccggctttagcgccgatcaggtagacgttctgcgtcaagagcatggcatctatctgatcgccagcggtcgggtctgcgtggccgggctcaaccacggcaatattgcgcgggtagccagcgccttcgccgcggtctgcgcacgctag

SEQ ID NO: 252205 - DNA, 168 bp, Klebsiella pneumoniae
atgattctgacgcaaaaaacctttgccgacatcttaaccgccgatgccagtgaagaagaaattaaacgtgtcgtggtattgaataaacttactgataaagaggagattgaaactaagatcgtcgcattcttaaaagaacgtcatctgaaggtggctgattatgaatag

SEQ ID NO: 252206 - DNA, 333 bp, Klebsiella pneumoniae
atgcaagcacagtatctactgatggaggtctgcacagaagacgctctcagcaattttatgcaggcgaacggagcagctcttacatccgcactggctccgctcctgaaggggctaggaggggttgacgctgcgtccagtatgttacgcagtgccctggttcgccaactggcaataaccccgcctgaaattgccgggaaatatcgtgcgattctggatgaatccgaagtgatgcctgaccctatgatggttggtgattgccagagctcttacaccccggcacaacatctgcgctttcagtaccgcctggataacattaaccacatacaggagtga

SEQ ID NO: 252207 - DNA, 198 bp, Klebsiella pneumoniae
atgaaagaccgcagtcacgatgaggcgatggccgagcacttccgcgccgatcctgcctatgcagcggagctgcttgccgaagtgcgccgcaatggtgatccagccgagctggccatcttgttgcggctgatggccacggcctcggcagatgacgctaggtcggatgacgccgatacagggcgcactctacctcgctga

SEQ ID NO: 252208 - DNA, 1755 bp, Klebsiella pneumoniae
atgataaaaagaatagataaaatcgccataacgaatgttaaggggatcgaaagctctgtttttgatgttcagcttattccaaacaaaccgacactcgttgtagctcctaacggtttcggaaaaagctctattgctgctgcttttggttgcctgcgttcgaaaaagatggatttggataaggacgagcgccacaagggtgatgaaggtcgccatccatctcttaaaattagttataccatgcagggcggagacaagattgaaaaagaagcgaatcatacaaaaaatgaactggcagctacatttggcgttcatgtaattaatagccagttagtttcgaaagcaaagaaactcaaaattgcgggcgctaacattgtcacttcagcaattgaagtcactccgatcgtactgatcaaaaatattcctccgaaagaaaaatttagctactccttcgcagcggtaaaagtgggcttcggaaaaaacggaaaggtattgccaaacatttcaaatcttcttgccgataatcggataatggctaaaatttggaatcaggtagattttaccaaacaggaccaggccggtgttaagaaggcaataaaagctctacaagatgagatcaacgccgggacaggaaatacagataaaatccttgccgatgttaaggatgaaacaacacaagcggtgttagccattgactttgttagcagcattttggcagccttggcggaatccggattaaacgatttctcgcaaatcgaggctatcctcgtagccttgcagattggtgatattcacgccaacgataaggcctcctttaaaaaagcaggggagcgcgctaactatgcgttcgaaaaagcagcctatattgaggatttctctgcgcttaaaggcacttggcgtaatattcagccaaaggaaacagcggatggacttgtgattgcctttccgaaggcaaatcagatttccaacggagagcgagatatcatttgctttgtagctcagttgaaaaaagccaagctccaactcaagaaaaaaaaggccattattttagtcattgatgagatatttgactatctggatgacgccaatctggttgcctgccagtattatctgacgcaaatgattgcggaactgaaatctgaaggtcgccaaatttttccattgattatgactcacttaaatcctgggttcttcaggaattttacttttagcgatcaaaaagtttgttatctaaacaaaattgcggtcgcgaacaaagcggtcgaaaacataatctctaagcgagatgaccctgccatatcggatgcaatttctaagcacttcctgcacttccactctgaagacgtagacctatctaacgagtttcaggcccttggactccctgctgatttggccaaggcgtctcagttttcagtacattgtgccagccaaatgcagcgatatgttgaaggtaagggctttgatccccttgcagtttgcagtggcgtacgccgaaaggtagagcaattgacatttgattcgttagcggaagagtcccgagaagagtttctgtcggtacacaaaaccgtcaacaaattacaattcgcagaggctgcgggaactacagttcctgaagtctattatttgttggcggtgatttataatgatgcgatgcatatcaggcccaatcaagataatttctccggattgggaacaaaactggctaacctgaccatcaagcacatgatttccacactaattcagcctgatgccctttaa

SEQ ID NO: 252209 - DNA, 129 bp, Klebsiella pneumoniae
atgaaagacagatcgcatgacatggtgatggccgatctgttgctgcagatgcccacgccctcggaaggtgaggcgagggcggatgatgcctgtgcaggccgcgctcagctaaatattgttattctgtaa

SEQ ID NO: 252210 - DNA, 591 bp, Klebsiella pneumoniae
atgcaagttcaagtcagaaagctcgaaggtagctgggacctcggctatgccctgcataagcatacgctctcaagcgtttacctcggggacgatgagtacggacatccccggtttgacaacactcggtctgagccaggggaagctctctaccaactcaagtaccgaggtgactggaatcaaatcgcaccgctggcggcgcagattcaagccacattactgccattgtttgggaaaattggcttgataattcctatgccagcatccaccacccgcgctcggcagccggtagatgaacttgcggcagaactcgggagaattaccggtattccggtattcaacaatattgtggtgaaagcacctgcaccgcaaggtgcccctcaactcaaaaacttgcacagccgcgaagaaaaagatgcggctttgcaaggtaggttcagcatcaatccgtgtatcaccaatgaaggccgttgggatgcactgttgctggatgatttgttcgatacaggcgcgactatggccgctgtttgcaatgcactgcggacgtacaacaaaataaatcgcgtctacgctgccgcaattacgtggaaataa

SEQ ID NO: 252211 - DNA, 855 bp, Klebsiella pneumoniae
atgacaacagtatttatagccggctcaatctcgattagtcgcctgcatgccaaggtgcaggagagaatcaacaaaattgtgtcgtcaaacttcaatattgtagttggtgacgcagatggtgcggactcatccattcaagagtgtcttcgcaactatcaagccaataacgtgacggtgtattgcacgggtgaaaccccacgaaataacatcgccgattggccagtacaccgggtttactcaaaagcaaaagttggaagccgagcctattttacagcaaaagacttagaaatggctcgcagcagtgattatggattaatgatttgggactgcaaaagcaccggaaccctgagcaacgtcattgaattacttcgagagagaaaaaaatccgttgtctttatcaacaaagataaggattttgtgacgatttcagatatttcggggcttgagcatcttcttacgtttatgtcgccacatgccagaactaaggcagaagaaaaaatcggtctcacatcaaaaattgccagcatttcacacgaacagttttccctcgacgtgtccgtagaggataagactactgccatgccagacgaacaaacaggacaagatccatttaatgaaaatgctgctcaaacagaaagcatgaaactgcgatcagaactcatgtccgctcttaagcagcatatcgttaacgcccatctaagccagtcacaagctgccaaggttttcggcgtaacgcagccccgaatttccgatcttacgagaggcaaggtcgatctgtttggactagatgcactggtgaatatggcagcaacagcgggcctacacgtggaaatgcacgttcgaagaacggcatga

SEQ ID NO: 252212 - DNA, 375 bp, Klebsiella pneumoniae
atgagtggcgtggttgcaccaaaaaattcgacggcgcggcggcgcggtaagcccatagaggtttgggtaacggacgaggaaaaaactgcgattacggagcttgctgaccaaactggtttgtctcgttccgcttatttgcgcgccgttggtctgaatagaccggtcggagcacgtgccgatcttgaagcagtgcgtgaactggtgaagctgaatggagacctgggccgggtggctggcctgttgaaactctggcttgcggaaaagcgaggccaaggtgcaaggcccatcgacatcgaaagcgtgatgatcgaattcagggaattgcaggcgcagattcgagagaagatgagcgccatagtctttgcccggaaatga

SEQ ID NO: 252213 - DNA, 753 bp, Klebsiella pneumoniae
atgagcggtggtaatgctgtgacccccaccagtactagcgcacaggcgcgggtaatgctctatcagcctagccagcgcccgcgattgcgcgagggtgattggacagacacatcatttggccgctgccgcgtggcaggcaggctaggccagaggcacgccgatattgtggaagcggtcctgtactgcgcagaacgtcggcgccctgtctctgacggcggcgtagagctgctggtagaccccgctcgggtgagaaagacgctttccgacagccgctacagctttacgcagatcgaaaagctgttggccgagctgcgagcggcgacgatcacaattgagacgccacaattcgatttcccaataatcgggggattgattgatcacgttatcccatcgcccatgacacggcctgatcccctaacagggggagagcggaatctgtggagagtgcgccttggcgtagcgctggtgatgctgcttgagcatgacttgagtctgtactacgacccagcccccattgctcgcctacagcatggcatcagccaagcagtcgcaaggcacgtcttgagccacaaaatagagccgacaggcggttggtatcttgataccgttatcgtggccgttgctgggatcgtgccgagcaaagcaatgcgagatgcacgattcaggctgagagaagatgccgacgaattgaaggcgctcggcctgattctagatggcgaccggttgaggaaaaaaggtactggtgacgcctaa

SEQ ID NO: 252214 - DNA, 354 bp, Klebsiella pneumoniae
atgaacattggtgatgctgcccggttatccggagtttccgccaaaatgatccgctattacgaagaggcgggattaataccggaagttgcaagaactgcagccgggtatcggatgtacagcgatattgatgtgtacaaattgcattttatacgtcgatgtcgggagaaagaaacctgtttaatcatgagtttgttcgaaactggactaatggtcctttgttggttcgaaatgataatggttattttcttcgggaaaaagatattaacccacttgccatcagtaatcgctatacagtttgggacgaacacaaccagcaagtcacatttatcgattccgagaggctttgttgaataa

SEQ ID NO: 252215 - DNA, 255 bp, Klebsiella pneumoniae; identical to SEQ ID NO: 127103

SEQ ID NO: 252216 - DNA, 420 bp, Klebsiella pneumoniae; identical to SEQ ID NO: 248540

SEQ ID NO: 252217 - DNA, 1557 bp, Klebsiella pneumoniae; identical to SEQ ID NO: 140468

SEQ ID NO: 252218 - DNA, 228 bp, Klebsiella pneumoniae
atgtttcccgccaccagcaacaacggttcccagcggcttatccagtcctggcacgcgaggtgcctggccgggccgttctccgtatcccatttgaatgagcgttggcacaaccagctgcgatttaccgccgccgcccgcggtgattgttgcgcttggttcgtcggcacggtggccgacgctggcaccgaattgccgggcgataactggagcgacgacgcaggctcgtga

SEQ ID NO: 252219 - DNA, 174 bp, Klebsiella pneumoniae
atggtggaattcatcgacggcgatcaggcgatcgtcaaacgcttctacgccgtaggcatcgaccgcgaagcgaaaggttgcgtgtgtgcaaacaagcaccttgtcgctactttcaagaaaagagccgaaagctcttaccttgccaccgttgtcgttaccgggcgcgttgcatag

SEQ ID NO: 252220 - DNA, 369 bp, Klebsiella pneumoniae
ttgccaatcgccaagcgcgccaagaatatgttccacttccttaattttatccttcgtgctctcgcgcgaattgacgttgggtatatggataatggtcttcctgtcaggatcgaggacattaaggatgtcatcgacgtaggagccactgtagaagaagtagccgatgtcaagttgcttgaggtattcgtaaccgttgagttgttcgtagtaggtataggtgacggtatcgaacctggactcatcctgaggagccaaaacggcctccgcatcaccccggaagtaggagccggtcatggcaacgatgtgtgtcttgtcacgcgcgatgaactgccccagatgctgaccaagcttgttatccgggttagctga

SEQ ID NO: 252221 - DNA, 261 bp, Klebsiella pneumoniae
atgatcattaatggtaaaaagataaaagcaaaagagatcatggaaatgacaggccgtagtgaaaggactgttaggaaatatttttctcaacctcgtgaagtctatgaagatgaagcggctgaacgtagaagaaaagcgtatgagctgagagagaaaggcttaaagtggaaagatgtaggaaaagagttagatacttctctacatggtgcggttgctctttataagcgttatttgaagttagatttaaaccaacaacaatag

SEQ ID NO: 252222 - DNA, 624 bp, Klebsiella pneumoniae
gtgctgaatgcgccgcagggcgtgagcatcagcagtccgcaggcggtacggttgtcttcgggtagcgccagcgtggggattgtgtcacagcagaatacggacattagtgcgctgaaacgttttacggtggcggcgggagaagccgtcagcctgctggcgcgaaaggcggggatgaagctgtttgcggcgaagggaaagattgaaatccaggcgcaggatgatgcgctggaggcgacggcgaaaaaggatatcaccgtgaccagcgtggaagggcgagtggaaatcacggcggcggaggaactggtggtgaattgtgcgggagcgtatatcaggctaagtggtggcaatatcgagctgggctgccctgggaatattctgctgaaatcggccaatgtgcagaaaatgggtaaggcggattttcgggtgcctccgctggaattgcctaaagggttcgaagagcgttttactgtcaaagatcagaagaccggtgaaattgtgccatttgcccgttaccgcatcaccactgaaaaaggcccggtattcgaaggccgggcagatgctgatgggaaaacggccagcgtttataccgcattgcctgagtcaataaaaatagagctactgtga

SEQ ID NO: 252223 - DNA, 1521 bp, Klebsiella pneumoniae; identical to SEQ ID NO: 224635

SEQ ID NO: 252224 - DNA, 303 bp, Klebsiella pneumoniae
atgaataaaaccgttatcgcggcggctgtattatgtatggccgcaggaaccccaatttattcctttgccgctgacccgtgcgaagttgttctttgcatgtacggaaaagcaacgggtaatagtggtggaagtgaatgccgctcagcagaaaaggctttctttaatatagtcaaaaagaataaatatggtttcttacctaaccatacgttgaatgcgagaaaagcatttcttggtgaatgtcccagcgcagacccggaggcagtaaataaaatactatctaagttcggcaaggtcagaggatag

SEQ ID NO: 252225 - DNA, 198 bp, Klebsiella pneumoniae
atggcatgcgctggtcagatggttgcactgggtgcgcatgcttttcagttcgctgaaaagcgcctgcggagagagcgacaccgcgttcaggcaatgcttgcgcagcagtctcaggctgtcaggtgggttcttaccccactgtttttccagaatatccagcgtatcgttcagtcctgtcagtatctgttggctgcttaa

SEQ ID NO: 252226 - DNA, 162 bp, Klebsiella pneumoniae; identical to SEQ ID NO: 184278

SEQ ID NO: 252227 - DNA, 159 bp, Klebsiella pneumoniae; identical to SEQ ID NO: 184277

SEQ ID NO: 252228 - DNA, 162 bp, Klebsiella pneumoniae
atgctgcgtgccatccgcgctgaactcgcattcaacggcgaactgatgccgcccaccatcaaacagggggagcagattactggtcactacgtagtttttaccacgtacggccagctctattttagtgggttgtccggttgcatcggtcgtcggcacaactga

SEQ ID NO: 252229 - DNA, 249 bp, Klebsiella pneumoniae; identical to SEQ ID NO: 135567

SEQ ID NO: 252230 - DNA, 426 bp, Klebsiella pneumoniae
  misc_feature (324)..(333): n is a, c, g, or t
atgcgcagttacaggcagtggttagttttcagtaaggctttgttagcgctattgttgctggcaggcatcactccggcgccgtttgctgcggttaacgttgatcgaacccggatcgtcttcgctgctaacgatgttgtccagtcgctgacgctcacaaacgatagcgtgacgccgatgctgttacaggtctggaccgatgccggagagacggcctcttcaccagacagtagccgcacgccgctggtggtcttgccccctgtctttaaaatgcagccggatgagttgagaacgcttcgtgtgatgctgagctcgcgccgtagtttnnnnnnnnnngtttacccggggatcgggaaagccttttctggcttaatatttaccagatcccccccgagcagaatgcaacagacagcgtcactcgcaaattag

SEQ ID NO: 252231 - DNA, 792 bp, Klebsiella pneumoniae
atgaatagtaacctgaccaagatatgttaccgtggtgagactggtgaaagtgatctaagaacattgatacttggtgagattctatatatctcactacgagatgttttaatcacgctgaataaagaaaatagagaaatcaacgctgattacacagtaaaatcgatggctggaataatcagggcgcaattacaggctcttgaccccgatgagtatattactacagatgctgaaaatggtgtttttgaaggtcagaaagagatcttcgtcacccaaccaggtttgtatcgagttatgtcgagtgaccgaagcgcggctggtaagcgctttcaaaaatggttattccatgaggtcataccatcgttgactaaacatggagtatatccaccaccgccagaagcaaaaggatctgccctcgcgcaaatggctgaaatattggcccaaaactcacgagcacttgctgatgctatccacagacatgaaaaattggtggaagacgtctcacaggtgaaaggcaaggttgccgatgttgaaaaccgtttgaacctcctagaatccagtccttcaattgtcaatgaggatatgcaatcccttgatagccgcctcgcttttttggacattagcatggaagaaaagcatgccgccgaaacattagcttggtgcgagaacatttctgtgcaaaaaaacaggaaggtgattcgcaaggactgtagggaaaactcgctctttacaacacagactatcgacgaagcaatcgctatcatgactgaaagtggaaaaatcacaccaaattga

SEQ ID NO: 252232 - DNA, 675 bp, Klebsiella pneumoniae
atggcaagagtactggatgcctggaaatgggcagatggcattacgttttcagttaaaatgaaagcaagagacgaacgggctgcccgttatgatgtttattggtatggtaaaagtaaagaagtcactgataccctacgatataatgtcccgcagaaaaaatcacaattactggctattctgtcagggttgcaaccccgtcaggataatcagcgtccctcaggcaatcagttagctattcagtatgggcaggttgatgcctcactgctcggagagtatgaaacctccgtaagctataaaaacggtaaaaaagtgttcgttgcactaaaaacagataacgacagttataccggtacaccgctgctggataaagacgcccgggtggtggaaacagaacacggaaaaaccctgtacaaaggcaaacgtaaggtcaacggccttgaaatttcagaatggtggacgaaacagactgatagttattatgcaaaaccagccataatttataattttgaactggttatccatcaagataagaaagaagggaataagctactggagttgtcgatggattacaccgttgacctgttgcacgcggataacgcattaaccgagaacgaactggtagcgctatgggaaaatataaccgaaacaattaaatatcaccccagccagtggtaa

SEQ ID NO: 252233 - DNA, 330 bp, Klebsiella pneumoniae
gtgagcggtcagcttgcggaaaacaaggatgcctgggatgcgtttaccgtgctgtttccgtcgattaccgcctcaggtatccctaaaaatgctgctctgaacgcgattatgcaaattgagaagacgccgcgagagctttattccggcgcaatcctgctgctggacgatacgcgctttgatgcagcgctagttctgcgttccgtatttcaggatagccagcgctgctggatacaggcgggggcgggaatcatcgcgcaatctacgccggaacgcgaactgacagaaacccgggagaaattagcgagcattgcgccctatttaatggtgtag

SEQ ID NO: 252234 - DNA, 483 bp, Klebsiella pneumoniae
  misc_feature (458)..(458): n is a, c, g, or t
atgatgctggccaacagcgccaacctgctggtctataccctgttcccgatgtttgtgcagatggcggcgccgaaagatcgcagcctgaaagacaccggcttttttggccttgagctgaatctcggcaactataccgatccgtcggcgaactacgcctggttcggcgtgtacgccatctatatgatcatcggcgcggtggccctgtttatctgctacaaatgcaccaaagaacgcgtggtcgcgaccgccgagcagaccgccaacgtcaaaactaccgaccttttccacgagctcagacataaccgtccgctggttattctcggcatgttctttatgctggcctttaccttcatgttcttcatgaacaccgttaacggcttcttcaaccagttcgtcgtcggccactcagaatggatgggcgccgtgggtctcgtcgcgtctattcccggcccatcgcnttcccggtgttctggccgaaactga

SEQ ID NO: 252235 - DNA, 513 bp, Klebsiella pneumoniae
gtgttctggccgaaactgaaaaaaatctttggtaaaaaaggcttcttccatctgttcctcgccatgttcatcgtcggcgaactgctgacctacgtctggtcccgcgaagggatgcacgacgccctgtggctggcctacatcgccacctttattaaacagtggggcttaacctccgccaccggctttatgtgggcgctggtaccggaagttatcgcgtacggcgaattaaaatcgggcaaacgcaatgccgccattatcaatgccattatgggactcttcttcaagatcggcttcaccatcggcggcgctatcccgctgtggctgctggcggtgtatggatttaatgaaagcggcgccgtgcagagcgccagcgccatcgacgggatcattatgaccgcggtgtggatcccaattgcgctggccgctatttcgatggtgatcatgcaggtttatccgatctccgataaacatgttaccgacatcaaccgtcagctggatgagatccgcgtgtag

SEQ ID NO: 252236 - DNA, 231 bp, Klebsiella pneumoniae
atgtctttaaaggcgccttcggtgaccttcacatcggtatacaccaaccagaattgcccatcggcccaggagagcgccggcgcccaaatgccgccggaggaggggttgcccttcatgtccagcagggtggtggtggagagcggcgaaggcagcaggttccagtttttcaggtctttcgactcatgtaaacgcacgcccggaaaccactcaaacgtcgagttggcaatatag

SEQ ID NO: 252237 - DNA, 306 bp, Klebsiella pneumoniae; identical to SEQ ID NO: 190463

SEQ ID NO: 252238 - DNA, 171 bp, Klebsiella pneumoniae
atgcagaaacgcacgcatatactgggatatgccagtaccagcatttgggatcaatggatgacagagaccacgagatgccatttcattagccatctgaaccaatgctgtacgatggtggtggcggtaagaagaagcgttacggtactgacccagtccgaagcagtcatataa

SEQ ID NO: 252239 - DNA, 174 bp, Klebsiella pneumoniae
atggagtctgccttgtcgcactttgccgaccttatagacgagaattgcttgatccacctcctgaagcactcacattatccctacaagcttttgatcgcgatgagacagccgctcatcttcaccaaaagtttccagatgccagcgaaagtgatgttgacgagttccatcgtctaa

SEQ ID NO: 252240 - DNA, 534 bp, Klebsiella pneumoniae
gtgcgatcgcgccagcatagggaaccacctgttgacttcccccggtcagctcagcatcgctgcgcatctgccgggtatcgagtgagacgttgttgcgacgatagggagatagcgagggcaaaatggcatacccaaaacggtcgattaccgccccctgaccgttctgtacgacggcgccctgtgcgccatcggcgtgaattaatgcaaacgtgtcgctggcgtaggggccgaacgtcacgccaccggaatgcaacaccacggttccggaggagcctagcgccacctgacgatagtcttttccctgatcgtagcccacgcgcagcgcgccaaaacgggtgttttgctggacgttgccgccaaaagtcgttgctgtcccttcatccccattgcgatagcgatcatagccgccgtagaccgaccaggagagttcgttctgctcgccacgggttccgttcatcgacaaggttgaggatcggttcgcgcgcgactggttataattcattgccacggaggtcggattgtcgccccagttaa

SEQ ID NO: 252241 - DNA, 1644 bp, Klebsiella pneumoniae
atggtggcgctgtcgtccgtgaaccttctttctctggcgagcctggcccgcagaaagcacccggcctgtcagattatcctcgccgccgaccgtgacctgaacggcaccggccagactaaagccgctgcggccgctcaggcctgtgagggcgttgtcgccctgccgccggtgttcggtgactggaatgatgcggtgatgctgaagggggaggacgccacgcggaaagccatttatgccgccatccggccagcggcacaaagccccttcgacaccatgagcgaggcggagtttaccgccatgagcgccagcgataaggcaatgcgggtgcatgagcattacggcgaagcgctggccgtggatgccaacggccagcttctgtcccgctatgaaagtggcatctggaaggtgataacgccgtctgattttgcccgcgatgtggccggactgttccagcgcctgcgcgccccgttctcatcgggaagaattgcgtcggtggtggagaccctgaaactgattattccgcagcaggatgcaccggcacgccgtctgattggttttcgcaacggggtactcgatacccaaagcggcctgttcagcccgcacagtaaatcgcactggctgcgcaccctgtgtgacgtggatttcaccccgccggtggagggcgaaacgctggagacccatgcgccgaatttctggcgctggctcgaccgggcggccagcagcaacccgacaaaacgcgacgtgattctggccgcgctgtttatggtgctggcgaaccgctacgactggcagctctttctcgaagtgaccggccccggcggcagcgggaaaagtattctcgccgaaatcgccacgatgctggccggagaggataacgccacatcagccgacatcgacacgctggaggacccgcgcaagcgtgcttccctgattggcttctcgctcattcgtctgcctgaccaggagaaatggagcggtgacggtgccgggctcaaagccatcactggcggtgacgcggtctccgttgacccgaaataccagaatccctactcgacgcatattccggcggtcattctggcggtcaacaacaacccgatgcgcttcaccgaccgcagcggcggcgtgtcacgtcgccgggtgattatccacttcccggagcagatagccccggaagaacgcgacccgcagctcagggataaaatcgcccgcgagctggccgtgattgtgcgccagttgatgcagcagttcagcgacccgatgagcgcccgcgccctgctccagtcgcagcagaactccgacgaggcgctcagtatcaaacgcgatgctgacccgacctttgatttttgcggctatctggaggcactgccggagccggacggaatgtatatggggaacgccaacattatcccgcgccagccgcgcctgtatctgtatcacgcttatctggtgtacatggaagcccacggttacaggaatgcgctcagcctgaccatgttcggcaaggggctctcagccatgctgaaagagtacggtcttaattatgagaagcgccgcacaaatcagggcatgcagaccaatctcgcgctcagggaggaaagcaacgccgactggctgccgaagtgtgacgaacccaccgcaacataa

SEQ ID NO: 252242 - DNA, 1002 bp, Klebsiella pneumoniae
  misc_feature (840)..(840): n is a, c, g, or t
atgtcagcagagaaaaaacccgttgtggcgattaccattggcgatccggcagggatcggcccggagatcaccgtggccaccatgatggacgaaagcgtgtatgacgagtgcaaaccgttcctgatcggctcggtaccgattatcagccgggcgatgaaaatcatgggctgcgattttgctatccataaaattgcccatccgcaggaggcccgtttcagctgggggacgttggatgttctggaaactggcgactacgattgcgacagtatcgaatggggcaaggtgcagaaactggcggggaaaatgtcgctggactatgtgatgaagtcgatcgagctgggtaaagcggggctgatcgacgtggtctctactgcaccaattcataaggaagccatcaagctggcaggatgtaagctcccgggccataccgaaatctatcaggtggaaacccaatctgattacggtctgaccatgttccacgtccacaacctgcgcgtcttcttcgtgagccgtcatatggcgctaaaagcagcctgtgactatgccaacaaagcgcgagtgctggcctgcgttcagcagatccaccatgaatttaccgccctgaacatcaaaaatccgcgcattgccgtggccgccctgaacccgcatggttccgacaatggtctgtttggtcacgaagaggctgacaatctgatcccggcggtgaaagcggcccaggagatggggatcaacgctatcgggccggttccggccgattccgtgttccatctcggcaaacaggggcgctacgacgccattctctcgctgtatcacgatcaggggcatattgcctgcaaaacnctccagtcgactttgaacgttcgatcaccattaccttcggcctgccgtttatgcgcagctccgtcgaccatgggacggcgtttgatatcgccggtaccggtaaggcgggtaccgtcagtatgctggagtcgacgctggtggcggcccgttactggaaaatga

SEQ ID NO: 252243 - DNA, 1311 bp, Klebsiella pneumoniae
atgcaacagcaaataaaacgcagcaacgtgcgttacggtatattggtttttttatttctcgcgaccgtatttaattatgctgaccgggccaccctgtccgttgtcgcgccgatgatgagtaaagagttaggttttgaccctgaagcaatgggcctggccttttcggtgtttggtatttcctacgtcattatgcaaatccccggcggctggctgctggataaatatggttcgcggttggtctacggctgcgcgctgattggctggtcggtcgtcactatgtttcagggcactatttatctgtttgccagtccgctggtggtgctggtgatcctgcgtctgatgatgggggccattgaagcgcccgcttttccggccaacagtcgcctgagcgtccagtggttccccaataaagagcgtggatttgtcacctcggtctatcaggccgcgcagtatatttcgctgggcattattacgccgctgatgaccatcattctgcataatttaagctggcactatgtcttttattatattggcgctatcggggtggtgctgggaatattctggctggtaaaagtgaaggatccttcacatcatcctaaaattaacccgcaggagctcgattatattcgtgaaggcggcggcgtaccggaattaggtagccaaaaaacgccgcaaaaattaactctcgcgcagattaaaagcgtctgcgtcaatcgcatgatgatcggggtttatatcggccagttctgcgtcacatcgattacctggttcttcctcacctggtttccgacttacctctaccaggccaaaggcatgtcaatcctcaaggtcgggtttgtcgccagtatcccggccatagctggatttatcggcggcctgctgggcggcgtattttcggactggctgctgaaacgcggttacagtctaaccaccgcccgtaagctcccggtgatctgcggcatgctgctctcctgcgtcattgtcgtcgccaactacacctcttcggaagtggtggtgatcgccgccatgagtctggcgttctttgccaaaggtttcgggaacctcggctggtgcgtgctgagcgacacctcgccgaaagagatgctcggtattgccggtggcgtgttcaatatgtgcggcaacctggcgagcatcattaccccgctggtcatcggggtgatcctcgccaacacccactcgtttgattacgccatcctctacgtcggttccatgggcgtgctgggcctgttctcctatctgtttatcgttgggccgctggatcgcttgacgctcactccgcgcaccgtttga

SEQ ID NO: 252244 - DNA, 864 bp, Klebsiella pneumoniae
atgaaaatcctttgtacccgcaacggctcgacgatctccccacgcgatgaacgccgtctgagtgatgcggttaatgctgtgatgaatgacgagccacaatatcgcgtctacggcattacccgaatgctggagaatttgcctgagccggctacgaaagaagcccaggaaaacggccttagcattcggttgtcacagtgggcgcagggcggtgagttcggctgggtgtttgataacgagtctgacacgttcgatatcagcaactgcgataacttcggcatcgacggaacggagttcctggacgatgcaagcgtatgtgcgccaatctcgttttatctgctgtaccgcattaccagcctgcttgacgggcgacgcctggtcattttcatggatgaattctggaagtggttacgcgacccggtgtttaaggactttgcttataacaagctgaaaaccatccgtaagctgaacgggatgctggtcgtcggcactcaatccccggctgagatcatcaaagatgatatcgccccggcagtgattgagcagtgcgggacacagattctggcggcgaaccccaacgccgaccgcgcacattatgttgacgacatgaagtttgaaccggaagtgttcgacgtggtgaaagggcttgacccgcaagcccgccagtatgttgtggtgaaaaatcagttcaagcgcggcgataccaaacgttttgccgctcgtgtcacgctagacctgtcgggtatcggcagatataccaaagtcatgagcggcgatgctcccaacctcgaaatattcgaatcgatttaccgggaaggaatgcagcctcatgaatggctcgatacctacctggctaaagcactctga

SEQ ID NO: 252245 - DNA, 753 bp, Klebsiella pneumoniae
  misc_feature (733)..(742): n is a, c, g, or t
atggcaaagctgctcaaggcaatgaaacgcccggcggcgctgtggggggtgcctatggtgcccctgctggctgtcacgggtgtaaccatcatcgttgctgtctggacttccgtcgcactcctgttcttacttcccgtcgaatttctggtgatgaaatccctcaccagaaatgaaccaatgcggttcaatctgattgccgtttggctgagagtgaagggaaaaccggtagcaaaccgtttatttggcgcaacaacacttatgcccgttgagcatgaggctgttgatatcaaggagtttctcgacgccatgaaactaaatcagtgtgccaccatcaagaagtatattccgtactcatcgcacattcatcagcatgtggttcgctcacctaaaagcgatctgtactgcacctgggaattgatgggaacgccgttcgactgcgagtctgacgaatcactccagttcgggacgaaccagttacacgggctaatccactcattcgaaggtatgcccgtcactttctatatccataacgaccgcaatacgtttaccgacaatcttcataaagattccggcaacccgtatgccgatgaagttagccgtctttactacgcttctgtcggggtgttccggcgtaaccgcctgttcctgacagtctgctatcgcccgtttgtcagccttgaaaaagcagaacgcaaacggatgaaagacagccagaaactaaaggaactggacnnnnnnnnnncgggcagataa

SEQ ID NO: 252246 - DNA, 684 bp, Klebsiella pneumoniae; identical to SEQ ID NO: 15694

SEQ ID NO: 252247 - DNA, 681 bp, Klebsiella pneumoniae
atgagcgtagacatcatttgccgtggtgctggtcacccgcgccgggagtgttccagccatcacaggcctgcggatgagaggagggcggtagccgtagcgttcggaataggggatggcggtgaatgtcagttcgtaactgcggtctcgtgctgcgctggcggtaatcccggttatcagaatgcccttgcggaatacctctggcgcatcattatcctcgacctttatctccagccccggcatcagcagagaactggtgctctgtcccttcaggatggcgcgtccgttcaggtagcgttcgtggcggatacgcgcatagaatgcaccactctccggcgtcgctttgtcacccgttttcagaaaattgtcagcgtaatgataggcttcaccgtaggtggtgttatccccgcctgttacgtcaaactggcctgttgtcatctccgccatcgcttcacggtagttgtaatcccgcgtcgtgacggacctcgataccacgctgtaggccgtgttcagatcccacactgcttcggttccgctgtcgctcatccccgaagggtgacgcagcggcagcgtcaggccgcgctcatagccactctggtcgtcgtaaaactcgataaccccgattttcagtcgggcgtcggtactgaaccggaaccagatacccacctccgacagcaaccgtga

SEQ ID NO: 252248 - DNA, 1074 bp, Klebsiella pneumoniae; identical to SEQ ID NO: 15696

SEQ ID NO: 252249 - DNA, 192 bp, Klebsiella pneumoniae
gtggcgttcggcaccgaagggggactgttcgatgagatgggcgtcgcgaccctggtctgcgggccgggcagcatggcccagggccataaggccgatgagtacatcagcatcgaccagaccgaacgctgcatggcgatgctgggccagctttgcgcctggatgcgcgccgaaccggcggaaccgcttacctga

SEQ ID NO: 252250 - DNA, 369 bp, Klebsiella pneumoniae
atggctagagcattgtcagcaattgagcgcagagagtacgtccgcgcagtgattcggatcaccaggcatcaggggcgactcacgaccgccgaggcaatgaaaaaactggggctgagccgcgctactgtccagcggtatttttccgaagcagaagcgactggggaggttgtccggcatggtcgtctggggctgttccgcgatcagcgggctctcatcgactttgacatgaaacggcttgggatggtgccaaaggcagcgtcggggatgaattacagcctgcttggttgtcctgtattccagcgtttcctcgatattcaggaaatgatttttacctgtacgccggcatcgtcatcacgggaggtcttatga

SEQ ID NO: 252251 - DNA, 696 bp, Klebsiella pneumoniae
  misc_feature (546)..(555): n is a, c, g, or t
atgctgaagaccgagaacgcccgcccgaccagttggatctacatcgacgcccgcgaccgcgacatggtgtcggtagtgcacgatctgcagcaggccatcggcaaggaggtgaagctgaagccgggcatcagtgtgtcctactccgggcagtttgagctgctggagcgcgccaatcagaagctgaagctgatggtaccgatgacgctgatgattatcttcgtgctgctgtatctggcgttccgccgcgtcggcgaagcactgctgattatcaccagcgtgccgttcgcccttgtgggcgggatctggttcctctactggatggggttccatctgtcggtggccaccggtaccggctttatcgccctcgccggggtggcggcagaatttggcgtggtgatgctgatgtacctgcgccacgccatcgaggccgagccatcgctggagaatccgcagactttcagcgtcgataagctcgacgaggcgctgtaccagggggcggtgctgcgcgttcggccgaaggcgatgaccgtggcggtgattatcgcnnnnnnnnnngccggttcggaagtcatgagccgtatcgccgcgccgatgattggcgggatgatcaccgccccgctgctgtcgctgtttatcattccggcggcgtataagctgatgtggctgtatcggcatcggggcaagcgtagccaatag

SEQ ID NO: 252252 - DNA, 150 bp, Klebsiella pneumoniae
atggaacgtagtgaaggtagcggtgcgcaggaagcccgtcgtgaagtccattacgaaaacctttgtcaagaagagcgtggcgcattgtgcgctttaaacaatcaaaaagaaactgtaagaaaagtggccgagcagcttttccataaataa

SEQ ID NO: 252253 - DNA, 201 bp, Klebsiella pneumoniae
atgataaaacgcctccccttcagccgtaacgctcaacttacgggtagtgcgatggatgagttttacgccgaggtcgtcctctatctgctgtatcgctttgctcacggtgggacgatgaatctgcagaatgtcagcggcccttgtaaagctgccctgctcaacaacctgtacgaaaatattaaggtattcaatcatgtttga

SEQ ID NO: 252254 - DNA, 936 bp, Klebsiella pneumoniae
atgaaccgggtgggtatcgaaggcaaaggtgaaagcgtctggctgggcttcttcctgtacgacattttgcagcggtttgcagcgctggcggagcgcaggctggatgaaagcgtcgccgcgatgtgccgttcacaggctctgcgcctgcaaagtaatctcgaagcccacgcctgggatggggaatggtaccggcgcgggtattttgacgatggtactcccctgggatcgaaaacctcacaggactgccggattgatgcgattgcgcagagctggtctgtattgtccggcgccgcgagcccgggacggtgcgcaaaggccatgcaggcgctggataagcaccttgtggataacgaaggagggctgatcaaactgttaacgcctcctttcgacggacacggtccaaatccgggctacatacaggggtacctgccaggcgtgcgggaaaacggagggcagtatacgcatggcgccatctgggcagtgatggcctttgcccgaatggggaatgccggacgagcctggcaactctggtcaatgctcaaccctataaatcataccctgaatgcggactctgtcgggatttataaagctgagccttatgtcatgagtgctgatgtctacagcgtcgctccccataccggacgtgcagggtggagctggtataccggttccgcaggctgggcctggcgtttacttaccgaggaattactggggataaaacgttccggcactgagtttagtgttcatgcccggttaccggatgagtggtcgtctttttctatggcatatcaatatggtgaaagccattatcagattagtgtttcacgcggcgatgcagaatattgcgtgacactggatggtgttctcctccctgatgacagaatactgctgaaggatgatggacaaaaccatacggttgagatcattcagaactga

SEQ ID NO: 252255 - DNA, 417 bp, Klebsiella pneumoniae
atgctcagtgaccaacttgttcacgtcaataaaaacaggaactgtattctcgcctttgtcgtagcctaccaggttgcccaagtgcaaactggagtgttcattaaattcgtaaaaatcactcaaaaactggaaatcgacggtttcaacagcggtaccagggttaagtgggcgacgtggaattttgatttgacgagtaacaggatcgcggtaaccaaccagctcgacctgagcaaacatattctcaccagttacattcgcaccgggcaaaagctcaagctcagtcacaccatcgccaaagccggcgttgtagagcatattggtgcgactgatcttagtcactcgccccagtacggcgacttgcccctcatctttgcgttcctggtgcataatgcgtacaaactcaccacggcgtactga

SEQ ID NO: 252256 - DNA, 198 bp, Klebsiella pneumoniae
atgcgaattgagcaggataatttccggcacctgctgaccggttatctgcccgaagcgacgcaggcgcagcatatgtttcgtatgctcacggcggctctggtccctgacgcgggtctggcaggcaaagaacggctggaatccttcacgctgcaggttctccagcagggtaatggtcggtatgtagctgtaatggtctga

SEQ ID NO: 252257 - DNA, 144 bp, Klebsiella pneumoniae
atgcgcactactggaatcctaatggcggaaattacgcttcgcccatacatgaagccgctgctcatcctttcagtgcttttgcgctggggctggctcactaagaagtgtatccggatcacccctgtaattggcaagcaggcgtaa

SEQ ID NO: 252258 - DNA, 666 bp, Klebsiella pneumoniae
  misc_feature (393)..(393): n is a, c, g, or t
  misc_feature (397)..(397): n is a, c, g, or t
gtgctgatcgttcctggtctgtacgccgccgatgagggcctgctaacgcggattaacgactatatcgcccggggcggcagagcgctgatcggctttaaatcaggctttagcgatgaaaacgtcaaggtgcgcagcagcgcgcagccgggggttttgcgccagagctgcggcgtcagctacagccagttcaccctgccggaagagacgacggtaagctcttgctgcgcagagattgattgccgcaatgacaatcaggctgagctgtggatggaattgctgacgcccgatgacggaacccgcaccctgctgcgctaccagcacccggcatggggcgaatacgccgccgcaacggaggcggattacggtcagggtcgcgccctgtacgttggattnctgncgcagaagggcctgattagccagctgtttgatgtcctgacggcggatctcacgctgaactcgcgaacttccgcctatcgctatccgttagtggttaaaaagatgcgtaaccgcgccggaaataatatccacttcctgttcaattactccggcgaggcgatggatgttgtcagcgagaccctgggtaccgcgctgctgagcggggagacagtatacgtcggccagccgttgcgcctcagggcctgggaatttactatcatcgaaagctaa

SEQ ID NO: 252259 - DNA, 279 bp, Klebsiella pneumoniae
atgtatcccgacaaccattacccctctggtcgcaccggtcaggttttcaagcccttcgacatcaaaccattttttgactctcgcatcgctccagaaccaggccattcctgtttccatcagtcccagcccgagagaaacaaagtttttattgaccatctggctccgggcaaacggtgtcatctcgggaaagcacagttcgatatttctactcgcaatcccttcccggcgtttcagaaagggtctggatatttttccaagaccagagcccagagtatgtaa

SEQ ID NO: 252260 - DNA, 201 bp, Klebsiella pneumoniae
atgattttggactggatgaattccggtttgatgaggatggtctgggggcaggtgctcgcggcgatgctcgtgttattaacgaacttcgttctggtgaacgcctgccacaaatcaccgcaacgcctttccgtggtagcggtagtgttttcgatccggaagatgaagccgttcccggcgacaacgggaaacctgcacgcctga

SEQ ID NO: 252261 - DNA, 651 bp, Klebsiella pneumoniae; identical to SEQ ID NO: 217085

SEQ ID NO: 252262 - DNA, 573 bp, Klebsiella pneumoniae
atggtcagctggtacagacccatcagcagcaatttctcccgcctctttccctccgatatcctgcctcatccattcgcgcgcagcttcaggaaccagaacgagcggccgacggtcgtggatatcgaccaacccctgatcggctgcagctgtcacaatcaaaaatccctctgcttcatccccgcgctcgaaaggtatgctgccgatagccgccataaaaatcggctgatcatccttacgatggatgaaatagggctgcttcttgtcaccttcacgcttccactcaaaccagccgtccgcaaaacagatcgcccggccatgctgccagaggggcttaaacatccggctggttgccgcagtttccacgcgagcattgatgagcgcaggtttatcccaccacccgggtgcgtagccccaatgaaccggatcgaggtgcagttcttcattgcgttcgctcagcaacagaactttggtaccgggcgccacgttgtaccggccgatcggttcggagtcaaaggcgatatctcgctcggcctcttcagaaagataagccaggtattcttcacgggtttgtga

SEQ ID NO: 252263 - DNA, 273 bp, Klebsiella pneumoniae
atgagcatcattcaatatgccgttaatggagccgggattaaatatgccgattatttggacccgcgagaggtagatgaatcgacagacgactgggaatacgagcagatggtgcaggatgcggctgaagactactgggaaaatcatgacggatgggaggaccactggccattgaatatcgagctgttcgtcgatggtaaaagtgttggcctatttgaagttgtgatggaaatggagccgacattctcagcaagtaaacaggagcgtgccgcatga

SEQ ID NO: 252264 - DNA, 660 bp, Klebsiella pneumoniae
atggccggggcggcgctgctggcgatcgtggcgatcccgatcctgatgggcttctggatccgcggcaggatcccggcggagagcagcaatccgctgaatcgctttttgatccgcatttatcacccgctgctgctgaaggtcctgcactggccgaagactaccctgctgattgcgctcctgtcgatcctgacggttgcctggccgcttaaccgggtcggcggcgagtttctgccgcagatcaacgagggcgatctgctgtatatgccgtccacgctgccggggatctccgctgcgcaggcggcggatatgctgcagaaaaccgataagctgatcatgacggtgccggaagtggcaagggtgttcggcaaaaccggcaaggccgaaaccgccaccgactcggcgccgctggagatggtggagaccaccattcagctcaagccgcaggatcaatggcgaccggggatgaccatggagaagatcgtcgaggagctggataaaaccgtgcgcctgccgggactggcgaacctgtgggtgccgccgatccgcaaccgcatcgacatgctctccaccggcatcaagagcccgattggcattaaagtttccggcaccaacctggccgatatcgacgccatcgccgggcaaaagcagaagctggcatag

SEQ ID NO: 252265 - DNA, 519 bp, Klebsiella pneumoniae
atgaaaaaattatcagcagctgcgtttgcatttggtctgttatctgtgtctgtatctcaggcattggcggcggatgccaccgttaacttcagcggaaccattcttcaggaagcctgcagtgtagatacttcagacaatactgttaacgttcagctaggcacctacggtgctgctcaattcccgacggtagggacaacgacccttcctgttcctttcgccatcaacttaacgggttgtccggcttcaggtggcccgacggctgcactggtgaccttttcaggggccgcggatgcggccggtgacctggcgttgaccgcaggcggcgcatcgggcgtttccattaatatcaaaaaagcagatggtaccaatattgatattaactctaccgattccggtattgcactgactagcgctacgacccaacagctccgctttaccgctaattacatcagtactgcggcttctgtcaccgcaggcgcggctaacgccgtcgcccaggtaaacatctcgtatatgtaa

SEQ ID NO: 252266 - DNA, 756 bp, Klebsiella pneumoniae
gtgctcatttgtcagcacgacgccagcgccgggtcagacgatattcccgtccttgcctggcagcaggccattgaggcggagccgatcgccaacccggtagtacgcgcccccacgcaaccggcctacattatctacacctccggctctaccggtacgccgaaaggggtagtcatttctcaccggggagcgcttaacacctgttgcgatatcaatacccgctatcaggttggcccgcatgacagggtgctggccctctccgccctacattttgatttatcggtttacgacatttttggcgtactgcgcgcgggcggcgcgctggtgatggtgatggaaaatcaacggcgcgatcctcacgcatggtgtgagctgatccagcgccatcaggtcacgctctggaacagcgtcccggcgctgttcgatatgctgctgacctggtgtgaaggtttcgccgacgccacgccggaaaacctgcgcgcagtgatgctttccggcgactggatcgggcttgacctccccgcccgttatcggaccttccggccacaaggacaatttatcgcgatgggcggcgccaccgaggcgtctatctggtctaacgcctgcgaaattcacgacgtccccgcccactggcgctccatcccttacggttttccgctaaccaaccaacgctaccgggtggtggatgaacagggccgggactgccctgactctgtctcttatacacatctgacgctgccgacgactccttacgtgtag

SEQ ID NO: 252267 - DNA, 408 bp, Klebsiella pneumoniae
gtgtttgaacgcggcgtcattaacgtcttcaaggagctaagctgggatttcaagacaaactcgccctgcaaatttggtgcgaaaatcatcgtcacgggactggtcaaattcgacaggtggggatttgggcttaactggggctggcagcgtgaccgcttagcagaccttaaacgtatgctaatgcttctggatggcaagcctgtccccgaccaccgcgctgacgttacccgtcggctgggagaccatatccatgagaataggcacagtaatcgttatgaggatgagatgtttgcgatcaaatactttcagaaggggacggcgcatatcactttcaggcgacctgagctggttgataagcttaacgacatcattgcccggcactatccgggagcgctggcggcaaagtaa

SEQ ID NO: 252268 - DNA, 156 bp, Klebsiella pneumoniae; identical to SEQ ID NO: 180882

SEQ ID NO: 252269 - DNA, 522 bp, Klebsiella pneumoniae
atggagttaattataatttgtgcaattcttggttgcataccggcagcaatagcaaagagtaaggggcgtgatttttttgggtggtggctctatggggcgctgctttttattgtggctttgattcactctctggtcattaagaaagacattcgtgcgatagagcgcagtcagattgatgagggcatggttaagtgcccgttttgcgcagagattatcaagccggaagccgtgaaatgtaagcactgcggcagtgatgtaaaagaggcgttggaagcggttagtctcgctaatttcaagccaagtgatatggcatttgaggatttcttcataagaaggaaggatgggtttgatgtcaatgaggcgacagtaacgactttggtttcccgccttaaacaagcaaatccaggtgctcaccccatgaatatcaaaaacaagtaccgtgagcaaattaatgatcttatgaatcaattgccaagcggaatcagggatgagttcatgcgcgtttatgacgcaaagatttga

SEQ ID NO: 252270 - DNA, 138 bp, Klebsiella pneumoniae
atgccgacgagagtaaagcaggaccgctctcccttaggcgagctcaattttctgaaaaaggttttgtatcaacgttattctctgggcattcattatgggttctggatcatgatgtcatttcatcatcagataccatga

SEQ ID NO: 252271 - DNA, 264 bp, Klebsiella pneumoniae
atgcatatcggcaatgccagcattattccgcgtcagccgcgcctgtatctgtatcatgcctatctggcgtatatggaagcccacggctacaaaaatacactcagcctgaccatgttcggcaagggactgtcagcgatgctgaaagagtacgggctgagttatgagaagcgccgaaaaaatcagggcatacaaaccaatctcgcgctaagagaggaaagcaacgccgactggctgccgaaatgtgatgaccctgtagcaaaataa

SEQ ID NO: 252272 - DNA, 348 bp, Klebsiella pneumoniae
  misc_feature (246)..(255): n is a, c, g, or t
atggcattcgtcgatcacaatcaggtcaaagaaatccggggccacctgtttaaaggctttttgatcttcttccgggccggtgatggcctggtacagcgcgagatggatttcaaatgccgggtcgatggtgcgcccggtgaccttggtcattgccgtgccaaacggcaggaagtcgttgtttttggtctgatcgaccagaatattgcgatcggcgaggaacaggatccgcttcttacttttcgcttnnnnnnnnnnggtgtaggttttccccgttccggtcgccatcaccagcagaacgcggttctgcccgccggaaacggcttcaatggttttattgatggcctgtag

SEQ ID NO: 252273 - DNA, 390 bp, Klebsiella pneumoniae
gtggtgctgcacagcgatccgcgctggctgccggagcgccagcgcgcctgggccagctggaactatcgcctgagcgacggggatcgggcccgggcctgcgtcacctacaacatgaatattctccaggggctgcccgcgggcgcgccgctgttctgcgtcaccctgaacccggacgcgccggtggacgatcgctacgtctggcagcgcttcgtctatgagcatccgctgtttaacccgcaaagctggtcggcccagctgcggcgcgaagagattaacggccagcagcggagctggtactgcggggcctactggtacaacggctttcatgaggacggggtacgcagtgcgctcgacgtggtgcagggcatcgccgcggcggaggacaactga

SEQ ID NO: 252274 - DNA, 573 bp, Klebsiella pneumoniae
gtggaagtcagccatgagctgaactggctgaatgaaaatatggcgcagctgaccgcgctcctggaatcggcgaaggcgcaaccgcaggctgatattcagcccgagttgccccctgaaaccgctgagctactgcagcgactggaagccgctaaccgggagatccaccatttaagcaacgaaaaccagcagcttcgccaggaaatcgaaaaaatccatcgcagccgttcctggagaatgaccaaaggttatcgttatctgggcctgcagatccatttgctgaggcagtatggtttcgtgcagcggtgtaaacattttattaagcgcgtcttgcggtttgttttctcgtttatgagaaaacatccgcaggtaaaacatacctcggtaaatggtttacataagctgggcctttatcagcctgcctatcgtttgtatcgtcgtatgaatccactgccgcacagtcagtatcaggctgatgcgcagattttatcgcagactgaactgcaagtgatgcatccggagcttttacctccggaggtttacgaaatttatctcaaactaacgaaaaataaataa

SEQ ID NO: 252275 - DNA, 600 bp, Klebsiella pneumoniae
gtggagttcgaccatacgcaaatcattcattaccagccgcaggaagcgaaagcgctctccgcctggatcgaaagcaccccgatggtctacgaagcgcactccaccgactaccagacccgccaggcttatcgtgcgctggtccgcgaccacttcgccattctgaaagtcggcccggcgctcacctttgccctgcgtgaagccatctttgccctcgcccaaatggaaaatgagctgatcgccccggagtctcgcagtcgcgtgatggaggtgatcgacgaagtgatgcttaacgaacccggctactggaaaaaatactatcgccccacctggagccaggcgatggtcgatatccacttcagcctttccgaccgtatccgttattactggccgcatccgcgtattcgccaaagcgttgagaaacttatcgctaatctgaccgacgctaaactaccgctggggcttatcagccagtatatgccggtgcagtttgaacgactgtcgctgaatgaactgaacgccgagccgcacgcgctgatcctcgacaaaatccaggatgtcctgcgtgcctatcgctacggctgttcttctgaaaccgcgtga

SEQ ID NO: 252276 - DNA, 219 bp, Klebsiella pneumoniae
atgggccggaacgtggtgcagaatggccgcgctatcgagcagctcggctttgcgataagcattggtttccgcggccgccagctgttcggcgctgttggccagattttgcgccagcgccagcagggcgtcacaggcgtagatggcggcgcggcagccgttgacttcatccataccgctgcggctaacggcgctaccgagggcgcgggttttctcttctaa

SEQ ID NO: 252277 - DNA, 237 bp, Klebsiella pneumoniae
atgcagttcatgtttattacgctggctctcttccgccgtcaggatgccgtggggcatgtcgtaatagaaaaacttgcatacataatcttcgccaaagaagtagcgacggctgcgcttatgcgcgaggccggccccggcatagggctgattctgccagtgctggaacggctgattaaaatcgttgatcagcacccggtggttgctgaccaggtacatcgggcgcggtacgggggataa

SEQ ID NO: 252278 - DNA, 405 bp, Klebsiella pneumoniae
atgaaatcgctataccggctttccgtagggcttatcctcggcgtgtcatttatcacctcggcggccgctaacgaccataaaattctcggcgtgatagctatgccgcgcaatgaaaccaacgacctgacgctgacgctccccgtctgccgggtggtcaaacgcattcagctcagcgccgaccgcggcgatgtacaactctccggggcgacggtctactttaaggccagccgcggcgccagccacacgctgaacgtccccgccgggatcaaagagggcagcaccaccggctggatcaacatcaatagcgataacgacagcaaacgttgcgtgaagaaaatcgccttctccggccacacggtgcactcctcagatatggcatcactgaaaattatcggcgatgactaa

SEQ ID NO: 252279 - DNA, 351 bp, Klebsiella pneumoniae
ttgcagataatccctgaaggtgacgggcagcggcggaagcagctgttgcgggtagcggtagccgtgctccagctccgccagcaggatctgcatgctcagaccgtcaagcaacaggttatccagacacagccacaggcgggcaggcatcccgtccacgtatccgacctggagatcgaataccggccacacttcggggttgagtacctgatgcgccagtttttcgcgcacccgcaacgcctcttcaggcgtatggagggtgtgtgtgggtatcacccaggggggcgtctgttcgagcacctgttgctgtccatcacgcacgatggcgcgcagcatatcgtggcgggcgattaa

SEQ ID NO: 252280 - DNA, 159 bp, Klebsiella pneumoniae
atgagtgccgaagctgcagggattgcggtctgtctgatggctttcagccaccatgcctgccgtaccgaatgcgacgccatgacggagcactactaccgcctgcgggactacgcgctcaaccacgcggaatgcaacgccatcatgcacatcatcgactga

SEQ ID NO: 252281 - DNA, 504 bp, Klebsiella pneumoniae
  misc_feature (431)..(431): n is a, c, g, or t
gtgggtgacgatgaccatggtgatgccttcgtgggccagggattcgataacctgcagcacttcattcactttttccggatccagcgccgaggtgggctcatcgaacagcatgatctgcggacgcatcatcagggcgcgggcgatcgccacccgctgctgctgtccgccggagagctggtgtggatacttccaggcgtgctccagcatgcccactttgtgcagcagttcgcaggcgtgctggcgcagctccgcgtcacttgccagatggtgatagcgcggggccagcagcagattgccgaacacggtcagatgcgggaacaggttaaagctctggaacaccatgccgatgttcaggcgatgttcggcattctccataaagcgcggcttctgctgcccctggcggtcgaggtgaataaagggttggccgttantctgaatttcgccgttatcgatctgctcaagaccgttcagcaggcgaatgagggtggttttccccgagcctga

SEQ ID NO: 252282 - DNA, 534 bp, Klebsiella pneumoniae
atgaaccgatttaccctgaagcagctcaaatatttcgtcaccgtggtggagacggagagtatcgccgaggcctcccgccagctgcacattgcgcagccgtcgatttcgattgccatcaagaatctggagagcaccttcgaccagcagctgtttattcgccaccatgcgcagggcgtttcgctcacctccagcggtcggcggatctacgataaagcgaaagagctgctgcgcctgtcctgggagttcgaacagaattcgcgagcggataaagagctggtttctggcatgatctccatcggttgcttcgaatcggtggctccgctgtatatgccgaagctggtggccgggtttaagaaatgctatccggaaatcaccctgcatctgtacgacggcgaacagcatgagctgatgcatggcctgcaccgcggccgcttcgacctggcgctggtttacgatctggagctcggccattcgatcaataaagagcctgtctcttatacacatctgacgctgccgacgactccttacgtgtag

SEQ ID NO: 252283 - DNA, 264 bp, Klebsiella pneumoniae
atgacaaaaatgagcaccatttacagcagactttcatacggcaccgggaccgcactgacgggctgcggtatctcagcaaaggcgtatgccggggcagttaaggcagaggtatggattttggccgacaaaatagcggggatgaccctgagtgactgggcaattattgtcggtatcgcctgcaccattaccacctgtggggtgaactggtactaccggcggaaagaacgtgaggatcggctcaatggctatgacaccaaaacttag

SEQ ID NO: 252284 - DNA, 465 bp, Klebsiella pneumoniae
atgccgccgtttttccagcgcgatgcgctgttcttccggggaaagcgcgcgcagatcgtcacgcgggatgtgatactccggcgttgtcgccaggattcgctgctgcccgtcggcatcaaccaccatacgcaacatatcgtggcgtgcgatgagctggttccatgctttctccagtatggcgagattgaactcatcgtggcgtttatcccactcaaacaggacgtgacaggggaagggcgcataacgctcgtcggcgtcgtgccgcaacacttccggctgcgaagcggcaggcgtcgcctctggcttagaacagataagctgcgtgagtccatgaggagacagatcctgccacgcccgttccgcattgatgcgtacgcccaggtagtgctgaatatcgctactgagttcaaggaagagcagcgagtccatgccgagttgcaacagatcctggtttggatgcagtga

SEQ ID NO: 252285 - DNA, 474 bp, Klebsiella pneumoniae
atgggtaagatcatcaaagaaaagtatcctgaacttgatgctgaagatcaggaggctgtacgtcagcatgctatcgccgcccttaacctcacgcagcaggccaagcgtattgtcaacggcgagaacgatgggacgctcaatactgcccttattgacggagtgcgtcgctttgcgatggacgtacgcgatttagacatagaccttatcgaccgcatcaatccctttggtgaagcctacgccatacttgctaagacaatgagcgaagatagcttgaagcaggtcgcggcggccatctcggccaagcgaacctcgatcacgcctgaagatgccaaagtgatcgccaagcgtgctgctgaatttaaacgtgaacgtgggcgactcccatcgttaacttcggcggatgcctgggaaaagcaccttgcagaaggtgcagccgcgtttatgcgttttagggcggagggacgttatgagtaa

SEQ ID NO: 252286 - DNA, 378 bp, Klebsiella pneumoniae
gtgctggccgaagtgcgcaacacgccgtggaatgagcgtcattactacgcggtggacggccagcaggcgcgcccgctggagaaagcctttcacgtttcgccgtttaacccgatggacatggtctatcactggcgcttcaacgcgccgggcaaaacgctacacatgcacattgaaaaccatcaggccagcaaggtgttcgacgccacgctggccctgagccgcgtgccgttaacccgcgccaatctgcgcgggctgctgctgcgtctgccgatgatgaccctgaaaaccgtcctcgccatctactggcaggcgctgcggctgtggctgaagcgcgtgccgctgtacaaccatcctgtcagcaggagtgaacgctcatga

SEQ ID NO: 252287 - DNA, 195 bp, Klebsiella pneumoniae; identical to SEQ ID NO: 235730

SEQ ID NO: 252288 - DNA, 195 bp, Klebsiella pneumoniae; identical to SEQ ID NO: 235731

SEQ ID NO: 252289 - DNA, 246 bp, Klebsiella pneumoniae
atgcatccgaggttccccgtcctttggcacgggccactggcgcgccttatttaccgcgagcttatcgatcatcgcctgggtaatctgctcgtcagtgattcccgctctgcgctgggcatcccacatcaggaactgcatatcagcccattcgctgtggtcgttaggttccgcggcagcttcaagcgcttctatgctgaggtgtttcagtgggccagccggaccaacattgccgaaggtggcatgtga

SEQ ID NO: 252290 - DNA, 333 bp, Klebsiella pneumoniae
atgtttattggctttggcttcaatcactgccagcggaatgcccggcttgtaatacagcacgatatcggcggatttcaccgttcttcgcgccgcgactttgccgcgcacgatgaccttaccgtcccggagtttgacctcctgtcggatttgcgttgtgtcactccagccggcatcgaggatggcgggcagaacgcgtttggtgatgatatctgcttccgtcagggtactcaggttcaggtcagccattggggattctcatcaaatagcgatgcgcaaattctacacacaaaatcagatgaaatcattacactcaatgtgcattatttgtcttaa

SEQ ID NO: 252291 - DNA, 141 bp, Klebsiella pneumoniae
atgatctgccatgcgttttcccagcacgatttcatccggattatagtggcgaaacgccagcggattatcggttttgggtccggcaaagcgaacgcgatcaacctggtcgaaataggtttgcatgatgaactccgaaattga

SEQ ID NO: 252292 - DNA, 168 bp, Klebsiella pneumoniae
atgcatctgtgcgggctgtcccgctccacgatttacgacctcatcagccgggaggctttcccgaaacaaatctccctcggcgggaaaaacgtggcgtgggcgcagtcggaaatcaccgggtggatggccgaccgtatcgccgaacgcaaccggggctatgacgcatga

SEQ ID NO: 252293 - DNA, 357 bp, Klebsiella pneumoniae
atgctgctgagcgcccggcagaggctcgccccctggcctggcgcccgtctgtccctctggaatgcagacacgctggcggcgcacgctcactcggcggacattctctggcttaataacgccctgcatcgtctgctgccggaagatcccgggctccttgcgacattacaacagcttgccgttcccggcgcgctgctctacgtgatggagtttcgccagttaacgccgtccgccctgctcagcacgctcctgttaaccaatgggcagccggaggccttgctgcataacagcgccgactgggcggcattatttagcgcggccgccttcaactgtcagcatggcgatgcagggcgttattaa

SEQ ID NO: 252294 - DNA, 198 bp, Klebsiella pneumoniae
atgaagaaaaaggatgcctctgaacatgcagagcacttcctgtcaaaaacccggtgggttccggaatggatgaccagtgccgacaaccagaaacagcctgccgcaaagtctgaactcagtctggcaacgagtcagagcgatacagacgctgatgtcgaccacgtcaccgaccataacaacccggcctgcgccgcctga

SEQ ID NO: 252295 - DNA, 219 bp, Klebsiella pneumoniae
atgtgtaaagccgccaacgtcgaactgatcggctatgaaaacgtcggctccggcctggtcaccgtgatggtgaagggcgacgtcggcgcggtaaaagcggcggtggattccggtgtggaatcagcccagcgcatcggcgaagtggtgacctcgctggtcatcgctcgcccgcataacgacatcaacaaaatcgtctcgcattacaaaattgcggactaa

SEQ ID NO: 252296 - DNA, 249 bp, Klebsiella pneumoniae
gtggtgggcgatctggcggggtacagctttttcaatattcagggcaaacccgtcgatacggtgatgaatgaccgggtcattggcttaagtctcgaacagctgcgggccattccctgcgtcatcgctatcgcctccgaaagtacgaaagcgacggcgatcctgggggcattacgcaccggggttatcgatgtgctggctaccagcgcctcgaacgcccgttcggtcattaatatgcaaaaggcgctataa

SEQ ID NO: 252297 - DNA, 240 bp, Klebsiella pneumoniae
atggtgcgggccttcccggcggaagtacgcttcaccggcatctctttctcctacaacctgtcgtacgcgatctttggcggcctgacgccgattgcggtcaccatgctgatgggggtgtcgccgatggcgccggcctggtatgtgctggccctgtcgctgatggggctaggattaggtatctggctgcgtcaggagttgacggcgccgacggggatgctggaaggggagctgcagcgttaa

SEQ ID NO: 252298 - DNA, 132 bp, Klebsiella pneumoniae
atgagtcgctacattattgaaaaccgcttaacccagccggagcagctcaaagcttttaatagcgaaggctatttctttgatgcggatgcctcagagaaaggcgaactggtgtttaaacgccacgagcagtaa

SEQ ID NO: 252299 - DNA, 1407 bp, Klebsiella pneumoniae
atgtctaccacccaggttctcggcgaaacgccctatgcttcgccaggacaaccgcacgccagcttaaccggacgcattgatgcgctgcccgcctcatttgggttatggtcgtttattaccctgctctcacttggcggcttctttgagctctacgatctcttccagaccgggtatatcagcgcgggcctgctggcggagggcattttccacaccggacaggcgggcatcttcggcatcgccgaccaggcggccttcgcctccgccacctttatggggctgtttatcggcgccagtctgctggcgccgctggcggacaaactgggccgccgcctgacctttatggtggcgctcgcctggtacggtcttttttcgctgctgatggcgacgcagagtagcgcggaaggggtgatcttcttccgctttctggtggggatcggcctcggcattgagctggtgaccattgatacttacctcagcgaatgggtgccaacccatctgcgcaataaagcctttgcctttgccttcttcatccagttcctctcggttccggcggtggcgctgatgtcctggatgctggtgccgaccaccctgttcggcctcagcggctggcgctgggtgatcatctttggcgcactgttctcgctggcgatctggtttatccgtaaaaagctaccggagtcagcccgctggctggaaagcaaagggcggcatgatgacgcgcatacggtgatgtgtgagatggaagcccgctgcggcctgacgccgtcgccaaagcatgcgcatgcggcacagagcgtcgtcaaacgcggcaccttccgcgaaatctgggcgccgcagtatcggcagcgcaccctgatgctaatggtgatgaacttcttccaggcgatcggtttcttcggctttggcaactggctgccggcgctgctctccggtcagggcgccagcatcacccatagcctgctgtacgccttctttatcaccctcgcctatccgctgggctgcctgttctgcacccgcttcgtgcatcgctttgaaaacaagtggcagattgtcctctccgcgctgatgaccgttatcttcggcaccctgttcgctctgcaaaacagtccgatcctgttggtgatctgcgggtttatgatcacctggtccaacgcctggctgaccatcagctaccacgcctaccaggccgaggtcttcccgacccatattcgcgcccgcgccgtcggcttctgctactcgttcagccggctctcgaccgcggtgaccagcattctgatcggcattattctgcaatacgccggcacgccgggggtgattagctttatcgtcgtcagtatgctgatggtgatgctgtcggtagggatcttcggcccgagaacgcggggcattcgtctggagaatatctga

SEQ ID NO: 252300 - DNA, 717 bp, Klebsiella pneumoniae
atgcgtccagcaggccgtagcgctaatcaggtgcgtcccgtcaccctgacccgtaattacacaaaacacgctgaaggctccgtgctggtcgaattcggtgataccaaagtgctgtgcactgcctctattgacgaaggcgttccgcgtttcctgaaaggccagggccagggctggatcaccgctgaatacggcatgctgccgcgttctacgcacacgcgtaacgcgcgtgaagcggcaaaaggcaagcagggcggccggacgatggaaattcagcgcctgattgcccgtgcgctgcgcgcagcggttgacctgaaagcgctgggcgaattcacgattactctcgactgcgatgtactgcaggccgacggcggcacccgcaccgcctccattaccggtgcctgcgtggcgctggccgatgcgctgaataagctggtcgccgccggcaagctgaaaaccaatccgatgaaagggatggtggccgcggtctccgtcggtatagtaaatggcgaagccatctgcgatctggagtacatcgaagactccgccgcggagaccgacatgaacgtggtgatgaccgaagatggccgtattattgaggtgcagggcactgcggaaggtgagccgtttacccatgaagaactcctcactctcctggcgttagcccgaggggggatcgagtccattatcacgacgcagaaggcggcgttagaaaattaa

SEQ ID NO: 252301 - DNA, 2049 bp, Klebsiella pneumoniae
atgagtcgcaaacaattagccctgctggagccgacgctggtgcgccaggcgctgctggatgccgtgaaaaaactcagcccgatggtgcaatggcgcaatccggtgatgtttatcgtctgggtgggcagtctgttaaccaccctgctggcgatcgccatggctggcggcgccctgaccggtagcgccacctttaccgccgccgtcagtatctggctgtggtttaccgtgctgttcgccaactttgccgaagcgatggcggaaggccgcagcaaagcccaggccaacagcctgaaaggggtgaaaaaaacggccttcgcccgcaaactgcgcgccccgcagcataacgcgccggtcgaccacgtgccggcggaagatctgcgcaaaggcgacgtggtgctggtggaagccggggatattatcccctgcgatggcgaagtcatcgaaggcggcgcctcggtggacgaaagcgccattaccggcgagtctgccccggtgatccgtgaatccggtggcgattttgcctcggtgaccggcgggacacgcattctctccgactggctggtgatccgctgcagcgtgaacccgggagaaaccttcctcgaccggatgatcgccatggtggaaggcgcccagcgccgtaaaacgccgaacgagatcgccctgacgatcctgctgatcgccctgacgctggtgttcctgctggccaccgccaccatctggcccttctcggcgtggagcggcaatgcggtcagcgttaccgtactggtcgccctgctggtgtgcctgatcccgaccaccatcggcgggctgctgtcggccatcggcgtcgccgggatgagccgtatgctcggcgccaacgtgatcgccaccagcggccgtgcggtggaagccgctggcgacgtcgatgttctgctgctggataaaaccgggaccattactctcggcaaccgccaggcctcagccttcctgccggcgcgcggcgtggaagagcgaaccctcgccgacgccgcccagctctcctcgctggcggatgaaacccctgaggggcgcagcatcgtggtgctggcgaaacagcgctttaatctgcgcgaacgcgatctgcagtcgctgcacgccacctttgtcccctttaccgcgcaaacgcggatgagcggcatcaatatcgatcagcgcatgatccgcaaagggtcggtggacgccattcgccgccacgtggaggccaacggcggccacttccctgtcgatgtcgataagcaggtggaagaggtcgcccgccagggggccacgccgctggtggtcgccgaaggcgaaaaggtgctggggattattgcgctcaaagatatcgtcaaaggcggcatcaaagaacgtttcgcccaactgcgcaaaatgggcattaaaacggtgatgatcaccggcgataaccgcctgaccgccgcggcgatcgccgccgaggccggcgtcgatgatttcctcgccgaagcgacgccggaagccaagctggcgctgatccgccagtaccagtcggaaggtcggctggtggcgatgaccggcgacggcaccaacgacgcgcccgcgctggctcaggccgacgtggcggtagccatgaactccggcacccaggcggcgaaggaagcgggcaacatggtcgacctggattccaaccccaccaagctgattgaggtggtccatatcggcaaacagatgttaatgacgcgcggctcgctgaccaccttcagtattgccaacgacgtggcgaaatatttcgccattattccggcggcgtttgccgcggtctatcctcagctggccatgctgaacgtgatgggcctgcattcgccctcatcggcgatcctcagcgccgttatcttcaacgcgctgatcatcgtcttcctgatcccgctggccctgaaaggcgtcagctatcgcccgctctccgcctcggcgatgctgcgccgcaacctgtggatctacggcctcggcggtttgctggtgccctttatcggtattaaagccatcgacctgctgctgaccctgagcggtctggtgtga

SEQ ID NO: 252302 - DNA, 714 bp, Klebsiella pneumoniae
atggccattcaacctgaaaacgagttcatacaacttcttggcgctcgaatccgcgaacaacgagaggttctaaagctatctcgcgcctcgcttgcagatagtttgggagtagctgtttcgacgttacaggcgtgggaaaacggagaaagggaaccgggtgctagtttcattgccaagctttctgaactgttatcagttacagcccactggttaattacaggtgattctgcggagctatctcacaaaccagaatcccaacactcaactgatgtgcttggtaatgttgtcgatattagcgaatttgttttcgtgccgagatataatgtctcagccgctgctggtcatggcgcgtggaatgatgatgaagctcctatgttcagtgttagttttcgtcgctactggatcactaattacttacgagctaatccacgcgatctgtctgttatcagcgttcgtggtgattcaatggaaggcgtgctcaacgataaagatatcatactcataaaccatgcagatcatgcaccaggagaggggatatatgtattgagaatcgatggtcagttattggtcaagcgcgtccaaattctacccggtttaaacttgtatataagcagcactaatcaggcttacaagccctttacagtttccttgacggacacccctgaagactttgcaatcattggtaaagtagtttggtacggcaggatgctttaa

SEQ ID NO: 252303 - DNA, 276 bp, Klebsiella pneumoniae; identical to SEQ ID NO: 208689

SEQ ID NO: 252304 - DNA, 477 bp, Klebsiella pneumoniae
atgacaagtttctacaacgagcttgaactttctgccatccacccacagtctattacaggaattctggatgaagttgaatctgcattgggcaaaataaataaacggcttgatgcagccgagaaaattattaatagcgaagaactgtccaagttaattatagatgagaaaatattaactgttcgggagtgcagacaaaacctcgtaagctatttgaatgaatttacattgtacaactgcattcttaacctgaattatataaaaccttacctgacactccccggggagaagttagttaatatctacggacttgtcggcaattcagaagaacgtgtaataaaacgagaatttttagctgaggctatcagaattgttaatgagagagaaggtcaaattaagcctttagctgaaggtgaaaaagctcaaaaaatggcgctaatacacgatctgagcagtgagcttttcaaatatgatgagtga

SEQ ID NO: 252305 - DNA, 228 bp, Klebsiella pneumoniae; identical to SEQ ID NO: 161805

SEQ ID NO: 252306 - DNA, 981 bp, Klebsiella pneumoniae; identical to SEQ ID NO: 187672

SEQ ID NO: 252307 - DNA, 477 bp, Klebsiella pneumoniae
atgaattacttagcagaactaccatttgttgacatcttcgatgccaaagccaacaaggcttttttctggcgcgtcgacaatccaccatttatgaacaacagcaatgttctttatcgggtcgcgtgcgatatgagcgactcagggcttattaaatcggaatcagcaagagggttcttcaatacgctggatacattgctttcaccgaaaagtgaaatatcagccagtggagcaactaaaatcagaggcagagcacgtcgcaccatcaatgaggtagcatgtgatatggggatcacaagcatgaaacttctaaactttcttgctcttattgggtggatagacaatgcaactgtacagccaaccaatgattcgcttactgaaggcgtgttacgaaaaaacagcaagatgccgtttggttttacaataaccagaaagggtgaacgcttgatcgcgagcaaataccaagcattgagtaaataa

SEQ ID NO: 252308 - DNA, 189 bp, Klebsiella pneumoniae; identical to SEQ ID NO: 164689

SEQ ID NO: 252309 - DNA, 306 bp, Klebsiella pneumoniae
atgaacaaccaagacttgtttattaaaaatataaattcaaaagagcaggatagaatttcagtaaaaaaggttgtggataatatttcaaagagtgcgcatcacggatgcggcctttatcatgaagtttaccatgcacgtctgttaaatgaattacgaaaccataccgaataccttaatgcagtcgacgcggctaaactgacagattacgcagcgtctcaaggtctttatattgacgatgattcacttcgcgcagctgaagaggcagaagcagaatgctggagagaaatacgagcccagcaagagtaa

SEQ ID NO: 252310 - DNA, 906 bp, Klebsiella pneumoniae
atgaacaaaattacgcctgtattccttgcgctgatgatgtccggcgcggcgtggggggcggcgatgccacaggcaagccgttacgatgccaggattcagcaggttatttataacccgcagaacgtaaccgtcatcaacaccatgcccggttttatgaccacgctcgtcttcgacagtgacgaggctgttattgatgccaaacccggctttgaagaagcctgggaggctaaaaaagatgctaaccgcgtgtatgttcgtccgctcgcgctccagcagggagcgccagggcaggacggtaatactgcccaagtcgtcatcccacccaacagccaggactggcatacaaacatgctggttgtcaccaccaagcgcctctacaacgtcgagctgaacgttatcgatgataaatcggctcagcaaccggctttccaggtcagctacagctatcccggagaggcgcgtgataaagcgaaccgggaagcgtcggccagacaaaaagagtgggagcagaagcaacaggaagcccgcattgagaaatcactgaactcggcgcagacgccccgaaactgggattacaccaaatatccggggcaagggagtttcagcattgatcctgacttcgcctatgacgacgggcgatttacgtttgtaggtttctctccggccaaatccattccctcagtaactaaagagctgaacggcaaggaacacacggtaaacaccggcattcagaaaaagggcgactacaccgtcctggttattcaggaggttacgccgcgtctggtacttcgctccgggaatgccgttgtggggcttgaaaacaaaagctatggccgggttcaggctcccgatggttcgacggtatcgccaaaggttgaacgggtcgagaagcctgaaagcaattaa

SEQ ID NO: 252311 - DNA, 174 bp, Klebsiella pneumoniae
ttgtatgcctgggtggaagattataattactcctctcaaaaactatgcgagcgactacttatgcgacgtgaaggatgttttaaagaatttgtctcctttgaaaatgaggagggtaaggcaaggtatgacgacacatacatctatgcgttactgcataaagaatggacgaagtag

SEQ ID NO: 252312 - DNA, 297 bp, Klebsiella pneumoniae
atggcattattcactcagcgcgtcggcaagatcttttttcacctgcgtgcgctgctccggcgtcagtaccttattcacctcaaaatagtacttcacgcggtaataacgcacctgctgatcaatcttgctgaaggccgccagctgatcgttgaccgctttttcatcccatttaccggaatcaattacgtttatcagagccccgtctttaatttcctgttgggaaatctgctggacattactctccaactgctgatgcaggcttttaattttcgcgacctgatcgttggtaagttttaa

SEQ ID NO: 252313 - DNA, 2094 bp, Klebsiella pneumoniae
atgtttgtcactgtgaatgaattagttggccttcccggtttgccaggcactcagcaggggattcgcggaatgatgaacaagcggacagccgacgcgccaactcttgtgcgcaaacgtcagggtacaaaggctttcgaatatcacattgactgccttcctgactctgctcagaaagcgctacgtgctcgccagataaaagaactgatgaacggttcaccgaaagagctgcctgtcgctcctgctaccgcatcgactacgccacgcgccaaaggtgccgaggagagcaaaatcgcggtgtaccgcaaatgcccggcgctgatggagcagaagctgaacggtctgacagcagcacagcgccagactgctgacgcgcgtatggcgctggtcgttgaagtgctgcgcctcggtgaactgccgggatacagccgggcaaaagctattcgcgagatcgtgcgtcaggctcagagtggtgaactacctgagcggctggccgctgccgtctcaatggcgaacgccaaaaaaggtgcgtcacggtcgctgagtgaaatatcactcaagcgctgggtggcggattttaataagacccgctccgcagctgaacgtcttcttttgcttgcaccgggcaaacgtcaggttgttaagccggaagaaatcagatggttgcccgagttcctgagcttttatcgtcgccctgacgggcgcggtattcaggaggcatacgatgattttgctgctgaatgggctgagcggtatcaggatgatgccctgatggccgcagcaatcccttcttacgatcaggtgtgttatgccatgaataaattaccggtagtggttaaacagaaaggccgtatcaccggaagcgagttccgccagtatgagggctttgtccgccgtgactgggagtcacttccggttaattacgtctggattggtgacggccacggcatgaagatgaaagtcgcccatcctgaccacggcaacccgttctcgccggaggtgacgtttatcctggatggtagctgccgttatattgttggctggagtctggcgttgtctgaaagtgtgatagccgttgccgacgccctgcgccacggcatcaaaaaccatggcaagccgttcctgtactattccgataacggtggtggtgagaccaacaataccttcgatgcggagctgaccggtattcttccccgcctcggaattgatcaccggctgggtatccctgaaaacccgcaggggcgagggattatcgagcgccttaaccgttcgctggccatgcgtatatcacgccagttcgctacctattacggcaccggcgcagaccgtggcaccgttcgccgcatgacaaaagcgctgcagtcggcaacgaatgcagcgaacaaagggaaggagctgacggcaaaacaacagcagaccctgcgcgatctgccgtcatgggaatcactcattgagcacattgaggccggtgtggagtggtacaacaaccgcccgcatgagtctctgccgcttcgtggagatggtgagcacttcactccggcgcagttccgccgctataagctggagaaagaagcgacagaaatcgagtggctgtctgagcttgagctgcgcgagatgttcatgccgcagatagagcgtaccgtcaaccgctgtgaggtccgtttattcaataacctgtattactccgctgagctgaataacgagcacagtaataaagtgctggttaattacgatattcacgacgcaacaaaggttgtaattcgtcgtctggatggttcctttatttgtgaggctgtctgggatggtaataaacagcaggcattcccggtcactgctgaatatcaccaacgccagcaacgcatcaaagggatgcgccagcgtggcgaggagaaagtccgtctggccgaggctgagaacgtccacaccctgccagctccggcagagcaggaatggctgcatggcaacgtctatcgccccactcgcggtacgacaccggtggcgctggcggaagtggaggatgcggaatacagcgaggatgaatatctgaataactcgctggatattctggaatcaaataagcgtaaaaacgcgatttaa

SEQ ID NO: 252314 - DNA, 1557 bp, Klebsiella pneumoniae
atgacaagccttcagcaacgtgcagagttacaccgtcaaatctgggccatagccaatgatgtcagaggctcagtggatggatgggattttaaacagtatgtactcggtgcacttttctatcgcttcatcagtgagaatttttccagctacatggaagcaggggatgagagcatacattatgctgcacttgatgacagcatcattaccgatgacatcaaagacgatgccatcaggactaaaggctatttcatctacccgagccagctgttctgcaacgttgccgctaaagctaacaccaacgacaggctgaatgctgatttaaacagtatcttcgtcgctattgaaagctctgcctacggctacccgtcggaggcagacatcaaaggcctgttcgccgatttcgatacgaccagcaatcgactgggtaacaccgtaaaagataaaaacagccgtcttgccgccgttctgaaaggcgtggaggggctgaagctggggaattttaacgagcaccagattgatctgtttggtgatgcctacgagttcctgatttctaactatgcggcgaatgccggtaagtctggcggagagttcttcacacctcagcatatctctaagctgattgctcagcttgcgatgcacggtcagactcacgtcaacaaaatctatgaccctgctgcaggctcgggctctctgctgctgcaggctaagaaacattttgataaccacataattgaggaaggttttttcggtcaggagattaaccatacgacgttcaacctggcgcgtatgaacatgtttctgcacaacatcaactacgacaaatttgatatcaggttgggcaataccctgactgaaccacactttggcgacgaaaagccgtttgatgcgattgtttcgaacccgccatattcggtgaaatggattggcagtgacgatccgacgctgattaacgatgagcgttttgctccggcaggtgtgctggcaccaaaatcaaaagctgacttcgcctttgtactacatgcactgaattatctttcggccaaaggtcgtgctgcgattgtctgcttcccgggtattttttaccgtggcggcgcggagcagaaaatccgtcagtatctggttgacaataactatgtcgaaaccgtgatttcactggctccgaacctgttctttggcaccaccattgccgtaaacattctggttctgtctaaacataaaacggataccagcgtgcaatttattgatgccagtgggctgtttaagaaagaaaccaataacaacattctcaccgatgcccatatcgctcagatcatgcaggtgttcagcagcaaatcagatgttgaccatctggcaaaatcagtgccctttgaaagagtggccgggaatgaatacaacctttctgtcagcagctacgtggaagccaaagacacccgagagatcgttcatattgcggaactaaatgccgagctgaaaactaccgtcagcaaaatcgatcagttacgtaaagatattgatgcgattgtggctgagattgaaagtggcgaggagcagaaatga

SEQ ID NO: 252315 - DNA, 255 bp, Klebsiella pneumoniae; identical to SEQ ID NO: 217732

SEQ ID NO: 252316 - DNA, 330 bp, Klebsiella pneumoniae
  misc_feature (310)..(319): n is a, c, g, or t
atgactgaacagattaccgagatcgataccctggtggtgggcgcggggcaggcgggcgtcgccatgagcgagcatctgacccggctggatatcccccacctggtgctggaaaagcagggtattgcccaggcctggcgcagcggacgctgggattcgctggtcgccaacggcccggcctggcacgatcggttcccggggatggtgttcccggactgcccggcagacagctttgtcggcaaagagcaggtggcagactattttgccgcctatgcccgcagcttcaatgcgccgatccgtaccggggtggagnnnnnnnnnntttcgtattga

SEQ ID NO: 252317 - DNA, 552 bp, Klebsiella pneumoniae
atggaaggccaccgcatcccccggctccagcgcccagctgacgatatcgtattcgtcctcatgggcgtcgatatccggcagggtgctgaaccgggtgtgctcgtaaagcttagtgccattgaaacgggtaggactgaactcctcctcccagcgatgcgacccgcgaatgcaacgcagcgaggtggcctccgccaccgggtccagcgggatccagaagctgacgttctgcctgccggagacgcaatagtaaggctggtcatgatgccagggagtcaccgtgctgcctccggccggtttgaccagcgtatgttcatggaaaaatttcgccgtctgcgactgcatcagcgccgccgcgatctcggcggccgccgactggaagacaaactcgctaaacgccgggatccgcgaccagttgcagtagtcctgaaaaaaaggcggcgaaccatctttggggatcaccgtgcgcgcatgaccatactcgctggggctggccatcagcgccgtgaccccttcggcgaggcgctcgacccagggggtaaagacgccttttaa

SEQ ID NO: 252318 - DNA, 798 bp, Klebsiella pneumoniae
atgggtgccccggaaggccgtccagagctgcgcctcaatcatcttgagtggcccccagcgttcgagcagttcatcccggatagtattcaggctctgcgtatcgttgaacgggaacacaatatcggtgtaccagtcatcgcccagcgccgcgacgacggccgcaatatccggggtgccggtgccgccggagaaagcggtcagggcaacagcaacgccagcaggtgtctgctcgccggtgtagtagttgagacggacgtccatcgcattgccagtcgcgcctttccagttggtggtcagggtgacgacgtcggtcgaatccgctttcagcgcagcagtaacctgcgtatcgggcagtttgttaacggcggcgataatggctgtcgcgatagtgtcggcggtatcgtcagcgctgacgccaacctgcaccgatataccgttaaccagcagggccagcgtgcccgcagcagtggccgggccggagatggtcaactccgattttgcagcagcaccggcagcaatatcagccatgcccatcgcccacacttcggtatagctgttagccttacgcagggttttgagcatcccggccagcatggagcctttaccgtaaagctggtcagcggtgccgtcgctggtgatgcggttttgcgtcagaacggcagcggtgccggtcgcactctgctggccgatgacgataattttgcgcgactgcgccggggcgctgtcgagcgcctgagaattatcaatatcgatgtacaccagcggaacgcggatatcagcaggaatattacccagtga

SEQ ID NO: 252319 - DNA, 612 bp, Klebsiella pneumoniae; identical to SEQ ID NO: 186057

SEQ ID NO: 252320 - DNA, 543 bp, Klebsiella pneumoniae
atggggatatcggttgaggttatcggtgctgagaagctgcagcagatgcgactggccatcgagaaactctctgacagctcgctgcagcaggaactgctggagagtatcggcgctgtcgttgaatcgcagacccgccgccgcatcagcgacgagaaaacctcaccggctggcgagcgctgggaggaatggtccgaaggttaccgcaagacccgcagcgggaatcagagcctgctgcaggggaatggcgatctgctcgacagcatccagtacatcgtcgagcgtggccgcgttcgtgtgggttcgccgctcagctacagcggcgttcatcaggacggctttgcaggcagcgttccggtcagcgcccacaagcgtctcattcatcaggcgtttggccgggcgctgaagcatccggtctggcagaccgtgggctcccatacccgccagatgaatattccgcagcgcgagtacctcgggctgtccaccgcaaacagtgatgagctgatgcatgtcatcggcgatttctggagtgaggtattaccgtga

SEQ ID NO: 252321 - DNA, 441 bp, Klebsiella pneumoniae
atgggaatttacgttacccgtgatgacctgctggctgcggacgggtcgctggtctggaatatggccatcgacaaagcgactgaccagctcgacgagacgaagatagccacggccattgaggacgcggacgcggagatcaactcttttctgtcaaagcgctatcagctgccgctgaacatcaccaccgttccgcgcccgctgcaccgggtagctgtatccatcgccatttactggctgtccgagcgcgacaatcagatcaccgacctgattcagaagcgctacgacagcgccatccagaccctcaaggagatggcgaacggcacgcgcgacctcggcctgccgaccgacactccggcccctgagaccgataacggcaggatgattgttgtctctgataacaaacgtctgttcacccgtaacaacctcaaaggggtgctgtga

SEQ ID NO: 252322 - DNA, 513 bp, Klebsiella pneumoniae
gtgagtggaacgaaagaaaaagcaacgggtaagcaaagcgctaaaggtcgcgctggcaagatttcagcgccggaaatggcacaggctgatgcatctgacctgccgggagctgaacggtcagtcacattaccagggcattacgttgcggtgggtgcgtcccccgtcagcgtaactttgggtgaagtcgatgcatcactgacgcctgagggtctggccaccggtggcggaagtgagaaccttatcaccgcgtcccctgcaaccgatgatgtggtggtgctggaggtacgcgctaaatcagagaatggattctggcgctgcggtcgcttctggccgcgcgagcctgtccatgtgtttgtcagcgacgatcccgatggcgataacgaggccaatgcgctggagggtgatgtggtggcggagtgcttcataagtcacgaaacctccgagcgcctgaaggctgagcctcatctggtggtggcggtagtgccggttctgcaggtggcggagaaagactga

SEQ ID NO: 252323 - DNA, 312 bp, Klebsiella pneumoniae; identical to SEQ ID NO: 250506

SEQ ID NO: 252324 - DNA, 3240 bp, Klebsiella pneumoniae
atggcaaagatgaccgaatccgatattgaagtaatggcgattgaatacctgcaagggctgggttatgagtacgtttacggcccggacattgaacccagtggcatcaatccgttacgtagctatcagcaggttatccttgaagataaggtgcgtactgccttgcaacgactaaatccacacctcagtgagcagaaatgcgaggaaactctaaaacaggtgatgcagatcagcacacctgatctaatggcaaacaatctggcctttcatcgcctgttgaccgaaggaatcaatatcgaagtcagcaaggatggtaatacacaaggagagctggcctgcctgatcgactttaacgatcccacgaataatgaatttttggttgtgaaccagataaccattaaagaaggcaatcatacccgccgaccagaccttattttattcattaacggtctgccgttagtcgttatcgaacttaaaaatgccgctgacgaaaatgcaacggttgcaggtgcttataaccagataaaaacgtatcagaaccaaatccccagcctgtttacctacaatgcctttaatgttgtttcagacggactggaagccaaagcgggaacggtttccgccgatttcagtcgttatatgacatggaaaaccgctaatggtaaaacacaagctaccagtacccaaccacagctcgaagttttattacaggggttgcttaatcctgtaacgctgttggatgtgatccgccactttatcgtgtttgaagccagcaaacatgaagacagcaaagggattatcagtatccgtaccgttaaaaaaatggctgcttatcaccagtactacgcggttaatgcagcagtactttccactattcgtgcctcaggtgtaaatgcagattccccctctgccgaagtagcactgcgccagcagggacgtaacagtaaagttcttgttaatgcgcaaaaaaccggagatcgtaaagcgggggtcgtgtggcatacccagggttccggtaaatcgctttcgatggtgttttataccgggaagattgtactggcgctgaataatccaacagtggtagtgatcactgaccgtaacgatttggatgatcagctattcggtacgttttcttctgccactcagctacttcgtcagacaccaaaacaggccaacaaccgggaagaactcaaagaatatttgcgtgtcgcctctggcggtgtggtgtttactactattcaaaaattccagcctgatgatggcagcaatatctatgagttgctgtccgacagaactaatattgtcgttatcgctgatgaagcacaccgttcccagtacggtttcagcgccaaagaagttgacgtgaaagacagcgaaggcaacgtaacaggtaaacgcaccgtttacggctttgccaaatatatgcgtgatgccttgcccaatgctacctatcttggctttaccggaacccccatagaaaaaacggacgtaaacacacctgctgtttttggtaactacgttgatatctacgatatctcacaggccgtagaagacggtgcaaccgtgcgtatcttctatgaaagccgtcttgccaaaattgccatcagtgacgaaggtcgccagctaattgaagacttcgacgatgagtttaacgaagacgagctgacgcttacccagaaagaacggtctaaatggaccagaatcgaaggtttgattggcagttcaaaacgtattaaagctattgcggcggatatggttcagcactttgaacagcgcttaaaatctaatgccgatcatggcaagggcatgattgtcaccatgtcccgtcgtattgctgctgaactttataaagaaatcatagagttaaaacctgaatggcacagcgataatctaaatgatggcgtgattaaagtcgtcatgacctcttctgctgctgacggaccagaaatcgctaaacaccacaccacaaaaaaagaacgtcaggttttggctaatcgtatgaaggatgacgacgacaagctgaaactggtgatagtgcgtgatatgtggttaaccggcttcgacgctcccagcatgcatacgctgtatatcgacaaaccaatgaaaggccacaacctcatgcaggcaattgcccgtgtgaaccgtgtgtataaagataagataggcggtctggttgttgactatctgggcattgcctctgatttaaaagaagccctctccttttactctgatgcaggtggacgtggagatcctgctgaggttcaggaagaagctgtaacgctcatgcaggaaaagctggaaatcctggaaggcatgatgcatggctacgattacaaagcttactttgccgcaactacttcacaacgcctgacaattattcttgaatcagaaaaccatattttagggctggataacggtaaaggtaaaatgcgtttcctggctgcggttgcagccttgtcgcaggcatttgcattggcgacaccgcacgataaagcaatggaagcggcacccgaagtagcattcttccaggcagtaaaagccagactgaataaatttactgaaaactcagacggatcagaagaagaacacaatgacagtctggaagttcgggtaaaacagactatcgatcaggctctggttaccgataaagttgttgatatttttgacgctgctgggatacaaaaaccagatatttccgttctttctgaagaattccttcaggaaatgaaggattaccaacacagaaatattgctttggaaacgcttaaaaaactgctttctgacgagattaaggttcgctcgaatcaaagtatcacccaaggcaaaaaactgattgatatgctgacctctgcaatcaatggctaccagaacaaggtactgaccgcagcggaggtaattgatgagctaatcaagcttgccaagactatccaggaatctgacagccttgccagccagttaaacctcagcgcttatgaatatgccttctattctgctgttgcagataacgacagtgctcgcgagttaatggaaaaggaaaaactacgagaactggcagtcgtacttacagaggctatccgcaacaatgtcagtcttgactggacagtgaaagaagcagcaagagcaaaaattcgcgtggtggtaaaacgtctgctcaaaaaatatggttatccacccgatatgtccttgctcgccacagagaccattttgaagcaggctgaacttttagctggagaattaggaaaatga

SEQ ID NO: 252325 - DNA, 153 bp, Klebsiella pneumoniae
atgcgtgacgcggcccacctgaaccttctgcacgccgaaccacggatgcacgagttctccgggaccggcagtattgagcgcagccagcaggcggttaagctggtcggtgtagtcgctgccgagcaggatcgcgttaatctgctgctgagttaa

SEQ ID NO: 252326 - DNA, 537 bp, Klebsiella pneumoniae; identical to SEQ ID NO: 138885

SEQ ID NO: 252327 - DNA, 246 bp, Klebsiella pneumoniae
atggacgccgagaaaggtgaagagcggcaggaagattaccgccggggcgaccatctgcatcacgcttacgcccagattgccaaggccgccgttgactcccagcgcgctgccctgtttcgctttggggaaaaagaaactgatatttcccatgctggaagcaaaattcgctccggcaaaaccgcacagcagcgcaataataataaatacccagaacggagtagtaatattctggattgccacccctaa

SEQ ID NO: 252328 - DNA, 324 bp, Klebsiella pneumoniae
  misc_feature (286)..(295): n is a, c, g, or t
atgacgaataacgccgacataaaaaaaaggaacttcctgactcagaatgaaattgagtctttacttaaagcggccgataccggtccttatgctgcacgtaattattgcctgacgttactgtgcttcatccatggtctgcgcgccagcgagatctgtcgtctacgaatatcggatatcgaccttgctgcccgatgtgtttacatccatcggcttaaaaaagggttttcgactacccacccgttgctggataaagagatctacgccctaaagcgctggctggccattnnnnnnnnnngaatggctgtttctctcccgcaaaggtaa

SEQ ID NO: 252329 - DNA, 225 bp, Klebsiella pneumoniae
atgaaaatagaattcaatgatcaagggtcggattcagtcatcacattaacgagcacagttttcgaattccgccttcacaaccgcgctgttgatacggcgctatttcttgctccttcggttcgtgctaagcgtaacggtttttttgttttaaaaacggttattaccggtaaaccctctcacgtactgcgtgcgtataaagcgattaaagcggaggcatcacgatga

SEQ ID NO: 252330 - DNA, 564 bp, Klebsiella pneumoniae; identical to SEQ ID NO: 250610

SEQ ID NO: 252331 - DNA, 219 bp, Klebsiella pneumoniae
atggaagaattaaagttgcactgtcatggctgcggcggttcttttgctcgcgatgagctgcaatatcgtccatctggcaggggtgcttatcggagagacttttatttctgcccggtatgcaatgagaaagaaaagcagaaaatcgccctctccgctgccgcttcctcgtttcgtaaaaccttgccgtcccgtccggggcatatggccaacaagcgctag

SEQ ID NO: 252332 - DNA, 294 bp, Klebsiella pneumoniae
atggctaatttactgcatgacaacccggcttttaaagcggcacaaagcaagctggctattgctcaatttattggtagtggtgaaatgtggtcagaggctttttcctcaatgaaagatatttatgaggaagctaagcacgcagaagattttatgttttgcggtcgtgaagaatctctctcaggcctgaaattcaatgatgttattttgaattatgacatgtatggcgacttggtttctgttaacgcagattctggcaatgcacgttacaaaataaacacagaagtttcttactaa

SEQ ID NO: 252333 - DNA, 195 bp, Klebsiella pneumoniae
atgaataaagatgataaggcttggcttttggccgttgtttacgcatcaactcaacccaaagaaatcacccctgaagagttcctttatgaagtcgaccgctctgaggttgattttctctccctgcttacaaagcgtgaggaagaggaaagtgcgaaagcgatcaagacttgggagcaactaggctcttcaaactaa

SEQ ID NO: 252334 - DNA, 219 bp, Klebsiella pneumoniae
atggaaagcaaagatctggtggtgattaacggccaactgtgcagcaaagacgttgccatgctgattattgagaaggttttacctaccgttcttgtggtggtggctgaaaaggtgagggacaggcgaaccaaggatgaagtgaaagaagcagccacaaccgtagttgaagccgctatatcggcaattagtttgaagagcctagttgctcccaagtcttga

SEQ ID NO: 252335 - DNA, 1455 bp, Klebsiella pneumoniae
ttgaaaacaactctcaatcaggcttttattatcaacaagttaagtattaatgttaagcctgagctcagtagctctggaaaagtcgttttcgaagccaaccctgaccaaaaaccttacatagtttttgacgatcatcgagattcacccgttggcttcggtgtgaaggtcagtttgacgaaaaaaacctatgtaatccagcgaagagtagcctcttcagatcgtaatgtcagtgagggtaagaagccaagctctgtcttgaaagtaaaggttgggaatgtgtccgattttccgagtatcgatcaagcccgtgaggcagctcggcagttggttcagacaatgattgcaacaaagagaaatcccaacaagattaaaagggaactcgatctggctgaattgaccgtgagtgaagcttttgcccaatacaggagtcacttacttggcagaaccaaacctgctaaaccaaacactctcaatgtgttagacaaagctgagaatcggttgaaagaatggcaaaaccttcgaatcaaggatcttactggtaatgaaatccttcgaaagtttgacgagattgcttcaagagccagaacagcagcagaacagacttttaggtgggccaatgttgctgtaaaacacgcaatcgagattgaagctgggaatgctcagacccagcaacgacaaccttcgttgtcctataatcctttttcaattttaaaggtacagaagaagttcagaacacgatctgagctggaagatagctatcgtgccaagggcgtacgaaatccattgtcccccaaagatactttgggacggtttctagctgcattacacaataagagaggttttaatcgtttgggttgtgattatctgttgctgaccattttgacaggagccaggaaagaagagacagcaacactgtgctggcgagaggccctgacagaagaggaagtcagaacgacaagctatgtcgatctcgaaaaccgggttattcgcttttacgacacgaaaaatcgtaacgaccatgagcttccaatctgtgatgctacaaagcgaattctggaagaccgacgagatatcgtcaacgataccgaaatacgggcagataaacgcaaatgggtttttccggctcgttcatcacgaagcaaggttggacattattctgacagtaaaagcttgcgcgagtatatctgtcaggaagctggaataatgaagctgggaatgcacgatctgcgaagaacttttggccgtgttgcagaagaactaacttcgtatgcagtggtgaaaagattgcttaaccaccgtaataccacggaccctactgaaagatatgctgagcctgataacgagcgagtttttgaggcacttcaacggattgagcttcatatgctgatgacagtacctgagttgtataatacacttttggcttcggcgaaatatcaaccattgccaacaaattag

SEQ ID NO: 252336 - DNA, 549 bp, Klebsiella pneumoniae
gtggcgtggctgaagccggaactgctgaacgaacctcagcaatacaagcctgaccgcgtcagcgtcatcgaacgccacatcggccagttcagcaccccggcagaggtcaaaacctacctgacggatcgtgatggctgcatcaggctggctgcgctgcgggtgcgcaatatccgcgctcaggcaggcggcaccgtcggcgatatcacctgggcggcgtacgtcatggccaccgatgcatggggctatacgcgcgacactcgctgcgaggtactggtcggaaagctggtgcgccgtattgtccagcgcggagccgctaacggtatgaaggctgaacgtctggccacctccgtcagcgccgacaatatctattccggcgggcttaacgatctgggtctgaccatgtgggccgtgacgtgggaacaggagttccgcctggatgatgaaattgacctcgccaccctcccggacttcctgcggctgggtgcaacactgcaggtcagcgacgacaccgaccccattaaaggcgttattaacgtaagagagccataa

SEQ ID NO: 252337 - DNA, 1029 bp, Klebsiella pneumoniae
atgcagcagcaggttgcgctccggcatatcccagcgcaccgttttgaccggcggcaggatgcccggcagcaccagcgtctgcagcggacgggccgggtcgttggccagatagtaggaggcgatgccgccgtaggatgccgcccacagccagtgcggttgcggcgcgatgttggtcccgatacaggaaatcagccagtcattgcgagtttcgccaaaggtgcccgactcggcatgggtgccccggaacgcggtccacaactgcgcctcaatcattttgagcggcccccagcgttcgagcagctcatcccggatggcattcaggctttgtgtatcgttgaacgggaacacaatatcggtgtaccagtcatcgcccagcgccgcgacgaccgccgcaatatccggggtgccggtgccgccggtgaacgcagtcacggccaccgcaacacctgcaggcgtctgctcgccggtgtagtagttgagacggacatccatcgcattgccggtcgcgcctttccagttggtggtcagggtgacaatggtggtggagcctgctttcagcgcggctgtgacctgcgtgtcaggcagtttgttgacggcggtgatgctggctgtcgcgatagtgtcggcggtatcgtcagcactgacgcccacctgtaccgagacgccgttcaccagcagggccagcgtacctgcagcggtggccggaccggtgatggccagctctgcttttgcggcagcgccggcagcgatatcagccaggcccatcgcccacacttcggtatagctgttcgccttacgcagggttttgagcatcccggccagcatggagcctttgccgtaaagctggtctgcggtgccgtcgctggtgatgcggttttgcgtcagagcggcagcggtgccggtcgcactctgctggccgatgacgataattttgcgcgactgcgccggggcgctgtcgagcgcctgagaattatcaatatcgatgtacaccagcgggacgcggatatcagcaggaatatcacccagtga

SEQ ID NO: 252338 - DNA, 618 bp, Klebsiella pneumoniae; identical to SEQ ID NO: 229983

SEQ ID NO: 252339 - DNA, 1077 bp, Klebsiella pneumoniae
atggctacgtttaatgtcccgacgctccgccagcttattcgtgccggtattcaggatttagagattgaactcgaccaggaattaccgattgtcggtgttgaacgcgcgttaaatacggctttcagcggcgctttacgcgacgtctacgattatcagacgtggattaaaaaccagattatcccatcagagcagtcagccgacgaaaccatttttgataccgcccgctatgagggcgttattcgtaaagccgcatcctatgccagcggccctgtcaccttcaccggcacaaagccgctaccgctcgatacagaaatgcagacacaggacggcgtccgcttccacgtcaccgccaccagtgacccgtcagcgggcaaaatcaccgtcaccgtgcaggccgacgagacgggcctcagcggcaatctgacggcgggcgacgttctgaccctcatttccccggtggccggagtgaacagtgatggtgtggtagcggatgcgggtatatccggcggtgcggacgtcgagtccgtagccgagttgctgacccgtctgctgtaccgcaagcgcaacccgcccaccggcggagctttgcatgattacgttatctgggccaccgagctgccgggcatcagccgggcatgggcctttgactgctggcacgggctgggaacggtgggccttgcgtgggtctacgaccagcgcacggacattatcccgacaggcaccgaccgcgagtcgatgcaggcctacctgttccgccatcaggaccctgcgaccgggacttacgtcggcaagcccggcggtatcgaggtctggcccatcccgctgacgctcaagccggtgccgctgaccatccgcatcattcccgatactgcggccatccgttctgcagtcaccctgagcctgcaggcgctgtttcgttcggtctcgccgggcgacacgctgctgctctccgccatccgaacggccatcggctcatcgacgggtgtcacggattacgagctggacctcaccaccaatcaggccagtgagaactacgagctgctgacgctgggggctgtcacatggcgcatcgtgtag

SEQ ID NO: 252340 - DNA, 453 bp, Klebsiella pneumoniae
atgaccatcagaataaactggcacctgcccgcaggtggagatatagagattgaacacaatggcctttcgtttgacgagggccttgtttctttggtgtatatctgcctgtttactgatgcgcgggcagataccagcgacgaaatacccgacggaaccgatgaccgtcgcggctggtgcggtaattccttcagtgatttcgaatggggctcaaagctctggctgattgaccgtgaaaagctgacagaagaggtcaggctccgcgcggagaattacgccagtctggccatgcagccattattacgtgacggctatgcgcgaaatgcccaggtcattgccactattccccgcattaacctgctggggttaaccattattctcacccgcccggataaaaccgagttaaccgtcgaaataaagaaacgctgggaggcggtagaaaatggctacgtttaa

SEQ ID NO: 252341 - DNA, 294 bp, Klebsiella pneumoniae
atggtggccatcgctgtcgaggataaagggagtcgcccccgtggtggtgatgaaggcgacgttgttatttatcatcaggaaggccatattattcgcctgaaaaagaatggcgtgattgaaataacagggaagacggtaaatgtggttgccgaagagagctgtgacattatcggtaaacagataaatatcaccggccccacttctttcagtgaagatatacaggttaagggaaaatctttccttgaccatattcataaggatggtgacggtgaaaacacgactaaacccttatga

SEQ ID NO: 252342 - DNA, 717 bp, Klebsiella pneumoniae
atgtattataggaatttcatcattacctcaatcgaggcggagcgtattctggccatgaaatttgatgaagcatttgctggagtaaaaaagaatgttattgatacactgaatcaaatgggaaatggtataacccgtgcttcgtattatacttcctgcttaatggataattatcaggatgtttgttctaagttaaagcaagaggacacaagatttattgcagggctggcgcagttagttaaaagccgtgatatcattttccaaatgattaaaatatatatagaaacctactttcaaaataaaaaagaagaaaaagctcaatatattctcaagaagcttgtcggtgcgggagtttacatatcatcttcaggattaactaatcgtattttaataatggcagtagcaaccatgatttgccagacttccaggtttaatactgttgtatatgggcgtatcaacagggcaaggtcattagtccttaaagggagtgtaactgctaccgcagtggtattaaacgtgtatggattgattcaggatgccgctaatagcgctgacaatttgaaaatgcataattcattttattacaatgcgttatacgctaaccatctggagatgatgtactttctcatcgaacctgtcatcacaggcgttccttatttaaatccgatgattatttctgatgatgaacttgctgaattacttattaaattaatgaggtga

SEQ ID NO: 252343 - DNA, 693 bp, Klebsiella pneumoniae
  misc_feature (181)..(190): n is a, c, g, or t
atggatttcttgaaaagatggttaaaagaagaattcattctttttttatggggatggggtattgtattattaatcattatatttagcatgattgcagtctctctttttcctgacattgccattaacttaataggactttttgttttattaatcattgggtttcacgttgtcgtttggtttnnnnnnnnnngatatgaaagaggaggggtaatgtcaaatccagcatatttatggttaactgatgagaatgattcgcctattataggttcttgcctgatgcccacacgcacgggttccatcgaattgcgcgcagtgaatcatcatgtttggttacctaccgataataatacaggaaagctgacgggaacccgtcttcatacaccggttaaaattcaaaaagagtttgacagaacaacacctttgctatttagggctctttgtgaaggtcgaacattaagatcggcaacgctaaaaatgtacagaataaatgaggcgggactggaagttgaatattttaacatagcgatggcgaatattaagattacggcaatcacaccaaatttacatccggccggaatgacaagtactcaccttgaagacattgatttccgttatgagacgatcacctggatatacacagaagggaacatcatgtatcgtgattcatggaacgatcgctgctgtgcatggtag

SEQ ID NO: 252344 - DNA, 495 bp, Klebsiella pneumoniae
gtgccctacaagcagcaggagcaggcgctgttctttatctgcgaccggctaccgcgacgcgacggtatcaagctcgatggccgggggaacggtaactatctggctgagcaggcagctgaaaaatatggcgcagaggtggaggtggtcatgccgtccgtcgcccactaccgcgagaatatgccgcgcttcaaggcggcatttgaggatgatgaactggtgttgccgaagcatgaggacgttatcagcgacctcgggcagatcgtcgttcagcgcggggtgccgggaattgatgaccgggagaataccggcagcgatggccacaagcgtcacggtgacagcgcgtatgcgatcttcctggcgttcctcgccagcaaagaagactgccagcgctacgaactgcaccggcttaacaacccgcaacagcagcgcaacagcgacagtcgccgccagttgcgcatcacccgtggccttaaaaatcagcgaggaatgctttga

SEQ ID NO: 252345 - DNA, 339 bp, Klebsiella pneumoniae
atggataacatacttacctggtgtcagcgggatgccgtctaccggctgttcgtcggtcagcagacggaactcacgcagtgtgtcgctgtcaggcttcaggaaccgcgggtcaacccactcataatcacgcggcatccagccatcacgggtactccacaggatttcgcagaccccaacgcctttaccgagaccatcaagcagatcaaacaacaattccgggatttgcggctgctcgacaagatcgcgaacagcatcagccagcaggacgtcatgctcatcgtcgctcgccgcttccaccgccggggggataccggccacagtcagcttgcgggtacgtag

SEQ ID NO: 252346 - DNA, 597 bp, Klebsiella pneumoniae
gtgtgctttattttgctggtctcggcggcctttttctggtccgcgtttgaacagaaaccgacctccttcaacctgtttgctaacgactataccaaccggatgatcggcgattttgagatccccgcggtctggttccagtcgattaacgccttgtttatcattctcctcgcgccggtattcagctgggcgtggcctgcgctggcgcgtaaaaacgttcgtccgggcagtatgaccaaattcgtcattggcatcctgtgcgcagcggcgggctttggcctgatgatgctggcggcgcagaacgttctgagcaacggcggggccgggctggcgaccatgactctgctggcgccggagagaatgcgcggccagatgatggggctgtggttctgcgccagcgcgctgggtaacctggcggcgggcctgatcggcggtcatgtgaaggccgatcagctgtcgctgctgccggacctcttcgcccgctgctccatcgcattgctgatctgcgccgccgtgctggccgtgctgattgtcccggtccgccggatgctggagaacagtcggtccagcgccgcgcaaaaatccctcagcaacgcctga

SEQ ID NO: 252347 - DNA, 1197 bp, Klebsiella pneumoniae
atgagtttgaattatattccagagtctgctgataattgtatctggggtaatattcatcctagctccggtaaaaaacttgggttaatgcaaaatattggtggtggaattttttttattggcgatataattaatccgtggattggcgttacaagccggcatgacttttattcgcctaacatatcttggcagaaggatgctgtttctacaaacatgccacgaatagttgagagtggtagttgtataggaatgtttttttgtaaggtgtttactgttgttgttaacaatgtaaatgaagaactgaacctaacagaaattactgtttctgctaaagatttaccctatatttatgttggtgttccattgtgtatttcatcaacatcaacatcaacatcaacatcaacatgtgaagtgtcaattttatcacgcattatcgaggacggaatattaacaaatcggtacattttgactggtattgtaggggaaatcggtacattattagttgtcaatcaaagaatgctggcggctcgaaaatatgtaggaggttatgcattcggtagtattgagatcaatgaaggacaaatagatatagtgaaatcaaaagatagaggctcaaagcaggggctaaacttctatatgactgacaatcggctgacaccgtcagcttctatgacggccaccgaggatagtattctgtttagtgctggcagtttttggttcaacaataatatttgttttagcccagataagcattgtgacctcgcctcagcagattctccgatagagaatatatttgtaaggaatgcaatttcaactgttgctgataaaaattatatacctattattcgaaatgtccccgacaatatcctcgatatttgggggacaatatccgctaaagcttataaatatgattgggctattcgtcaaaaaggagatgatatggcccggtggcatgtgggatggattgcgcaagatatagttgatgcatttgcaaaagctggggaaaatgctagtgaatgggcgctggttgtctataatgaatcaagttcaattaatactcctttattaacttctcctgagtacacactccagaataaattgaaagaaacatcagaatggcgagtaatattagatgaatgtaatgctatggagttgttatatcaacgtcgtcaattgaaaagactttctgaattgctttga

SEQ ID NO: 252348 - DNA, 543 bp, Klebsiella pneumoniae; identical to SEQ ID NO: 248567

SEQ ID NO: 252349 - DNA, 441 bp, Klebsiella pneumoniae
atgggaatttacgttacccgtgatgacctgctggctgcggacgggtcgctggtctggactatggccatcgacaaggcaacgaaccaactcgacgagacgaagatagccacggccatcgaagatgccgacgcggagatcaactcgtttctgtcgaagcgctatcagttgccgctgaacatcaccaccgttccgcgcccgctgcaccgggtagctgtatccatcgccatttactggctgtccgagcgtgacaatcagatcaccgacctgattcagaagcgctacgacagtgccgtccagaccctgaaggagatggcgaacggcacccgtgaccttggtctgccgaccgacacgccagccccggagaccgataacggcaggatgattgttgtctccgataacaaacgcctgttcacccgcaacaacctcaaaggggtgctgtga

SEQ ID NO: 252350 - DNA, 309 bp, Klebsiella pneumoniae; identical to SEQ ID NO: 246552

SEQ ID NO: 252351 - DNA, 705 bp, Klebsiella pneumoniae
atgtcagcactatttgaacgtgcccaaaaaacggtagtaatgattacctctgtgccggtcaccgcggcagagctggataccgcaacctggttaaacctgagttgcactatcaaacaggcaagctttaccgctggtcagaaaaacgatattgacgtgacaacgctctgttcggatgaaatggaaaatatcaacggccttcctgctccgtctgaaatgtcactttccggtaacttctaccgcaacccggcgcaggatgcacttcgtgaagcatacgataacgacggggtttatggatttaaggttattttcccgtctggtaatggattcctgatgcgcgctgaggtacgtcagcacacctgggattctcaaaccaacggtgttgttgctgcaacgttctcgctgcgtctgaaaggtaaacccaccaatattaatgccccaggagttctgtcgtttgctactgaccttccggcgtcccaaacggtcgcggcaggaagcgctctgactatgggcgtggtcgtccagggcggtacggcaccttatacctacgcctggaaaaagggcacctcgacagtcagcggccagaccagcgaaacgtttacgaaagccagcgctgtatccggtgatgccggggtttattcctgcgtggttactgatgccgatggcactgtgatcacttcttctgattgcaccgtcaccatcaattaa

SEQ ID NO: 252352 - DNA, 267 bp, Klebsiella pneumoniae
  misc_feature (5)..(14): n is a, c, g, or t
gtgcnnnnnnnnnnatcctttactgacacgattaactttgtggattgctggcatcaaaccatcagagggcgtattgagtgtcgctggcggcgctataaaaaaggcattgaattagtcatcaaagtgccatttaacctcaaaaaatgcacccttaaattaccaaaagtgtatcaacttaataaacaattacctgcgccgatagactgtgatacctatcatcacttttatgacattaccgatgcaggtgagataaaagtactattgtaa

SEQ ID NO: 252353 - DNA, 471 bp, Klebsiella pneumoniae
gtgcagagccactacaacctgattatgcgtgaagatgaacgagggctgttcgggctgtgcgcggaagagggtatcgccatgactccctatagcgcgctggccagcggccgtctctcccgcttagaaggccacacgcggcgagcggtggaagatgattatgcccggggcaaatacgacggcacagcagagcaggatcggatcataattgcccgcgtcgctgaacttgccgaacggcatcaggtctccatgaccgaaatttcgctggcctggctgctgactaaagtcaccgccccggtgatcggcgccacgcaaaagcatcatgttgacggcgcggtcaacgctgtagcccttcaactgagcccggaagacatccgttatctggaagaagcctaccagccgcacgttctcacaggcgtgatggcgcaaaacacgccgcaagccaaagaccatcatcaggtgtggacgcggtaa

SEQ ID NO: 252354 - DNA, 972 bp, Klebsiella pneumoniae
  misc_feature (308)..(317): n is a, c, g, or t
atggagatatgccgggttgcgccaggcgtccggcgccagcaggggcgccttctccacctcaccctgcggcagggcaaccggctcaccctgcgccagccgctgcagagtggtagccatctcctgcagaacagcgcgattgacgctgcgaccgctgagcgtcaggggaggaatagcgccgtcaaacggcccctcgctaagggcgttcttcagctgaagtaccgcctgcgacagctgctggcgatcgtcactatccgcctcgtctgcttgcagcagggccgccagctggtagcagcgcaaagtggcggccnnnnnnnnnnggtagcagcgcaaaggggcggccagccgcgagcgccaggcctggggatcggcggcgatctccggtgtcgcccggctggcctgggcgaacagcgactgcagctgattgaactgcgcggcggtctcgccgaaggtcggtggcgcttcagcgtccggggccgccagccgccgggcgacctcgtgcagcatcccggccagacgcgccttaaactggttaccgggaaaggcctgctgaaagcaggcgttgaccagcagggtgacgaggatcgcggtgttaatcgccacccacagccaaagcagcagccgcaccaggatctcgctctggctggtcatcgacgggaaggtctgagcgtaaatcaccgccagcgccaccacgaaaaaggccagtcccagcttgcccagcacccgcatcagatagagggcgcagaaaaagagcgccacggaggccgccaggcggatcagcgggtagtcataggtccacttgatgatcagcaacacgccgccgagcgccacggtaacggtgacaaaaaagaccacgctgaccagcttaatcatcaacacgttaggctggctgacgtagaacacgacgatcagcgcaacggccaggaaagggatctgcagggtcataaacagggtgatgagcaccgcgcagcttag

SEQ ID NO: 252355 - DNA, 297 bp, Klebsiella pneumoniae
  misc_feature (177)..(186): n is a, c, g, or t
gtgatcgcgaacttccgcgaaaccgacctgaacaacgtgcgccccggcgtggcggcgcggatcaccgtgatgaccaaccacaaccggacctttaacggggtggtggattcggtcggctccggggtcctgcccgaaggtgggagcgtcatcgaagggctgccgctgatccagaaaagnnnnnnnnnnattaactgggtccacgtctcgcagcgcttcccggtgaaaatcgccgtcagcgatcccgacccggaactgttccgcatgggcgcctcggccagcgccgtgctgcagccgtag

SEQ ID NO: 252356 - DNA, 303 bp, Klebsiella pneumoniae
gtgacactcatcaaaaataaacaccacctgttggttgtaaacaggaaggtctccttcccctttcatcaggttattcagcttctgaatggtggtaacgatgattttgttatcgtctttatccagattgcgtttcagacccgcggtgttgtcagagccattgacgctgtcgggggagaagcgctgatactccttcatggtctggaaatcgaggtctttacggtcgaccacaaagaagactttatcaatgaagtccagttcagtcgccagacgtgcagccttaaagctggtcagggttttgcctga

SEQ ID NO: 252357 - DNA, 216 bp, Klebsiella pneumoniae
atgtgttttctggcggaagttgttcagtatgtactgtgtgatttcctggatgcgcagcgggtgaagaaaagcctgctgattttccgcggcactgagttttttctcgtcggtttcggtttccagcgccttaaactgcgggcggacatcgttatagtccaccttaaacttcagcaccttttcatcacgaatggcatcggtaatcacgtaagaatgtaa

SEQ ID NO: 252358 - DNA, 231 bp, Klebsiella pneumoniae
atgaccaaagcgtttgatcgcgccagcgatctggaaatggaagaacgggaacaggctttaaaccggcatttaaaccgcgttaaagaacggcctgagcatgacggattctgtaacgactgcggcgcacccgtcccggctaagcgactccgggcgctgccggatgtggcgacctgtatcagctgtcaggccatcagagaacacagggggaagcatgccgtgggaaatcattaa

SEQ ID NO: 252359 - DNA, 969 bp, Klebsiella pneumoniae
  misc_feature (544)..(553): n is a, c, g, or t
atgaataacaacgcaataaatgcattactctcttgtaaaactccaaaagacattcaggcttgcattaatgcaggctccgatattaatacactggattcgtttggaagaaatatactgttttactgtaaaaacccaagaatgattgacactctggttaaagcaggaatagattttaaccatgctgacaactatggtcacaatgttttgtttaaccagcgaaatcctcacatactgaaaaaattgattgattccggcgtagatatagaccacaaaaatggtctcggccaaacctgtttatgctcgttagctgataatatatcctgttgcaaaaccctgatcaatgctggaattaatgtcaacaatgtggataaatgcggaagaacaatacttttttacgtaaaaaatcactctatctttgatttgatggtacaggccggttgcgatataaaccacagagataaccagggtcacggtatttttgaaatttgctattcattaggcgatttcaaagccaaaatgctcattcgtcatattagtatgaagnnnnnnnnnnctattagtatgaaggatagcagtccagtaattttcaactacctcaacagcgaaagtctgcagataatggatttgcttcagaagaaaaaccttaactttactatctctgataactgccaggtttatctaagtgccaatgaaaatgaaatgagctctttcttcagtgaactaaagaagaagacagatatcagcaaaacacattttcgccatattgtactgcgaggttatgatttacgcggggacattgaaaccattaaatggtttatccgcaatgacatcaaaatagataaaaaacaactggaacagcatattcgacatgatgagatttgtaaatatatagcagaacatgagagaaagaaacttagcgaaattatgaaacaaacaatctctttaatgccagtaaaacgtagattgtaa

SEQ ID NO: 252360 - DNA, 336 bp, Klebsiella pneumoniae
atgccatttcacctcggtggcggtgtgcggcagcttggagttaattttgctgtgatgaaagcgggtgccgctgccgccgatcaactgcgcggcgatggtagccatccgcgaattcagcgcagtatggcgataggcctcggagatctccgtcggggaggcgacccggcgcagcgacggatggtcgggagcatggtcgcgttcgatatcgaaacgtggccgcccgtcgagggtttctccccacgccgtcgcgtggcggcggctctcctcgacccagccgtcgaaatcgctctgcagggcggcgatgtcagcgctggaaagcacttcttcgaccactag

SEQ ID NO: 252361 - DNA, 498 bp, Klebsiella pneumoniae
atgcctttacctgtgcagattgccacggcactggggctggctgagaccgcgtcggttgacgatgccgtatcagcgatccagaccatcaagaacagcgaacagaccgcgctgaaccgtgctcagaacccggacctgtcaaagttcatcccgcaggagacctatcaactggcgctgaaccgcgctcagacagcggaagatcgtctgaagacactggatgagaagacggccaccgctctggttgacgatgccgtaaccgccgggaaagtcgcgcccgctaaccgcgatatgtatctggccctttgccgcagtgaagaaggccgtcagcagtttgccgagttcgtgaaaactgcgcagccgctggtcaatcaggacccgtccaaaggtaaagagaacaaggggcagcagaccacgctgaccgaaaccgaactggcgatgtgtcgcagcatgggtcttacccaagaagagtttctcgccgctaaaccgaaacaggagcaataa

SEQ ID NO: 252362 - DNA, 870 bp, Klebsiella pneumoniae
atgttgtttggactaagcttttctaaagtaaagtcaagatacggaatcggcgcagctgctatcaacgaaatgtgccatgctcataaatttaagttagttgttcctagaccttatttaaatgaaatggcaagccacggcttaaaagcgttagaatatgcacatatatacaatatcattggtgatgagtctagatccatcttaaaatcatcaggtaacgcctacttgagtcattttggtcatattcgcgatgataagttaccaggctatgaaatgagtatcaacgactttctctcatactttgggatccaaaataattctactctagctaaaattgagagacgtatagaggatctattaagctcactagggattgaggttgtaaatatgcctcgctggaaaccggagttaagatcagagatccatgcacaaaaaccacaagaggcgtcaataataatagaccatgatgcctcagttctcactatgttgtctgatgctacggaagaaggatatatttttgctacttgggataaagttttaacagaactagtagaagaaataagcagagtatatgctgataccccgagtagtgttgttgattttctctcaatggcaaacgattcagaatttgaaatggagcaaactgttagcttacttgattctttagtttattgtgatgagaaaaaagcagaagctctggctaagaaaattgaggcgataaaatcatctgaaactgctttttcgcttcaacggttcattgatgacgcaagaaaaaaatcatcacggatgacagatcctctagatattgtaggtgtatttttttccgagttaaatgatggagatgaggaattatcaggcgtcgacagcaattaa

SEQ ID NO: 252363 - DNA, 612 bp, Klebsiella pneumoniae; identical to SEQ ID NO: 61245

SEQ ID NO: 252364 - DNA, 1092 bp, Klebsiella pneumoniae; identical to SEQ ID NO: 186061

SEQ ID NO: 252365 - DNA, 696 bp, Klebsiella pneumoniae; identical to SEQ ID NO: 152558

SEQ ID NO: 252366 - DNA, 528 bp, Klebsiella pneumoniae
atgggtgatgtcacgtatggttttgaagcgggcttctttgaacgcggccaagtccttctcgtcgtacaggccgtgctcgtccagtcgctccttgatctcgtagaccacattgaggtcttgcacttcgccgatgtgagcgcccttgtcataggtggcaaaggccttgcgcacgttctctggatcgttcacgaagtcgatgataaagacttcatccttcccgggtgccgtccggttcaggcgggcgaaggtctgcacaatctccacatggttggcgattttcttgtccacgtacatggcgaccagtttgggctggtcaaagccagtctggaacttgtcggccaccaacatcacccggtattccgggcggtcaaaggcaaagcgcaaatcctgcccgtggacatccgggttcatgctctgctcggtgaattcctcgttctcatcgacgataaacacatcatccttgaactcgctgtcatcctggtgcatcacctgcttaccggtcatcttgccggagaaggccaccagtga

SEQ ID NO: 252367 - DNA, 456 bp, Klebsiella pneumoniae
gtgctcgtccaagcgctccttgatctcgtagaccacattaaggtcttgcacttcgtcgatgtgagcacccttgtcataggtggtaaaggcctgacgcacgttctctgggtcgttcacaaagtcgatgataaagacctcgtccttaccgggggccgtccggttgaggcgggcgaaggtctgcacaatctccacatggttggcgattttcttgtctacatacatggcgaccagtttgggctggtcaaagcctgtctggaacttgtcggccaccaacatcacccggtattcagggcggtcaaaggcaaagcgcaaatcctgcccttggacatccgggttcatgctctgctcggtgaactcctcgctctcatcgacgataaacacatcgtccttaaactcaccgtcatcctggtgcatcacctgcttgccagtcatcttgccggagaaggctaccagtga

SEQ ID NO: 252368 - DNA, 858 bp, Klebsiella pneumoniae
atgaataatgaaaatacgtatggctacgtatatatactggtatcagataaaacaccgtatattaaaattggtggcacggattatttgccagagaagcggtgtaaggagattaatacccagccaccctattgtttatatgccccatggcgggtagcagactaccgtagcgtacctgactggcataatgtcgaaacctggctgcactatctttttcgcgattctcgcgtgcggactattgcaaatcagaaagagctatttaatgtcacgcctgaactggctgcccatcatcttgccagccttgatcaacaaccgttgacgactaaacctaaaatcgaccgactttttcatcaccaggggttgagagattacctggtaaaactattcgctatcgccggttgtgaaaaatggcgacataaagaaggggtttgggtgtttagtctgttcccaggggcgcatagcggatggtcccggtattttacgcttagtatccatagccacgaagtcgcttattcaacgcggtcccgcgattgtcaaattcatatgttattagcagatgagcttatcatggactatcccgatattgttcggtgggtgacggaccataaaggagggattgaaaaaccaatttataaaacagctttatcacacgcgcagcaaatctggtttgagggtgagtttgaagagtgtcttcagttactctcgttccctgaagtccagcaggctgttgccacctactgggaccgcgcattaacaaaatacgattatagtcttcaggcgaagtatcataaccggatggcagttgaggagatcttcaaacagttacaagtacaacggcagcgagaatcgagcgcaatgtaa

SEQ ID NO: 252369 - DNA, 144 bp, Klebsiella pneumoniae
atggccagccacaaacgcgagaaagagatccgccaggccttcgccgaagaagccgccgcgcaggcggagaaaatcaccaaaagtgccgggctgtctgcggaaactgccgctgatatccgtcgccagattctggggatcgcatga

SEQ ID NO: 252370 - DNA, 579 bp, Klebsiella pneumoniae
gtggactttgccgagtttcatattcagacccatcgcaaaatcccgtccgggcataaaattcgctttctcctgcatagcgattcagggaaaatagagtttaatgcggccctgacaaaacatgacaatagcggtgtcgataaaggtatccgctacgctttttcattgcctgaatgcctgcaggtagtgcagcgtcgccgcgatccccgctttcgtttacgccatgagcatgacttttattgccgcggccgccataaaaacggcgaaaactatcttttcgatatcaaagacatttcagatggcggttgcgcattgatgaccaaaacgccgaatcttaaatttctcagccataacgccttactgaaaaacgccgtacttatgcttgcagaatatggcgagatcaccatcgacctggtggtcaaaaatgtcattgttatcaccctggataacgctaatgaagagagtgagagctactatcagatatcctgccagtttaagttccgccatctcgatgaccagcgcagaatagagaagatactgctggacctgatcttagaagccaagcgcaaaaagagaatctga

SEQ ID NO: 252371 - DNA, 429 bp, Klebsiella pneumoniae
gtggtcgaagatgaggcagtgatctttaccaggagcggcacgcaggccacgcccaagaatctgaatccagcgcatttcgctttttgttggccgggcgaagataatgcagcgaacatcactatcaaaaccggctaccagaacaccaacgttaatgatgattttggttatgccctgttcgaagcggcggatcgtgagctgccgttcgtcgtgcggtgtgctggctgtcataacttcaaccgtcacgccagcgctggcaaattcaaccgtgacaaaattggcgtgagcgacatctacgcaaaaacaaatcgtcgggcggtcttcgccgttctccagccagtttttcacgatgtcgcctaccagcttggcttcgctcattacctggctgagctggttttctttgtagtcgctgccatagcctgctacgtatga

SEQ ID NO: 252372 - DNA, 252 bp, Klebsiella pneumoniae; identical to SEQ ID NO: 246537

SEQ ID NO: 252373 - DNA, 162 bp, Klebsiella pneumoniae
atgccccatgtcaccgaaaagatgctggggcatgaactgggaggagtgatggcggtctataataaacacgattggctggtggagcagaaagaagcatatgagctttatgctgataaaatcatgtggtatgtgaaaaaaatgataaatggtgactttaattaa

SEQ ID NO: 252374 - DNA, 342 bp, Klebsiella pneumoniae
gtgctcattaaaaatctgaaagaagaaatgttaaggtttgaagatgaagccaaaactgactggttgtttcctaatcctatgccgtttggtctggaacgagttatgattcaccagtgggtgcgggcttatctaggatttccgatggtttacgttgaagcaaaaattgttatgactgcttataggggggaagagatatataccttacctatacctcatcaaaatagttctgtcggatttacctataacaaggatttattttcagaaaccgtgactttttatccactggagcgagcaaaggagattcatattgcgctggagaaaaagcgacttggtggcaaatga

SEQ ID NO: 252375 - DNA, 303 bp, Klebsiella pneumoniae; identical to SEQ ID NO: 193638

SEQ ID NO: 252376 - DNA, 354 bp, Klebsiella pneumoniae
atgagcattctgggtatggcggccattcgcattaatggccgcgaaattaaaaccgagggtaaatctaccctcaatccgggcggtaaggcccgcacgcagcatatgggagccggaaaggtctggggaaactccggcaaaatggtgggtccctcgatccagatgaccatcgcggccgcgcaggatatggacgttatcgaaatcagtaactgggaaggcgtgacggtgatgtttgagggcgataacggcctgacctacatgatgaccggggcagcgacagataacccggccacactggacgaagacgcgggcactatcagtgccaactttatcggcgaaaaactggtgaaggtataa

SEQ ID NO: 252377 - DNA, 354 bp, Klebsiella pneumoniae; identical to SEQ ID NO: 186059

SEQ ID NO: 252378 - DNA, 189 bp, Klebsiella pneumoniae
atgttgcttcctcagctgctctgtcaggcgcagcagctgccggagaggcaactgctgcaggtaggacatatcaaatcgttgggaaagattgacgataaggttactcagcgccgtcgccagcggcaccagatcgcccccgtgacgcggtctccgaaagcaggtcatcgagtgcagcagctttactgctga

SEQ ID NO: 252379 - DNA, 273 bp, Klebsiella pneumoniae
atgcgcgccaccctcgcccaggccgaggagatcgcccgcctcagcgaaggctaccgactcaacgccgcgccgggagacccgaccctggcccgctgcgccgaacagctgcggcgctacgctgaacgtatcgaacaggaggcgacggcgcctggcgaacagctgaccgccgaactgactaacccctttggcccggcgctggccgccgcgctggccgccctgcccgactgggggccgacaccgatagcgactgagcaacaggctaaaacgtcatga

SEQ ID NO: 252380 - DNA, 240 bp, Klebsiella pneumoniae
atgattactgaacgtattgctgaacatgttggtatggccaccgctgcgcaggcatggctgcaggcgcgcggtagtcgtgttacggagatgcgggtgtggatgcgccgcccgtgtctggaaatcacctgtccgccaactgagctggtgaacagggctaatcatctgattgaacgctgccccaccgggacccgttccgtgtggatggccacccttgaaggctgtcatgttatctggaggtag

SEQ ID NO: 252381 - DNA, 330 bp, Klebsiella pneumoniae
atggtcgaccagcaggcggcacaccacgaacagcaggaaaccatccgcaacggcgacaacgctacggacgaatatgtccgccagacccgtccgctgatggcccgcctgtcgctctacagcagcatcgcgtacgtgatgatcatgtctcttggccagcaggctggcgcggtggccggtgcttttgggcatgcgttttcgatgcccgaaccggactgggatatttcgctgatgctggcgaccccggcgctgggctatctggggttcaggacgctggacggcttcgcccgctacagcaaatccagcaaacacaaggtcatggtgggtaaatga

SEQ ID NO: 252382 - DNA, 303 bp, Klebsiella pneumoniae
atggctactatcccaatccagacatatccgttacttgctgttccctttaatgctgccacggatttcaccgtactcgctggtcattgcgaaacctttgccgaaaccctgattgaaagcaacgatcccacgctgaaaatggcgctctgcggcagactaaacgcctgtctgacgctgctccagcccacgctgttagagcccgtcccgccccatcttattgaaagcctgactgttgatgccctccctgcaaattcccccgtttcgagcctgaatgcacagagctttgccgctactgtctctccctga

SEQ ID NO: 252383 - DNA, 471 bp, Klebsiella pneumoniae
atggatatttcgacagtgcttaatgttaaaaacatcaagttaaatatgaccgccagaaccaaagaagaggtgatagaagaactcaccgatttacttatccaggatggcgccgtcaccaataaggaagactttattcgtgatgtctggttacgcgaggagctaggctctaccggctttgaaaaccatatcgctattccacatggtaaatcttccggtgtttcccgtaccgcattagccatcggacgcacgcaacatgccattccctgggagaccatggatggcagcgatgtccgctgtgttattttatttgcggtttgcctggtggatcaaaatgccacccatattcgcctgttggcacaagtgtctgggtcactggcggatgaagacattatcgctaaattacttgttgaatctgatccacataaaatcattgcgcttttcaattcagaaacagaaaacgccgatgcttaa

SEQ ID NO: 252384 - DNA, 300 bp, Klebsiella pneumoniae
atgacaaaaccagcatcaaccaccaaaaagccacgcaagcagcacacgcctgaatttcgtcaggaagccctgaaactcgctgaacgcattggggtggccgctgccgcccgcgaacttaacctgtatgaatcacagctctacaactggcgaagcaaacagcaaaatcagcgttcttcttctgaacgcgagcaggagatgtccgctgagatcgcccgtctgaaacatcaactggcagaacgggatgaggaactggccattctccaaaaggctgcgacatacttcgcgaagcgcctgaaatga

SEQ ID NO: 252385 - DNA, 924 bp, Klebsiella pneumoniae; identical to SEQ ID NO: 227609

SEQ ID NO: 252386 - DNA, 465 bp, Klebsiella pneumoniae
atgatattgatagaaaaatccagcccagacacgccagaatctttgtatcttatcgaaatgctatccgcgacgctggctgagattactggcgatagcggaaagactaactttaacgtcgataccatgaaatctgatcgagcgctgtgggtagtggcaaaagatgaaaatggcgaggctatcggttgcggggcgatccggccaatatctgaagatattgctgaattgaaaagaatgttttccgtcaataaagcatccggaacaggtacagcattgctccggtatcttgaaggtgaagcaaagtcgcttggatataacgaaatcaggctagaaacccgtaaagttaatacccgcgcagttgctttttatgtaaagcataactatcaacgcatcgctaactatggcccgtatgtgggtaaagatgaggctgtttgcttctcaaagcacttatctctcaaggagatttga

SEQ ID NO: 252387 - DNA, 273 bp, Klebsiella pneumoniae; identical to SEQ ID NO: 250769

SEQ ID NO: 252388 - DNA, 249 bp, Klebsiella pneumoniae
atgtttgaacgttatcgggatagcaaaacgcatcagacgtatataggccttacctttatgacgcaaagcctggatcaaatgcgtcggctggagccgctaaatgtgaagaatccaccgctgcaacaaaagcttaatctgcactgtaaaaacagtccggacggctggctgtgcccgatagatgaatttgccgcgcagattaatagccgtctcgataagactgcgatgattgcgcagaactacgcggaatag

SEQ ID NO: 252389 - DNA, 1047 bp, Klebsiella pneumoniae
gtgggcatctacagcggccaggtctggcataacgccttgcagattaaggcctcgtttgatccgctgcgtctggcggcgctgagaaaaacgaatatcgtcttaggccagccgcggctggtggtgagcgtcggcgatgcccgcggcattggcgccatccatgccccggaggtcaacggtaacgtattaagcgtggagccggggctggggataagcggcgatggcgcaggtattcatatgccaatgcctgcgctggcggaggacaacaagccgcttgagattgccttttcactcgatctgaacgggacgggagagttttcactggtgccgctcgggcgtaacagcgagctgcagctgaccagtaactggccgcatcccggttttctcggcagcttcctgccaacgcaacgggaagtgagtgctgccggctatcgcgcccactggcaaagcagctggttcgccaacgatatggggagctatttcaaggatgatatggagatcccgtggtcgcgactgccggcgttcagtgccgatgtgatgtcccttgccgaccagtaccagctaaccgatcgggcgacaaaatatgccatcctgttaatcgggctgacctttatggcttttttcgtgttcgagagcctgacccgtcgtcccctgcatccgatgcaatatctgctggtgggcttatcgctggtgctgttttacctggtgctgctggcgctctcagagcacattggttttaccgccgcctggctggcggccagcctgtctggcgcggtgatgaatgggatctaccttcaggcggtgctcagaggatggcgtaacagcctgctgtttgtcgccgcgctactgctgctggatggcgtgatgtggtttctgttgcattctgaggatagcgcgctgctgctgggtaccggggtgctggcgctggcgctgagcgtcctgatgtttttgacccgtcgcgtggactggtatgcattatcgctgccgaaaggcacagtgcctccgacaccggctgccgatgacgataagctgcgtctctggaaagagtga

SEQ ID NO: 252390 - DNA, 735 bp, Klebsiella pneumoniae
gtgctgcttcacctgaacctgaacgtacagatcgcctgccggcgcgccatgttcgccggcctcgccttcgcccgccagacggatccggtcaccggtatccacgcccgccggaattttaaccgacagggttttggtcttttctacgcggccatggccatgacatttattgcacggatctttaatcagcgtaccgcgtccctggcagtgcggacaggtctgctgtaccgcaaaaaagccctggcgcatctgcacctggcctgcgccatgacaggtcggacaggtctgcggtttgctgccggccttggcgccgctgccgtggcagacgtcgcactcttccagcgtcggaatacggatctctttagtgacgccgcgcaccgcttcttccagcgtcagctccatgttgtaacggagatcggcgccgcgtgccgcgcgctgacgaccacgcccgccgccaaagatatcgccgaaaacatcgccaaagatatcgctgaagtccgcaccgccgccaaaaccgccgccgccgcccatgccgccctgttcgaaggccgcgtggccgtactgatcgtaggccgcacgcttctgggcatcagtcaggatttcatacgcttctttgatttctttaaatttggcttcagcctctttatcaccctggttgcggtccgggtgatatttcatggccaggcgcttataagcctttttgatttcacgctcttccgctgttttggaaacgcctaa

SEQ ID NO: 252391 - DNA, 342 bp, Klebsiella pneumoniae; identical to SEQ ID NO: 242404

SEQ ID NO: 252392 - DNA, 630 bp, Klebsiella pneumoniae
atgactgaacgggtttattacaccagcgatgctaccgacgggcgcgcccagatcatcgcctgcactgcagaagcggatggccgttacgccatcgaactggatcggacgctgtttcacccgcaagggggcggtcaaccggcggaccgtggatggattgccgggcaggtggttgagacggtggctgtgcgcggcgaaagggtgatgcatattctgtcgcaaccccttcccctcggtgaagtggagatgaaaattgatgcctccgcgagacagctgcatgctcgtctgcattctgtcggccacctgcttggcctggcgggcgaacagcttggctggcaaccggtgaaagcgcaccactggcccggcgaagggcggataacctttaccagcaggaatagcgccgcgctgccggacgccagtgcgctactggcgttagtaaaggcatggcaggcgcaggacttaccgcgtcaggtgacgttcgctgatggcatgcgcaaggtgggattcggcgagctgccagcctatccctgcggaggcacccacgtcgcccgtctggcggagctgggcgacattgtcattagtcagattaagatgaagaaggggcagctggtggtcagctacaccctggcgtaa

SEQ ID NO: 252393 - DNA, 930 bp, Klebsiella pneumoniae
atgaatctgaacctcctgcccgacctcgctcttttcgttcagatagtcgaccagggcagcttctccgccgtcgcccgccagaacggcattaccccttcagccgttagccgcagcgtgtcacggctggagcgagagatgggctgcaaactgctgcagcgtaccacccgcaagctgcgtcttagcgatgccggggaaacgatatatcagcatgcccagcagatgctggaagcggcgcgacaggcaatggattccgcaggcagtcgccaaacggtcgcccagggaaagctgacgctcagcgtcccgaaagccgtcggccgctttgtgatccacccgctgatgatggcgtttttccaccgctacccgcaggtggacgtctgcctgcggctggaagatcgccctctcgattttatcgatgacggtattgatctggcgctacgcatcaccgataccccctcccccggcctgcatggcaaaccgctgatgccaatcaggcacgttatctgcgccactgaggcctatttacagcagcacggtacgccgtacaccccgcaggatctgcgcgcgcatagctgcattagccttggcgaaacgcccgccgatgcgcgctggaagttccgtcgggaaggcaaaacagaaacggtgccaacctacgggcggtacgccgccaaccataccgccgtacgcctcgacgcggtcagacagcatttagggatcggcagcctgccgctgttcaccgcccgtgaggcgctggcgaagggcgatatcgtgcaggtgctgcccgagtgggaattcatcagcagttactccggcgacctgtggctgctgtgggcgggagataaacatatgcccgccaggatgcgggcgatgatcgattatctcagcgagacggtgccggcgctgaacgcaggcagcacagagccagcgaaataa

SEQ ID NO: 252394 - DNA, 366 bp, Klebsiella pneumoniae
atgacctatggacaggcgtatttgagcggctggaaagagacctttaactttagtggccgcgccagtcggcggcagttttggacgttttttcttatcaatgtgctgatcgccgccgcgccagtggccgcctggagtctggtcacccttgttgaccctcactacgggatcctcagttttgttgtcattccctttgccgcgctctggctgctgctgatggcgctccccttgctggctgttggctgccggcgaatgcatgatatcggccgctccgggatctggtttgtgttgggagttatcattccgtggtttgcaattatttcgctggctctgtgctgcctgcgttcagcgccggcaccgtctcgctga

SEQ ID NO: 252395 - DNA, 915 bp, Klebsiella pneumoniae
atgcgcttaccaatcattcttgataccgatccgggcatcgacgatgccgccgccattgccgcggcgctgttcgcgcctgagctggatctgcagttgatgaccaccgtagcgggcaatgtctcggtggagaagacgacccgtaacgcgctgcaattgctgtatttctggaatgccgatgtaccgctggcgcagggggcgtcgatgccgctggtgcgtccgttgcgcgacgccgcctcggtgcatggcgaatccggcatggaggggtatgactttgttgagcatcaacgtcaaccgttggcgaagccggccttccaggctatccgtgatgcgcttatgcatgctgccgagccgatcaccctggtggcgattggcccgctgaccaatatagcgctgctgctgacccagtacccggaatgcgtgtttaatattcgccggctggtgatcatgggcggctcggcgggccgcggcaacttcacgccgaatgcggaattcaatatcgctatcgacccggaagccgccgcgaaagtgttccatagtgggctggagattgtgatgtgcgggctggacgtcaccaaccgggcgctgctggcggcggattatctggcgacgctgccgacgctgaaccagaccggtaaaatgctccatgcgctgtttagccactatcgcagcggcagcatgagcagtggtctgcgcatgcacgacttgtgcgctattgcgtggctggcccgcccggaactgttcactctccagcagtgctttgtggcggtggagacgcaggggacctggaccgccggcaccacggtggtggatatcgaagggcgactgggccagccggcgaacgcccaggtggcgctggatatcaacgtcgaagggtttcaacgctgggcggcggaggtgattgccctggcgccgtga

SEQ ID NO: 252396 - DNA, 951 bp, Klebsiella pneumoniae
atgcagatcctgttggctaacccgcgcggtttttgcgctggcgttgaccgcgctatcagcattgtagaaaacgcgctgacgctgtatggcgcaccgatctatgttcgtcatgaagtggtgcacaaccgctatgtggtggatagcctgcgcaagcgtggcgccatttttatcgaacagatcagcgaagtgccggacggcgcgatcctgattttctccgcccacggcgtgtcgcaggcggtacgcaacgaagcgaagagccgcgacctgacggtgttcgatgccacctgtccgctggtgaccaaagtccatatggaagtcgcccgcgccagccgccgcggcgaagagtcgattctgattggccatgccggccatccggaagtcgaaggcaccatgggacagtacaacaacccgcaaggggggatgtacctggtcgagtcgccggaagacgtgctgaagctggaagtgaaaaatgacgcccggctgtcgtttatgacccagaccacgctctccgtcgacgatacctcggatgtgattgacgccctgcgcgcgcgttttccgaaaatcgtcggcccgcgcaaagacgacatttgctatgccaccactaaccgtcaggaagccgtgcgcgcgctggcggagcaggctgacgtagtgctggtggtcgggtcgaaaaactcctccaactctaaccgcctcgccgagctggcgcagcggatgggtaaggcggcttacctgattgacgacgcctccgatattcaggaagcgtgggtcaaggatgcggcctgcgtcggcgtgacggcgggcgcgtcggcgccggatattctggtgcagaacgtcattacccgcctgcaggagctgggcggcggcgaagccgtgccgctggaaggccgggaagagaatatcgtctttgaagtgccgaaagagctgcgtgtggatgtccgtgaagtagagtaa

SEQ ID NO: 252397 - DNA, 450 bp, Klebsiella pneumoniae; identical to SEQ ID NO: 210166

SEQ ID NO: 252398 - DNA, 501 bp, Klebsiella pneumoniae
atgagtaaatcgatctgttcaacggggctacgctggctgtgggtggtcgtagccgtgctgattatcgatctgggcagcaaattcctgatcctccagaacttcgctctgggggagacggttccgctgttcccgtcgcttaatctgcattatgcccgcaactatggcgcggcctttagctttctcgccgacagcggcggctggcagcgctggttcttttccgggatcgcgatcggcatttgcgtagtactgacggtgctgatgtaccgttcgaaggcgacgcaaaagctgaacaatattgcctacgcgctgattatcggcggcgcgctgggcaacttgttcgatcgcctgtggcatggctttgtggtcgatatgatcgacttctacgtcggcgactggcattttgccaccttcaacctcgccgatagcgcgatctgcatcggcgcagcgctgattgtgctggaaggcttcctgccgaaaccgactgtgaaagagcaggcgtaa

SEQ ID NO: 252399 - DNA, 2853 bp, Klebsiella pneumoniae
gtgtttatcaaaccgaaatacggaaccgagaatctgatgagtgactataaatcgaccctgaatttgccggaaacagggttccctatgcgtggcgacctcgccaaacgcgaaccgggaatgctggcgcgttggaccgatgatgacctgtacggcatcattcgtgcagccaaaaaaggcaaaaaaaccttcattctgcatgatggccctccttatgcgaatggcagcattcatattggtcactcggtaaacaagattctgaaagacattatcgttaagtccaagggactgacgggctatgactcgccttacgttccgggctgggactgccacggtctgccgatcgagctgaaagtggagcaggaatacggcaagccgggtgagaaatttaccgctgccgaattccgcgctaagtgccgcgaatatgccgccgagcagatcgatggccagcgtaaagactttatccgtctcggcgtgctgggcgactggtcgcatccgtacctgaccatggacttcaaaaccgaagccaacatcatccgcgcgctgggcaaaatcatcggtaatggccacctgcataaaggcgccaaaccggtgcactggtgcgtagactgccgttccgcgctggcggaagcggaagtggagtattacgacaaaacctctccgtctatcgatgtcgcgttccacgcggtagacaaagccgcggtactggcgaaattcggcgtagccgacgtcaacggtccggtgtcgctggttatctggaccaccacgccgtggaccctgccggccaaccgcgctatctctctgtctcctgagttcgactatgcgctggtgcaggttgacggccaggcgctgatcctggcgaaagacctggttgagagcgtaatgaagcgcgttggcgcgacggactacactattctggcggcggtacaaggttctgagcttgagctgatgcgctttaagcatccgttcctcgatttcgacgtgccggcgatccttggcgaccacgtgacgctggatgccggtaccggtgcggtgcataccgctggcggccacggtccggacgactacaccatcagccagaaatacggtctggaaatcgccaacccggttggcccggacggcgcttacctgcctggcacctggccgtccctggacggcattaatgttttcaaagccaatgacatcatcgttgagatgctgcgtgagcgtggcgcgctgttacacgttgagaaactgcagcacagctatccatgctgctggcgccacaaatcgccgatcatcttccgcgccactccgcagtggttcgtgagcatggatcagaaaggcctgcgcgcgcagtcgctgaaagagatcaaaggcgtgcagtggatcccggactggggccaggcgcgtatcgaatcgatggtcgctaaccgccctgactggtgtatctcccgtcagcgcacctggggcgtgccgatgtcgctgttcgtgcataaagaaacccatgaactgcacccgcgtacccttgagctgatggaagaagtggcaaaacgcgttgaagttgacggcatccaggcgtggtgggatctcgattcccgcgacattcttggcgatgacgccgacagctacgagaaagtgccggataccctcgacgtctggtttgactccgggtcgacccactcttccgtggttgacgtgcgtccggaattcgccggtcacgccgccgatatgtatctggaaggttctgaccagcatcgcggctggttcatgtcctcgctgatgatttccacggcgatgaaaggcaaagcgccatatcgtcaggtactgacccacggcttcaccgtcgacggtcagggccgcaaaatgtccaagtctatcggcaacaccgttagcccgcaggacgtgatgaacaagctcggcgccgatatcctgcgcctgtgggtggcttccaccgactacaccggcgaaatggcggtctctgacgagatcctcaaacgcgctgcggacagctatcgtcgtatccgtaataccgcgcgcttcctgctggcgaaccttaacggtttcgatccggcgaaagacatggttaaaccggaagagatggtggtgctggaccgctgggcggtcggctgcgcgcaggcggcacaggaagatatcctgaaagcctacgaatcctacgacttccatgaagtggtgcagcgcctgatgcgcttctgctccatcgagatgggctcgttctacctcgacatcatcaaagaccgccagtacaccgccaaggcggacagcgtggcgcgtcgcagctgccagaccgcgctgttccatatcgtggaagcgctggtgcgctggatggcgccgatcatgtccttcaccgcagatgaaatctggggctatctgccgggcgagcgtgagaaatatgtcttcaccggcgagtggtatgaaggtctgttcggcctggccgacgacgaagcgatgaacgacgatttctgggacgagctgctgaaggtgcgtggcgaagtcaacaaggtgatcgagcaggcgcgtgcggataagaaagtcggcggctcgctggaagcggcagtcacgctgtatgctgatgccgatctggcggctaagctcaatgcgctgggcgatgaattgcgatttgtcctgttgacctccggggcgaacgtcgcagactatgcgagcgcgtccgctgatgcgcagcaaagcgaactgctcaaagggttgaaagtcgcattgagtaaagctgaaggtgagaaatgcccgcgctgctggcattacaccaccgatatcggcaaggtggcggaacacgcggaaatctgcggacgctgtgtgagcaacgtcgccggtgacggcgagcaacgtaaattcgcctga

SEQ ID NO: 252400 - DNA, 939 bp, Klebsiella pneumoniae; identical to SEQ ID NO: 210169

SEQ ID NO: 252401 - DNA, 1107 bp, Klebsiella pneumoniae; identical to SEQ ID NO: 215086

SEQ ID NO: 252402 - DNA, 312 bp, Klebsiella pneumoniae; identical to SEQ ID NO: 215087

SEQ ID NO: 252403 - DNA, 471 bp, Klebsiella pneumoniae; identical to SEQ ID NO: 252383

SEQ ID NO: 252404 - DNA, 681 bp, Klebsiella pneumoniae
atgagcgctaaattttcaccgtcactgatgtgcatggatttaacgcagttcaaagagcagatcacggcaatgaataaaaaagcggatttttaccatgttgatataatggatggcaattacgtccgcaatatcacactgtctcccttttttattgagaatctgaaaaaaattactactgtgcccattgatgttcatctgatggtgaatcatccggaagatttcattcccatgtgtctcgaggccggcgccgatatcatcagctttcatcccgagacggcgaataacaaaatattccgcctgctgaatcagatcaaggatgcgggcaaaaagtgcggggtggtgctgaacccggcgacaccggcagaaagcattgccgaatatgcgcatctgctggataaagtgacggtcatgtcggttgaccctggctatgccggacaaaagtttattcctgagtcgctgaacaagattagaaagctcatcaacatgcgcaaaaataatggctatcactatctgacggaaattgatggctcttgcaatgagaaaaccttcggtcagattgctgaatccggggtagatgtctttatcgtcggcacatcgggtctgttttcgctccatgaggatgtcagccaggcgtgggacagaatgatcgagatcttccagcgggaaactgtcgctgcataa

SEQ ID NO: 252405 - DNA, 1263 bp, Klebsiella pneumoniae
atgcttcattttcttatttatgatgtgctaggaacaccggcgatactggttggtttattttcactgatcggtctgctgttgcaaaaaaaaggaatttcagacgttatttcaggcacactgaaaaccatcatgggttttgtcatattgaccgccggcgccggtattatagcctatacgttaaccatctttagccagttatttgagcattctttccatattcagggcgtggtgcccaacactgatgccatggccgctctggcgcagaagaattacggcacggaaaccgccaccattatggtattgggcatgctgatcaatatcgccctggcgcgtctaacgccattaaagtacatctttctgaccggacatcatacgctttatatggctgcgatgctggcggttatcctgtctgtaggaggcttgtcagggggatgggtggtggccatcggggcggttattctcggtgcgatgatggtcatctccccggctatcttgcagccgtttacccgtaaaataaccaacaccgacgatctggcgctcgggcattttggatctattggctacctgctgtccgcgctggtgggcaaaattattggtaaaggtagtccctcgattgaagagatcaaagtacctaagtcgctcaatttccttcgcgactcatcagtggccatctctctcaccatgatgattctgtttctggtgctggtgctcgttgcgggaaaatcctttgtcgaggagaccctgagcgctggtcagaactttattatcttcgccattattcagtccctcacgtttgctgcaggagtttatatcatcctcgccggggttcggatggtgattgccgagatcgtcccggcgtttaaagggattgcagacaaactggttaaagacgcgaagccggcgctggactgtccgacggtgtttcccttcgctccgaatgccgtcatcgtcggcttcctcgcaagctttgtcgcagggctggtcagtatgttcctctgcccgctgttcggcttgagcgtcatcgtcccgggcctggttccccactttttctgcggggccacggcgggggtttacggcaacattaccggcggacgtcgcggggcggtggtaggggcttttgctcacggtctgctcatttcgttcctgcctgccattctcttgcccatgatgggggatatgggactgggctccacaacctttggagacgcagactttggcgttgtcggcatcgtgctgggtcatatcatcgcaatgtttaactaa

SEQ ID NO: 252406 - DNA, 267 bp, Klebsiella pneumoniae
atgaaaaaagtgcttatcgtgtgcggtaatggtttaggcagcagcttcatcgttgaaatgaatgtcaaaaagatccttgccgaaatgaataaagaagctgaagtcgcacataccgatctgacgtcggcaaaaagcgaaactgccgatcttattctcagcgccaaagacattgcagaacatcttagcagtcactctgcaaaggtcattggattaagtaatttacttgataacaataaaattaaagaaattttagcagaaaacatttaa

SEQ ID NO: 252407 - DNA, 438 bp, Klebsiella pneumoniae
atgatcagagactggttaaccccggataaaattaaagtcattaactcaatagatagctgggaaaatgccgttcgacttgcagcagaacccttgctgatgcaagggtatatagccgggtcgtatattgaggcgattttgcaaagccataaagaacttgggccctattacgtattagctcccggcttggcgatgcctcatgcccgtcctgaacagggggtgttaagaaatggattatcgctacttcatattaaagaaggggtgtcgttcggctcgtcagagaacgatccggtatacgtggtaatcatactatgcgctcgttccggaaatgaacatatcacgatgattggtgaactggctgaaatctttagcgatcagcaaaagttacaccgattattaaatgccgatgatagcaaggcgattcaggccgttattgactga

SEQ ID NO: 252408 - DNA, 1059 bp, Klebsiella pneumoniae
gtgattttggtgaagagtttagacgcggacggtagcccgaaagaaaaacgacgtaaaggaacgggtaagataaccctgaccgaggtggctgagtttgtcggtgtgagcgccatgaccgtctcgcgagcgctgagaatgcctgaaaaagtgaatcctgagcttcgcgatcgcatcgatgcggccgtcagtcaactcggctatgtccctaatctgcaggcacgtaatctggcgtcggtccattccgatcttattctcgccgtcgttcccaccttctcttcgccgggttttttgccggtctctgaagcgctgcaaaaagtgctgaccgaacgcggatataccatgatgtttatggaatccgggcatgacggtcaaagtgaacaaaagacgtttgaaaaaatgctcgcctataacccggcggccattattcagttcaatatcgataccattgagagctgcacccagttgctggccaacgtggatgttcctattctggaaattggcgcgctaaatacccaccctgtgggtatgtgcatcggcgtggattacggtaaggccgtaaagcagatcgtgactcatctggccgacgcctcattaaaaaacatcgcactgctctgtaccccggctaataacacaatgtttcgccagttgctgagcggttggaatacggcgatgctcgctctgaaccgctccccgcaccgggtggtaaccacgcatttgccatccaccatcgccacaggcgtcaatatattcaaggatatgatgattacctggggcgatctggatgcgttaatttgcacgtcggatgaaatggcctgtggatgtatgatggcctgccacagtgccggcatcaaggtgcccaataccgtagccattgcgagtttaggcggaggagtgttatcgacagtctgttcccctgccctgacaaccgttgagtttccctggcatgacattggggtgaaagccggtaaagcccttctcgaactgcttaacgataagcctggtgaaaagttcattgaaattccgtcagtgctcaaagtccgggccagtaccgcggcatga

SEQ ID NO: 252409 - DNA, 1299 bp, Klebsiella pneumoniae
atgcgtttcacggaagcctgcttactgaaaacggagaacaacatgacgacactcagtgaaccgttggttaccccgaaatatggcaaatggcgccagctggtgctgggtttgatctgtatggccgccatttccagtccgcaatatgtctggacgctgttgacaaaacccctggccgctaaactgggcgtgggtttgccagaattgcaggtgaccttctccctgctgatcatcctgcagaccttcttttccccttttcaggggcggttagtggaaaaatttggcccacggcggctgatcgctattggcacggtgatggcgggaatgagctgggtgctttccgcgcaggtgaatggcctggcaacgctctggctggtttatggctgcatgggcggcctcgggaccgggatcgtctacatcggcgttgtcggcctgatggtcaaatggttcccacagcagcggggatttgccgccggcgcggtggcggcgggctacgggatgggggccatcataaccaccttccccatctccctgtcgctgaccactaacggccttgaacacacgatggcgactttcgggatccttttcgccctcgtcggcttcctcgccagtcaggggctgaagctgccgccgcccgctgtctcccagcccgtcagtcagacggtggcgcagagcagcagatcgtttacttcccgggaaatgctgcgccagccgctgttctggctgatgttcgccatgatggcgatgatgtcgacttccgggctgatggtcacttcgcagatggcggtgttcgccgaggatttcggcattagccaggcggtggtgtttggcatggcggcgctgccgttggcgttaacgatagaccgctttaccaacggcttaacccggccgctgtttgggtttatttccgaccgcttcggccgcgagcaaaccatgtttatcgcctttgcgctggagggggtggcgatgatgctctggctggcgtgccgggaagatccgctgctgtttgtcctgctctccggggtggttttctttggctggggggagatcttctcgctcttcccgtcgacgctcaccgatacgttcggcagcgaacatgccgccagcaactatggctggctgtatatttcgcagggcatcgggtcaatctttggcggtccgctggcggcactgctctatcagtacactcacggctggcatgtggtcttcagctgcgcgattggccttgattttgtcaccgccgccctcgcgctgtgggtgctaaaaccgtggcgcgcgcgctttatccgccagcatagctaa

SEQ ID NO: 252410 - DNA, 534 bp, Klebsiella pneumoniae
atgttacccctgaccacgccccggctgctgctgcgccggttcagaacggaagatctgccgtctttcagccattatcgcaatctgccggaggtggcccgctttcagagctggacccactacggcatgacagaggcgacagccttctatgaacaacagcgttcgctgggctttgctgaggatgagagttggttccagcttgccgtagagatccaggccaacggtgcgctggcgggagatgtggggatccactttttcgatcaaggcagacaggctgaactggggatgaccttttccccgacgtatcagcatcaggggtatgcccgggaagccatgcgggcggtgatggccttactctttgaacagttagcccaccaccggctgacagcggtggtagacacccgcaataccggcgcgatcaaactcctggaagggctgggctttcgtcgcgaggcgcattaccggcagaatatcttttttaaaggcgagtggggcgatgagtacctgtacgcgctgttgcgtagcgaatatcagtga

SEQ ID NO: 252411 - DNA, 1269 bp, Klebsiella pneumoniae
atggaacctattaccatcaccctatgtttgctggtgttcgctatcatcatgtttgtctgggagaaagtgccactggcagtgacttccatggtggtttgtgtggcgttagtgctcaccggtgtattggatctcaagcaggcgtttgccggttttatcgacagcaacgtcattctttttgtcgccatgttcatcgttggcggggcgttatttgaaaccgggatggcaaacaaagtcggtggcgtgatcacccacttcgccaaaacggagaagcagctgatcttcatcattatggtggtggttggcgtaatgtccggttttctctccaataccggtacggcagccgttttgatcccggtcgttatcggtgtagccgccaaatcgggattcacccgttcgcgtctgctgatgccgctggtgtttgctgccgcgcttggcggcaacctgtcgctgattggcgcccccggtaatttgatcgcgcaatcggccttgcagaatatcggcagcggcttcggtttctttgagtatgcgaaagtgggcctgccgatgctggtctgcggcatcctctatttcctaaccatcggctataagtttctgcctaataactcgaacagtagtgaggtgggcagcattggcgaacagcgggattacagccacgttccgcgctggaagcagatcctgtccctggtggtgctgatcgccacgatcctcggcatgattttcgaaaaacagaccggtattagtctgacggtagccggctgcattggtgccctggtgctggtcatcaccggcgtgttgacggaaaaacaggcttataaagccattgattcgcaaactatttttatcttcggcggcaccctggcgctggctaaagcgctggaaatgaccggtgcgggtaagctggttgccgatcaggttatcggcctgctgggtaataactcctcaccgtttatgctgctggtagtggtctttgccctctccgtggtgatgaccaactttatgtccaataccgccaccgtcgcgttgctggtgccggtgagtttgtcgattgccgccggtatgggcgccgatccgcgtgcggtactgatggcgacggtaatcggtagctcctgcgcctatgcgacgccgatcggtatgcctgccaacatgatggtgctgtcggccgggggctataagttcgtcgattacgccaaatccggcattcctctaattatcgtttctaccattgtcagcctgatcctgctgccaatccttttcccttttcatccgtaa

SEQ ID NO: 252412 - DNA, 894 bp, Klebsiella pneumoniae
atgaaatatacggcattgatagtgacattcaatcgtctcggcaaactgaaaaaaacggttgaagagaccctcaaacttgaattcactaatattgttattgtcaataacgggtccacggatgggacccaagcctggctttcgtcaattgttgatacacgagtcattgtattaaccctcaccgagaataccggtggggcggggggctttaaaaccggtagtcagtatatctgtgaacagctggcaagtgattgggtatttttctacgatgacgatgcttacccctatccagacacgttgaagtccttttcacagctggataagcagggttgtcgggtatttagtggactggtgaaagatccgcaaggaaaaccgtgtccgatgaatatgccgttctcgcgtgtgccaacttcacttggcgacactgtacgctatttacgctaccctggagagtttatcccggcagctaatcgttctatgttcgtacaaacggtttcatttgttgggatggtcatacatcgtgatctgctcacgaccagccttgaccacatccatgaacagctttttatctactttgatgatctttactttggctatcagctatcattagctggtgagcaaattatgtatagcccggagttgcttttttatcatgatgtgagtattcagggcaaacttattgcacctgaatggaaggtttactatctatgccgtaatttgatcctgtcgaagaaaatattccagaaaaatggcgtgtatagcaattcagcgatagcgatacgcatcctaaaatatatattaatcctgccatggcaacgtcaaaaatattcctatatgaaatttattcttcgtggaatttcacatggcataaaaggtattagtggtaagtatcattaa

SEQ ID NO: 252413 - DNA, 741 bp, Klebsiella pneumoniae
atgcacccagttattaacttcagtcatgttacaaaagagtatcctctgtaccatcatattggctcaggaatcaaagatttaattttccatccaaaacgcgcttttcagttgctgaaggggcggaaatatttagctatcgaagacgtatcctttacagttggcaaaggtgaggctgttgccctgattggacgtaatggggcaggaaagagtacctcgcttggcctggttgccggcgtgattaagccaactaagggaaccgtcaccactgaaggacgggtggcatcgatgcttgaactcggcggaggctttcatcctgaacttaccgggcgtgagaatatttacctgaatgctactctgctgggccttcggcgtaaagaggtccagcaacgtatggaacgtattattgaattttcggaactgggagaattcatagacgagccaatcagagtgtactcaagcggaatgctagctaagttaggtttttcggtcatcagtcaggttgaaccggatattttaattattgatgaagttctggcagtaggtgatatcgcttttcaggcaaaatgtattcagaccatcagagattttaagaaaagaggcgtgacaatattgtttgttagccacaatatgagtgacgttgaaaaaatctgcgacagagtcatctggatcgaaaatcataggctcagagaagtgggttctgcagagcgaatcattgaactgtacaagcaagcaatggcttaa

SEQ ID NO: 252414 - DNA, 768 bp, Klebsiella pneumoniae
atgaagtacaatttagggtatttatttgatttacttgttgtgataacaaataaagatctaaaagtgcgctataagagcagcatgctaggctatttatggtcagtagcaaatccattgctttttgccatgatttattattttatatttaagctggtaatgagagtacaaattccaaattatacagttttcctcattaccggcttgtttccgtggcaatggtttgccagttcggccactaactcattattttcattcatcgctaacgctcaaattatcaagaagacagtttttccccggtccgtgattccgctaagtaatgtgatgatggaaggcttgcattttctttgcaccatcccggttattgttgtctttctttttgtttatggcatgacgccgtccttgtcctgggtttggggtatacctctcattgctattggccaggtgattttcacctttggtgtttcaatcatcttttcaacgctgaacctgtttttccgtgacctggagcgctttgtcagtctggggattatgctgatgttttattgtacgccgattttatatgcgtctgatatgattccggaaaaatttagctggataattacctacaatccgctagcgagtatgattcttagttggcgtgatttattcatgaatgggactcttaattatgagtatatttctatactctattttacgggaatcattttgacggttgtcggtttgtctattttcaataaattaaaatatcgatttgcagagatcttgtaa

SEQ ID NO: 252415 - DNA, 447 bp, Klebsiella pneumoniae
gtgtttcaccttggtatgacggcagccttccagaatgttcagataccccatcaggttagcgtctgcgtaggcatacgggttttccagcgagtagcgcacgccggcctgggcggccaggtggatcacgcggtcaaattgctctgtggcgaacagctttgccataccttcacggtcggccagatccagctgctggaaatgaaatgccggagatgccagtcgatccagacgggcctgcttcaggctgacgtcataatagtcgttcatgttgtcgattccgacaacatcatgcccttcattcagcaggcgctgcgcgatatggaagccgataaaacctgcggcaccagtgaccaaaaacttcatatttttcctccggggtgtggatatcccgttctacataagtgccgattttacactggcttgcggttgggatcacttggtttaccatga

SEQ ID NO: 252416 - DNA, 1944 bp, Klebsiella pneumoniae
atggatatgcaaaaagaaacgcttttttcagaagtagaaacagctaacagcaagcagcttgctgtgttaaaggcttacttcccacagtgttttgataaaaacggggcgttcattcaagagaagctacttgagatcgtcaaatcctcggatgttgaactctcgaaagaatcatacagcttaaactggctgggtaagtcttatgcccggctgttggctaacctaccaccgaagacgttgctcaccgaagataaagaccataaccaacgtgaagagaacaagaacagccagaatctgttgatcaaaggggataacctcgaagtattgaagcatatggttaatgcttatgctgaaaaggtgaagatgatttatattgatccgccatataacactggttctgatggattcgcctataacgatgaacgcaagtttacacctgaacagctttcggaactggcaggtatcgatcttgatgaagctacacgtatactcgattttactgtaaaaggttcaagtagtcatagcgcatggctaacgttcatttatcctcgtctttatattgctcgtgaacttttacgtgaagatggtgttatatttatttcaattgatgataacgaacaatcacaattaaaagttttatgtgatgagatatttggtgaaatgaacttcatttcaaatattgctaacataaataatccgaaagggcgctcagatgacaagtacattgctcgctctcatgaatatatcttgtgctataaaaaagaaaacgttaattttttagggtgggagccagaagaaaacgtaacaaaacgatataataacacggatggtgaaaataaatttagatatattgatttaagaaaaactggaagcaatgataggagagatgatcggccaaatttattctattattttatgtataatgagacaacaaaggatttttacccaacatataaagaagaagaaaaggatgggtatattttaataaaaccaacacgtgaggatggatctgatggaaactggcgatggagtttagattcagcaagagaaaaacgtcatttactagagccgcgttatatgtctgtccgttcaaaatggactatagctgttaaagattatttaacagaagataaaagagtaaaaccaacaagttcgtggacgcataaatttgcaaatagcgagagaggaactgaagacttagtcactctaggctttaataaagaggtatttcctaatccaaaacccattggattgataaatgccattctaacaatgattgtaaataacaatgatctagtattagattttttcgcaggctctggttcaactgcacatgcagtattagagcataatctaataactggaaaaatgatcaattatatttcagttcaattagatgaagaatgtgatgttggaagtgaggcatataaatctggatataagaatatatttgaaattacaaaatcacggataaaaaaagcctctaagagcattttgattaaaaatcctgattatagaggggatataggttttaaaatatttgaaacagtcaatgattttcgtacaaaagatgagtcagagcttacgttatcgaaccatactttctttgatgatgttgtgctgactcctgaacagtatgacacactgttgactacatggtgcgtgtatgatggtagtttgttaacaacaccaattgaagatgtagatcttgatggctacaaagcgcacttgtgcgatggtcgtctgtatctgattgcgcctaattttaccagtgcagcactgaaagctttacttcaaaagctggattcagacaaagactttgcccctaacaaagtcgtgttttatggcagcaacttcgagagtgcgaaacagatggaacttaatgaagcactgaaaagttatgccaataaaaaatcaattgatatggatttggtggtgaggaactaa

SEQ ID NO: 252417 - DNA, 333 bp, Klebsiella pneumoniae
gtggttgccgatacgcggatccaggcataccccttcgataatctgtttgctgttcagcccctggctttcagcatagctgtcgagctcgttgaaataggcaacgcgcagcgccagataggtgttagcgaacagtttgatcgcttccgcttcggtggagtcggtaaacagggttgggatatcctgcttgatcgcgccttctttcagcagatcagcaaaacgttcggcacgcgcagagcgctcaccgatgacaatacgcgacgggtgcaggttgtcgtacagtgcacgtccttcacgcaggaactcaggagagaaaataacattatcaatccctaa

SEQ ID NO: 252418 - DNA, 1371 bp, Klebsiella pneumoniae
atgacacagttaacatgctttaaggcttatgacatccgtggtgaactgggcgaggagctgaacgaggacatcgcctaccgtatcggccgcgcctatggcgaatttctgaaacccgggaagatagtggtggggggcgatgtgcgcctcaccagcgagtcgctgaagctggcgctggcccgcgggctgatggacgccggcaccgacgtgctggatatcggcctgagcggcacggaagagatttacttcgccactttccacctcggggtggatggcggtatcgaggtgacggcgagccataacccgatgaactacaacggcatgaagctggtgcgcgagaacgcgaagcccatcagcggcgacaccggcctgcgggatatccagcgcctggcggaggagaaccagttcccgccggtggacccggcgcgtcgcgggaccctgcgccagatttcggtgctgaaggagtacgtcgaccacctgatgggctacgtggacctggcgaactttacccgtccgctgaagctggtggtgaactccggcaacggggcggcggggcacgtgattgatgaagtggagaaacgcttcgcggcggccggggcgccggtgacctttatcaaggtgcatcaccagccggacggccatttcccgaacggtatcccgaacccgctgctgccggagtgccgccaggacaccgccgacgcggtgcgtgtgcatcaggcggacatggggatcgcctttgacggcgacttcgaccgctgtttcctgttcgatgacgaggcgtcgtttatcgaggggtactacattgtcggcctgctggcggaggcgttcctgcagaaacagccgggggcgaaaatcattcacgacccgcgtctgacgtggaacacggtggacatcgtgacccgcagcggcggccagccggtgatgtcgaagacggggcatgcgttcatcaaggagcggatgcgccaggaagacgccatctacggcggggagatgagcgcgcaccattacttccgcgacttcgcctactgcgacagcgggatgatcccgtggctgctggtggcggagcttctgtgcctgaagaacagttcgctgaaatcgctggtggcggaccgccaggcggcgttcccggcgtcgggggagatcaaccgcaagctgggaaatgcggcggaggcgatagcgcgcatccgggcgcagtatgagccggcggccgcacacatcgacacaacggacggtatcagtattgaataccctgagtggcgctttaacctgcgcacgtccaacacggagccggtggtgcgtctgaacgttgagtccagagcggatactgcgttaatgaacgccaaaactgaagagattttagctcttctcaagtaa

SEQ ID NO: 252419 - DNA, 1191 bp, Klebsiella pneumoniae
atggtgaaggccggggctggcaccgacagcgccattgattccctgaagccttaccttgataaaggcgacatcatcattgatggcggcaacaccttcttccaggacaccatccgtcgtaaccgtgaactctctgccgaaggttttaactttatcggtaccggtgtttccggcggcgaagagggcgctctgaaagggccttccatcatgcctggtggccagaaagaagcctatgaactggtagcaccaattctgaagcagattgcggcggtggctgaagacggcgagccgtgtgtgacctatatcggtgctgacggtgcgggccattatgtgaagatggtgcataacggcattgagtatggtgacatgcagctgattgccgaagcctatgcgctgctgaaaggcggtctggcgctctctaacgaagagctggcgcaaacctttaccgaatggaacgaaggtgaactgagcagctacctgatcgacattaccaaagatatcttcaccaagaaggatgaagagggtaaatacctcgttgatgttattcttgatgaagcggcaaacaaaggtaccggcaagtggaccagccagagctcactggatctcggcgaacctctttctctgatcacggagtccgtatttgctcgttacatctcttcgcttaaagaccagcgtgtcgccgcgtcgaaagtgctgagtggtccgcaggctcaaccggtcggtgataaagcggaatttatcgaaaaagttcgtcgcgcgttgtacctcggtaaaatcgtttcctatgctcagggcttctcccagctgcgtgctgcttctgatgaatacaactgggatctgaactacggcgagatcgctaagattttccgcgcgggctgtatcattcgtgcgcagttcctgcagaagatcaccgatgcttatgcgcaaaacgctggcattgctaacctcctgctggcaccgtacttcaaacagatcgctgatgactatcagcaggcgctgcgtgatgtcgtggcgtatgccgtacagaatggtattccggtaccgacgttctcagcggcaattgcctactacgacagctaccgttccgcagttctgccagctaacctgatccaggctcagcgcgattattttggtgcgcacacctataagcgtactgataaagaaggtgtattccataccgagtggttggaataa

SEQ ID NO: 252420 - DNA, 1440 bp, Klebsiella pneumoniae
atgataaaaattgcgcgcattgccgtgacgctggggttgctttcctctctgggagcccagacttacgcggctgggttagtggtaaatgataacgatttgcgaaatgatcttgcctggctttccgaccgtggggtcattcatctgagcctttcgacgtggccgctgagccaggaagagatcgcccgggcgctgaaaaaggccaaaccgtcctattcttctgagcaagtggtgctggcccgtattaaccagcgactgtctgccttaaaagctgatttccgggtcaccggttacacctcaaccgaccagccgggcactccgcaggggtttggccagacgcagccggcagataactcgttaggtctggcattcaacaacagtggcgagtggtgggacgtacacctccagggcaacgttgaagggggagagcggatcagcaacggatcgcgcttcaacgccaatggcgcctacggtgcagtgaagttctggaaccagtggctctcatttggccagataccgcagtggtgggggcctggttatgaaggcagcctgatccgcggggatgcaatgcgcccgatgaccggttttttaatgcagcgtgccgagcaggcggcgccggaaacctggtggttgcgctgggtgggtccatggcagtaccaaatctctgccagccagatgaatcaatatactgcggtgccccatgccaaaattatcggcggacgattcacctttacaccgtttcagtcattagaattaggtgcatcgcgcattatgcagtggggcggggaagggcgccctgaatcattcagcaacttttgggatggattaaccggtaaagacaataccgccgcaaacgatcccaatgagccgggtaaccaactggcaggctttgattttaagttcaagcttgaaccgactttaggttggcctgtgagcttttacggacaaatgatcggcgaggatgagtctggtttcctgccttcagcaaatatgttcctcggaggggttgaggggcaccatggctggggtaaggatgcggtaaactggtatctggaagcgcatgatacgcgcagcaatatgagtcgaaccaattacagctatacccaccacatctataaagatggttattaccaacaagggtatccactgggcgatgcgatgggcggagatggtcaactcattgccggtaaggttgagctcattaccgaagataaccagcgctggagtacgcgcctcgtttacgccaaagttaacccggagaatcagtcgatcaacaaagcgttccctcatgcggatactctgaaaggtgtacagctgggctggagcggagatgtgtatcagtctgttcgtctgaatacttcattgtggtacaccaacgctaacaacagcgacagcgatgacgttggtgccagcgcagggatagaaataccgtttagtttataa

SEQ ID NO: 252421 - DNA, 1137 bp, Klebsiella pneumoniae
atgaagaaaaaacttgttagattttcggcattagcgttggcgattgggtttttatcgggttgtacaatcatccctggtcagggattaaacagtctgcgtaagaacgtagttgagcttccagatagtgattatgatttggataaattggttaatgtttaccccatgacgccggggcttatcgatcagcttcgcccggaaaccgttcttgctcgccccaatccgcagctggataatttacttcgtagttatgaatatcgcattggtgtgggtgacgtactgatggttactgtatgggatcatccggaattgactactcctgcgggtcaatatcgtagcgccagcgacaccggtaactgggttaattcagatggtacaattttctatccatacattggaaagcttcaggttgcgggtaaaacattaagtcaggtacggcaagatatcgccagtcgattgaccacttatattgaaagtccgcaggttgatgtaagcgttgcagcgtttcgatcgcaaaaagcctatgtaacaggcgaagtagttaaatccggtcagcagccaataacgaacattccactaactgtaatggatgcgataaatgctgcaggaggacttgcacctgatgccgactggcgtaatgttgtattaacccatgatggtaaggatacaaaagtatcgttatacgctttaatgcaaaaaggcgatttgtctcaaaatcatcttttatattctggagatattctgtttgttcctcgtaatgacgatcttaaagtgttcgttatgggtgaggtaggaaaacaaagcaccatgaaaatggatcgcagcgggatgaccttagctgaggcgattagcaatgcagaaggtatgtctcaagcatttagtgacgctacaggagtgtttgtaattcgccagctgaaagatgataagaatgggaagattgcgaacgtttatcaactaaatgctcaagatgcatccgccatggttttaggaactgaatttcagttacaaccatatgatatcgtgtatgtaacgtctgcaccaattgtgagatggaatagagttatatctcaattggtaccaacaatcactggggtacatgatatgactgaaactgcaaaatttataagaacttggaattga

SEQ ID NO: 252422 - DNA, 735 bp, Klebsiella pneumoniae; identical to SEQ ID NO: 252390

SEQ ID NO: 252423 - DNA, 1917 bp, Klebsiella pneumoniae
atgggtaaaattattggtatcgacctgggtactaccaactcttgtgtagcgattatggatggcactactgcacgcgtgctggagaacgccgaaggcgatcgcaccacgccttctatcattgcctatacccaggatggtgaaactctggttggtcagccggctaaacgtcaggcagtgacaaacccgcaaaacaccctgtttgcgattaaacgcctgattggccgccgcttccaggacgaagaagttcagcgtgacgtttctatcatgccatacaaaattgttgccgcagacaatggcgacgcatggctggatgtgaaaggcaccaaaactgcaccgccgcagatctctgctgaagtgctgaagaaaatgaagaaaacggctgaagattacctgggtgaaccggtaactgaagcggttatcaccgtaccggcttactttaacgatgcgcagcgtcaggcaaccaaagatgccggccgtatcgccggtctggaagttaaacgtatcatcaacgaaccaaccgcggccgcgctggcttacggtctggataaagaagtgggcaaccgtactatcgcggtttacgacctcggtggtggtactttcgatatctcgattatcgaaatcgacgaagttgatggcgaaaaaacctttgaagttctggcgaccaacggtgatacccacctgggcggcgaagacttcgatactcgtctgatcaactacctcgttgatgagttcaagaaagatcagggcattgacctgcgcaacgacccgctggccatgcagcgcctgaaagaagccgctgagaaagcgaagattgaactgtcttctgctcagcagaccgacgttaacctgccgtacatcactgcagacgcgaccggtccgaaacacatgaacatcaaagtgactcgcgcgaaactggaaagcctggtagaagacctggttaaccgttccatcgagccgctgaaagtcgctctgcaggatgccggtctgtccgtttccgatatcaacgacgtgatcctcgttggtggtcagactcgtatgccgatggtgcagaagaaagtggccgagttctttggtaaagaaccgcgtaaagacgttaacccggatgaagccgtggcgatcggtgctgccgttcagggcggtgtactgactggcgatgtgaaagacgttctgctgctcgacgtaaccccgctgtcgctgggtatcgaaaccatgggcggcgtgatgactgcgcttatcagcaaaaacaccaccatcccgaccaagcacagccaggtgttctctaccgctgaagacaaccagtctgcggtaaccatccatgtgctgcagggtgagcgtaaacgcgcgtctgataacaaatctctgggtcagttcaacctggatggtattaacccggcgccgcgcggcatgccgcagatcgaagtgaccttcgacatcgatgctgacggtatcctgcacgtctccgcgaaagacaaaaacagcggtaaagagcagaagatcaccatcaaagcgtcttccggtctgaatgaagaagaaattcagaaaatggttcgcgaagcagaagctaacgccgaatctgaccgtaagttcgaagagctggtacagacccgcaaccagggcgaccatctgctgcacagcactcgtaagcaggttgaagaagcaggcgataaactgccggctgacgacaaaactgccattgagtctgcgctgaccgcgctggaatcttctctgaaaggcgaagacaaagcggatatcgaagcgaaaatgcaggcgctggcgcaggcttctcagaagctgatggaaatcgctcagcagcagcacgctcagcagcaggcgggttccgctgacgctcaggcgagcaacgcgaaagacgacgatgttgtcgacgctgagttcgaagaagtgaaagataaaaaataa

SEQ ID NO: 252424 - DNA, 405 bp, Klebsiella pneumoniae; identical to SEQ ID NO: 138494

SEQ ID NO: 252425 - DNA, 750 bp, Klebsiella pneumoniae
atgcatattaattacctggaggatgacgatctcgcctttctgcctgagtgcagcgaggcgcatctggaagcctttacccgcattctgacccacggggaaaatggcaaaccccgtctctccagcacgctcctgcgcaacgagacatttttagcgatggaggggcacccggagcgttatcgccgcaactggcagctaatcgccggtgagctacagcattttggcggcgatagcatcgccaacacgctacgccgccatggcaaattttatcgcgcgatcctgctggatgtatgtaaacgactgaaagcgaaggtcgacaaacagctgtcgacgccgcagatcgagcagcagttgctggcgcattttctgcagcacagctggaataaactgaacgcggagcaaaaagcgcagtttctcgccgcggtggagtgccggagccatgagctggacagcctgatggctcatctgctgaggcatcgcaagctaagcgaaggcgtcactttgttgctggacgaacgcttaaccgccatcctgcgcacgcacgccgcggtgagcgtcatcggtcatggcctggtgcgcggcgccgggctgggcggaccgctcggcgccgcgctgaacagcgtgaaagcggtgagcggcagcgcctaccgggtcaccatccccgcggtcctgcatatcgcctgtttacggcaaatgctccagccgccgtcagacaccgcggaaattggtgaaaaataccccgccagatcatag

SEQ ID NO: 252426 - DNA, 480 bp, Klebsiella pneumoniae
atgccgcgacagaagcgcgccacctggtcgcaaagccggtgctgctctatcggctcacctttcgacaccagcctgcccgccgccgcgctgagcaggccaaaagcgaagatcgccccgcgatgggtattcaccccgccggtggcctccagcatatcgttctcacaggccatccctaccgggcgcagcatcatcaatacctgctccggcgcgaccgccgcagtatcgtggcccatgatgaaaaatttctccatccacggagccaccaccgcggtgctggcctcaaacgaggccagatccatatcccagtgcgcgccagcgttacgaatatccaccaacccgggctttggggtcaggcgaacttcggtcaacagcgcgcgctctaccgcgctgaccacctcttcggcactcagtggcttcacgcgccgcacacgcgcaggattaattaacacgtcgctcatggcctttcccctctgcgtttag

SEQ ID NO: 252427 - DNA, 1833 bp, Klebsiella pneumoniae
atgaagttatcagaaagagatggtaaagcaatcattgataaatatattaatgacgaattaaaatataaaaactatctcaagttgaaagaagcgtatgaaaatgacccttctaaaaaccctatgccaaaatctgtagttcagcctcctgttgagccaaaaccttttatcttcactaatgcgttaagagaaagaaaagccacggcaagaactaacgatactgaagcttatcaggttatctatgatttatccggtgttccagacgagatccgtgttgactactggagaaccatcgttaaagctcatgctaacccaaactatgttatagaatccactcagagcaacggagataacacagttcgcggtttccgtggtaaacgtccagtaatcgcaaacaacatccacgtagcacaggatgcttctgttcacggtcagctctatgagttcgtgtatgacgtttcagacgctaaatatgtgctttgtgatgatgctaaacgtgaagagcttaaaaagcttggtagagaagaccagataacttacttcccaaatgacgaaagggctttcgttcctgagcatggcggcgtgttcccgtttgctaaatggatgaacagcagaacagatctcaagtctgatacttaccgtgaaatagttttaaaacacgtaaaccgtgaattagaaaaagcgggttatggtgattatccggttcactcttttgttagtcgtgtccagaagtttaaggacgaagaacaggcagaagcggtaagaaaggttcatactgatttaccacaatctattaatgattataaagaagaatttgctgaactcgcaaaactcaatattgaccctgatcagaaaaatgcttctattattaataaatataatattaatatcagagaaaaaagtaagcgtgcaatcgagttaactactgaactcgaacgtatgcataaagatattgaaattatgaaattagcacaagctgcagaagtggaaaaccttactcttaaagtagagaaagataagttatcttctaaagtgatcgagcttactgaacaaacttcattaaaagatgaagagatcaatcaactcaagaaagatcttgaaaaagaaataaaggaaaaagaagagttcgttgataaaaacaatgaattgtatttcaaaaacactgaacttgaaaaggaaaaagaagagttagcgaaagaggttaaaacgcttgaggacgaaaatatagagttagaaaaagagaataccactcttactgaaaaagtttctgctcttgaagagaaaaacactaaacttgaagaagaattggaaactcttgatgctaatactacgcgagagattaataatttaaaaggtcaggttgaatctcttaatggtcaacttgagcaaaaagatattactcatgctgctgataaagaagctgctttagcagagttgagaaaacaacttagtgaagcatttgaaactgaaaaacaggaagctttagctaaacttcgtgaagagttaacggctcagtttaaagtggataatgaaaaagcgcttgaagctcagaaaaccacgcttgaagctggatttacatctgaaaaaactcaagcattgaatgagcttagagaagaacttaacaaaatctttggtgtgaaagaaaacgagtataaagaagtaattaaaggtcttagaactgaatccgctgaaaacttcgagttagcaaacacttatagccaaaaaatgcgcacgttcttacaagaaaacactgatcttgttgaagagaatcgtaagcttaaaaagcaaatcgaggattttaataacgggaatgaaaatagaccaaaaaataaataa

SEQ ID NO: 252428 - DNA, 330 bp, Klebsiella pneumoniae
  misc_feature (312)..(321): n is a, c, g, or t
atgccaaacgcaaaagtaatagttgaatattcaagaaatgatgtaaaggtttcaggtggcctttatggatttaaaccttctgctgttgagttaggggaaggtaatgctatttatgaagatgctttaacaggtcaaactattgaagcaagaacattaaatgagttaatgaaagaaattgctattccagaagtagaagcggaatatgatgaagaaggtgttttaataaaatcagaaccctgtctcttatacacatctgacgctgccgacgatatgcagtgtgtagatctcggtggtcgccgtatcattaaaaannnnnnnnnnatgttgtag

SEQ ID NO: 252429 - DNA, 258 bp, Klebsiella pneumoniae; identical to SEQ ID NO: 150364

SEQ ID NO: 252430 - DNA, 261 bp, Klebsiella pneumoniae
atgaagaaaaatatactatatgaaatatctagagtatgtggatttataagtgtggttggttatatttacccattgttattggcatatctatatctaaaaacaaatagtgccgatgactataaatattttatttatactaaagcggatttgcaattatatatagatgattattttaaaattgaccaccctcgatttattgtcgccatattttttggtttgttatctattacctttcatgttttacataggaaaacaaaatga

SEQ ID NO: 252431 - DNA, 1488 bp, Klebsiella pneumoniae
atgaataatatgtcatttatgatttggttttccgtttatgcctgcgcgatgattaccttaggctggtacgtttcgcgcaaacagaaaaccggcgaagactttttacttggcggtcgttcgctgccgatgatcctcactctcggttcgacggtcggcaccatggtggggaccggctccagcgtcggcgccgtcggctttggctacagcaacggctgggccgggatgctttacggcctgggcggcgcggtggggatcctgctggtggcatggttattcgcaccggtacgtaaacttcgcttcatgactatgagtgaagaaatgtcgtattacaccggcggcagtaaaattattaaaaacctcgtcgcgatacttatttttattgcctctatcggctggctgggggcgcatatattaggcggcggattatatctggcgtgggccagcggcattgatattaatgtcgcgaaaattattatcgcgctggcttttgtggtttatgtcggtatcggcggctattccgcagtcgtgtggatcgataccattcaatcgatcgtgctgttcgtgggctttattttaatggcgatactggcggttcatcacgttggcggctggagccatattcagcaggccgtcgatccggcggcgcaaagcctgttcgcggtcgataaattaggcgtgctgccggcgctatcattggcgatggtgatcggcgtcggcgtgctggcgacgccttcttatcgccagcgtatttactcagcgaagaccgtctcttcggtacgccactctttcacgattaccggcctgctgtatctgggattctccttcctgccggcgatcatcggtatggcggtatggaccatgaacccgcagttggagaacagcggcttcgccttcttgtttgccacccaggtgctgccgccggtgctggcgatggcgatcctgattgccggcatgtcggccaatatgtcttccggcagctctgatgccatcgccgcggtgtccattatgctgcgcgacctctacaccctggtgaccggccatatgcccgcgccggagaaagcgattcgcctgtcgcggatcttcctggttctggtgattgcgctggcgctgctgtttgccctgacctccaacgacatcatcagctacatcaccaaaatgatctcgatgattatgtccgggatgtttatctgcaccatgcttggccgtttctggacacgctttaactggcagggcgcggtcgccgcgctggccggcggcgccggggcatcggttgcggtgctggtggatagcgactggctggcgttctggggcaacccgtgtattccggcggtgctgacgagcctggtggcctcggttgtggtgacgttactgaccccggccagcagcatgagccgcgagcaggcgctggagatgattacccgcgagcgtgaaagccgcccaacgccgccgccgctgccgattggcaaacgtcatacctcacgcgggtaa

SEQ ID NO: 252432 - DNA, 1092 bp, Klebsiella pneumoniae
atgactattcgatcacttaaaggagaagtgcttgagctttcaccggaagttagaggtctgcttgataatggaatggattttttaaaaaaggctcagaccgaattcgcaacgtctccaacacattctattgttagtttttggacggctgtagaattgttactcaaagttccgcttgcacatgaacattggtcgcttgtttgtagcggaaaaaaaatcatacgttcgaaatatcttactggtgatttccagtcaataactttttcagagacatgtgaccggttgagggatgttctcgagaaacctctacatacttccactgtgtcatcatttgatataattaggcagcatagaaatcgagttgttcatttttatcacgatgcattaaatgaccaagccaaggagaagctactgattgagcaggctgatgcttggttcgccctgaatcggttgatgcgtgaagattggaaatctctctttgaaggagcattgggtcattatcttgcaagtcaagaaactcaattactcataaataacagttattatgcagatattaaatttcagcaggttaagaaaatattagaggaacatgtcagtaagggcggtcgagttattgaatgtcatttatgcaagaaagttgctgtacctcttaaaaccacgtttgaatttgaagagtattcgtttaagtcatcttcctgtcttgtatgtagtactacacaggacggattggttgaattttcatgccctgcatgcgatgaaaatcaaatactgaaggcttgggaagaatcggactttgaatgtagtaagtgccaacataccgcttctcgttatgagctttttgatacgagtagtttttcaccggatgaatattgcactttatctgtccctgcaggatgttcagagtgtgagcagaacgatactgtctgtgagttcggagaaaaatacctatgcacttactgttttggaattttcgaaaatgtcgagcagtgtgaatattgttcttatcacagtactagtgttgatgagtttagcggaatgactggctgtagtttctgcgatggccaccgagaaacctggcctgaagacgatgactga

SEQ ID NO: 252433 - DNA, 1284 bp, Klebsiella pneumoniae
atgaaccccagaattattatttcaggtgttatctcatgttttctgcctgcgaccttatgccatgcggccaatctaagcgacgacggcagcttccagttaaatggatatggcatggtggctggagattttcagagcgaactaaaccgtcccaaaaacatgtcgttgcataccgatcccaccgggcctaatcaggatcctcgtggcaaaatgggcgatttgggaaacagtttctggcacgattactggacatcgctggctattactaaaaaatggcaggggctggcttctcccgagcaatgggctgattacacctatgaaatggtgggttacggcgataaaacggtagaaacggcacagaattatgggcgctttggtgggctctcttttcttcccgaaggcgcaaacatttgggctgggcgtcgttacctcgatcaacgtattaatatcttcgcttacaataccaaagaagtacatattgattccggcctcggttataacagtaagaattttgatctgaacgttggtaccgaccagatcgactggtccagcgataccgcgccgcaggcgatagaaggctcgcggcgcatcgttgatatggcttatcgtatcgatcagacagagctgggtatgacctatgttaaagaaattgatgacccattgggcactggcaagcagaaagcaattagtttttccgcgaaatacagcatgccgtctttttggggagtggcaaagggacaatcgacagtcaaattacagtatggtaaaggggttattgctccttatctgaacaccagtcgtattaccgtccttagcgaagagggcgattgttcaatgcgtttttccaccgacggaaacttgacgttatttgatgattttgccgtctcgccggctttcatctatgaatataccaagcgtgaaaaaactgctgaccgaaccacctttatacctgatacaggttattcagggggggacatgacctatggttccgcaaatgaaaccgggatctttaccggcgtaaacgttaaacaaaatattcatcaccaaaatctctccatgttgtatgaagtcatggtgaataacactatcaataaaaatggcgtcgaaggtgccagcggcgtcggctacaaaattgccgccggcccggccctgcaactggatgttttaccgtatgtcgcgccgattctcagtttgacggttacctacgcaggcggggacaaagaggtcacgttattgccggaagactcggagtggcgagtcgggtatcgaatggaagtctggttctga

SEQ ID NO: 252434 - DNA, 513 bp, Klebsiella pneumoniae
gtgcagtcagcctattatgacatcaacgaggatatcgttgagatcaaggctgaacctaagctgtttgagctttaccacatggacagaagggtactgctgcggctgaaagccattgacgccctgcagcgcaaggaatcagcccaggcgctttatacctacatcgaaagtcttccccagaatcctgcacctatttccatgaaacggatgcgtgaccggctgaatctcacctcaaatgtctatacgcagaaccacacggtgcgtaaggcgatggagcagctgcgggatattggttatctggattacactgagtttaaacgtggccgagccacctatttcagcgtgcattatcgcaaccccaaactcatcagtggtcctgtgaaggttccgcgcaaagaggaagaagagaaggcgccagagcaaaattatgacgaagtcattaaggcgctgaaggctgctggcatcgatccccttaaactggccgaagctctctcagcgatgaagccagaaaattga

SEQ ID NO: 252435 - DNA, 255 bp, Klebsiella pneumoniae
atggggcagcaggctttccagctcaagactccggcactccaccgcggcgagaaactgcgttttttgtgccgcatccagcttattccagctgtgctgcagaaaatgcgtcaacaactgttgctcaatctgcggcgtcgtcatctgtttatcgacctttgccttcagcctcttacacacatccagcaggatggcgcgataaaatttgccatggcggcgcagcgtattggcgatgctgtcgccgccgaaatgctgtag

SEQ ID NO: 252436 - DNA, 405 bp, Klebsiella pneumoniae; identical to SEQ ID NO: 241343

SEQ ID NO: 252437 - DNA, 282 bp, Klebsiella pneumoniae
atgaaaacccggtcaggtagtcattccgctaagcaatcaaaatatgaaacctttgttgaagcgaaagatccccgctggcttatcgacagaaacaatcttcgccgcgcctggcgctgtgaagtgcagcggcatacccagttttacaccctgtcattcaatgagggctggttcccgaacggcgatccgcaggtccttgccaaccagtgtagtcagattgccgatctggatacggtctctgaagacgagctgcttgtcactaaaaccatcaggagccgtaaatga

SEQ ID NO: 252438 - DNA, 702 bp, Klebsiella pneumoniae
ttggtcttccgctatgccgaccggatgtttaccctgagccaggagatgctcgacatcgtcaactatcgcaaagagtctaatctgctgtttgacgtcggcgtggccgatgcgctctcgaagcggctggtcagcggcgtgctggatgccgccgttgtcgaaagcgagcagattcatctgcgctgttttgaatccacccatgagctgctgctggagcagttgagccagcataagctcgatatgattatctctgactgcccgatcgactcgacgcagcaggaagggctgttttcggtgaagattggcgagtgtagcgtcagcttctggtgtatgaacccggcgccgacgaagccgttcccggcttgtctcgaagagcgacggctgctaatccccggccgacgatcgatgctgggacgtaagctgctgaactggattaatgtgcagggtctgaaggtggagattctcggcgagtttgacgacgcggcgctcatgaaagcctttggcgctgcgcataatgcgatatttgtcgcgccgacgctctacgcgcatgatttctatcatgatgaatcgattgtcgaaattggccgcatggatagcgtgatggaggagtatcacgctattttcgccgaacggatgattcagcatccggcggtacagcgcatctgcaatcgcgattattcgtcgctgtttactgaacccagatag

SEQ ID NO: 252439 - DNA, 384 bp, Klebsiella pneumoniae
gtgaagcagcacgctatctttgagcgtgaaggcaacaacctgtactgcgaagtgccgatcaacttcaccatggctgcgctgggcggcgagattgaggtcccgacgctcgacggccgcgtcaatctcaagattccgggcgaaacccagaccggcaaactgttccgcatgcgcggcaaaggcgtgaaatccgttcgcggcggcgcgcagggcgatctgctgtgccgggtggtggtggagacgccggtggggctgaacgagaagcagaagcagctgctgaaagagctacaggaaagcttcggcggcccgaccggggaaaacaacagcccgcgttcgaaaagcttctttgacggtgtgaagaagttcttcgacgatttgacccgctaa

SEQ ID NO: 252440 - DNA, 687 bp, Klebsiella pneumoniae
atgcgtttaacgattattttagtcggtcctgcccgggccgagaacgtcggcgctgccgccagggcgatgaaaaccatgggatttcgcgaactacggatcgtcgatagcgaagcccacctggcgcctccggcacgctgggtggcgcatggctcaggcgacatcctcgatggtatcaccacctatcccacccttgccgaggcgctgcatgacgttgattttaccgtcgccaccaccgcccgcagccgcgcgcgttttcactattacgccacgccgcagcagctgttgccactgctggaggagaaggcgcagtggatgacgcacgcggcgctggtttttggccgtgaagactccgggttgagcaatgaggagctggcgctggctgatgtgttgaccggtgtgccgatggctgcggattatccgtcgctgaatctcggccagtcggtgatggtctactgttatcaattagcatcgctaatgcaacaaacggcgcccgccgccgctgcggcagaccatcatcagctgcaggccttacgtactcgtaccctggcgttactttcgcgtttgggcgtggaggatgatgccaaactggccgactggttgtcgcaacggctgggcctgctgcagcagcgcgacacggcaatgttgcatcgtttgctgcatgatattgaaaaaaacctgccagaataa

SEQ ID NO: 252441 - DNA, 522 bp, Klebsiella pneumoniae
  misc_feature (197)..(201): n is a, c, g, or t
atgcgggggaagctcgaaggcaaaaacgccatcgaaaactatgtctatgacctgacgcacgagctgaaaagtccgctggcggctattcgcggtgcggcggagattctgcgcgaagggccgccgcctgcggtggcggcgcggtttactgagaatatccttgcgcagaacacccgcatgcagctgctggtggagcggtnnnnngcccaggcgctgggtaatctgctcgacaacgcgattgattttaccccccagggcggcgagatcgccctgggggtagagaaacgaaatgcagaggtgcaactgagcgtaacggataacggatgcggtattccggactatgccctgacgcggatctttgagcggttctactcgctaccgcgtgaagacggccacaagagcagcggccttgggctggccttcgttcgtgaagtggcgcgcctgcatcatggcgatatccgtctgcgcaatcggcccgaaggcggcgtggtcgctacgctgagacttcaccgtcccttcacatag

SEQ ID NO: 252442 - DNA, 612 bp, Klebsiella pneumoniae
atgagaaacattaatgtcactatcaatacccgcaatagctttgtacgtgaatcgctggtggctatggttaatgacctcgcccacggcgatctgcaggcccgtttttcctggctgaacaacgacctgtcaggcgaagatatcattatttatgaagtgatccccggcgaaatttatctatgtaactctctgattaagaacaggaaaaaaggaagctctctgatcatccttcacagctatgagcagttgccggaagatgatttcatgatcaattgcctgaagggggtcatttttgtttcgctgaaaacggccagtatcccgcagctgctggcgatcattaaaagcgagctccagcattgtatggagccgttagccatcgacagcgtcagccgggaactgagctgtgccagctgcccgcatcgtgtgctatcgcgatcgcagaccgccgtcgtacacggcattttggaaggactggatatgagtaaaatcgccgctctgcaacgcgtcacgccgcgtactgccgcctaccataaaaataagattatggaaaaataccgtctgaataataaccacgactttttccagtttatgaatctgttacgtgaacgctggtag

SEQ ID NO: 252443 - DNA, 258 bp, Klebsiella pneumoniae
atggagaggctccccgccatcgcccttgggatctttgttgccgccttcgtgccgttggccgccgtgttcccggcgctggaggcgaaccataaaggcgcggcgatttcggtctataacagcaccatcgggggggtgattgcctataccgccttatatattctggccttatccctgtgcccgttaatttgcgttgaacagccaggcttaaccagcgatcagaatgcgaaaccatttaccgccaacgcggcaaagtcttga

SEQ ID NO: 252444 - DNA, 213 bp, Klebsiella pneumoniae
atgggccgcgccgggctgattaactctggcggcgcggcgagcggagagaccgaccttaccgacgcggtgcgcaccgcggtgatcaataaacgcgctggcggtatggggctgatccttggccggaaggcgtttaagaaatcgatggccgacggcgtgaagctgatcaatgccgtgcaggacgtctaccttgacgggaaagtcactatcgcctaa

SEQ ID NO: 252445 - DNA, 237 bp, Klebsiella pneumoniae
atggtgcgggccttcccggcggaagtgcgcttcaccggcatttccttttcctacaatctgtcgtacgcgatttttggcggcctgacgccgattgccgtcacgatgctgatgggggtgtcgccgatggccccggcctggtatgttctggccttgtcgctgatgggcttgggattaggtatctggctgcgtcaggggctgacggcggcgaggttgccggaaggggagctgcagcgctaa

SEQ ID NO: 252446 - DNA, 447 bp, Klebsiella pneumoniae
atgggcattttttacggtggcattgcgcaaatttttgccggcctgctggaatacaaaaaaggcaacacctttggcttgaccgcttttacctcctacggcagcttctggctgacgctggttgctatccttctgatgccgaaaatgggcctggctgatgcgccgaacgcgcacttcctcggcatgtatctcggcctgtggggtatttttacgttgttcatgttcttcggcacgctgaaagccgcacgtatgctgcagttcgtgttcctgagcctgacggtgctgttcgcgctgctggcgattgggcatctggtagataacgaaggcatcgtgaaagtagccggctggatcggcctgatctgcggcgccagcgccatttacctggcgatgggcgaagtgctgaacgagcagttcggccgcaccgtgttgccgatcggcgaaccgcgttaa

SEQ ID NO: 252447 - DNA, 276 bp, Klebsiella pneumoniae
atgtccgcggcgatgcttgcgctgcaggccaaaaaactgcgcccgcgagttggtgtgttcggccaggcgttcgcccgtcagatagggaagaaagagcagcccttctgcccccgccggcaccgctgcggcttcctgcaaaagctgtggatgcgtaatctggttatcggcaagcgccagccgcgcccagcggacggcatcgccgccggcgtcgaggatggtaaatccgccccaggcggcgttggcaagatgaaggttattgaccagtggatggtgtaa

SEQ ID NO: 252448 - DNA, 474 bp, Klebsiella pneumoniae
atgaaatacaagaagtttgcgatgggcctgctgttgctggccggctgtcaggttgctcaggcggagcagattggttccgtggatacggtcttcaaatggttaggaccggatcacaaaattgtcgtcgaagcctttgacgatccggatgtacagaacgtgacctgctatatcagccgggcgaaaaccggcgggatcaaaggcggcctggggctggcggaggatacctccgacgcggcgatttcctgccagcaggtcgggccgattgagctgacggacaaaatcaaaaatggcaaaagccagggcgacgtggtgttccagaagcgcacctcgttagtatttaaaaagctacaggtcgttcgcttctatgatgcgaagcgcaatgcgctggtctacctgacctattcggataaagtagttgatggttcgccgaagaacgccatcagcgccgtgccgattatgccctggaataaataa

SEQ ID NO: 252449 - DNA, 789 bp, Klebsiella pneumoniae
gtggcggctgtcgccttacccggcctacagggtcctttcacaggctcaaacctcgcaggcccgcgcaagcgcagcgccgccgggcaagatatcagacacggttcctgtaatttcgccgggtggcggctgtcgccttacccggcctacagggtcctcccacaggctcatacctcgcaggcccgcgcaagcgcagcgccgccgggcaagatatcagacacggtacctgtaatttcgccgggtggcggctgtcgccttacccggcctacagggtcctctcacaggctcatacccgtaggcccgcgcaagcgcagcgccgccgggcaagatatcaggcacggtacctgtaatttcgccgggtggcggctgtcgccttacccggcctacagggtcctctcacagtctcatacccgtaggcccgcgcaagcgcagcgccgccgggcaagatatcaggcacggtacctgtattttcgccgggtggcgactgtcgccttacccggcctacagagtcctcttacaggctcaaacctctcaggcccgcgcaggcgcagcgccgccgggcaagatatcaggcacggtacctgtaatttcgccgggtggcgactgtcgccttacccggcctacagggtcctctcacagtctcatacccgtaggcccgcgcaagcgcagcgccgccgggcaagatatcaggcacggtacctgtatcgccgggtggcggctgtcgccttgcccggcctacagggtcctctcacaggctcataccccgtaggcccgcgcaagcgcatggactga

SEQ ID NO: 252450 - DNA, 564 bp, Klebsiella pneumoniae
gtgaatagccggactctgcggggcgatggccgggatcgctggccgctgaaacggcccggtggccgccacgatgcgctgcgcttcaatcaccccctgcgaggtgtcgacacgaaagcccggccgtccgacgaggcgttcggcgctgaagacctccaccccggtacggatcggcgcattgaagctgcgggcataggcggcaaaatagtctgccacctgctctttgccgacaaagctgtctgccgggcagtccgggaacaccatccccgggaaccgatcgtgccaggccggaccgttggcgaccagcgaatcccagcgtccgctgcgccaggcctgggcaataccctgcttttccagcaccaggtgggggatatccagccgggtcagatgctcgctcatggcgacgcccgactgccccgcgcccaccaccagggtatcgatctcggtaatctgttcagtcatttcgctatccttcaagcacagttgccgacgacgtcgccggaattgacggctttcaggttatttaactgtgacgaattggtaaaatattataaaacgatcgactga

SEQ ID NO: 252451 - DNA, 819 bp, Klebsiella pneumoniae
atgcacaatcaacactctccccacatcgatcaagcgaccatcgaccgctggcaggcggatggcgcggtgttattaaaaggcgtctttaccccctgggtcgagcgcctcgccgagggggtcacggcgctgatggccagccccagcgagtatggtcatgcgcgcacggtgatccccaaagatggctcgccgcctttttttcaggactactgcaactggtcgcggatcccggcgtttagcgagtttgtcttccagtcggccgccgccgagatcgccgcggcgctgatgcagtcgcagacggcgaaatttttccatgaacatacgctggtcaaaccggccgggggcagcacggtgacgccctggcatcatgaccagccttactattgcgtttcgggccggcagaacgtcagcttctggatcccgctggacccggtggcggaagccacctcgctgcgctgcattcgcgggtcgcaccgctggcaggaggagtacagtcccacccgtttcaatggcactaagctttacgagcacacccggttcagcaccctgccggatattgacgcccatgaggacgagtacgatatcgtcagctgggcgctggagccgggggatgcggtggcctttcatttccgcaccgtccatggcgcccgcggcaaccccggcgcgcgggcgcgacgggtcttctccgcccgctgggttggggatgacgccgcctttgccgatcgcggcggcgtgacgtcgccaccgttccccgagctgaccctgcgggacggcgacccgctggattccccgctgttcccgcaggtctggccgcgggcgtga

SEQ ID NO: 252452 - DNA, 1221 bp, Klebsiella pneumoniae
atgaaataccattcagcaccgctcatcccgcacaaatccgccctcatgtccgcgccggctaatctgctggcggaagaggtctgtctacccgccgcgctgctaaaaaagtcggcgctggaaaataatatttcatggatgcagcgctacgccgacgcccgcggcgtatcgctggcaccgcatggtaaaacgacaatgacgccatggatatttcaggcgcagcagcgagcgggggcgtgggggatcggcgtgggcagcgcctggcaggctagcgcggcaatggccagcggcatccaacgcgtcctgatggttaatcagctggtcggcaaagccaatatgcaggtggtcgcgcagctaaaagcccactatcgggcggtggattttatctgctgcgtcgatagcgaggtcaacgtgcgcgccctctccacattcttcgcagaccagggacaaacgctggatgtgctgattgaacttggcgtgcctggcgggcgctgcggctgtcgtagcgtcaatgacgcgctggcgctggcgcagcgggtaagcgacctgccgggactacggctacgcggactggaactgtatgaaggggtgctgcacggcgacgatccgcagccgcaggtggaagcgctgttacagcaggccgcggcgcttgcctgccgcatggagccgctggttgacggcgaatttattctcaccggcgcgggcaccgtctggtatgacgtggtatgcaacatctggctggcggcggcaaaaccgcgccgctgccgtatcgtcatccgccctggctgttatatcacccacgatcgcgggatctacgatctcgcccaacaagagctgatcgcccgcgatccgattgcctgcgatctcgccggcgatcttacatcagcgctggagctgatggcgatggtgcaatcggtgccggaggcggatcgcgcggtagtgaatttcggcaagcgcgactgcgctttcgacgccgggctgccgcagccgatcgcccattatcgtaacggccaggagttagcgctgcgcgcggagtcgatcgtcagcaccggcatcatggatcagcactgtatgctgcgcctggcgccgggcagcgatgtgcaggtcggcgatattctgctgttcggcacctcgcacccgtgtctgacctttgataagtggaagacgttgctgctggtcgatgacgactacaacgtgctggacgagctcgacacgctgttttga

SEQ ID NO: 252453 - DNA, 1116 bp, Klebsiella pneumoniae
atgcctttagccgattttcaccgctccgatccttttaccctcggtatcgaactggagctgcaggtggtgaacccgccgggttacgatctcagccaggatgcctcgacgctgattgccgacgtccagcatgagctgaccgtgggagaagccaaacacgacatcaccgagagcatgctggagatcgccaccggggtgtgccgcgacatcagccatgcgcaaatccagctcagcgccatccagcaggcggtccagcgcgcggcgctgcgccatcatctgcagatctgcggcggcggttcccacccctttcatgcctggcagcgccagcaaatcagcgataacccgcgctatgtcaaaaccgtcgagcattttggctatctggcacagcaggcgacggtctttggccagcatgtgcacgtcggctgccagagcggcgatgacgccatctatctgctgcatggcctgtcgcgctttgtaccgcacttcatcgcccttaacgccgcctcgccgtggtttgacagtaccgacagccgtttcgcctgttcacgcctgaaccgcttctcctcctatcccgacaacggtccgatgccgtgggtggccgactggcaggggtttcgtcgcctgttccgccagctgagctacaccagcatgatcgatagcatgaaggatctgcactgggatattcgccccagcccgcagtttggtaccgtcgaggtgcgggtgatggacacccccctgacccttgcccaggcgatccacatcgccggctttattcagaccctggcctgctggctgttgacggagcgtccttttaagcaccagcctgatgattatctgctgtacccctttaaccgctatcaggcctgccgctacgggctggacgggaccctcaccgacgtgcgcagcggggagcagcgcagcatccgccaggagatcctgcagttcgccgaccggctggcccctttcgcccatcagctgaaggcgacggcagcgctggaggcggtggttcgccaggcgaaatcgccgcacagcgaggcgcagcagatgcgcgactttatcgccaacggcggttcgctttccgggctggtgcaaaaacactgtgagatttgggcggcataa

SEQ ID NO: 252454 - DNA, 720 bp, Klebsiella pneumoniae
atgttattacgttgcctgctccctctggcgctgctgcccctggccgccgtcgccagcgccgcctgtaccctcaccgacccgacgctgaccctgcagagctatcgggtggatgcgcagaaagagcgcattgcgatgtactggcaggatcggcacggcaaagcctggggttccctgcgttcgctgctggcgggtatcgatggcgacggccgggtgcagatggcgatgaacggcggcatttacgataaggcctacgcgccgctggggctgtatatcgaagacggcaaacggctgacgccggtaaaccgctccgccggcggcgggaacttctttatccgccccggcggcgtattcctggtggaaaacggccgggcgaaaatcgtgccgctgccggcgtacaaaccctctcccgccatccgctatgcggtgcagtccggcccgatgctgattgaaaatggcgtcatcaactggcgactgaagccctccgccagttcgcgcaagctgcgcaacggggttggtatcgataagcagggccgggtggtatttatgctcagcgatcgcgagaccaacttttacgattttgcctgctatgcgcagtcaaagcttggcgtgcggcagatgctttatctcgacggcaccctgtcgaagatgtaccgcaaaggcggcagcgtgccgtggcagtatcatccgttcgtgaccatgataacggtggagcgaaaatag

SEQ ID NO: 252455 - DNA, 3093 bp, Klebsiella pneumoniae
atgctgaccttttttatccgtcgtccgcgatttgccatggtgatcgcgctgctgctgacctttgtcggcgcggtgtcgctgaagctgatcccggtggagcagtacccggcgatcacccccccggtggtgaacgtcagcgccagctggccgggcgccagcgcgtcagacgtggcggaagccatcgccgccccgctggagacccagctcaacggcgtcgatcatatgctgtatatggagtccaccagctcggatgaggggacgtaccgcctgagcataaccttcgcggcgggcaccgatgccgacctggcggcgatcgacgtgcaaaaccgggtggcgcaggcgctggcgcagctcccggcggaggtgcagcagaatggcgtccaggtgcgcaagcgcgccagcaatctgcttatgggggtaagcctctactcgccgctgggcacgctgtcgccgctgtttgtcagcaactacgccagcacccaggtgcgcgaggcgctggcccgcctgcccggcgtcggcgaggtccagatgtttggcgcccgggattacagcatgcgtatctggctgcgcccggaccgcatgaacgcgctcaacatcaccacggatgatgtcgcccaggcgctgcgcgagcagaatgtgcagggcgcggcggggcaggtgggcaccccgccggtatttaacggccagcagcagacgctgaccatcaacgggctggggcgtctgaacgaggcggccagctttggcgagattatcctccgccgcggcgcgcaggggcagctggtgcgcctcgccgacgtggcgaccattgagctgggcgcccgcagctacagctccggcgcccagctgaacggtaaagcgtcggcctatctggggatctatccgacgcccaccgccaacgccctgcaggtcgccagcgcagtgcgtgcggagcttaaccgcctgcacactcgctttccggcggatctcacctgggaggtgaagttcgataccacccgctttgtggcggcgacgatcaaagagatcggcgtctcgctggcgctgaccctgctggcggtggtcgtggtggtgtcgctgttcctgcagagctggcgggcgacgctgatcgtagtgctggcgatcccggtgtcactgatcggcacctttgcggtgctctatctgctgggctacagcgccaacaccctcagcctgttcgcgatcattctcgccctgacgatggtggtggatgacgccattgtggtggtggagaatgtggaaaccaaaatggcggaagggctggatcgcctgcaggccaccgcccaggcgctgcggcagatcgctgggccggtgatcgccacgaccctggtgctgctggcggtgtttgtgccggtggcgctgctcccggggatcgtcggcgagctgtaccggcagtttgccgtgacgctctccaccgcggtggccctgtcgagcctggtggcgttaaccctgaccccggccctctgcgcgctgctgctgcgcccgcgtcccgcccggccggcggcggtgtggcgggcgtttaaccgtcttctcgacggcacccgcgacggctatgggcggctggtcggctggatgaaccgccgccccttgctggcgctggcggcgacggtggcggcaggcgcgctggtggcgttcagcttcacctcgatgccgaaaggcttcctgccgcaggaagatcagggttacctgtttgccagcgtgcagctgccggaggcggcgtcgctggagcgtaccgaagcggtgatggcccaggcgcgtaaactgctgatggctaacccggcggtggaggatgtgattcaggtgtccgggttcaacattctcaacggcaccagcgcctctaacggcgggtttatctcggtaatgctcaaggactggcatcagcggccgccgctggatgcggtgatggcggatattcagcgccagctgctgtcgctacccgaggcgacgatcatgaccttcgcgccgccgaccctgccgggcctgggcaatgcctcggggtttgatctgcgcatcatggcgcaggctggtcagtcgtcggcggagctggagcaggtgacgcgggagatcctccagctggcgaaccagcatccgcagctgagccgggtgtttaccacctggagcagcaacgtgccgcagctgaccctgacggtcgaccgcgaccgggcggcgctgctggatgtgccggtggcgcagatcttcagcagcctgcagacggcgttcggcggcacgcgcgccggcgatttcagccgtaacaatcgtgtctatcatgtggtgatgcaaaatgagatgcagtggcgtgagcgggccgagcagattagcgagctgtacgtccgcagccgcgacggcgagcgggtgcggctgagcaatctggtcaccattacgccgacggtgggggcgccgtttattcagcagtacaatcaattcccgtccgtgtcggtgagcggttcagcggccgagggggtcagcagccgcacggcgatggcggccatggagcagattttgcaggcccatctgccgccgggatatgactatgcctggagcgggatctcctggcaggagcagcagaccggtaatcaggcggtgtggatcgtgctggcggcggtggcgatggcgtggctgttcctggtggcgcagtatgagagctggacgctgccggcgagcgtcatgctctcggtgctgttcgccatcggcggagcgctgctctggctgtggaccgcgggctatgccaacgatgtgtatgttcagatagggctggtgctgctgatcgccctggcggcgaagaatgcgattctgatcgttgagttcgcccgtagccggcgcgaggaggggctgtcgatagtcgacgctgcgcgagagggggctacccgccgcttccgcgcggtaatgatgaccgcggtgtcgtttattatcggtatcatgccgatgatgctcgccaccggcgccggggcgcagagccggcggatcatcggcaccacggtattcagcgggatgctggtggcgacgatggttggcatcctgtttatcccgtcgctgtatgtactgtttcaacgtatgcgcgagtgggcgcatcggcgggggtaa

SEQ ID NO: 252456 - DNA, 1080 bp, Klebsiella pneumoniae
atgattaaaaccttccgctttgctctgctggcctgcggtctggtcgtcggcgccctgacggcgaccgccgcgccggcggtgccggtccgcgtcgccacggttgaacttgctcctcatgctgaagaacgcgctatccccgggcgggtcgaggcgatccgcgccgtcgacattcgcgcgcgcaccgaaggggtgattgttcagcgccacttccaggacggccagtatgttaccgaaggcgacctgctgtttaccctcgacgacgcgcagccccgcgcggcgctggctctggcgcaggccgagctgaaaagcgccgaagcctcattacgtcagtcgcagcagttgctcactcgctacgagcggcttatcaacaaccactccatcagccgcaacgacgtcgatacggcccggatgcagcgcgacgtcgccgccgctgccgtacagcaggccaaagcccgcgtcgaggcccagcagattgtgctcagctacacccggattacggcgccggtgaccggtcgcgtgggccatagcgcctttcacatcgggacgctggtcaattcgtccagcggcgtgctggtggacattgtgcagttggatccggtgcgggtctcgttcgccctcgacgaagccgcgtttttcagtaaaaccggccagcacgccgatatccacgctctgaagcaggcgtggctggcgcagattgaggttgatggtaaacggcgcgacggggtgttgacctctatcgataaccggatcgacgcccgcaccggcagcgtagcggtgcgggccgagtttgccaatccgcagcaccgtctgctgccgggcggcagcgtgacgatcctgttccgtccgcaggaactgccgtcgcgagtgatggtcccggctgccgccgtgcagcaggatccgcagggctttttcagctgggtgctgaagccggaccacaccgccgggcagcgtcgtctgaccctcgcggggcagcaggggcagcagtttgcggtcgagaaagggctgcaggcgggcgagcaggtgatcaccgacggcgcgcagcggttgcgcgaaggcgccgcggtgcaggtgctgaactag

SEQ ID NO: 252457 - DNA, 2724 bp, Klebsiella pneumoniae
ttgaccaagatgaataacccaaagtttacgacgccctcgggcgacaccgcgccacggcaggtctggcagcagaccgttgacgcagtgctggcgcagaccaaaagccaggccgctgggttaagttccgcagacgccgccgagcgcctgaatacctgtgggccgaacgcgctgccggaaaagaaaggcaaaccgggctggctgcgctttctcgcccactttaacgacgtactgatttacgtgctgctggccgccgcggcgctgaccgccatcatggggcactgggtcgataccctggtgatcctcggcgtgacggtgattaacgccctgatcggtcatatccaggagagcaacgccgaaaaatcgctgcaggggatccgcaacatgctctccagcgatgcccgcgtccagcgtaacggcaagcatgagactatcccgacgcgcgacctggttccgggggatatcgttatcctgcgcgccggcgaccgcgtgccggcggatatgcgcctgattgaaacccacaacctgcgggtggaagaggcgatcctcaccggcgagtcgacggtggtggataaaatcaccgacgcgctggagggcgatctgccgctgggcgaccgggtgaacatggtcttttccgggaccaccgtcagcgccggcggcggcgtcggcgtggtgaccgccaccggcgcgcagaccgaactcggccatatcaaccagatgatggcgggtattgagaagcaacgtaccccgctgctggtgcagatggataagctcggcaaagcgattttcgccattattctcgccatgatggtggcgctgtttatcttcagcctcgcgctgcgggatatcccgatgggcgagctgctgctgtcgctgattagcctggtggtagccgcggtaccggaaggactgccggcgatcatctcgattattctgtcgctcggcgtgcagacgatggcgcgcaagcgggcgattattcgtaagctgccgaccgtggaaaccctcggcgccatgaccgtggtctgctcggataaaaccggcaccctgacgatgaacgaaatgaccgtcaaagcgatcatcaccgccgactgctgctatcgggtggaaggcgacagctacgagccgcaggggcggatcttcctcgaggggagcgatgagcccgtgcaggttcagcccggcaccgtgctggagacctggctgcgcaccatcgacctgtgtaacgacagccagcttacccaggatgagcgcggtctgtgggggatcaccggcgggccgaccgaaggggcgcttaaagtgctggcggcgaaagcgcagctcccggcggtggaggcccgtctggtggccaagatcccctttgactcgcagtacaaatatatgtcgaccctgcagcacatcgatggcaatgcccgggtgctgatcaccggtgcgccggacgttatcttcgccatgtgccgcgagcagatgagccgccacggcgcggtgccgttcgaggcgcagtactgggaagaggagatggcgcgcttcgcccgtcagggactacggatggtggcggcggcctgtaagccggccagccttgatgccaccaccctcaaccatgaggacctgcaggagggactgattttcctcggcatcgccgggatgatggatcccccgcgtccggaagccattgacgccatccacgcctgccagaccgccggcatccgcgtgaaaatgatcaccggcgaccacccgcagacggcgatgagcatcggccagatgctggggatcaccaacagcagccaggccatgaccggctaccagctggagcacatggacgatgcggcgctggcgaaggcggcggtggagtacgacatctttgcccgtaccagtccggagcataagctgcgcctggttaaagccctgcaggataacggcgaagtggtcggcatgaccggcgacggcgtcaacgacgcgccggcgctgcgccaggccgacgtgggtatcgccatgggtatcaaaggcaccgaagtcaccaaagaggcggccgacatggtgttgaccgatgataacttcgccaccatcgccagctcggtaaaagagggccgtcgggtctatgacaacctgaagaagaccatcctcttcatcatgccgaccaacctggcgcaggggctgctgatcatcatcgccctgctggcggggaacattattccgctgaccccggtgctgatcctgtggatgaacatggcgacgtcggcgacgctctccttcggcctggcctttgaggccgcagagcgcaacgtgatgaaccgtccgccgcgtaaaaccggccagcatgtgatggatggtttcgccgtgtggcgagtggctttcgtcgggtcgatgatcgcgattgccgcctttatccttgaggcctggctggcgccgcgcggccacagtccggagtttatccgcaccgtgctgctgcagatgctggtgacggcgcagtgggtctacatgatcaactgccgcagcagcgacagcttctccctgagcatgggtctgctgcgcaacaaaggcatctggctggtgaccggcgtcctgctgctgatgcagctggtcattatctatgtcccgctgatgcagagcatgtttggtacggaagcgctgccgctgcgctactggtttgtcactctggtcatcggcgtcgccatgttcctggtggtggaaatcgagaagcgtctgacgcgccggttccgcaaaacggcctga

SEQ ID NO: 252458 - DNA, 249 bp, Klebsiella pneumoniae; identical to SEQ ID NO: 238882

SEQ ID NO: 252459 - DNA, 342 bp, Klebsiella pneumoniae
atgacgatttccgctcaggtgattgatactatcgtcgagtggattgatgataacctgcatcaaccgctgcgtattgatgatatcgctcgccatgccgggtattcgaaatggcatctgcaacggctgtttttacagtacaaaggggagagcctggggcgctatattcgcgaaaggaagctgctgctggccgcccgcgatttgcgcgacaccgatcagcgggtctacgatatctgcctgaagtatggcttcgattcgcaacagacctttacccgcgtcttcacccggaccttcaatcagccgccgggcgcctaccgcaaagagaaccacagtcgcgcccactga

SEQ ID NO: 252460 - DNA, 1101 bp, Klebsiella pneumoniae
atgaaccgtgtcactttcagcgtggtcgccatcatgttactcgcagcagcaacgacattgccgtttgttcttaatgccggttttggtaaggcgccgcagggagcacagcttagccaggtggaagcgtctccccactaccgggacggccagttccataaccaattgcccacgccagggttcaccgggcagaaaaatatgctggcggcgtggtgggatttcctgatgaccaaacgggaaaacgcccgtcccgcgcaaccgctgccgctggtgaagaccgatctggcgacgctgcccctcgggcaggacgtgatggtctggctcggccactcctcctggtacctgcagctggcgggaaaacgcatcctgatcgacccggtgttcagcgattacgcggcgccgttctcctttatcaataaagccttccccggcgactatccgtggcgggcggaagggatgccggagatcgatctgctgatcatctcccacgatcactacgaccatctggattacgccaccattcgcgccttactgccgaaaattaagcgggtcattacgccgctgggggtcggatcgcatctgcgctactggggaatggacggggcgctgattaccgaagcggactggcagcaggcggtaccggccagcgacgagctcaccgtccacgtgctgccggcgcggcacttttccggccgcgggctgaagcgtaaccagacgctgtgggccagttttctgttcgttacccggcagcaaaagatttattacagcggcgacagcgggtatgggccgcactttaaagcgataggcgatgagttcggtccggtcgatctggcgatcatggagaacgggcagtatgaccaggactggaaatatatccacatgatgccggatgaaacggctcaggctgccgacgatctgcgcgctcgcgcggtgctgcctgggcatgcaggacgattcgttttggcgaaacacagctgggatgaaccgtatcaacggctggcggctgccagcgaaggaagggcctggcgtctgctgacgcctgtgcagggcgagccggtgtgggtcgccgataagacgcaatcatttaacgcctggtggcgctaa

SEQ ID NO: 252461 - DNA, 582 bp, Klebsiella pneumoniae
gtggctcgtccaaagagtgaagataaaaagcaagcgttactggaagctgccaccgcggctttcgcccagtccggcatagccgcctcgacgtcggccatcgcccgcagcgccggtgtggccgagggaacgctgtttcgctatttcgccaccaaggatgagttgctcaacgagctgtacctcgcgattaagctgcgcctggtgcgcacaatgatcgccgggctggatccggacgagaagcgcccgaaagagaacgcgcgcaatatctggaacagctatatcgactggggcgtgcgcaacccgatggagcacaaagcgatccgccggatggcgctcagcgagcgcatcaccgacgaaacccgccgccaggtaaaagagagctttccggagctcaacgaaatgtgccagctgtcggtgaaagagatattcctcagcgaggcgtaccgcgcctttggcgacgccctgtttctgtcgctggcggaaaccaccatcgaattcgccagccacgatccgcagcgcgcccgggagattatcgccctcggctttgaagccatgtggcacgccctgcatgaggcggacgcctaa

SEQ ID NO: 252462 - DNA, 369 bp, Klebsiella pneumoniae
atgacgccggaaacactgcatccctgcgctcaccgtatcgccctgacctacccgtttaccgaacactgctggccctttgggccagagtacgacgtgtttaaggtcgacggccgcatctttatgatcaccatgactattcgcgggcgggcgctggtcaatctcaaggccgagccgcagaagtcgctgctgaatcagcaaatttatcgcagtatcgaacccggctaccatatgaacaagaaacactggatcacggtggtgccaggagaggatatcagcgaggatctgctggccgagctgattgacgattcgtggcatcaggtggtgaacaagctgagtaaaaaggcgcagcagcgcctgcgtccgcgctga

SEQ ID NO: 252463 - DNA, 654 bp, Klebsiella pneumoniae
atggatatcgtatcggtcgctttgaagcgctattccaccaaggcctttgacgccacgaaaaagctgactgccggggaagcggaacagctgaaaacgctgctgcagtacagcccgtctagcaccaactcccagccgtggcactttattgtcgccagcaccgatgaagggaaagctcgcgtggcgaaagccgccagcggcacctacgtgttcaacgaacgtaaaattctcgacgcctcgcacgtggtggtgttctgcgcgaaaaccgcgatggacgacgcctggctgcagcgcgtggtggatcaggaagaggccgatggccgtttcgccaccccggacgcaaaagccgctaaccacaagggtcgtactttctttgccgatatgcaccgcaaagagctgaaagatgacgatcagtggatggcaaagcaggtgtatctcaacgtcggcaatttcctgctgggcgtagcggcgatgggtctcgacgccgtgccgattgaaggggtcgattttgcgatcctcgatgaggaatttgacctgaaagcccagggctacaccagcctggtggtggtcccggtcggccaccatagcgtagaagatttcaacgctaccctgccgaagtcgcgtctgccgcagtcgacgaccattaccgagatttaa

SEQ ID NO: 252464 - DNA, 153 bp, Klebsiella pneumoniae
atgctggcagggcaaagcttttactctgaaatggaaaaataccttagctgcctgctgtatgaactgattaagtattttgctgcggaaatgatagccccgcgctggctgcgtaccgccgatggcgttaaatttattgacgaggtgacggcatga

SEQ ID NO: 252465 - DNA, 384 bp, Klebsiella pneumoniae; identical to SEQ ID NO: 227591

SEQ ID NO: 252466 - DNA, 879 bp, Klebsiella pneumoniae
atgagccaaccaactgcccgtgctatgtggatcggcgagtgcttattaaaagcgctgttaatggaggtatccgcctggcctaaacctggccttgttacacctcattcacaaggggcgcataaagatatggatatctggttatttattaccagttcatcggctattgccccctgttttagcgcctgcgcccatgcaggggaaaatcatcaaggatcgccgtgggaactctttacaaaaatacgtgccattggcattcattatgaaaatacgctgctgcgggcaacacagcaggttaatacccagcgcggcattcttttttccggcacggttctggcgacagcggcaggatggctttccgggcgcggagaaaccctctcatataacgccttaagccagtgcgtcgctgaactctgccgcgatctctgccgtagggattttgccgccctggccgaacgcccggcgcaaacccacggtgagaaattgtatgtcggattcggcattaccggcgtgcgcggagaggcagagcaaggtttcccactagtttgccagattggcttacccgcgctgcatcaggcgctggacaacgggctggcctggcgggaagcgcttattcatacgttgctcaccttaatggcccattgcgatgacactaccgtgctgtttcgcggcggccagcaggcgctggcggaaatgaagcagtatgcccggcgtcttgtgacgcagggcggaatgtttaaccctgcgatcgagcagcaactggctgattttaattcatggtgcatggataagtgggtcagccctggcggttcggccgatttattagcgctgtgtctggcgatgtattttctttgccgccagccgcaaggagatatgacataa

SEQ ID NO: 252467 - DNA, 1089 bp, Klebsiella pneumoniae
atgtctcaaaaaattacagcaatcaaagagccggtggttgagtacaaggacaaaactcttcattatcgtattgcaaaagtcatcggcgagaatgtggatcaaaccttacaagagatgattgcggttgcgctgaatcgtctttctgcggttaaagaccgttaccaaactgtaagtgttgacagccatgatggcgaagatggtgatgttcaacaggcaaggcaatttttgaataataaaatagagagatggagtatattattcaatgaattagttcgctatagtgatggcgcaaataaaagtattataactattgatgaaagcgcttctttcttatcaatagaccaaatagcgcctccggtttctgtagatggtaaaagacgtgaatttcttgattcaataatgcacatggcatttcttagaaaccatgtggtggtaattcagtcgccagttctaagaactcgagagttggaaaaatacattacgtggttattaaaaaaagcaggggtaattacccaaggttctgtaatgctcaatgctgagttaccaaagcagcaaagagaaagaataatgaataacaataccaagaaggttagaatcggtacgcctttggtagatacgcttagtaatatgcctgttgagaacgccagagaaacgataacatcagaagcaataaaaacgaatcatgttaaagtaactccgaaggggttggggctggatatcattaaagttctttttactgatagagagcgtgaaaactatgggcttacagatgatgtcttctcaggtgatgctattgataaaggtaatattaacgtttcggtggaaataagctataattacaaagccaaaaaaacctcccaagtaataattaataatatcagccaagcattaaggcatagccatccggatgatgttgaattaacacttgataaggtggggaaaatcaaaggagatagtttggttatttctaagaaaattaaacttaagtttattaatggaatagcagatccagaagagatgtatatgaagattagagaatggttagttgaacaaatccggttaggcgaattagatgctgaagctgaataa

SEQ ID NO: 252468 - DNA, 1539 bp, Klebsiella pneumoniae; identical to SEQ ID NO: 218179

SEQ ID NO: 252469 - DNA, 681 bp, Klebsiella pneumoniae
atgctgaatatcgtgccgggcatcgatctcctccacctcattgggcagattgccggcgatggtctccatcacgtcgctgagggtcacaatcccctcgacggaaccaaactcatcgaccacaaaggcaaaatgggtgcgggcctggcggaactgctcgagcgccgagaggagcggcagcccctccgggaagaccagcggttgacgcaccagtgcctgcagatccagcggctcctgacgcagggactgctggagcaggtcaataacatgcaccacccccagcagatcttcattatctttcccgccggtgaccaccagacgggtatgctgatttttctccaccaggctgcggatctcttcctccggcgcgctaaggttgatgcgctcgatatcatggcgcgacgtcataatactgctgacgctgcgctgattaaggttcagcacccgctcaatcatcagtcgttcctgcggattaaacagtggatgttgatcctgatcggcgaccagcgacgccgtgtcagcatccagttcagctttttctttctgcccgctcagcaaattcatcaccgcttcggtagtgcgctgacgcagcgtcatattggcggagaggaagcgacggcggttaaactgcgccaactggttaagcgcttcaatcatgaccgagaagccaatggccgcatataa

SEQ ID NO: 252470 - DNA, 897 bp, Klebsiella pneumoniae
atgaatatggagaatttgaaagcggttattccggtcgcaggactaggcatgcatatgctgccggccacaaaggcaattccaaaggagatgctgccgatcgttgataagccaatgattcagtacatcgttgacgaaatcgtcgccgccgggatcaaagagattgttctggtgacgcactcctcgaagaacgcggtggaaaaccacttcgacacatcctacgagctggaagccctgctggaacagcgcgtgaagcgccagctgctggcggaagtgcaggccatttgcccgccgggcgtgaccatcatgaacgtgcgtcaggcgcagccgctgggcctgggccactccatcctctgcgcccgcccggtagtcggcgacaacccgtttgtggtggtcctgccggatatcatccttgacggcggcaccgctgacccgctgcgctataacctcgccgctatgatcgcccgctttaacgagaccggccgcagccaggtgctggcgaaacgcatgccgggcgatctctccgaatactccgtcatccagaccaaagagccgatggtggctgaaggccaggtggcgcgtatcgtcgagtttattgaaaaaccggacgagccgcagactctggactccgatctgatggcggtggggcgctacgtgctgtcggcggatatctgggccgaactggaacgtaccgagccgggcgcatggggccgtatccagctgaccgacgctattgccgaactggcgaagaagcagtccgtcgacgcgatgctgatgaccggcgaaagctacgactgcgggaagaaaatgggctacatgcaggccttcgtcacctacgggatgcgtaacctgaaagaaggcgccaaattccgcgaaagcattaaaaaactgctggcctga

SEQ ID NO: 252471 - DNA, 630 bp, Klebsiella pneumoniae
atgaactggcaactcatctcattttttggcgatagcaccgttttgctgcccagcgcagcggcgctgtttattgtcctgatgctgcgtaaaacgtcgcggttgctggcgtggcagtggagtttgctgttcggcatcaccggcgctatcgtctgcgcctccaaactggcctttatgggatggggtctgggtattcgtgagctggattacaccggcttcagtggccactccgcgctctccgcggccttctggcctatcttcctgtggctgctcagcgcccgtttctccgtcggtctgcgtaaagcggccgttattaccggctatgttctggccgccgtggtgggctattcgcggctggtcatccatgcgcattccttctcggaagtgattgccggcctgctgctgggcgctgctggcagcgctttgttcctggtgttgcaaaaacgtacccctgatccggaaagcgtgcatatctcatggggcggtgttgcatgcctggtgatggttccgcttatccttttacatagcggcagcaaagcgccgactcagtccctgctgggacaaattgccaccgcggtggggccgctggataaaccctttacgcgtaccgatctgcacaagcaggcctggtaa

SEQ ID NO: 252472 - DNA, 534 bp, Klebsiella pneumoniae
gtggattccctgttccgcctgttcgatggcgctgttcaaaagcacccgtaccccggcctggcgatggcgggccagcaggtaatcgcggaccggtggaggggcgttgcgacccatcaccgtcgacgcctgctccaccaccgtgacgcgacagccgcgatgaatagcgctggcggccagctccagaccgatggtgcctgcgccgacgataaccacctcgctccctggctgcagcgccgcgcgcagacgcgcagcatcgccggcgtgacgcagggtcaggcaacgttcccccagcgcgtcgagcagcggcagcggcctggcggcggctccggtcgccagcagcagttgtcgccagtgaaggacgcgattgtctgccagcgtgaggctctgcgcctgacgatcgatatcgcgcagcgtcacaccgagatgcagctggacgttgttgtcctgccaccagttggcggggagcaccggctgtcgctgcggatctgcatccagcagcatcactttcgacagcggcgggcgctcatacggtaa

SEQ ID NO: 252473 - DNA, 393 bp, Klebsiella pneumoniae
atgcaatatcatgaaatagtaagagatgagattatgagttttattattgaaaatgttgaaggttttaatgttttagaaaagatttatccgaaaatgatagatacaaaacatcctgaatatcctgaaataacaaagatcccattctttgagatagagtttaggaaaggacttacattagccaatacttataataacattgatgaagaatacataaaccaaagaacgttaaactatgctatcaacttatgttttaacagtgaaatgagttttaagtatagtcatgacgatacattaagagagtctttttcgtgcgcttattattgcataatggaaaacatgtatagaacgttatcggaaaaagaaagaggcaaagtgttatggtggattgattga

SEQ ID NO: 252474 - DNA, 660 bp, Klebsiella pneumoniae; identical to SEQ ID NO: 251747

SEQ ID NO: 252475 - DNA, 357 bp, Klebsiella pneumoniae; identical to SEQ ID NO: 182584

SEQ ID NO: 252476 - DNA, 435 bp, Klebsiella pneumoniae
atgaaaaagatcctcgtatcctttattgccatgatggctgtcgcttcatctgcctgggctgcagagacaatgaacatgcatgaccaggtaaataatgcccaggcgcctgcccatcagatgcaatcatccgctgaaaaaagtgcagttcagggggagagcatgaaaatgatggatatgagcggtcacgatcaggccgcaatgtcccatgaaatgatgcaaaacggcaattctgctgcccatcaggacatggctgaaatgcataaaaaaatgatgaaatccaaacctgagaacacccaagaaactgctaagccattttccgaaatgaacgagcatgagaaagccgctgttgtgcatgagatggcgaataatggtctatcttccgttattcatcagcagcaggctgaaaagcatcgcagccagatcacccagaattaa

SEQ ID NO: 252477 - DNA, 1137 bp, Klebsiella pneumoniae
atgaagaaaaaaattgttagattttcggcattagcgttggcaattgggtttttatcgggttgtaccattatccctggccagggattaaacagtctgcgtaagaacgtggttgaactcccagatagtgattacgatttggataagctggtgaatgtgtatccgatgacaccaggcctgatcgatcaactccgaccggaaactgttctggctcgtccaaatccgcagctggataatttgttgcgtagttatgaatatcgcattggggttggtgacgtactgatggttacggtatgggatcatcccgaactgactacacctgcaggccagtatcgtagcgccagcgacaccggtaactgggttaactccgatgggaccattttctatccttatatcggtaaggtgcaggtggcaggaaaaacgcttagccaagtacgccaggatatagccagccgtttaaccacttatattgaaagccctcaggttgatgtaagcgttgcggccttcagatcacaaaaagcgtatgtaacaggagaggttgtaaaatcaggccagcaggctattactaacattccattgaccgtgatggatgcaatcaatgctgcaggtgggttatcagaagatgctgattggcgtaatgttgtattaacacataacgggaaagacacgaaagtgtcattatatgcgttgatgcaaaagggggatctaacccagaaccatttattatatcctggtgatattctgtttgtaccacgaaatgacgatctcaaaatttttgtaatgggtgaggtaggcaaacagagtacattgaaaatggataggagtggaatgacattagccgaagcactcggttcttcggaaggtattgcgcagggaacaagtgatgctacaggtatatttgtcatccgacaattaaaaggcgataaacaaggaaaaatagctaatattttccaattaaatgctcaagatgcttcagcaatggttttaggtacagaatttcacttgcaaccatacgatattgtttatgtcaccaccgcgccattagtacgttggaacagggtgatatcacaacttgtgcctacgattactggtgttcatgacatgactgaaaccgctaaatttatcaaggactggccgtaa

SEQ ID NO: 252478 - DNA, 1362 bp, Klebsiella pneumoniae
gtggtaaatgacaacgatctgcgtaacgacctggcctggctttccgaccgtggagttattcatctgagcctgtcgacgtggccgctgagtcaggaagagatctcccgggcgctgaaaaaggccaaaccgtcttattcttctgagcaagtggtgctggctcgaattaaccagcgactgtctgccttaaaagccgattttcgggtcactggttacacctcaaccgatcagccgggcaccccgcaggggtttggccagacgcagccagcggataactcgttaggcctggcattcaacaacagtggcgagtggtgggacgtacacctccagggtaacgttgaagggggagagcggatcagcaacggatcgcgcttcaacgccaacggcgcatacggcgcggtaaaattctggaaccagtggctctcctttggtcagattccgcagtggtggggacctggctatgaaggtagcctgatccgcggggatgcgatgcgaccgatgaccggtttcctgatgcagcgagccgagcaggcggcgccagagacctggtggttacgctgggtggggccatggcagtaccagatctccgccagccagatgaaccaatataccgcagtgcctcatgccaaaattatcggcggtcgtttcactttctcacctttccagtcactggaattaggtgcgtcgcgcattatgcagtggggtggggaagggcggcctgaatcacttagtaacttctgggatggtttaacaggcaaggataataccgccgcaaacgatcccaatgaaccggggaaccaacttgctgggttcgattttaagttcaaactcgagccgactcttggctggccggtgagcttctacgggcagatgatcggcgaggatgagtctggtttcctgccttccgctaatatgttccttggtggagtggaagggcaccacggttggggtaaagatgcggtgaactggtacgtggaagcgcatgacacgcgaactaatatgagccgaacgaattacagctatacccaccacatctataaagatggttattaccaacaagggtatccactgggcgatgcgatgggtggggatggtcaactcattgccggtaaggttgagctgattactgaagataaccagcgctggagtacgcgcctcgtttacgccaaagttaaccctgagaaccagtcgatcaacaaagcgttccctcatgcggatactcttaaaggtgtacagcttggctggagcggggatgtttatcagtcggtgcgtttgaatacttcactctggtacaccaacgcgaacaacagcgacagcgacgatgttggggccagcgcaggggttgaaataccatttagtttataa

SEQ ID NO: 252479 - DNA, 534 bp, Klebsiella pneumoniae
atgttccagcgtcacgacctgacatggcagagtggcgaaggtaagcggatccagcagccagggaagctggctgttactctcctcaatggcgcgccgaagcagggacagggtgggataaagctgcaatacgcccggcaccgggggcagaagttctgtactcaggtagccgcagagcccatagcgtcgcgtaaagcccagcgactgatacagcgcgacggccgcatggttatcgcggatcacctccaggaataccgtctcgatcccctgctgttgcaaaagcatcagcagctcctgcatcagtttccggcccaggcctttgccgcgccaggccgggcgcagggcaaaggccgccaggcgagcggcactcccccggcgcgcgacgatcgcgatcgccgccggttcatctccggccagccagacgcgggaatcgaccaggctcatcccctcggcgctaaaacgctgaacaaatccctctaccgactgggtaacaggcaccaggtaggcttcaaaacaggcgttgagaatatccgttaa

SEQ ID NO: 252480 - DNA, 534 bp, Klebsiella pneumoniae; identical to SEQ ID NO: 134561

SEQ ID NO: 252481 - DNA, 864 bp, Klebsiella pneumoniae
atgtcctggtcaatcgatattatttcctgcataaccgatcgctttgtggaactcacggcgaccgaaaaacgcattgcgcagtttattctcgatgatgtcgcggcggcggcggagctgcccatcgccgagatagcgcgtctgacgcaaaccagccaggcttcggtcacccgttttgcccgggcgctcggctgtaaagacgtccgcgagctgaagatgaagcttgcgcaatctcttgcggtcggccagcggtttatcctcgatgttccggatctcgaaggcgtccaggggatctatgagtcaatcatcagcgtactggagaccaaccggcgggcgctggatatcgaggcgctgaagcgcgcggtgagctggctgagcgatgcgcggcagatcctcgccctggggatgggcggcggttcgaccatctgcgctcaggaaattcagtatcgcctgtttcgcctcggtctgccggtagtcagccagagcgatggtctgctggtacgcatgatgagctcggcggtgacgccgcaggatgtggtgatcgtgctgtctctgggcggctatacccgggaaatcatcgagagcgcggcgattgccagccagtacggcgcgaaggttattgcgattacccccgccggaacgccgctggctgaacaggcggatctggtgctaccgctgctggtacgggaaaacgactatatctttaagcccagcacttcccgttacgcgatgctggcgatggtcgatgtgctggccaccgaactggcgatggccaacaaaacccaggcaaaaggcaaattacgccgtattaagctggcgctcgacagccaccgcggcggcgtcgatcggcagccgctgggggactaa

SEQ ID NO: 252482 - DNA, 270 bp, Klebsiella pneumoniae
gtgcaaggtccctgggcagacaagcgcgcttctgcaggaggaacaccgtttaatagtggaagccccgatattcatggggaactcagcgagcgagagttgcagatattacaactgatcgctgaaggtcagatgaataaagaaattgctcgcaccctcgttatttctgctgaaacggtcaaatggcacatcaaaaatatctacgcgaagctcaaagtgaatagtcgcactcaagcgatgagccgggcgctggagatgaaattactggattaa

SEQ ID NO: 252483 - DNA, 465 bp, Klebsiella pneumoniae
atgagaggatgcatgatctggataggactggccaccctggtagtggtgtttgttgtgggatttcgggtgcttacctctgattcacgccgcgcgatccgccgcctgagcgaacgcttgggcatcacgcccgtcccgctggaatcgatgatcgatcagctgggaaaagccgccggtaatgagtatttgcgttacctggagcggccgaatgaagcgcatctgcagaacgccgcccaggtgctgctgatctggcaggttgcgattgtcgacgccagcgaaaaaaacctgcattactggtatcgcctgatgcaaaaagcgcgtttagcggcgccgattaccgacgcgcaaatccgtctggcgcaaggatttctgcgcgagctggacccggatgtgagcgatttgcataacctacagcagcgctataacgatctgtttctcccggaagacggcgtgcactggttgcactga

SEQ ID NO: 252484 - DNA, 588 bp, Klebsiella pneumoniae
atggccagcaccatcagcaccgatataggtcacacatggctcaccgtcttctgcaaccgccgcgatctgtttcagaattggagcaaccagttcataggcttctttctggccacctggcatgatggaaggccctttcagagccccctcttcaccaccggatacaccggtaccgataaagttaaaaccttcggcagagagttcacggttacgacggatagtgtcctggaagaaggtgttgccgccatcaatgatgatgtcgcctttatcgaggtaaggcttcagggaatcgatggcgctatctgtaccagccccggccttcaccatcaacaggatgcgacgtggtgtttcaagggattcaacgaactcttgtactgtgtagtaagggaccagtttcttgcctggattttcggcaatcacttcttcggtcttttcacgggagcggttgaaaacggagacggtataaccacggctttcgatattcagcgcaaggtttcgccccatcaccgccataccgacaaccccgatctgttgtttggacattacatactcctgtctggtgtggtcactgcgacgtgttcgcaagtttga

SEQ ID NO: 252485 - DNA, 513 bp, Klebsiella pneumoniae; identical to SEQ ID NO: 252434

SEQ ID NO: 252486 - DNA, 591 bp, Klebsiella pneumoniae
atgccgatttatcagattgatgggctgacgccagtggtgccggatgagagctatgttcatccgacggcggtactcattggcgacgtgatcctgggaaaaggggtctatgttgggcctaatgccagcctgcgcggcgacttcggtcgtattgtagtaaaagacggagccaatattcaggataactgcgtcatgcacggcttccccggccaggataccgtggtggaagaggacggccacatcggccacggcgcaatcctgcacggctgtgtgattggccgcaacgcgctggtgggaatgagcgcggtgattatcgacggggcggtaattggcgaaaatagtattgtcggcgcttccgccttcgtaaaagcgaaagcggaaatgcctgctaaccatttgatcctcggcagcccggcaaaagcgattcgcaccctgagcgaacaggagctggagtggaaaaaacacggtacccgtgaataccaggtgctggtcgaacgttgtaagcagacgctgcatcaggtggagccattaaaagagatggaggccgggcgcaagcgtctggaatttgacgaaaacctgcggccaaaatcctaa

SEQ ID NO: 252487 - DNA, 336 bp, Klebsiella pneumoniae
atgtacgaggcgtttatcgcattgttccggccgttactgccgctgctgcgcgacagcgagccgtcagagttgacgccggagcgctgtttccagatccaactgctccttatccatttctatcgccgtgtggtgcttaaagacccgctgctgccggaagagctcctgccggcgcattgggccgggcaaaccgcgcggcagctgtgcatcaatatttatcaacgcgtgacgccaggcgcgctggccttcgtcggcgaaaaaggcgaaagctcagttggcgagcttcccgccccgggtccgctttattttcaacgctttggcggtttgccgggcgtctaa

SEQ ID NO: 252488 - DNA, 663 bp, Klebsiella pneumoniae
gtggatgtctgttacaacaacaccaacgtcaagctgtttggccttaacgccggagccagctacggcccgctggccagcacccaccatgccattgacgatctggcggtgatgcgcggcttcggcaatatccagattttcgccccgtcctcgccgcgcgaatgtcggcagattattgattacgccatcggttatcaggggccggtctatattcgcctcgatggcaaggcgctgccggaactgcacgatgaaagctatcgctttgtaccgggcgcgatcgtcacgctgagggaaggcgatgatatcgcgctggtggccaccggctcgacggtgcatgagatcgtcgatgcggcgcagatgctggccgacgcggggattcaggccaaagtggtgagcgtgccatctcttcgcccctgcgataccgccgcgctgctggcggcgctgaagccgtgcaaagcggtgattacggtggaggagcataacgtcaacggcggggtgggaagcctggtggcggaagtattagctgaggctggggtgggtatcccgctcaaacgtctggggatcccggatggtgagtatgcggcggcggcagatcgcggctggctgcgtaaacaccactgtttcgatgccgcttccgtcgcggagctggcgcagaaaatgcgctga

SEQ ID NO: 252489 - DNA, 582 bp, Klebsiella pneumoniae
atgtcgtttgaattacctgcattaccatatgcaaaagacgccctggcgccgcacatttccgcagaaaccctggaatatcactacggtaaacaccaccaggcgtatgtcactaacctcaacaacctgatcaaaggcactgcgttcgaaggcaaatccctcgaagagatcgtccgcacgtctgaaggcggcgtattcaacaacgcagcgcaggtttggaatcacaccttctactggaactgcctggcgcctaacgccggcggcgaaccggaaggcgaactggcggccgcaatcgccaaatctttcggcagcttcgcggattttaaagccaaatttaccgatgccgcggcgaaaaacttcggcgctggctggacctggctggtcaaaaatgccgacggcagcctggcgatcgtctccaccagcaacgccggcaccccgctgaccaccgacgcgaagccgctgctgaccgttgacgtttgggaacatgcctactacatcgactaccgcaacgcccgtccaagctacctggaccacttctgggcgctggtaaactggaagtttgttgcggctaacctggcggcataa

SEQ ID NO: 252490 - DNA, 738 bp, Klebsiella pneumoniae
atggcgtccgattcgaccggcacgtcgacgctgatgacggtggtgtcgtcgcggccgttacaccatccactggtcaataaccttcatcttgccaacgccgcctggggcggatttaccatcctcgacgccggcggcgatgccgtccgctgggcgcggctggcgcttgccgataaccagattacgcatccacagcttttgcaggaagccgcagcggtgccggcgggggcagaagggctgctctttcttccctatctgacgggcgaacgcctggccgaacacaccaactcgcgggcgcagttttttggcctgcagcgcaagcatcgccgcggacatttattccgcgccgttcttgaaggggtggcctttgcgtcctggcgtaatcttcgccagctgcaaaagtgcgggcaatatccgcaacaaatgatcgcttccggtggcggcgcgcgcagcccgctgtggcttgaaatcaaagccgcggcgtacaatcttccgatattatctacgcgcaatcaggagaatggcgtcaccggatgcggtattatcgccggggttggcgcagggctgtacgccgattttgccagcggcgtgcggcaaacggtgcagttcgacaaagtgatctcaccggatccccgtctgcgggattattaccacgcctgcagcgagctttttgatacgctgtaccggcaatccgccgccttatacgacaggctggatgcgctcagcgtggggcccgactga

SEQ ID NO: 252491 - DNA, 423 bp, Klebsiella pneumoniae
gtgatccgctatcgtacccgcgatctgactcgcttgctgccgggaaccgcgcggaccatgcgccgcatggatcgcatcagtggacgcagcgacgatatgctgattatccgcggggttaacgtcttcccatcacagctggaagaggagatcctcaagtttgaacacctggcgccgcactatcagttagaggtcaatcgccgcggtcatcttgattcgctggcggtacgcgttgagctgaaagagagcgggctggcgttaagtcatgaacaacgctgccagatttgtcatcagttgcgtcaccgtattaagtcgatggtcgggatctccaccgatattactatcgtcaactgcggcagcattcctcgctctgaagggaaagcctgtcgggtattcgacctgcgtaaagcggtggtcagcggttaa

SEQ ID NO: 252492 - DNA, 306 bp, Klebsiella pneumoniae
atggcgctgaagtggatacaaagtcaggcagattataacaatgtcatgcagcatttgacgttgtcgccaggggagaagaaaggtaataaagaactgaatgaaaaagatgtgattaactttttaggtatcggggaacaaaaattgtttttttacaccaattatggcgaaaagctcaccttactgcataataacctcccggtttttgttgacccggatgagccatttaaacccatacctgacatccagatgtcagaatatcttgccatgatcgacgaccagcatccgacgggtacaatgactgcctga

SEQ ID NO: 252493 - DNA, 249 bp, Klebsiella pneumoniae; identical to SEQ ID NO: 251771

SEQ ID NO: 252494 - DNA, 150 bp, Klebsiella pneumoniae
atgccgggcattgcggaaacggtggacttcgcccatatccgcaaccattactaccgtagccataaaaccatcaacccgaccgggattatctccgttggtccgcagcaggatcttaacgaacctcacggccgcgatcttcgtttccgctaa

SEQ ID NO: 252495 - DNA, 147 bp, Klebsiella pneumoniae
atggttatatccataaccataatagctgctagctttttttactacaccattaagtatacaacctttaaccaatacaccactttgctcaaatctcttataacttacttcaatttctttaactgtattttcttcaaatcttgctactaa

SEQ ID NO: 252496 - DNA, 981 bp, Klebsiella pneumoniae
  misc_feature (936)..(945): n is a, c, g, or t
atgacgtacgggaatgttatcgattattggcagcggctagaatcacggcagtcggagtgggcttttcgcgcctgggagcggctgattaaaacattgagtcctgatgttcaggaaagaatacagctcagggaaagcgatgcagatccgtacgtggtcatctttggtaagacccaggtcggaaaaaccaccttactgctcgacctgatgggcatcgatcttcaacagatggcaacgctatcgcaggtgctgcgtggcgggcgggaagccgggaaatctgccaccgccaccgccatggagtatcgccgttcaccggacgcacgatggggattgtctgtgcaatcggaaaaacgctggtttacctctgacgacgcgctggcagaggcattagcgcagctgagacaacatatggaacggggggaactggttgtcgattccccctgtattgtgcatattccggggcgttttttcaggctgcaaaccacgggtgcgcccggcgtgcgtattctggatctgccgggcgataatcccgcgaatgcacaggagcaaaagcatgtcaatcaaatggcgaagacctatcttcccttcgctgatttggtgctgctgattggtcgtggcgacgatttgagcttcctgcagccggacgttatcacgctgccgggcattgaggactggcaggcgatgccgtaccggtttcgcatcgtgaccacctattcctactcagcccagtcggtgaagatgctgattcgcaacgatccggcttccgatatcacgcagttacgtcagcgccttattgaacagatcgaacgctttaaccgcctgagcggcgcggcgaaagatctgaacctctactttccactcgagtttggcagcagctggctcagtatggcggaaaacgatagcgccctgtatgcccgcgttgcccccatagtcagcagnnnnnnnnnntgcccgcgttgcgcccatagtcagcagcttgcgtaa

SEQ ID NO: 252497 - DNA, 315 bp, Klebsiella pneumoniae
  misc_feature (301)..(310): n is a, c, g, or t
atggatcagttcaagaaaaagagattgcccctcctgattgcgggagcgggcggcaaaaagagctcaggctcaagccgtacaccagttgaagcggatgataccgttaattcgcgggccatggcgtctatcctcgatctgctcggggaaggtgttgttggtgggcttattaacggtgctaaatctatcttcatcgatggcgtggcgctggagaacgaagacggatcattcaactattccggtgtaacctgggatttccgggatggttcgcaagaccaaagcccgatgcctggtttcgattttnnnnnnnnnngttaa

SEQ ID NO: 252498 - DNA, 486 bp, Klebsiella pneumoniae
atggcggaatcacagcccctatccggcacccctgaaggtgccgagtatctcagagcggtgctgcgcgcaccggtctatgaagcggtacaggtaacgccgctgcaaaaaatggacaagctctcttcgcgcctcgacaacttcattctggtcaagcgcgaagaccgtcagccagtgcacagctttaagctgcgcggcgcgtacgcgatgatggcgggcttaacgcctgaacagaaagcgcgtggggtcatcaccgcttctgcgggcaaccatgctcagggcgtggcgttctcctctgcgcgtctgggcctgaagtcgctgattgtcatgccggtggcgactgccgatatcaaagttgatgctgttcgcggctttggcggcgaagtgctgttgcacggcgctaactttgatgaagccaaagccaaagcgattgaactggcgcagcagcagggctttacctgggtctggcggcgggcgtggcggtgctga

SEQ ID NO: 252499 - DNA, 267 bp, Klebsiella pneumoniae
atggataatgtgggtcagaaagtggatgggatgattgcagagaataaacaacagcatcaggaaacccgtgaaaacatacaacagcaaggcgttgaagtgaaaaaagagaatgctgaactggaaaatgaccacaaaacaaaaggaaatgatttcaaaaattcttataatgataagaaagagcatcaaaccagactgcctggcgcggattcaaccaaagaactactggataaggcaacaaaattagaaaacgagaaaccaaagggatag

SEQ ID NO: 252500 - DNA, 384 bp, Klebsiella pneumoniae; identical to SEQ ID NO: 227591

SEQ ID NO: 252501 - DNA, 1293 bp, Klebsiella pneumoniae
  misc_feature (1247)..(1256): n is a, c, g, or t
atgaagctattacgcctaaaaatctctgatccgtccggcttccgtagtctgccctgtggttttgaacactattttagaaccgaatgggatttacaggaagaattgaatcaacatgaaggctttgcgccttttgtgtgtgctggtcccaacggcagtggtaaatccaatctgcttgaagcattagcagctatcttctttcagttggaaattttgcgggtccgtcgaagttttttgcctgaggtattgcaaagtaccgatcatgatttatcaccaatctcatttgagctggattatctaattcgagtaccagaagagtttcgaatctctggcggacaagaatgggcaaaagtctccgtgtggaaaaacaacggggaatctgtgcgtttccattgggtaaatcagagtgactttgacacaaatgctgatgaagttttcaagggaagccatgccgatattctattgcctcagtatgtgttgggctactcgtctggcgagaatgaaattctcagtctaccgtttttcaaaatgcgctttgtacagttcgacgagtactggaatgccttgactcgacaactgagctactctggccatccggagtcgaggttggcctatcttgacagtggtttcagccaagctattttactttgtaatctgctttttcaaaacgaaactgcgcttcaacctttccgtgaggatgttggtatagaggcgttgcgggagtttcgtattattatccgtcgcagtattcctcttgcgccggagcagttgacctcgtttgccagcgaggataaaaaccagcaccaatcacttgatgacattttgaatagtaaccctgctctgcatgtggatatggatgaagaaagtggtcaaagttaccatttaaacctgatgcagctgctggaaggggatgacaaatcctccttggtagtcagcgcgcttaaacgctgcgctagcttgtattacgaggacgagtgtaacgacactctaattctggactactgggttaatgatgctactcgacaggcttttcgcgagaattttaatggttcggcactggctctattccaggcgttccaagtattgctgacactcaatttgtataaggtgagtgataatctcaaaactgatctgtatcgctcaacaagtcactatgtcagtgaaacggtaccaacgttggcgtccgacgaacgaattatgcgcttcaagtttgtgcgttttactaaacaaggagtggaagagccaatgannnnnnnnnnctctcggacggtgaacaccaattgcttcatagcctag

SEQ ID NO: 252502 - DNA, 174 bp, Klebsiella pneumoniae
atgacggcgcaggcacggctggcggaattatatccggacgttgattctaagtttggtgaaagtgactatgagcatatcaaagcttgggtgttcaaagctctggctattggtacactgaagcaggtattcaatgacgctgacaattgcattgaacttaaggcggttttggtatga

SEQ ID NO: 252503 - DNA, 1398 bp, Klebsiella pneumoniae
atgcacgataaatacgatgtgctgatcatcggcgggggtcctgggggatacgttgccgccatccgtgccggccagctagggcttcgtaccgtattagtggaaaaacaacatctgggcggcatctgcctgaactggggatgcattccaaccaaggcgctgctgcatggcgctgaggttgcgcacactatcacccatgccagtcagctgggcatcagcgtgggcgaggtgaacgtcgatctgcagaaactggtgcagtttagccgtaccgtatcgcaacagctcaccgctggggttgcgtacctgttgaagaaaaatggcgtgagggtgattgatggcaccgcgcggctgcgcggcaaggggcaaatcacggtcgaggatgcccgaggggaggcgcgcgattaccgggccgatcacgtgatcctggcaaccggcgcccgaccacgcgcattgccaggcatagcgccagatggcgaacatatctggacctatttcgaggcgctgcggcctaagcttttacccaagtcgctcttaatcatcggttcaggggcgattggcgtcgagttcgccagcctttataacgatctgggctgtaaagtgacgctggtcgagctagcgtcgcagattttgccagtggaagatgccgaggtgtctgcagcagtgcgtaagtcattcgaaaaacgcggtattcagatccatacccagaccctggtgacgcaagtacagctcaccgataccggggtgcgctgcacactaaacaacaccggcggcgaatattctcaggatgtcgaacgtgtgctgctggcggtcggcgtacagccgaatattgaagatctggggctggaaacgctgggcgttgagttagaccgcggttttatcaagacggacgcggcttgtcgcactaacgtatttgggctttatgccatcggcgatgtagccggcccgccgtgtctggcgcacaaggccagccacgaaggcgtgctctgcgttgagaccctggccggtgtcgaaggcgcccaccctctcgatcgcgactatgtgcctggttgcacttatgcccggccccaggttgccagtctgggcctgacggaatcgacggccctggccaggggacggcccatcaggatcggtaagttctcttatcagagcaatggtaaggcgctggtcagcggcgagacagagggttttgtgaagacgattttcgatgctgaaaccggcgagttgctgggcgcgcatatggttggcgcacaggtcacggaacagatccagggctttggcatcgcccgtcacctggaggccacagacgaaagcctcctgtcgatgatctttgcgcatccgacactttccgaagcgatgcatgagtcaatcctcgcggcctgcgaccaaccgttgcatcaataa

SEQ ID NO: 252504 - DNA, 1536 bp, Klebsiella pneumoniae; identical to SEQ ID NO: 213864

SEQ ID NO: 252505 - DNA, 1020 bp, Klebsiella pneumoniae; identical to SEQ ID NO: 213863

SEQ ID NO: 252506 - DNA, 960 bp, Klebsiella pneumoniae
atgctcagcaaacaggcgttattgcaggcttaccgcaagatgcgggagatcagaacatttgaagagcggttgcatcaggaaaataccagcggtgatattccgggcttcattcacctttacaccggtgaggaggccatcgcggtgggggtctgcgaaaatttaacgagcgcagattttattggttcaacacaccgtggacatggccactgtattgctaaaggttgcgacattcacggcatgatggccgaaatattcggtaaggacagcgggttatgtcgcggtaagggcgggtcgatgcacattgccgatctgtcgaaaggaatgctgggggcgaacgctatcgttgggggagcccctcccctggccatcggcgccgcgctaacggcaaagacgctaaaaaccggcaacgtcggtgtctcttttacgggcgatggtggttctaatcagggcctggtctttgaagccatcaatatggccgtcgtgctccagcttccagccgtctttattttcgagaataacggttacggcgaaggaaccggccatgactacgccgtgggtgggcgtgatatcgcccggcgcgccgctggcttcggcctgccggcagtgaccgtcgatggcaccgatttctttgccgtttatgaggcaacctcagaggcggtcaagcgtgcgcgagaaggcggtggcccaagcgtcattgaggccaaagccttccgctggcatggtcattttgagggcgatcccgcgctatatcgtgcggaaggtgaagtgcaacgcctgcgtgaacaacatgatccgctgaagattttcaccgctaaggtcaagcaacatatcacccaggaagaactggcggcgattgacgaggaagtagaagccctggtcaacgatgccgtattgaaggcccgcgccgctgcctacccggctccggaagacctgctgacagacgtgtacgtctcatactga

SEQ ID NO: 252507 - DNA, 759 bp, Klebsiella pneumoniae
atgcgaaacagcaaaattattaccgcccagcgcatgctactggttcgcctttaccagctggcagaaaagcgcgatcgagtaatagacgtcccccgccccattgctgtttatctttccgaactgaaataccatttatccaggtcagcactggagggattaggggcagcgcgtgataaaggcgtgcatattattatggaccaccagtccattgccgatttaaaagactgcccggcagatttgaaaggtgacgccgttgtcggtgcggtcgttgaaaatgccaaattcaaactggtttaccgggttatggacccggatacagcggaatgggtagcgagaatgtcaggcactattctggtggatgacgaactccgtaaggctaaaacagataatatgctcacggagaccatcgacagtgagcgcacaatccgccaggccgaacgtttctttattgacagcaatatgatcctgaacctgcccgattttgtcagctttatctttacgacaaaaacgctaccttctgcttcactgatctcgccgataaaggtcagaaagcgccagctaaaaactttttcggtttcccctgatattgccgcaacggtagcccccgtgaagatcatgctggatttttgcgaggatgataaacccgccatgtcggatgtgatgacaacacacccggctcttttcttcgacgaaagcgaagtcaaaccggtaaagccgaaacctgatgatgaagaacacctgtccccgctggatttttaa

SEQ ID NO: 252508 - DNA, 141 bp, Klebsiella pneumoniae
atgaacgacgaaaacaaaatgcctgtgccggatgaagcgcaggcattcccggcacacgctgaggatgatattgccacgcttgagcgggaagcccgcgctaaaagggaggccgagcttctcaatgcgcaggacgacgaatag

SEQ ID NO: 252509 - DNA, 315 bp, Klebsiella pneumoniae
  misc_feature (206)..(215): n is a, c, g, or t
atgaatagagtcggatattttctgcgccggccagccctgctgctctcgctgctgtttattctcctggtggtgatgagcgcgctgtttgccccctggctcacccccttcgatcccgatgaacagtttgtcgagggactgagcctggaaggcgcaccgctttctcccaacagcacttactggctgggaaccgatctgctgggacgcgnnnnnnnnnnatctcttctcgcgtttaatttacggagctcgtacttcgttactcatcggtgttgtcgccaacggcactgcagtactgatcggcgtcctggtagggcttag

SEQ ID NO: 252510 - DNA, 735 bp, Klebsiella pneumoniae
atgaatgatcgacgttatgccttcatgtatcaatctcccaaggaatacgaaacttatgaagcattgcacgaactagcgagtaagttactcggtacgggaaatgttgcagatggcgtaaacccaggtatcaaaattatcgacttttcagaagttccctcagatattttacctgttgtagtaggtttggttgggaggttgatctatcaaattcagttctggagcgatccgggtaaagatggtgatggacgtcatccagtagtgatcgtttgtgatgaggcacacttgtaccttcccagcagtgcagcctctactggaccattagaaaagcgggctttggagaactacgagcgcatcgcgaaggagggacgtaaatacggtgttggtttaatggtggttagccagaggccttctgatgtgagtacaaccattttgagtcaatgtagcaacattataagtttgcgtctcgctaataagacagaccaatctgtggttaagcaacttttgcccgagagcttggaggggttgatggaggtgctgccgacgctggacgtaggtgaagctgtcgttgtgggagatgcaacattgctacccacacggattaaaatgtctaagcccaagcatgaacctcgtagcgcaactattccgttctggacgcgctgggataagccaaaggccgacgttgatttgattgctgccgtagagaacatgcgtcgacagtcgcggaccaacgattga

SEQ ID NO: 252511 - DNA, 228 bp, Klebsiella pneumoniae
atgggaaggctgggcgttgacgtccgccagaatgaccatatccggattaaaacgctgctgctcatgcgccagctttgcccgactaatgagcttatcctgttccatttcgcgctggacaggatcacgggattcattaaagaaataacgctcccagacctgatcactcagcgcctcacggcgcagctgttcctgctcgttatcggcagcgtacagagtgatcaggtttga

SEQ ID NO: 252512 - DNA, 384 bp, Klebsiella pneumoniae
  misc_feature (281)..(290): n is a, c, g, or t
gtgtcagaaatcccagacagaaataaaaagaggatgtcagaagtgccatctgcatttttcagctcgcccgcagccggcggcatcgtgctcatcatcgcctcagcagccgctatcatcgtggctaactctccgctcagggagggatatgaggtattcctgaaatacaacgccgccggcctctccgttgagcactggataaacgacgccctgatggccgtgttcttcatgatggtcggcctggaaatcaagcgcgagcttctcaccggtcagcttgccacctnnnnnnnnnnccggtcagcttgccccctggggccagcgcgcgctgccgggatttgccgcgctgggcgggatggccgtgcctgcggccatttacgtatggtttaa

SEQ ID NO: 252513 - DNA, 678 bp, Klebsiella pneumoniae
  misc_feature (658)..(667): n is a, c, g, or t
atgagtgagcaaattagattgagctatcatgaaattgattttcttgttcctgttcatcgatttaacatccagttttcatatgtaactaagcaaggcttatctttcatcagagaatttgtattacgtttagtacagcttgcacctatgaaaccttcacaaatagcaacttatatcggattaaataaggccgaagttgatgaagctatttctgatctcatggataagggagatctgcgttttaatacgcatgggagtgttgaacttacaccacaatctacaggatactttgatagtattggttcctcccctaagacttcatcaattcaggaaacgggttctacattgtcgttcgagttatgtggctttaattgcataggaaataagcgtacattcgatcgctggaagcaagggattgaattgcatgttgacaacaaactattatcttgctcagaaaatttagctaaagaaaaattccagaaagaattctataaatatctcgacaaaggctatctcaagggtgttagaactgaagggacggatcgcccaagcatatacacaatggatgcagtaaacaaattaacaaaagatgctcttagattgacttgcaaattctatgttgatgtagatggaagacctattgaacgagaggatttcgatnnnnnnnnnnctattagatga

SEQ ID NO: 252514 - DNA, 642 bp, Klebsiella pneumoniae
atggcccgcaccgtcagcaccgatataggtcacacacggctcgccgtcttcagccaccgccgcaatctgcttcagaattggtgctaccagttcataggcttctttctggccaccaggcatgatggaaggccctttcagagcgccctcttcgccgccggaaacaccggtaccgataaagttaaaaccttcggcagagagttcacggttacgacggatggtgtcctggaagaaggtgttgccgccatcaatgatgatgtcgcctttatcaaggtaaggcttcagggaatcaatggcgctgtcggtgccagccccggccttcaccatcaacaggatacgacgtggtgtctcgagggattcaacaaactcttgtactgtgtagtaagggaccagtttcttgcctgtgttttcggcaataacttcttcggtcttttcacgggagcggttgaaaacggagacggtataaccacggctttcgatgttcagcgcaaggttacgccccatcacagccataccgacaaccccgatctgttgcttggacattacttactcctgtctggtgtggtcactgcgacacgttcgcagcttaaatgtgatgataatgttagcccaaagtacaaagagctcatagtgaaaatttgttaa

SEQ ID NO: 252515 - DNA, 366 bp, Klebsiella pneumoniae
  misc_feature (309)..(318): n is a, c, g, or t
atggatatctttgttaagctcttttcgggcattggcactttttttattgaagacccgaaaatagccattgcacgttttctgttaattgttctcggctttatattggcctggatgggattccgccggaagcttgaaccgttaattatggtgccgatgggccttggtatgattgcagttaacgccggggtactgtttctggcaggcggacaaaccgggaccttaattctcgacccgatggtcagcgaacctaacgagctggtaaacctaatgcaggtaaacttcctgcagccggcctataatttcaccttnnnnnnnnnngcaatggcctcatcgcctgtatcgttttcttcggcattggcgcaatga

SEQ ID NO: 252516 - DNA, 942 bp, Klebsiella pneumoniae
gtgtacgcggatgatcagatggcaaaacatcttgccgcaccggacccgcattcacagtatgcacagaaagaaagtcctacgtttaccgggacacccaaagcgccaacgccagcggcggggaataacaccacgcaggttgcgaccaccgcgtttgttcaggaggcactgacggctcttattaatggtgcgccagccacgctggacacgctgaaagaaatagccgtagccattaacaatgatccgaaattcagtaccaccattaacaatgcgctggcactgaaagcgccgctgtcgagtccggcactcaccggaacgccaacagcccccacggcggcgcagtcggtcaacaatacacagattgccactacggcttttgtgaaatcggcgattgcggcaatggtgggttctgcacctgcggaactggatacactgaacgaactggcggcggcgctggggaatgacccgaactttgccacgacaatgcttaatgcgctggcaggtaaacaaccgttggacaatacgctgactaatttgagtggaaaggatgtgactggtcttctcgcataccttggtttaggggaattgtctgctgctggggttagcggtggcgctgcatctgcttcaggatacatcaccattccgatgattatcagtggagcacggcgggtcttatacattcaatggggaggatttactggagctacaggtagctccggctctgacggggtatatgaaacctcaaatatcaccgtcacctggccagttgctttccccaatgcggttttccaggtgataacaggcggttcatctgatgttagtggtgtcgggcagcaagagatggcatggagtctgggcaagacaaaaacttatgggatttttggttttcaatgccgtaccccaaacgcatcgatgaatggctcatatcttgcaattggctattaa

SEQ ID NO: 252517 - DNA, 318 bp, Klebsiella pneumoniae
atgttggccacgccctgcgccttgcactcgcggtttttatcgctcggcgtgtcggtcatgtcgtccacgatggtggcggtcatcatcgactccagcagccccaccacggcaagtcctgccgagtacggcagaataatcatcagcgtgtcgaggttaagcgggatatccgggatcagaaacaccggcaggctgtccggcagtttgcccatgtcacccacggtgcgcacgtccaggtgcagccacatggaaatggcggtcagcacgatgatgcagaccagcggcgagggaatggttttgttcagatacgggaagagataa

SEQ ID NO: 252518 - DNA, 510 bp, Klebsiella pneumoniae
  misc_feature (116)..(125): n is a, c, g, or t
atggaggcaatgttcaccggcaccatgacggatgcgtactcgctgaagcccagcgtaaagaagtcagccgttacgatgttcaccaggttcgatacgatgagcggcaggctgggggnnnnnnnnnngatatacgtgaacagcagccggcccctgccgcctccccagcgggaaacgtgcagcgcggcccactcaaaaaagccggactcatcgagcagcaggctgataatgatgaccgcaatgaacgtgcccgtggcgttccagacaatctgccagaccaccggaatatcaccgatgtgcaccacgccggtcagcagcgccagcgccgcaccgatgacggcactccagccaatgctcagccccttcggctgccagatgaccagtaccagcgtcaggatgaaaatcgcacctgccagaaacatacccgctcctattgaatacaaatgcctgttaaaccggactgataaattttcgatgcgtaatatattcgataatccagatatataccggtaa

SEQ ID NO: 252519 - DNA, 537 bp, Klebsiella pneumoniae
atgatggatgcgatagaaaagttacttttcgtttctgaggaagcgaaaaaatggatctaccaccctatgatgaagaaggttaaacaccatactttacaccagtaccggcgtgagctgtctaccagtggaaatcagatccttgctttaattcctcatgaacttccgataagcatgaacgccctcccatcctccccggcacagcagtggcatcaccttcgagccacgattaaccttctttgtcgcctgagccgttctgatatccctcaaggcagtattgcctttgaagaactggtttattatatcccccggcttctggaagcatctgaatctatcaatgttgccgcttacgaacgatggtatgacttctatatacgcaaaaaaggagagggtgtactgaatgaggctaaaattgaatttttgtcttttatagtgaaaatcattaactggaacttgtccatacataaccttcccaccttcgatagcaagcaggcctttcgggattggtttttgctaaatgatcctaacaagtcgctatag

SEQ ID NO: 252520 - DNA, 1053 bp, Klebsiella pneumoniae
atggcagtacgaaaactcaccacaggaaaatggctttgcgaatgttaccccgccggacgtagcggacgtcgtgtgcgtaaacaattcgctaccaaaggcgaagctctggcttttgagcgtcacacgatggaagaaagcgaagcaaagccctggctgggcgaatcagtggatcgtcgaacactgaaagacgtggttgaactatggttcaaactacatggtaaatctctgacagctggccagcatgtctatgacaaactgctgttaatggttgacgctctgggcaatccccttgcaaccgatctcacatctaaaatgtttgcccactatcgagataaacgcctgacaggagagatctacttcagcgagaaatggaagaaaggagcaagcccggtcaccattaacctggagcaaagctatctaagtagtgtttttagcgaactatcccgcctgggcgaatggtcgtatccgaacccactggagaacatgcgaaaattcaccatcgcagaaaaagagatggcatggcttacccatgagcagattgttgaattactggctgattgcaaacgtcaggacccaattctggcactggtagtcaagatatgcttaagcacaggcgcacgctggcgtgaagccgtaaatcttacccgctcacaggtgaccaaataccgaattacctttgtaagaacgaaggggaagaaaaacagaagcatccctatcagtaaagagctttacgaagagatcatggcgcttgatgggttcaatttcttcacagactgctattttcaatttttatccgtgatggaaaaaacgtctatcgtgctccctcgcggtcaactgacacacgttctgcgccatacgtttgcagcgcacttcatgatgtcgggtggaaacatcctggccttacaaaaaattctcggacatcacgatataaaaatgacgatgcgttacgcacatctggcaccggatcatctggaaacggcgctccgtttcaatcctctggcaacgctgccaagtggcgacaaagtggcggcagcggttggcattaccccgtaa

SEQ ID NO: 252521 - DNA, 240 bp, Klebsiella pneumoniae
gtggtaactctgggccgtgcgggcattggtgccgaggaagtaaagcgtagccccgttgggaagcaccatcggatcgcctttcagctccacttccacttctttggcgaagtcgatgatgtactgtttaaagacgtgggcctgtgccttactggcggaaaggaaaatctggttacgtccggtaagcagggcgtcaatcagggcttcacgggcaaagtaaaaggtcgcgccgatctggcgtga

SEQ ID NO: 252522 - DNA, 765 bp, Klebsiella pneumoniae
atgcaatatctaaaagatattacagcacttgatatttccgaaataacagatgctgttaaggcagagggtcataacaggatggctcaagttgtacgcatggtactaatagatgtttttaaggaggctcaacatgctggtcatgttccgccaggatacaaccctgcccaagcaacgaaacagccacgaaacaagataagcagacaaaggctatctctggaggaatggaaggctatttatacatccgccgaacaacaacaaccttatttacaatgtggaatgttgcttgccattgtaacagggcaacgcctaggagatatttgcaatatgaagttttcggatgtatgggatgatatgctgcatattgagcaggagaaaacaggaactcgattagccattcccctttctctcagaaatgaagcgttaaatattactctgagtgaagttatttcaaaatgtagagatgctgtggtgagtaaataccttgttcattttcgccatagcacctcacaggctagtcgtggtgaccaagtgtcagccaagacacttacttcaacgttcaagaaagcacgggataaaagcggtctaacctgggaagagggaacagctccgactttccatgaacagagatcactttccgagcgcttgtatcgtgagcaagggatagacacccagaaactattgggccacaaaacaatgaaaatgactgacagatacaatgatgaccgcggtaaagagtggatcattgttggtaaaaaagcagtatga

SEQ ID NO: 252523 - DNA, 762 bp, Klebsiella pneumoniae
  misc_feature (70)..(79): n is a, c, g, or t
  misc_feature (748)..(757): n is a, c, g, or t
atgacggagtcaccgcaaacgcaatctgaaatctctattcaccagttggtggtcgggaaacctgcaaacnnnnnnnnnnttcctgctcagtgtgaactgctgcgctgttcgttgcaggaaggtatggatattttgctctggaggggccattttgcgcggcctgagacgttgcagctacacgacgatctgggcaggattaacttctcgtgcatcctggaaggcacatcgcgctttgcgattcagggactccggcgccacaccgactgggagcttgcgcgcaatcgccattacattacccatacgccagactgtcgcggcagcgcctcctattgtggccgattcgagagcattaccctctccttcagccctgcaaccctcgcgttgtgggtgccggatattagcgcggacattaagaataagatcgactcccactgctgttgccagcagcagcgttgtaatgctgaaacccacttaacggctcaggccttgcgtcacgcgctgatgcgcatgcacggcggcttcagtcatgaacaaaagccgtcgacgctatggttgcaggggcaaagtctggtcatgctcagtctggtgctggatgaacatcgcgaagacgccagttgcctctcctgccacttcaacccgatggaacgccagaaactgctgcgggcgaaggatctgctgctggctgatctgacgcaagcgccgggcgtcgcggagctggccagagagtccggtctgagcgttctcaaannnnnnnnnnattaa

SEQ ID NO: 252524 - DNA, 150 bp, Klebsiella pneumoniae; identical to SEQ ID NO: 135614

SEQ ID NO: 252525 - DNA, 756 bp, Klebsiella pneumoniae
gtggttgaccatcgcgccgccggcggcgacatctttgccgctctccatgcagccttcgaccagcagcgacatcagcggcttcggcgccacatcgcggtggacgcgctggctgatgacgcgcaggtcgccggtatccagcccctgatagctatcgaacagcaccatccgcccgcggttgagcacgaactcgatagcgataggccactgggtgtagccagtggaggtccactggtagatgcgcccggatttttgcggttcaacgcagcccatcaggcagtaatcgcgggcgtcttcaaaatcgaagcctttgcgcagcatcatcttgatgtgggagtcatcgaagtggcaggccgggaaacccatccccgctttcaccacgtcgacgattttttccatgtatttctgcggcgactggttgtggatacggcaggccagcgacggctggtaaaccttcacgaagcgcacggcgtccataatcagataggtcagatcgttacaggcatcgccgccgctacgtttctggcctccaacggtgaggttgataaacggctgataacctgcgaaatatttcgctcccagctcgctcgacatccacatcagttcggcacatttgatgatgaacgcctgcagcagttccagcgcggtgtcgtgggtcaggcggccttcgcggatatcggcttcgaacatcgggtagcagtactggtcgacgcgccccagcgacagcccggtctggttctcttcgatttcaaacagtga

SEQ ID NO: 252526 - DNA, 723 bp, Klebsiella pneumoniae
atggaaggcttaaccccgcgtatgcaacgcctgcgtaaccactacctgacggtgcgcccgagcgtctctatctatcgcgcgctggcctttaccgaagtggtgaaagccaacccgggcatgccgaccattctgctgcgggcgaaagccttccgccacgcctgcgaaaccgcgccgattctgattcaggacgatgagctgatcgtcggccatccgtgcggcaagccgcgcgcgggcgccttctcgccggacatcgcctggcgctgggtgcgcgacgagctcgacaccatgagcacccgcccgcaggatccgtttgagatcagcgaagcggataaaaaaaccattcgcgaagagatcgtcccgttctgggaaggccgttcgctggacgagatttgcgaagcgcaataccgtgaggccggcgtctgggccttcagcggcgagaccttcgtcagcgacctctcctatcaccagattaacggcggcggcgatacctgtccgggctacgacgtgctgctattcaccaaagggatgaacggcattaaagccgatgccgaagcgcatctggccagcctgagcatggaaaacccggaagatatcgaccgtatctactactacaaagcggcgattgaaacctgtgaaggagtagtcaactacgcccgtcgccaatccgccgaagaccttgcaggaagcgctgcagagtatctggaccgtcgaatcactgtttga

SEQ ID NO: 252527 - DNA, 300 bp, Klebsiella pneumoniae
gtgatcccgaccgggattatcgcccgcaccgtgcgctcgcaggtggccgatatcctcagccaggagtttatcgttggcctgcgcgcccgcgggctcaacgagtcgcgcatctttgtccatgtcatgaaaaatgccgcgcccaccgcgctggcggtgatggggctcaataccgccatttttcagcgcgacctgcccctgctgcagggcaccatctgggtgctggcgctgtttttcgtgctgctcaacctgctggtggatattctgcagaccaccctcgacccgcgtattaagaggagctga

SEQ ID NO: 252528 - DNA, 261 bp, Klebsiella pneumoniae
atgcttcagggtcgcttcccgtgtgcaaaaattttccacctgcagatcacgttcgcaggtatggtttgtgaactcgcttcggttcacaacctgggcggtacaggactgtccggtatcaccgacaatgctgtcggcacgggattcggtatcctttgcggcctgaataaacggcgcatcctgagatatctgatccggtggccggttcgtgaacgactcagtaatcgctttgccggtatccccctggctgaactccagggctga

SEQ ID NO: 252529 - DNA, 513 bp, Klebsiella pneumoniae
gtgcagtcagcctattatgacatcaccgaggatatcgttgagataaaggctgaacctaagctgtttgagctttaccacatggacagaagggtactgctgcggctgaaagccattgacgccctgcagcgcaaggaatcagcccaggcgctttatacctacatcgaaagtcttccccagaatcctgcacctatttccatgaaacggatgcgtgaccggctgaatctcacctcaaatgtctatacgcagaaccacacggtgcgtaaggcgatggagcagctgcgggatattggttatctggattacaccgagtttaaacgtggccgagccacctatttcagcgtgcattatcgcaaccccaaactcatcagtggtcctgtgaaggttccgcgcaaagcggaagaagagaaggcgccagagcaaaattatgacgaagtcattaaggcgctgaaggctgctggcatcgatcctcttaaactggctgaagccctctcagcgatgaagccagaaaattga

SEQ ID NO: 252530 - DNA, 657 bp, Klebsiella pneumoniae
  misc_feature (256)..(264): n is a, c, g, or t
gtgaccgccggtggccgcagcccaggctttagcaatcgccataccttcgcctttcggatcgttttccgggtgaacggcgatcagggtcggaacaccgaaaccacgtttgtactcttcacgcacttcggtacccgggcatttcggcgctaccatcaccacggtgatgtctttacggatctgctcgcccacttcaacgatgttgaagccgtgagagtagcccagcgccgcgccatctttcatcagcggctgtacagannnnnnnnngtcggagtgctgtttgtctggcgtcaggttaaccaccaggtccgcctgcgggatcagctcttcgtaggtgcctactttgaagccgttttcggtcgctttacgccaggaagcacgcttttcagcgattgcttctttacgcagggcataggagatatccagaccggagtcacgcatgttcaggccctggttcagaccctgagcgccacagccgacgatgaccacttttttaccctgcaggtagctcgcgccgtcggcgaattcgtcgcggcccataaaacggcatttacccagctgcgccagctgctggcgcagattcagtgtattaaagtagttagccatgatggtgtactccgtgatgttgtgtgtcgttactctatggatttcaagttgtag

SEQ ID NO: 252531 - DNA, 279 bp, Klebsiella pneumoniae
  misc_feature (223)..(232): n is a, c, g, or t
atggagttcgccggaaagggacggcccctgctgatcgagggtatggcgcaactgctgatattgcaaaagcgtctgttgggcaaacactcgcagctcttcaccggcttcggtcagcgtgaccgtgcggttatcgcgcacaaacagcggctggccgagatcttcttccagccgctgaatctgccgggaaagcgtggaggggctgacgtgcatcgcccgcgcgctnnnnnnnnnnaagtggcggctttccgccagatgcaggaaggttttcagatcgcgtaa

SEQ ID NO: 252532 - DNA, 708 bp, Klebsiella pneumoniae
atgaaaggattactgctgttgctcggcgctggcggaggctggcaactctggcagtcggaaaccggcgaaggtctgcgggcagattaccgcaccgccaaaggcgcagtcagccgtcagcaactggaagatggctccctgctcacgctgaatacccaaagcgcggcggatgtgcgttttgatgcgcatcagcgcaccgtccggctctggtacggtgaaatcgccattactaccgcgaaagatgcgcagcaacgccccttccgcgtcctgacccgtcagggccaactcaccgctttagggacagaatttaccgtccgccagcaggataatttcacgcagcttgacgtgcagcagcacgccgtggaagtgcttctcgccagtgcccccgcgcaaaaacgcatcgtgaacgctggtgaaagcctgcagttcagcgcctctgagtttggcgcagtgaaaccgctggatgacgagagtacaagctggacgaagggcatcctgagcttcagcgataaaccgctgggtgaggtgatagccacgctaagccgttaccgcaacggcgtgctgcgctgcgatcccgccgttgccgggctgcgcctgagcgggacgttcccgctgaaaaataccgatgcgatcctgaacgttatcgctcaaacgcttcccgttaaaattcagtctattacgcggtactggataaacatttcaccgctgtaa

SEQ ID NO: 252533 - DNA, 858 bp, Klebsiella pneumoniae
atgtccggcagtgcttttgccgttacgcaccacgccttcagtagcggagcaggaaggacatctgatggaaatggaagccacgcaagcaccttaaaatcaccatcatacactaaatcagtaagttggcagcattacccagttcttattgagaatagcaatgcaattgtaaatggaaaaggtagaagatatagacgtaattgggaatcacgagtcaaaacaggacatgatgtaattcggtctttaaacaaagctgtgtataatgcattagaagacattcaattatttcgcacagaaaataatagcacacataccattcttaatggtgatacaagaaaactgctaaaggatattaaaaaggcagacgttattattttctcccctccttatcctaattcttttgattatacggatgtgtacaatattgagttgtggatgttagattaccttaaaaatgatattgataataagaaattaaggaaccaaacatttcgatctcatgttcaggcgaaatggaatttcgatgcagatatggaactaaactctaaaaccttaataacggtttttgataatttaaataaattgaggaaggatctttggaacaaaaatatacctgagatggtttataattattttgaagaccttcaaactatttttaaagaatttagtagaatattacctgtaaaccatcacgccatagttgctataggtgatagccaatatgcaggtgtacatattgacgttggtgtcatacttgaagaaattttgatatctcttggttttgtactccaagaaaaaggtgagatacgttcaatgaggagcagctctgaacattgtttggttttcaaaaaaataaggtaa

SEQ ID NO: 252534 - DNA, 300 bp, Klebsiella pneumoniae
atgaacgtggaaaccatgaacatcggcatggtgcacaacttcaagttcctcaaagggctgctggataccccggaggggcgccatggactgattaccttgctgcgtaccgcctcgattctcggcaatggccagatgcagttcagctatgtcgataacgaagtgctgaagaaagcgcagcaggagccggagaaataccgcgacctgatcgtccgcgtcgccggctatagcgcctacttcgtcgagctgtgcaaagaggtccaggacgagatcatcagccgtacggtgattgagaagttctag

SEQ ID NO: 252535 - DNA, 636 bp, Klebsiella pneumoniae
atgcccgtcgtctttaccagcgcgctgggctttgagcaggataacttcctcgcccggcgtaatctgctcaaaccggtctggggcatctcccagacgccgcaggtctggttcgatcaccagatttatgaatccgaaggcgaactgcgctttaactgggattttgtcgccgcgctgtttcctgccgggcaggtggagcgccagtttgaacagtattgcgcattgctaaaccgaatggccgaggatgaaagcggctggcaactgccgctcgccgcgctggtgcctcccgttaaacacgcagggcaatgcgcagagcgctcaccgcgcgtatgccctgagcaatctcagccacacattgcggcggacgagagcaccgtcagcctgatttgcgacgccttccgcgaggtggttggcgagtctgtcacgcccgcagaaaacttctttgaggcgggcgcaacgtcgctgaatctggtgcaactgcacgttttgttacaacgtcacgaattttccaccctgacgttgcttgacctcttcacccacccttctcctgctgccctggccgattatctggccggcgtcaccacggtggagaaaacaaaacgacctcgccctgttcgccgtcgtcagcggcggatatag

SEQ ID NO: 252536 - DNA, 174 bp, Klebsiella pneumoniae
atgacggcggcctttggcgtcgcagcccatattcggcgcgccgccaaagcccgaaacgcggctggcggtggcggtgctactgtttccgtacttatcgatcagcaaagtgccgccgataaacatgtccagcgcgtagtgacccgcagcctgggcgaaggcgcggttggagcgtag

SEQ ID NO: 252537 - DNA, 303 bp, Klebsiella pneumoniae
atggatagccgctatcccggtgtcccgcgcgacctggctgtcacgaatcgcctccaccagcccggattttatctgccgcgcgccgcgcagcaccgcctctgccgggatgccaatccgcgaatgaatgctgccgatctgatactggcgctccgcaagagcctgaagatcctctttttcacaggtcaggatctgctgtacccatcccgccagagagcggctcagacgttcctcaaccagctcataagagaggtgtctggcgatatccggatcctgaaaaataaaatcgtaaaagcgggtcgctaa

SEQ ID NO: 252538 - DNA, 327 bp, Klebsiella pneumoniae
ttgcgggttaaccgcatagctgccgttatccagctggagcgccagctggaacagatagaacgcctggcaggcttctttgaaattacgcgccggatgggccggcacgtggtgcagaatggccgcgctatcgagcagctcggctttgcgataagcattggtttccgcggccgccagctgttcggcgctgttggccagattttgcgccagcgccagcagggcgtcgcggcgcgctggtttaacggcggcgggaacgccagcgatatcgccatccagggcgttcagcgtggtggcatgctcggtgcacagcgtgcttttctgggcgagtaa

SEQ ID NO: 252539 - DNA, 240 bp, Klebsiella pneumoniae
atgacccagaaacaggtttgccaccacatcaaggttttcacacagcgccagatcctgaaacaccgtggcaataccgtattccagcgccttgccggggctatcgagggtgacggggttgccgtcaaactcaatggtgccggaggtcggctggtggacgccggcgaggatcttcaccagcgtggatttgcccgcgccgttgtcgccgaccagcgcgaccacctcgccggcgtggacttctaa

SEQ ID NO: 252540 - DNA, 528 bp, Klebsiella pneumoniae
atgattgcaaatggttttgttaaagagttttttgatgttgatatcgctaaagttccttatattagttggtcattctcgattttgtttgccattccattttttttgattacttcccacgtggggtgtatgattttagaaggtacaacagatttattccggataagaaaaattaaagtgcctccgatgatccattattcgatattttgtttatcttgcgttttttttagcattagttatatttcttatttgggtagcgcaggttggttatttaatgctgtgaccaaaaaggtttattcttatgataccagaagctcttttcgatgcaataataagtactggacgattccagagttagggaaagatgcgaggtatctcgctgaaacatctgatagttaccgtgttatctatattagaggaaataatattaatgtggaagttgtaaaatgtaaaaaaaacgaaggatatatcctttttcccattgaaaatgctaacgatatattaaaaaagcaggttccaaagggaggctga

SEQ ID NO: 252541 - DNA, 249 bp, Klebsiella pneumoniae
  misc_feature (230)..(239): n is a, c, g, or t
atggcacactacaacttaacgccgcgcgtcaaagtgctggcagaccgtttactcgcccagaaaagcacgctgtgcaccgagcatgccaccacgctgaacgccctggatggcgatatcgctggcgttcccgccgccgttaaaccagcgcgccgtttctatgaactgatgcgccagctgccgctgaccatcagcgccgacgaactgatcgtcggcaaccagacccgtaaacnnnnnnnnnngacgaactga

SEQ ID NO: 252542 - DNA, 519 bp, Klebsiella pneumoniae
atggcggagattactgagttgatcggtcaggtggatgcgctgattaccgaatggcgtaccgcggaacaggatgctggttataaaaatactcagagcctgctgcaaaagatccatatccattgccagcacatcagcagccagctgggagtgttattcagtagtctgtcgcagatgcaaaacggcaaagacgcactgaccagcctgcttaaccgtcgctatctgcctgtggtgctcaagcatgaagtcaccctggcgattgagtatgacctgccgctgacggtagcgattatcgatattgatttctttaaagagatcaatgacaaatggggccatatggtcggcgaccgcgccattaagcacgtagccgatctgctcagcgataatattcgctccagcgactatctcttccgctacggcggcgaggagtttctgctggtgctggtggagacccgcgcggcagaggctttccctctccttgaacggcgcaactgcgtgaagatgcacaaaggcgggggataa

SEQ ID NO: 252543 - DNA, 405 bp, Klebsiella pneumoniae
atggatgcctccagctttacgcttttcttcgatgagcttaacgccctgctggccggagaatcgctgccggctatcgacacccgctatgatttccgctcgtatttgctgcaccagcagaagatcaatcaaccactgagagacgacgcgcgcgcttactggctggcgaaagcatcgacgcttccccccgcgcccgtcttgccgctggcctgcgaacccgccacgctacgtgaagtccgtaatacccgacgccgcatgattgtcccggcaacacgctggcacgcctttagcaaccgggccggcgagtatggcgtgacgccgacaatggcgctggcgacctgtttttctgccgtgctggctcgctggggcggcctgacgcgactgctggcgtttgagttcacggagtaa

SEQ ID NO: 252544 - DNA, 213 bp, Klebsiella pneumoniae
atgcgggtagcggtcggcaaagcgcgccggctcaaggccaacgtgcgccagcagatagcgggcatattcgctggcctctctggcgctgacgccgtggacgcgctggccaaaggcgatgctctcctccatggtcaggcgcggattgagcgaagcatagctatcctggaaaaccatctgcacctggcgacggtaggctttcagcggcagacgtga

SEQ ID NO: 252545 - DNA, 291 bp, Klebsiella pneumoniae
atgagcgagatcctgcgccacccgcgccatccttatacccaggtgctgctgggcagtcggccgaaagaggggcttaagaaaggtgatgccctgcactgcattcccggcgcgccgccggatctggcgcgcttgccgcccggctgcgcctttgccgagcgctgcccgcaccgtcgcccggtctgtgagcagagtctgccgccgacggaatccgtcgcggagcgccacgcggtgagttgccaccgctggcgcgagctggcgattgacgctaacgcccaggccctggccgtctga

SEQ ID NO: 252546 - DNA, 201 bp, Klebsiella pneumoniae
gtggcggttgattttatccagggcaaaaaaccgcaggccagcaccaccctgtacaacaccccttcccagctatttaccccggaagtggtgacggccaaaaacatcaaagcggaaatcttcgataaaaaaatccagacctgggatcaggtgtgtagcggcgagtacgccgccgcctgccagaagttaggcatcagcaagtaa

SEQ ID NO: 252547 - DNA, 351 bp, Klebsiella pneumoniae
atgattcagggcggcggttttgagccgggcatgaatcagaaaaccaccaaatctcctattcagaacgaagctaacaacggtctgaaaaacacccgcggcaccctggcgatggcccgtactcaggcgcctcactccgccaccgcgcagttcttcatcaacgtcgccgataacgacttcctgaacttctccggcgaaagcctgcagggttggggctactgcgtattcgcagaagtcgttgagggtatggacgtggtcgacaaaatcaaagcggtcgccaccggccgcagcggcatgcatcaggatgtgccgaaagaagatgttgtgatcaaaagcgtcaccgtcagcgaataa

SEQ ID NO: 252548 - DNA, 723 bp, Klebsiella pneumoniae
gtggcgacactttttattgcggatttacatctgcaaacggaagaaccggcgattaccgccggttttctgcgctttttacagggggaagcccgcaaggcggacgccctgtatatcctcggcgacctgtttgaagcctggatcggcgatgacgatcccaacccgctgcatcggcaaattgcttcagcgctgaaagcgctggccgattccggcgtcccctgctacttccttcacggcaaccgcgattttctcgtcggtcagcgctttgcccgcgaaagcgccatgaccctgctgccggaagagaagcttctcgacctctacgggcgcaaggtgctgattatgcacggcgacaccctctgcaccgacgatgcaggctatctggcgtttcgcgcgaaagtgcacaatccctggatccaacgcctgtttctggccctaccgctgtttatccgccgccgtatcgctgccagaatgcgcgccgacagcaaagcggccaacagcagcaagtcgatggaaattatggatgtgaatccacaggcggtcgttgacgttatggaaaaacatcacgttcaatggctgattcacgggcatacgcaccgtcctgccgtccatccgctagaagccaacggtcaatccgcatatcgcgtggttctgggcgcatggcatcacgaaggctccatggtcaaagtgacggccgaaaaggtcgaactgattcagttccccttctga

SEQ ID NO: 252549 - DNA, 330 bp, Klebsiella pneumoniae; identical to SEQ ID NO: 173158

SEQ ID NO: 252550 - DNA, 510 bp, Klebsiella pneumoniae
atgtcttcccgcaataattcggcgcgtatcgccatcgtgatggggtccaaaagcgactgggctaccatgcagtttaccgcagaaatccttgatgccctgaacgttccgtaccatgtcgaagtggtttccgcccaccgcacccccgataaactgttcagcttcgccgaaggcgcgcaagacaatggttttcaggtgattattgccggtgcgggcggcgcggcgcatctgccgggcatgattgcggcgaaaacgctggtgccggtgttgggcgtgccggtgcagagcgcagcgctgagcggcgtagacagcctctactccatcgttcagatgccgcgcggtatcccggttggtacgctggctatcggtaaagccggcgccgccaacgccgccctgctggcggcgcagatcctcgcccagcacgatgcggaactgcaccagcgcctcagcgcctggcgccaggcgcaaaccgatgaagtactggataacccggatccgcggggtgcggcatga

SEQ ID NO: 252551 - DNA, 339 bp, Klebsiella pneumoniae
  misc_feature (236)..(245): n is a, c, g, or t
atgaaacaagtttgcgttctcggtaacggccagctaggccgaatgctgcgccaggctggcgaaccgctgggtattgcggtctggccggtcggtctcgaagccgacccggaagcagtgccggtacagcaaagcgtgattaccgcagagattgaacgctggccggaaacggcgctgacccgcgagctggcacgtcattccgccttcgtcaaccgcgacgtttttccggttatcgccgnnnnnnnnnnagctagagctcgctaccgcgccgtggcagcttctggcggagaaaagcgaatggccgacggtattcgcccgtctcggcgagctggctatcgttaa

SEQ ID NO: 252552 - DNA, 669 bp, Klebsiella pneumoniae
ttgcgggaaaatgaaaccgcgcagctgccggatgataactacggcgagtgtatcgttgagcaggggattaacttctccgccgaagtgtcgctggtcggcgcacgcgcccgggacggcagcacggtcttctatccgctgacccgcaacctgcatcaggacggtattttacgcgccagcgtcgcctttccgcaggccaacgcccgccagcaggcgcaggccgagcagatgctgtcggcgatcatgaatgagctgggctacgttggcgtgatggcgatggagtgttttgtcaccgctgatggtctgctgattaacgaactggcgccgcgcgtgcacaatagcggccactggacgcagaacggcgcgtccatcagccagtttgagcttcatctgcgggcgattaccgatctaccgctgccgccgccggtggtcaacagcccgtcggtgatgatcaacctgatcggtaccgatctcaactatgactggctgaagctaccgctggtgcatctgcactggtacgacaaagaggtgcgtccgggacgtaaagtcggccacctgaacctgaccgacagcgataccgatcgcctgagcgcgacgctggaagcgctgaagccgctgctgccgccggaatacgccagcggtgtattctgggcgcaggcgcagctggcgtaa

SEQ ID NO: 252553 - DNA, 576 bp, Klebsiella pneumoniae
atggctccggggcaaatgatggttggtctggtagcccggctaaggcacagcgcgccgcaagccgggattctggcgaaggattatgccagagaggtagcccggacaggtgcgcagcaccgcctccgggattatggagagctggattacgccagctgcgcctgcgcccagaattatcctgcgctctttccccgggggcggcgcccgacgcgccttgcccgggctacatgttcgtgcagtttgcggatttggttgaatggctacggggcaaatgatggttggtctggtagcccggctaaggcgcagcgcgccgcaagccgggattctggcgaaggattatgccagagaggtagcccggacaggtgcgcagcaccgcctccgggactgtggagagctggattacgccagctgcgcctgcgcccagaatacaccgctggcgtattccggcggcagcagcggcttcagcgcttccagcgtcgcgctcaggcgatcggtatcgctgtcggtcaggttcaggtggccgactttacgtcccggacgcacctctttgtcgtaccagtgcagatgcaccagcggtag

SEQ ID NO: 252554 - DNA, 804 bp, Klebsiella pneumoniae
atggagaggattcgtccgctgataggcagcgtcgatgcgccggatcatcgccaaccgtggcgaaccggcggcctctggcggcgcaacattaacctctatgttgcaggcggcgcgctgctgacgctacatcatcgggggcagggcgtgagccccggcggatgggttgttcgtcatcgcgattttatccggctgcacgcggcgctgcggacgggggcgtcgccgatagcgcggaatgacggtattcaggtcggcgatcttttgctgatgccgccgcgcaggcgctgctccctgcggctccgctgtcaatccgtaaacgcttatctcccgccagcgctgatgagtcgaccggaggagaccgggctgttcgggccgctgtcgcaggctatcgagctgcggcagcatcccgagctgcgccagcttcgccactgttttgcctccgcgctggccggcaacgccgtcgactggcgcctgtggctgggcaaggggccgggcctgacgcccagcctggacgacatgctgatcggcatgatgctggcggcgtggcgctcggggcgcatgtcaccctgcggcggaagggcattttttcgcgcctccggcgatctgcgcgcggccaccactcaggtgagcgtcaactatttacgctacgccagcgaggggcgcttcgcttcgccgctgatgcattttgcctgcgccctgcaacgtggacgacgtctcgaccccgccgtcgaagcgctgctggcgatggggcatacctccggcgccgacacgcttctgggattctggctggcgcaacatcttatctaa

SEQ ID NO: 252555 - DNA, 225 bp, Klebsiella pneumoniae
atggcaaaaatgagagccgtcgacgcggcaatgtatgtactcgaaaaagaagggattaccaccgcattcggcgtgcctggcgcggcgattaaccccttttattccgccatattctggctcgccacgtggaaggcgcgtcccatatggccgaaggctatacgcgtgccgcagccggtaatatcggcgtatgcctggggacatcgggcccggcgggaacggatatga

SEQ ID NO: 252556 - DNA, 150 bp, Klebsiella pneumoniae
atgtaccggtcaattcatggccatctcaaagtggtatcaactataagttggaataattttccaaaacctgatttaagccacataattgagaaggttattatgaaaaaatacttaaaaatcatgggtgaattattaaattacgaggaataa

SEQ ID NO: 252557 - DNA, 1083 bp, Klebsiella pneumoniae
atgatggaattagtcccacaaaatattcggcagattcttgccagcgatacgccgctgattgacgtccgtgccccggttgaattcaggcaaagcgccatgcccgcagcgatcaacctgccgctgatgaacgatgacgagcgcgctgccgtcggtacctgctataagcgtcaagggccggaagccgctctcgcactgggccatcagctggtgaatggtaagattcgcgccagccgcctcgccgcctggaaagaggcctgcgcgcgttatccagaaggctacctgtgctgcgctcgcggcggccagcgttcgcatatcgtccagcagtggctgaaagaagctggcgtggattaccctctgatcgtcgggggctataaagcgctgcgccaggccgccatacagcttaccgaagagctggtacagcgccctatcgtgctgatcggcggctgtaccggcaatggcaaaactcagctggtctgcgctcaacctgacggtatcgatctcgaagggcttgcccatcaccgcggctcttcattcggtcgcaccctccaggagcagtatcagcaggctacctttgaaaaccatctggccgtggcgatgcttaaaaagtccgggcagcagacgcgctgggtgctggaggatgaggggcatatgatcggcgccaatcacctgccggagtgtatgcgtcttcgcatggcgcagtcgccgctggcggtagtggaagatccgtttgctatccgtcttgaacgactgcgggaagagtattttgcgcgcatgcatcgcgatttcctggcggcctacggcgaagagcaaggctggcaggcgtatagcgaatatctgcatcatggcctgttcgcaatccgccgtcgcctcgggctacagcgttttgcccagctcaccgccaggcttgatgaagcactgcttgaacagcagcgaaccgccgacaccgaagcgcacttcagctggctggttcccctgctgaatgagtattacgatccgatgtaccgctaccagctcggcaaaaaagcggagaaaattattttccgcggcagctggcaggaagttgccgcctggctggcggcgtaa

SEQ ID NO: 252558 - DNA, 1146 bp, Klebsiella pneumoniae
atggcacataaaataaaagcgctggcgataacgatcggtgcagccctggcgttaacctcttttgcatcccaggcggaaattacgcttttaaaacaagatccgcaggcgggcgatccgttaagccggcttaattttaccgtcggcgggagtatccgtccccagttcaacatgatgtccggcgatggcgacaaaggctcatataaacgtaacggtttcgatggcggaacccgtttccgcttcgcggccgactactatctgtttgatgatatcagctggatcagctattacgagctgggcgtcaatattccggcacttttcgactgggataaccactatgccgaaggcgcgaataacaccagccgccgtatgctctataccggcctgaaaagcgatacctgggggacgttaacctacggtcagcagaacagcgtttattacgacgtggtcggggtaaaaaccgatatctgggattacgacatgattggccaggcgccgggtaacggcattaacggcgactacgatggctcctatcgctcacgtaatatgctgaaatataagaaaaccgttggcgatgtcgatctctatgcctcttatctgtttgaggacagcgaatatctgccgggcaacggtctgcgctataaacgtaaaggcggcggatccatcggcgcggattatcacattatgaaagatctgacctggggcgccgcgtggaactatacccgcgccgatatgcgtaacccgtccagttctgacagcaaatcatacgatcagaatatcgttggtaccgcgcttagctggacgccggataactggaccttctccttgggcggcggttggtatcagaacttcctgaccaccaaaaaaaccgatgtccataactacttcgcgggcgatgcctgggggattgagtactttgccggttataaattcccgattggccagtatgcggtgaaatctattcagccatactttatgggcgaccgcctgcagtacgtgaacggccgcaactatcagcgtatcgataatggcgtcggcgtgagtttccagctggattatggtttccgcgttgactatgaacacgtcttcacgtcgagcaccgacaacctgggcgatatgaacctggtgcgtctgcgctacgacttctaa

SEQ ID NO: 252559 - DNA, 306 bp, Klebsiella pneumoniae
atgtcgaaaaaactactgcagctgcactttgcttttaacggtcccttcggcagcgagatgtcccgtcagctcgtggagctggccgagtccatcaatcaggaaccagggtttatctggaaggtctggacagaaaacgaaaaaaatcaggaagcgggcgggatctacctttttgagaatgaagaaaccgcgctcgcttacctcaacaagcacaccgcgcgcctcaaatcgcttggcgtaaacgaggttatctgtaaagttttcgacgtgaacgagccgctcaccgcgctgaatcacggccatttgtaa

SEQ ID NO: 252560 - DNA, 2418 bp, Klebsiella pneumoniae
atgattgcccgctggttctggcgcgaatggcgctcgccgtcgctgctgatcgtctggctggcgctgagcctggcggtggcctgcgtgctggcgctgggctcaataagcgaccgcatggagaaaggacttagccagcaaagccgggaatttatggccggtgaccgcacgctgcgcagttcgcgcgacgtccctggcgcatggattgatgaagcgcgccgccttggtttaaccgtcggcgagcagctaagctttgccaccatgacgttttccggcgatacgccgcagctggcggatgtcaaagcggtggacgacacctatccgctatatggccagctgcaaactcagccgcccggactgaagccgcacgccggcaccgtgctgctggcgccgcgattaatggcgctgctgaatctgaaaaccggcgacaccatcgacgtgggcgacgccacgctgcgcattgccggcgaggtgatacaggagccggatgccggatttaaccctttccagatggcgccgcggctgatgatgaacaccgccgatgtggcgaaaaccggcgcggtgcagcccgggagccgcgtctcctggcgctataagtatgccggaaccccgcagcagctggcggactacgaaaagtggctgctgccgaagctggggcctgagcaccgctggattggcatggagcaggacgacagcgcgctgggtaaatcgctgcaacgttcgcagcagtttttgctgctgtcggcgctgttaacgctgctgttagcggtcgccgcggtggcggtggcgatgagccattactgccgcagtcgttacgatctggtggcgatcctcaaaaccctcggcgccggacgggcgcagctgcgcaaactgattgtcggccagtggttgatgctgctggcgctggcggtgattgccggcggggcgatgggcgtagggctggaacatattctgctggcgatgcttaagccggtgctccctgcggcgctgccggcggcgagcggctggccgtggctgtgggcgatcggcgcgatggtggtgatttccctgctggtcgggctgcgtccttatagactgctgctggcgacgctgccgctgcgggtgctgcgccaggacgtcgtcgccaacgtctggccgctgaagctctatatcccgatcgtgtgcgcggtggtggtgacgctgctggcgctgctgatgggcggcagccccctgctgtgggcggttctggcgggtgccgtagtgctggcgctgctgtgtggcctggcgggatggggcgtcctgtggttactgaagcgtttgacgttaaaagcgctgccgctgcgcctggcggtgaaccgtctgctgcgccagccgtggtcgaccctgagccagctggcagccttttcgctgtcgtttatgctgctggctctgctgctggtgctgcgcggcgatctgcttgaccgctggcagcagcagctgcctccggaaagtcctaactattttctgattaacatcgcaccggagcaggtggtgccggtaaaaaccttcctcgccgagcatcagacccgcgccaccgagttctaccccatcgtgcgcgcccgtctgacgcaaattaacggccaggcaacggagggcaataaagatgaagccctgaaccgggagcttaacctcacctggagccgcgagcgtccggatcataatccgctggttgccggtagctggccgccaaaagcgggtgaggtgtcgattgaagaggggctggcgcagcgtctgggcgtcaagctcggcgatagcgtgacctttaccggggatactcaggactttagcgcgaaggtgtccagcgtgcgtaaagtcgactgggagagtctgcggccgaacttcttctttatcttccctcagggggcgcttgacggacagccgcaaagctggctgaccagcttccgctgggataacggcaacgggatgctcacgcagctcaaccgcgaattccccaccgtcagcctgctggatatcggcgcgattttgcaacagattggccaggtgctgacccaggtaagccgcgcgcttgaggtgatggtgattctggtcaccgcctgcggcgttttactgctgctggcgcaggtacaggtcgggatgcgtcagcgctaccaggagctggtggtctggcgcacgctgggtgccggtaagtctctgctgcgcaccacgctgtgggcggagttcgcgctgctgggcgtggtatccggcgtcgtggcggcgattggcgcagaggttgcgctggcgctgctgcaaagcaaaatctttgacttcccgtggtctccggactggcggctgtgggtgatgctgccgctgtgcggggcgatactgctgtcgctgtgcggcggctggctggggctgcgtctgctgaaaggtaaagcgctgttccgccagtttagccagggatag

SEQ ID NO: 252561 - DNA, 555 bp, Klebsiella pneumoniae
atggcggccgacacgctgttggttctcggcgacagtctgagcgccggttatcgtatggcgggcaataccgcctggcctgcgctgctaaacgataagtggcagacaaaaacgccggtagttaacgccagcatcagcggcgatacctcgcagcaggggctggcaaggctgccggccctgcttaagcagcatcagccgcgctgggtgctggttgagctcggcggtaatgacgggctacgcggtttcccgcctcagcagacggaacagacgctgcgtaccattattgagcatatcaaagcggcgaacgcccagccgctactgatgcaaattcgcctgcccgccaactatggccgccgttataatgaagcctttagcgctatttatccggcactggccaaagagtttgatattcctctgctgcccttttttatggaagaggtttatctgaaaccgcagtggatgcaggatgatggaattcacccgaatcgcgacgctcagccgtttattgccgactggatggcgacgcgcctggctcccttagttaatcatgactcctga

SEQ ID NO: 252562 - DNA, 855 bp, Klebsiella pneumoniae
atgtccgcacagaatatcgtcaatattaccgaagctaatctacaccagacgctgcagcaatccgcgacaacgccggtgctgttttatttctggtccgcgcgcagccagcattgcgagcagctgacgccggtactggagagcctcgccacccagtacaacggcctgtttaccctcgctaaagttgactgcgatgccgaacaaatgctggcttcgcagtttggcctgcgcgctatccctacggtttacctgttccagaacggtcagccggtcgacggcttcgaaggcccgcagccggaagaagcggttcgcgcgctgctggataagttcctgccgcgtgaagaggagctcaaagcacagcaggcgctggcgctgatggaggaagagaactacgccgaagcgctgccgctgctgaaagacgcctggcagatgtcgaatcaggagagccagatcggcctgctgctggcggaaacgctgattgccctccatcgttccgatgaagcggaaacggtactgaaaaccgtgccgctgcaggatcaggatacccgctatcaggggctggtggcgcagatcgagctgctgaaaaaagccgccgacacgccggaaattcagcagctgcagcagcaggttgagcagaacccggaagatgcggcgctggcctcccagctggcattacagctgcatcaggtggggcgtaacgaagaagccctggcgctgctgttcagccatctgcaaaaagatttaggcgccggaaacggcgaggttcgcaaactgctgcaagagatcctttccgcactcggcaccggcgacgcgctggccgcgaagtaccgccgccagctctattctctgctttattaa

SEQ ID NO: 252563 - DNA, 189 bp, Klebsiella pneumoniae
atgataatcacccggctcgcgctgcgcgtagccgggctacaggatggatcttctcgtggcccggacaggcgcgttcagcgccgtatccgggaaaaaatcttacgcgcgttttttcagctgcgtcaccaccagctgatggcgcgcattgaagaacttcaggtaggtcagatacccggcgataatcgttga

SEQ ID NO: 252564 - DNA, 783 bp, Klebsiella pneumoniae
atgaacgggcataatattaccaatgagtcgctggcgttatctatggttctggtactggtagcgatcgtggttagctaccgggaaaagctggcgctggaaaaagagattatctggagcatttgtcgggcaatagtgcagctgattattgtcggctatgtgctgaaatatatctttaacgttaatcacgccgtgctgacgctgctgatggtgctgtttatctgctttaacgccgcgtggaatgcgaaaaagcgtagcaaatatatcgacaaagcctttgtctcctcgtttatcgcgataacgaccggcgctgggttaaccctggcggtgctggttgtttccggctcgattgcttttgtgccgatgcaggtgattccgattgccgggatggtagccggcaacgcgatggtggcggttggactttgctacaacaatatggggcagcgttttagcagcgagcagcagcagattcaggaaaagctgagcctgggcgcaacgccgaagatggcgtctgcaaggcttattcgcgatagcattcgcgccgcgctgatcccaacggtagattcggcgaaaacggtggggctggtgagcctgccggggatgatgtcggggctgattttcgccgggattgatccggtaaaagcgattaagtatcagattatggtgacgtttatgctgctgtcgaccgccagtctgtcaacgattatcgccgggtatctgacctacctgaagttcttcaatgcgcgccatcagctggtggtgacgcagctgaaaaaacgcgcgtaa

SEQ ID NO: 252565 - DNA, 681 bp, Klebsiella pneumoniae
atgaccgaaagtaacgctattttgcgcctggagaacgtggggtttcaggccgatgatgtcaccatccttaatgagataagttttcagctcagggcaggggaatttaagctaattaccggtccttccgggtgcgggaaaagcaccttattaaaaataatcgcttcgctgctgagcccgacgtcgggaaaaattctcttcgcgggtaaagatatcaacacgttgacgccggaaacctatcgccagcaggtttcctactgcgcgcaaaccccggcgctgttcggcgattcggtgtatgacaatctgatcttcccgtggcagatccgtaataaacagcctgaacccaaagcgctggtcgccgatctgctgcgctttgggctggcggaaaatacgctggaaaagtcaatcaatgaactttcgggcggggaaaagcagcgcgtttcgttgatacgcaatctgcagtttttgccgcaggtgctgctgctggatgaaattaccagcgcgctggatgaaagcaataaaaccaatgtgaatgagattattcatcgctacaccagcgaaaaaaacatcgccgttctgtgggtcactcacgatagcaatgaaattgcccatgcggatgaagtgattacgctaaagcctgctggcggaagagcgcaggaggagaaaaaaaatgaacgggcataa

SEQ ID NO: 252566 - DNA, 918 bp, Klebsiella pneumoniae
atgctgatttttatccccattcttattttcgtcgcgctggttatcgtcggagcgtcggtaaaaattgttcctcagggctaccagtggacggtagagcgctttggccgctatacgcaaacgctgcagccgggtatgagccttgtggttccctttatggatcggatcgggcgcaaaattaatatgatggagcaggtgctcgatatcccttcacaggaggtgatttcgcgcgataacgccaacgtcaccattgatgcggtgtgctttattcaggttatcgatgcgccgaaagccgcctatgaagtcagcaacctcgagctggcgatcatcaacctgaccatgaccaacattcgtaccgtgttgggctccatggaactggatgaaatgctctcccagcgcgacagcatcaacacccgtctgctgcatattgtcgatgaagcgaccaacccgtggggcatcaaaattacccgcgtcgagatccgcgacgtacgcccgccggcggagctgatcgcctcaatgaacgcccagatgaaagccgaacgaaccaagcgcgcctatattctggaagccgaagggatacgtcaggcggaaattctcaaagccgaaggcgagaaacagtcgcagatcctcaaagccgagggcgaacgccagtcggcatttttacaggcagaggcgcgcgaacgttctgcggaagcggaagcgcgcgctacccagatggtgtcgtccgctatcgcctccggcgacattcaggccatcaactactttgtcgcgcagaaatataccgatgcgctgcagcaaattggcgcggcgaacaacagtaaagtggtgctgatgccgctggatgccagcagcctgatgggctccatcgccgggatcagcgaactgattaaggaaggggctggcacccagaaaaaatcatga

SEQ ID NO: 252567 - DNA, 465 bp, Klebsiella pneumoniae
atgatcgcgctgattctcacccacccgcatattttctggctcagccttggcgggctgctgctggcggcggaaatgctcggcggcaacggctatctgctgtggagcggcattgccggcgtcgtaaccgggctgctggtctggatgctgccgtttagctgggagtggcagggcacgctgttcgccgtgctgaccctgctggcggcctggctgtggtcgcgctggctgcgtaaccgcgtaaaacgccagaagccggcggacgctcagcttaatcagcggggacagcagctgcttggccgccgctttacgctggaaacgtcgctggttaacggccgaggacacgtccgcgtgggcgacagttcatggccggtaatagccgatgacgacctcctggcgggcagtaaggttgaagtcgtcgccgtcgaggggattacgctgcgggtcaaggagctccctaacggccgctag

SEQ ID NO: 252568 - DNA, 411 bp, Klebsiella pneumoniae
atgaatattagcgatgtggcgaaaaaaaccggcttaaccagtaaagcgatccgtttttacgaagagaagggactggtaacgccgccgctgcgtagcgaaaacggctaccgcagctacagccaacagcatctggatgaactgaccctgctgcgccaggcgcgtcaggtggggttcaatctggaagagtgtcgcgagctgatattcctgttcaacgatccgtcgcggcacagcgccgacgtgaagcgccggacgctggagaaagtcgcggaaattgagcgccacatcagcgaactgcaggggatgcgtacgcagctgctggcgctggcagactcctgtcccggcgatgacagcgcggactgcccgatcatcgataatctctcgggctgctgtcaccgcaaagtccaggcctag

SEQ ID NO: 252569 - DNA, 2502 bp, Klebsiella pneumoniae
atgtctaacactatcgacctcgcgcttgatggcctctcctgcggccactgcgttaaacgggtgaaagagagcctggagcagcgtcctgacgttgagcaggcggaagttaccgttaccgaagcccacgtcacgggcagcgccagcgcggaagcgctgattgagaccattaaacaagccggatacggcgcggagctcagccacccaaaggctaaaccgctggcagagtcatcaatcccgccggaagcactgacagcggccaccactgagcttccggcagcccgtgacgaagatgacagccagcagctgttaatcaacggcatgagctgcgccagctgcgtatcccgggtacaaaacgcgctcgccgcggtgccgggcgtctcgcaggcgcgggtcaacctggcggaacgcactgcgctggtattgggcagcgcgtccgccgcagaattagtccaggccgtagagaaagcgggctacggcgcggaggctatcgaagacgacctcgagcgccgcgagcgtcagcaggaaaccgccatcgccacgatgaagcgcttccgctggcaggctatcgtcgccctgctggtcgggatcccggtgatgggttgggggatgatcggcgacaacatgatggtcagcgatgataaccgtaccctgtggctggttatcggccttgtcacgctggcggtgatggtatttgccggcggccatttttaccgcagcgcgtggaaaagcctgaaaaacggcaccgcgacgatggatacgctggtggcgctgggtaccggcgtcgcctggctctattcgatgagcgtcaatctgtggccgcagtggtttccgatggaagcccgccacctttattatgaagccagcgcgatgattatcggtctgattaacctcggccatatgctggaagcccgtgcacgtcagcgctcttcgaaagcgctggaaaaactactcgatttaaccccaccgtcagctcgggtggtcaccgacgaaggcgaaaaagatctgccgctggcggaagttcaggcgggaatgaccctgcgtttgaccacaggcgatcgcgttccggtcgatggcatcattagccagggcgaggcctggttcgatgaagcgatgctcaccggtgagccggtgccgcagcaaaaaggcgacggtgacgccgtgcatgccgggaccgtagtgcaggacggcagcgtactgtttaccgccagcgccgtcggcagccagaccaccctggcgcgtattatccgcatggtgcgtcaggcgcagagcagtaaacctgaaatcggccagctggcggacaaaatctccgccgtgttcgtcccggcggtcgtggcgatagccctgttcagcgccgcgatctggtactttttcggtccggcgccgcaaattgtctataccctggtgatcgccaccacagtgctgattatcgcctgtccgtgcgccctggggctggcaacgccgatgtcgattatctccggcgtgggccgcgcggcggagtacggagttctggtgcgcgatgccgatgcgctgcagcgcgccagcaccctggatacgctggtctttgataaaacgggtaccctcaccgagggtaaaccgcaggtggtggcgataaaaacctttgccgccatcgatgaaaccaccgcactgcgtctggcggcgtcactggagcaaggctccagccacccgctggcgcgcgccatcctcgacaaagccgcagatcaacgcctgcctgcggtagataatttccgcaccctacgcggactgggggtcagcggtgaagccgaaggccatcgtctgctgctcggcaaccaggcgctgcttaatgagcaaaatatagcaacggctgaaatagaaggcgaaatgaacgcccaggcgtcacagggcgcgacgccggtgctactggcggtagatggtcaggcggcggcgctgttcgccatccgcgatccgctgcgtgaagatagcgtggcggcattagccaggctgcaccgccagggttatcgtctggtcatgctgaccggcgataacccaaccaccgccaacgctatcgctaaagaggcgggcattgatgaggtgattgccggggttctgccggacggtaaagccgatgcgattaagcacctgcaaggccagggacatcaggtggcgatgatcggcgacggtatcaacgatgcgcccgcgctggcgcaggccgatgtggggatcgccatgggcggcggcagcgatgtcgccattgagacagcggcgattaccctgatgcgccatagcctgaacggcgtcgccgatgcgctggagatcgccaaagccacgctgcgcaacatgaagcagaacctgctgggggcatttgtttataactcgctgggcattccgattgccgccgggatcctgtggccgctaaccggaacgctgctcaatccggtggtggcgggcgcagccatggcgctctcttcgattaccgtcgtgagcaacgccaaccgcctgctgcgctttaagccaaaatcctaa

SEQ ID NO: 252570 - DNA, 795 bp, Klebsiella pneumoniae
atgggcctgttaaaccgaataaaaatgctgtggcaagccgccctcggctcgtcttattcctggcccgcgctggatatcacccttcccggggaacgctatctgcacctggtcggcagtattcatatgggcacccgcgatatgtcgccgccgcccgcccggctgttaaaaaagatccgtcaggccgatgcgctgattgtggaagcggatattagcggcagcgaaacgccattcagcaacctcccctcctgtccgccgctggcggaacgcctgaaggcatcccagcttgctgcactgcaagagcgggcggcagaaatgggtctgtctgtcgcgctgttcgacagtcaaccgctgtggcaggtagcgatggtactgcaggcaactcaggcgcaaaaactggggctcagggcggattacggcattgattatcaactgctgatggcggcgcgcgagagccatatccgcgtgatggagctggagggagccgacagccagattgcgctgctgcgggatctgcccgacggcggtctggcgctgctggaggataccctcacccactggcgcacaaatgcgcgtctgctgcaggtgatgatcggttggtggctcgatcagccgccgtcaagaggggctacttcgctgccgacaacctttagccagtcgctgtatgacgttctgatgcaccagcgcaacctcgcctggcgggaaacgctgctggcgctgccgccgggacgctacgtggttgccgtcggggcgctgcatttatacggcgaagggaatctgccggacatgctgacgtaa

SEQ ID NO: 252571 - DNA, 480 bp, Klebsiella pneumoniae
atgactcccgccgtaaaattactcgaaaaaaacaaaattagttttcaaatccacagctacgatcacgatccgaacgaaaccaattttggtgacgaagtggtgcgtaagctgggactgaacgccgaccaggtctacaaaacgctgctggttgccgttaacggcgacatgaagcatctggccgttgcagtgaccccggttgcgggtcagttggatctgaaaaaagtggcgaaggccttaggcgcaaaaaaagtggatatggcagacccgatggtcgcgcagcgggttaccggctatctggtggggggtatcagcccgctcgggcaaaaaaaacgtctgccgacggtgattgacgcaccggcccaggcgtttgccaccatctatatttccggcggcaaacgcgggctggatattgagctggcggccagcgatctggcgaagatccttgaggcaaaattcgccgatatcgcacggcgcgattaa

SEQ ID NO: 252572 - DNA, 585 bp, Klebsiella pneumoniae
atggccctggtgccgatggtcattgaacagacctcacgcggtgaacgttcttttgatatctactcccgtctgcttaaggaacgcgtcatttttctgaccggccaggtcgaagaccacatggcaaacctgatcgtggcgcagatgctgtttctggaagcggaaaacccggaaaaagacatttacctgtacattaactctccgggcggggtaatcaccgccgggatgtcgatttatgacaccatgcagttcatcaagccggatgtcagcaccatctgtatggggcaggccgcttctatgggcgcgttcctgctgaccgccggggcgaaaggcaagcgcttctgcctgccgaactcccgcgtgatgatccaccagccgctgggcggctatcagggacaggcgacggatattgagatccacgcccgtgaaatcctgaaggtgaaaggacgcatgaatgagctgatggcgcatcataccggccagtctcttgagcagattgagcgtgacaccgagcgtgaccgcttcctgtctgctgcggaagccgtggagtacgggctggtcgactctattttgacccatcgtaattga

SEQ ID NO: 252573 - DNA, 756 bp, Klebsiella pneumoniae
atgaatcttatcagtattcccgcatttcaggacaactacatctgggttctcagtgaagatagcggccgctgtctgatagtcgacccgggagaagccgcgccggtgctcgccgcgatagaacaaaaccgctggcaaccagaagccatcttcttaacgcatcaccatcacgaccacgttggcggcgtaaaacaactacgtgaaaaattcccggcaatagcggtttacggaccggcagaaacccaggataagggagcaacctgcatcgtaaaggacggagaaagcctgtctgttttgggccgcgaattttctatttttgctacgccaggtcacactttaggacacatctgtttctacagtaaaccttatctattttgtggcgatacaatgttttccggcggctgcggcagactctttgaaggcaccccagaccagatgtatcaatcacttaacaagattaacgcccttcctgatgaaacgttaatatgttgcgcacatgagtacactttagcaaatatgaagtttgcaatgagcatcttgccccatgataaggatataaatgattactatcgcaaagttaatgagttacgcgcaaaaaaacaaaagacactacccgtaactctgaaaaatgagcgtcgtataaatttatttttacgtacagatgatcatgatttaattgaagaaataaacaaagaaacaaatttgcaacactctgttcagagatttgcgtggttaaggtcaaagaaagacgacttctga

SEQ ID NO: 252574 - DNA, 723 bp, Klebsiella pneumoniae
atgaagccggcaaggatacctcagacagttacagcgccagagcactggtccagcatgccctggggcgaatactaccgcgaatcgctggaacggcagatgaaaccgtggctggctaaattatatggctttcatttacttaagattggcaatctgagcgcggaaatcaatacggagtcctgcgcgatttcccatcaggtgaatgtctctttacagggtaatcccgtgcaggtaaaggccgatccgctgcatttgccttttgccgagaagtcggttgatgcctgcctgctggcgcataccttaccctggtgtagcgatccgcatcgactgctgcgggaagcagaccgagtgctgattgacgatggctggatcattttgaccagttttaaccccatgagcctgatgggattacgcaagctggtgccggtcttgcgcaataagcccccctataacagccgcatgtttactttaacgcgtcagatggactggctggcgctgctgaatttcgaagtgatgcatcacggttgctaccaggtccttccctggtctcgtcacggggggaaaatgctcagcacccatttacctgctttaggatgtttacagctcattattgcccgtaaacgtacgatccccttgacgctaaacccgatgaaatcgggcaaagcaaaaaaacggataccgcaggcggtgggcgccacacgtcagtggcgcaaggggcaaaattag

SEQ ID NO: 252575 - DNA, 468 bp, Klebsiella pneumoniae
atgctcaaacaggtagaaattttcaccgatggttcctgcctgggcaatccaggccccggcggctacggtgcaattttacgctatcgcggaaaagaaaaaacctttagcgaaggctttaacctcacgacgaataaccgcatggagatgatggccgccatcgtcgccctcgaagcgctgaaagaacattgcgaagtgatcctcagtaccgacagccagtacgtgcgtcagggtattactcagtggatccacaactggaaaaagcgcggctggaaaacggcggacaaaaaaccggttaaaaatgtcgatctctggcagcgcctggacgctgcgctgggtcaacacaaaataaaatgggagtgggtcaaaggccacgcggggcatccggaaaacgaacgctgcgacgaactggcgcgcgcggccgcctctcatcccacccgggatgataccggttatctggcagagcgctaa

SEQ ID NO: 252576 - DNA, 741 bp, Klebsiella pneumoniae
atgaccgctatgagcactgcaattacacgacagatcgttctcgataccgaaaccaccggtatgaatcagattggtgcgcactatgaggggcacaagataatcgagatcggcgcggtagaggtgatcaaccgccgcctgaccgggaacaacttccacgtctatcttaagccggaccgcctggtggaccctgaagcttttggcgtccacggtattgcggacgaattcctcatggataagcccgtgtttggcgatgttgtcgatgagtttctcgattacatccgcggcgcggagctggtcatccataacgcatcgttcgatatcggctttatggactatgaatttagcaagctgaatcgcggtattccgaagaccgatactttttgcaaggtgaccgacagcctggccctggcgcgtaaaatgttcccgggcaagcgcaatagccttgatgctctttgctcgcgttatgaaatagataacagcaagcgaacgctccacggggctctgctcgatgcccagattctggccgatgtttatctgatgatgaccggcggccagacgacgatggctttctctatggaaggggaagggcagcggcaggccggagatacgggaatacagcgcgttgtccgggcaaccagtaagctacgcgtagtttatgccactgatgaagagctggtgaaccatgaatcccgcctcgatctggtacaaaagaaaggcggaagctgcctgtggcgggcatga

SEQ ID NO: 252577 - DNA, 771 bp, Klebsiella pneumoniae
gtgcccggactgaaaattacccttttacaacaaccgctggtgtggatggacggtcccgccaacctgcgtcatttcgatcgtcaactggaagggattaccgggcgggacctcattgttttacccgaaatgttcaccaccggtttcgcgatggaggcggcaaaacagtcgctatcgcaagaggaagtggttgcctggatgggagctaaagccgcgcaaaccaatgcgctgattgccggcagcgcggcgctgcaaacggaacgcgggcccgttaaccgttttttgctggtggagcccgagggtaaaatccatttctatgataaacgacatctgttccgcatggcggatgaacatcaccattaccaggcgggtaacgaacgggtcatttttgcatggcgcggctggaggatcctgccgctggtgtgctacgacctgcgcttcccggtctggtcgcgcaatcataacgactacgatttagcgctgtatgttgccaactggcccgcaccacgctcaacgcactggcagtcgctactggtggccagggctatcgaaaatcaggcttatgttgccggatgcaatcgcgtcggtaccgacggcaatggccaccattaccggggcgacagtcggataattacgccgcagggcgaaattatcgccacagccgagccgcatcaggccactcgccttgacgcagagctttcattgacggcgctgaacgagtatcgcgagaagtttccagcctggcaggatgccgaccccttcacgctcaattaa

SEQ ID NO: 252578 - DNA, 2445 bp, Klebsiella pneumoniae
atgatgattttgagtattgttgcaaccgttgttttactcggtgcgctcttctatcaccgaatcaatctgctgctcagcagcgcgattttgctgctctggaccgccgcgctcggcattgcagggctgtggaatatctggctgctggtcccgctggccatccttttactgccgttcaattttacgccgatgcgcaaatctatgatttcagtgccagcctttcgcgctttccgtaaggtcatgccgccgatgtcgcgtaccgagaaagaagcaattgatgccgggacaacatggtgggaaggcgatctgttccgcggcaatcccgactggcagaaactgcacaactacccgcagccgcgcctgactgccgaagaacaagcctttattgacggcccggttgaagaagcctgccgaatggcgaacgacttcgaaatcactcacgaaatggcggatctgccgccggagctgtgggcttatctgaaagagcatcgcttctttgcgatgatcattaagaaagagtacggcgggctggagttctccgcttatgcacaggctcgcgttctgcaaaagttgtcgggcgtctccggtattctggcgattaccgtcggcgtgcctaactcattaggcccgggcgagctgctgcagcattacggtacggaagaacagaaaaatcactatctgccacgcctggctcgcggccaggaaattccctgcttcgcgctgaccagcccggaagcgggttcagatgccggcgcgattccggataccggcgtggtctgcatgggcgaatggcaaggccagcaggtactgggtatgcgtctgacctggaacaaacgctatattacgcttgcccctatcgccaccgtgctggggctggcatttaaactctccgaccccgaccgtctgctgggaggtgaagaagagctgggtattacctgcgccctcatcccgacaaccacgccgggcgttgagatcggtcgtcgtcatttcccgctgaacgttccattccagaatggtccgacccagggaaaagatattttcgttcctatcgactacattatcggtggcccgaccatggccggccagggctggcggatgctcgttgagtgcttatccgtaggtcgcggtatcaccctgccatcgaacgccaccgggggcctgaagtctgtcgccatggccaccggcgcctatgcgcacattcgccgccagttcaaaatctccatcggtaaaatggaagggatcgaagaaccgctggcgcgtattgcaggcaacgcctacgtaatggatgctgccgcctcgttgattacctacggcattatgcttggcgaaaaacccgcggtactgtcggcaatcgtgaagtaccactgtacccaccgcggccagcgctcgatcatcgatgcaatggatattaccggtggtaaaggcattatgctcggcagcggaaacttcctggcgcgggcttatcagggcgcgccaatcgccatcaccgttgaaggcgcgaatattcttacccgcagcatgatgatcttcggccagggggcgattcgttgccatccatacgtgctggatgaaatggcggcggcgcagaataacgacgttaacgctttcgataagctgctgtttaaacacatcggccacgtaggaagcaacaaggtacgcagtttctggctgggcctgactcgcggccttaccagcagctcgccgacccgcgatgccactcgtcgctactatcagcatatgaaccgcctgagcgccaacctggctctgctgtccgatgtctcaatggcggtactgggcggtagtctgaagcgtcgtgaaagaatttctgcgcgtctgggcgatgtgctgagccagctctacctggcgtcggcggtcctgaaacgctatgacgatgaggggcgtaacgaagcggacttaccgctggtgcactggggggtgcaggatgcgctgtatcaggccgagcaggcgattgacgatctgttggtgaacttcccgaatcgtctggtagcgggcgcgcttcgcgtggctatcttcccgaccggacgtcattacctggcgccttcagacaagctggatcataaagtcgcgaaaatcctgcaggttccgagcgcgacgcgttctcgtatcggccgcggtcagtatctgacgccgagcgagcataacccggtcggtctgctggaggaagcgctgcttgatgtgatggcggcagatcctatccaccagcgtatctgtaaagagctgggcaagaatctgtcctttacccgacttgatgaactggcccgtaacgcgctggcaaaagggttaatcaatcaggacgaggcggacatcctggtccgtgctgaaaccagccgtctgcgcagcattaacgtcgacgacttcgccccggatgaactggcgacccgaccggtaaagctgccggagaaggttcgcaagattgaagcggcctaa

SEQ ID NO: 252579 - DNA, 582 bp, Klebsiella pneumoniae
atgtaccaggatcttattcgtaacgaactgaacgaagccgccgaaacgctggccaattttctgcaggacgaagccaatatccatgcgattcagcgcgcagcggtgctgctggcggatagctttaaggccggcggtaaggtgctctcctgcggtaatggcggttcgcactgcgatgcgatgcactttgcggaagagctgaccgggcgctatcgtgaaaatcgccccggctatccggccattgcgatttcagacgtgagccacctttcttgcgtgagtaatgattttggctatgaatatgttttctcgcgctatgtggaatctgtggggcgtgcaggggacgtactgctggggatctccacttccggaaattctggtaacgtcatcaaagcgatcgaagctgcccgcgctcagggcatgaaagttattaccctgaccggtaaagacggcggtaaaatggcaggctctgcggacgttgaaatccgcgtaccgcattttggttatgccgaccgcattcaggaaatccatattaaagtgattcatatcctgattatgctgatcgaaaaagagatggttaaagcttaa

SEQ ID NO: 252580 - DNA, 768 bp, Klebsiella pneumoniae; identical to SEQ ID NO: 175762

SEQ ID NO: 252581 - DNA, 741 bp, Klebsiella pneumoniae
atgcgcaaaatcgcattatttattgcgatgcttctgttgccatgcgtttcattcgcagggctacttagcagtaacagctcgacaacgccgatgagcaaagagtataagcagcagctcatgggctcgccggtctacattgagatctttaaagaagagcgcatgctcgatctttacgtcaagatgggcgaaacctggcagcttctcgacagctaccgcatttgtaactactccggcggtctcgggccaaagcagcgtcagggcgacttcaaaagcccggaaggtttttacaatgtttcccgtaaccagttaaaacccgatagtcgtttctataaagcgatcaatatcggctttccgaacgcctacgatcgggcgcatggttacgaaggcaaatatctgatgattcacggcgcctgcgtatcggtcggctgctacgccatgaccgataccggcattgacgagattttccagttcgtcaccggcgccttagtttttggtcagcccaacgttcaggtgagtatttatcctttccgcatgaccgatgccaacatggcgcgccacaagttttcctacttcgcggatttctggaagcagctgaaacccgggtatgattacttccgcctgacgcacaagccgccggtggtttccgtagtcgatggccgctacgtagtgagcaaaccgctcagccacgaagtcgttcagccacagcttgcttcaaactacacggtccccgaggcaaaatag

SEQ ID NO: 252582 - DNA, 1344 bp, Klebsiella pneumoniae
atgattaaaatcacgaaagggctgaatttgcccatagctggcatgccatcacagcagatttcttcgaagactgcggtcaagcgcgttgcgctgttgggtgaagagtacatcggtatgcgcccatcaatggcggtgcgtgaaggggaccgggtgcaaaaaggtcaacttctgttcgaagataaaaaaaatcctggcgtgcgttttactgcacctgcgagtggaaccgtcagcgccattcatcgcggcgagcgccgggttctgcagtcggtcgttattgatgtggatggcgaagagtccgttcattttccccgctatgaattagccgaacttgccggattgacgcgcgagagcgttcagcagcagctgctggagtccgggctgtggacggcatttcgcacccgtcctttcagtaaaatacctgcgccgggcagcgttcctgcggccatttttgtcaccgcgatagacacgaatccgctggcggccgatcctcagccaatcattctggcccagcgcgaagcgtttgacgccggtttgacgctgttgacgcggttgaccgacggtaaagttcacgtgtgtcaggctggcggcggcaagcttggcgggcatcctgtcggccaggtgacctttaatcagtttgccggtccgcatccggccgggctggcggggactcacattcattttcttgagccggtcagcctgaaaaagcaggtctggcatcttaactatcaggatgttatcgccgtcggcaaagtgttccttgaaggggagttgtacaacgaacgcatcgttgctctcggcggcccgcaggtcaaagagcctcgtttgttaaagacctgcttaggcgccagccttgatgaactgcttgaagatgagctgctggacgatgaaaaccgcattatctctggttcagtcctcagcggaacccatgcgtgcgggcctcatgctttccttggacgctttcatttacagataagcgttgtgaaagaggggcgcgagaaagagctattcggctgggtgatgccggggaaagataaattctccattacccgtaccaccgtcggtcactttctgaagcgtaagctatttaatttctcgacggataccaacggcggcgagcgggctatggtaccgattggcaactatgagcgagtgatgccgctggatattctgcccaccatgctgctgcgcgatttgctggcgggcgataccgacagcgcgcaggcgctgggctgtctggaactggatgaagaagacctggcgctttgcacctacgtttgtcccggcaagtatgaatatggtccggcattgcgcagcgtgttaacccagattgagcaggaaggataa

SEQ ID NO: 252583 - DNA, 1239 bp, Klebsiella pneumoniae
atgggcttaaagcaactgtttgacaaacttgagccgcactttacgcacggcggcaagctggaaaaatactacccgttgttcgaagcgacggcgaccctgttctatacacccggtcaggtgacgcgcggagcggcgcacgtcagagacgccatcgaccttaagcggatgatgatactggtgtggttcgccgttttcccggcgatgttctggggaatgtataacgttggtctgcagaccataccggcgctggctaaattatatagcgctgaacagctgcagcaggtcatcgccgggaactggcactacagtattgcccagtggctgggggtaaacttcaccgcagatgccggctggctcagtatgatgacgctgggtgcggtatttttcctgcctatctacatcaccgtgtttcttgtcggtgggttctgggaagtcctgtttgctatcgtgcgtaagcacgaaataaacgaaggcttcttcgtgacctcaatcctgttcgcgctgattgtaccgccatcgctgccgctatggcaggctgcgctcgggatcacgtttggcgtcgtcatggccaaagagatctttggcggaaccgggcgtaactttctcaacccggcgctggcggggcgggcctttctgttctttgcctggccggcgcaaatttccggcgatctggtgtggaccgcagcggatggcttttccggcgcgacgccgctgtcccagtgggctagcggcggcggtgaatcgctggttaatgtcacaagcggacagccggtaagctggatggatgccttcctcggcaatatcccgggctcgattggcgaggtctcgacgctgatgattctgatcggcggcgccatcatcattttcggtcgcgtggcttcctggcgcattgtcgctggggtattcctcggcatggtggctaccgcgacgctgtttaacttcattggctctgatactaacccgatgtttgccatgccgtggtactggcatctggttctcggcggttttgctttcggcatgatgtttatggcgacggatccggtgtccgcgtcgtttacggataagggtaaatggagctacggcctgctgatcggcgtgatgtgcgtcctgattcgcgtcgtcaacccggcctatccggaagggatgatgctggcgatcctcttcgccaacctctttgcgccgctgttcgattacctggtggtgcgggccaatattaagcggaggaagtcgcgtggctga

SEQ ID NO: 252584 - DNA, 795 bp, Klebsiella pneumoniae
gtggctgagaataaaagtaacgatagcatcggcaaaacgctgctggtggtgctggtgctttgtctggtctgctcaatcgtggtcgccggttctgccgtggggctaaaatcacgccagcaggagcagcgcgcgcttgataaacagcgcaatatcctggcggttgctggtctgatgaagcagggaatgagcgcagatgaagtggccgatatttttaaggcccgcatctctccacgattagtcgatctcgctagcggggagctgctggataaagacccgagcaaatttaatcaggcccaggccctgaaagatccgcagcagagcttgcagctggaagccagccaggatccggcgggtattaaacgccgcagtaatatcgccgaaatatatctggtgcgtgatgaaaaacagcagattcaggaagtcgtactgccaatttacggtaacggcctgtggtcggtgatgtacgcgtttgtggcgctggaaaccgatggccgtacggtaaaagggatcacttattacgatcatggcgaaacgccggggctgggcggggaaattgaaaaccccaactggcgccagcagttcgtcggtaaacaggtgcttgatgataaagggatgcctgcgctgagaatcgtcaaaggcggcgcgcgtcctggcgacctgcacgccgttgatggcctgtcgggcgcaacgctgacgtcaaacggcgtgcagcatagctttgatttctggatgggcaaactgggctttggcccattcctgcaaaaggtgcgagaaggggagctgaataatggctga

SEQ ID NO: 252585 - DNA, 639 bp, Klebsiella pneumoniae
atggctgatttgggcgacatgaaagaaatgaagcgcgtgctggtggggccgcttatcgctaataaccctatcactctgcaggtactgggcgtctgctccgcgctggcggtgaccaccaagctggagaccgcttttgtaatgaccattgcggtgacgctggttacggcattctccagcatgtttatctccatgattcgccaccacattccgaatagcgtgcgcatcattgtacagatggcgattatcgcttcgctggttatcgtcgtcgatcaggtgctacgcgcgtttgcctatgagatctcgaaacagctttcggttttcgtcggtttgatcatcactaactgtatcgtgatggggcgcgccgaagcctatgccatgaagtcgccgccgttggcgagctttatggacggtattggcaacggtctgggatacggggcgatcctaatcatcgtcggtttcctgagagagctgatcggcagtggtaagctattcggtattaccgtgctggaaacggtgcagaacggcggctggtatcagccaaatggtctgtttcttctggcacccagtgcgttcttcattatcggtttgttgatttgggcggtgcgcagctggaagcctgaacagcaggaaaaggagtaa

SEQ ID NO: 252586 - DNA, 597 bp, Klebsiella pneumoniae
atggctcactacattagcctgtttgtccgcgccgtgtttgttgaaaacatggcgctggccttcttcctgggaatgtgtaccttcctcgccgtgtcgaaaaaggtctcaaccgctttcggtctcggcgttgcggtaacggtcgtactcggactggcggtaccgatcaataacctcgtgtataacctcgtgctgcgcgatggcgcgctggtggaaggcgttgacttaagctttctgaacttcatcacctttattggcgtgattgccgcgctggtacaaattctggagatgatcctcgataagtacttcccgacgctttataacgcgttggggatctttctgccgctgattgccgttaactgtgcgatttttggcggcgtctccttcatggtacagcgcgactataacttcaccgaatccatcgtttacggctttggttccggcgtcggctggctgctggcgattgtggcgatggcgggtattcgcgaaaaaatgaaatacgcaaacgtgcctgcgggtctgcgcgggttagggatcacctttattaccacgggtctgatggcgctgggctttatgtcattctccggtgtgcagctataa

SEQ ID NO: 252587 - DNA, 1224 bp, Klebsiella pneumoniae
atggaaataattcttggcgtagtgatgttcacgctgatcgtcctggtgctatccgggctgatattggccgcgcgttcgaagctggtgaatgcgggcgatgtggtcattgaaatcaataacgaagcggataaacagatccgtactccggcgggcgacaagctgctgaatacgctctccagcaacggaatcttcgtctcgtcggcctgcggcgggggcggctcctgcggccaatgccgggtgacggtgaaagagggcggcggtgatatcctgcctaccgaactttctcatatcaccaagcgtgaggcgagagagggctgccgcctggcctgccaggtcgcggtgaagcagaacatgaaaattgagctgccggaggagatttttggcgttaagaagtgggaatgtgaagttatctcgaacgataacaaagccacttttatcaaagagctgaagctgcgcgtgccggacggcgacgcggttccgttccgcgcaggcgggtatattcagatcgaatgtccatcgcacaaggtcgcttatgctgactttgacgttccggatgagtatcgcggcgattgggataaatttaatctcttccgctatgtctcggatgtaaaagagcctacgttacgcgcctactccatggctaactatccggaagagaggggcatcatcatgctcaacgtgcgtatcgcaaccccgccgccgcaggtacctgatgcgcctccgggaattatgtcttcctatatctggtcgttgaagccgggtgataaagtgacgatttccgggccgtttggggaattttttgccaaagaaacggacgctgaaatggtctttatcggcggcggtgccgggatggcgccgatgcgctcgcatattttcgatcagcttaagcgcctgcacagtaagcgtaaaatcagcttctggtacggcgcgcgctctctgcgagaaatgttctatgatgacgaattcgagcagctggcacgtgaaaatccgaactttaccttccacgtggcgctctccgatccgcagcctgaagataactggaccggtcataccggctttattcacaacgtcctgtatgaaaactatctgcgcgatcacccggtgccggaagattgtgaattctatatgtgcgggccgccggtgatgaacgccgcggtcatcaaaatgctgaaagatctcggcgttgaggatgaaaacatcatgctcgacgattttggaggctaa

SEQ ID NO: 252588 - DNA, 216 bp, Klebsiella pneumoniae
atgctgacggtatttgtcgcgacctttgtgattttcgcgctggttattctgggaatgtcgctcgggtatctgatcaagcgaaaaaccatccagggcagctgcggggggatctcatcgctgggtctggaaaaggtttgcgactgccctgagccctgcgatgcgcgtaaaaaacgcatggcacgcgaagcgcagcgcaatcaggatcgcatcatttaa

SEQ ID NO: 252589 - DNA, 858 bp, Klebsiella pneumoniae
atgaaatcaatagtaactgcgctcggtttacttattgccagcagcgcctgcgcagcaccgcagcttattgctcatcgcggaggtaccggcgatgccccggaaaatacgcttccagcaataaaactcgccctggaaaataaggccgaggcgatctggataacggtgcaattaagccaggatggcgtcccggttttatatcgtcctggcgatctttccgcgctgactaatcatacagggaaaatctcaagctatagcgcagccgaactggcacgcatggacgcggggtggaaatggggcgatgaaactcacccctggcgcggtaaaaatgcaacgattcccacgctacaatcggtgctggaacagtggccggagaccttcttttatatcgatatcaaatcgcctgatgccgaccctgcgataatggcggctcggcttggcgatgtgttaaataaaacccatagcctcgcccgcgtacgcgtgtattcaacggacgctcgctatatcgcagcgctaccagagtcaattccccatttcgtcagccgggacgaaacgcgaacaaagctggcgaccatttctcttagccaccagtgtcagcccaccaactcaccaggggacgagcactggtacggccttgagctgaaacgcaaagtagaagtcatcgagaagttcaccctgggcgaaggcgtatcgccggccacactcacctgggataaagaagcgatggactgtttccgctcacagggcaaagcccatatcatattcttcggcattaataatgctgatgattttcgtacggcaagcgagcttggcgccgacggcgtaatggtcgactcaccggcaaaagcgaaaacgtggtaa

SEQ ID NO: 252590 - DNA, 1056 bp, Klebsiella pneumoniae
atgcgtaaaatcatccatgtagatatggactgcttcttcgcagcggttgaaatgcgtgataacccggcgctgcgcgatatccctatcgccattggcggcagtcgggtacagcgcggcgttatcagtacggctaactatccggcgcgtaagttcggcgtgcgcagcgctatgcctaccgccaccgccctgaaactttgcccacacctgacgctccttcccggccgtttcgacgcttacaaagaggcctcgaaccatatccgggagattttttcccgctatacctcgttaatcgaacccctatcgctggatgaagcctatcttgacgtcagcgacagcgtccattgtcaggggtcagcaacgctgatggcgcaggagatccgtgagaccatccatcgcgagctcaatctgactgcttctgccggcattgcgccggtaaaatttttggcaaaaatcgcctcggatctgaataaacctgacggccagtttgtcattgcgccgcaccaggtagcggagtttgtcaaaacgctgtcgctgtcgaagatcccgggcgtcggcaaagtctccgccgcgaagctggaaagcatgggcctgagaacctgcgaagatgtacagaacagcgatctggcaatgttgctcaagcgctttggtaaattcgggcgaatattgtgggaacgcagccacggcattgatgaacgagaaatcagcagcgagcgccagcgcaaatcggtgggggttgagcgaaccctgatagaggatatccacgaatgggcggagtgtgagtcaattattgaaaacctctatcccgaacttgaacggcgcctggcgaaagttaaaccggatttgcggattgctcgccagggggtcaagctgaagtttaatgatttccagctcacgacccaggagcatgtctggccccggctgaataaagatgatttgatttctaccgcgcataaagcctggcacgagcggcgcggaggtcggggagtcaggctggtggggctgcacgtgacgctgcttgatccgcagctggagcggcaactcgttttgggattgtaa

SEQ ID NO: 252591 - DNA, 456 bp, Klebsiella pneumoniae
atgttaacgataagaatgtacgaagagcgggattttccggcgctatgcgcactatttttacgcgccgttaaagagaccgccagcgccgattattccccccggcaaattgccgcctgggcgcaggttgatgaagcccgctggcggcaaaaactcgcggcgtcacgcgtactggtggcaataaatgatgcctcgccggtcgggtttatcactgccgtagatgactatatcgatttactcttcgtttctcccgattttagtcgtcagggaatcgccggcgagttgcttaatacactactgatgcagctgcctgaacgcattttcacggtagaggccagtattacggcaaagcccttttttgcgcgtcatggcttcacggttattcagccacaggaagtggaggcgcggggtgaacgatttcttaattatttgatgcggcggcaaatcggcttgcaatag

SEQ ID NO: 252592 - DNA, 1140 bp, Klebsiella pneumoniae
atgggcaataatgttcattatacgtctgaatctatttcttatattcgttcagacgatctgtggatcgaaggtttagcgatccaacaattacactcgacggcaaatttaccccacatgcagcgcgtggtgggaatgccagacttacatcccgggcgtggctatcccatcggcgcagtcttcttctcgctgggccatctctacccggcactggtgggtaacgatatcggctgcggcatggcgctgtggcaaacggatatcctcgcgcgaaaatacaatgcggataagtttgagaagaaactgtccgctatgggggacgttgcgcaagcaagctggctggacgagcatctgccggaaaatttgttgacccatccctggcgcagcgccctgggatcgattggcggtggtaaccatttcgctgaactgcagcaggtggagcaggttgtggataacgaccgtttccagcaggccggccttgatgctcagcgcctgctgctgctggcgcacagcggatcgcgcggcctcgggcaatccatactgcagcaccatattgcggctttttcgcacgatggcctggcggaaggtagcgctgcggctcgggattatctggcagaacatgatgatgcgctggcttttgcacgcgtgaatcgttatctgattgccacccgcatcctgcaacagatacgggccgacggacggagcgtactggatatcgcgcataactttgtcgagtcctgttctgttgacgggctgcagggttggctgcatcgcaaaggggctacgccggacgaccggggcctggtgataatcccgggctctcgcggcgaccacagctggctggtgcagcctgttacccgcgaggagaccctgcattcgctggcgcatggcgccgggcggaaatggatgcgaaccgaatgcaaagggcgcctgtccggcaaatatacgccggctcagctggcgcgcaccgaactgggaagcagggtgatctgccgcgatcgtcagctgatctatgaagaagcgccgcaggcgtataaatccgttgaaagcgtacttaactgtctggtgcaggccggactggtcgaaccgatcgcccgtctgcgtccgctgctgacgctgaaaaccagcggagggaaaagcgcatga

SEQ ID NO: 252593 - DNA, 600 bp, Klebsiella pneumoniae
atgattttattgcaactctcttccgctcaggggccggatgaatgctgtctggcggtgaaactgacgttggagcggctcataaaggaagccgcagagcggcggctttccctgacgctgctggaaagtgagccaggacgtcatgccggcaccctgcgttctgttctgctttcgctggatggcgacggcgcgtttgctttcagcgaaagctggtgcggcactttgcaatgggtcttttccagtccgttcaggccgcatcacgggcgcaaaaactggtatgttggcgtagggcgcttttcctgcgatgaacagatgctctccagcgagatccgttttgaaacgctgcgctcttccgggcctggcgggcagcacgtgaacaagaccgattccgcggtgcgcgccattcatacggcaagcggcatcagcgtaaaggtgcagtcggagcggagtcagcatgcgaacaaacggctggcgcgtctgctgattgcctggaagctggaacagcagcggcagaatgagagtgcggcgttgaagtctgagcggagaatgttccatcatcagattgagcgcggtaatccgctgcgaacgtttagcgggcgttaa

SEQ ID NO: 252594 - DNA, 1458 bp, Klebsiella pneumoniae
gtgtctgaactgtctcaattatcccctcagccgctgtgggatatttttgccaaaatctgctctattccccacccgtcctatcacgaagaacaactcgctgagcacattatgggctgggcaaaagaaaaaggcttacacgcggaacgcgaccaggttggcaacattctgattcgtaaaggcgccactgccggtatggaaaaccgcaaaccggtagtgctgcaggcgcacctcgatatggtgccgcagaaaaacaacgataccgttcacgacttcactcaggacccgattcaaccttacatcgacggcgagtgggtcaaagcgcgcggcacgactctgggcgccgataacggtatcggcatggcttccgcgctggcggtgctggctgacgacaacgttgttcatggcccgctggaagtgctgctgaccatgacggaagaagccggtatggacggcgcctttggcctgcagcccaactggctgcaggcggatatcctgatcaacaccgactccgaagaagagggtgaaatttacatgggctgcgcgggtgggatcgacttcacctctgacctggcgctgacccgtgaagccgttccggctggtttccagagctttaaactgacccttaaagggctgaaaggcggccactccggcggcgagatccacgtcggtttaggcaatgcgaacaaactgctggcacgcttcctggcgggccatgctgaagagctcgatttgcgcctggtcgatttcaatggcggcaccctgcgcaacgccatcccgcgcgaagcgttcgcgacggtagccgtagccgcggacaaagcggaaacgctgaaagcgcgagcgaatgagtaccaggagatcctgcaaaacgagctggcggctaaagagaaaaatctcgctgtgctgctggagtcggcggaaaatggcctgcctgcgctgacgactcaatctcgtgatacctttgtgcgcctgcttaacgccacgccgaacggcgtcatccgcaactctgacgtggcaaaaggggtggtggaaacctctctgaacgtcggcgtggtgaccatgaccagcgacaacgtgcagattcactgcctgattcgttcgctgattgacagcggtaaagattacgtcgtgagcatgctggactctctgggcaagctggccggtgcgaaaaccgaagccaaaggcgcctatccaggctggcagccggacgccaactctccggtgatgcatctggtacgtgaaacctatcagcgtctgttcaacaaaacgccgaatatccagattatccacgcgggcctggagtgcggtctgttcaagaaaccgtatccggaactggatatggtttccatcgggccaaccattactggccctcactctccggatgaacaggtgcatatcgaaagcgtgggccagtactggacgctgctgactgagctgctgaaatccattccggcgaagtaa

SEQ ID NO: 252595 - DNA, 459 bp, Klebsiella pneumoniae
atgagcgaaaaatacgtcgtcacctgggacatgttgcagattcacgcccgcaagctggcaacccgcctgctgccggttgaacagtggaaaggcattattgccgttagccgcggcggtctggtaccgggagcactactggcgcgtgaactgggtattcgtcatgttgacaccgtttgcatctcaagctacgaccacgataaccagcgtgagctgacggttctgaaacgtgcagaaggcgacggcgaaggcttcatcgttatcgatgacctggtcgataccggcggtaccgccgttgctatccgcgaaatgtatcctaaagcgcattttgtcactattttcgcaaaaccggccggccgtccgctggttgacgattatgttattgatattccgcaggatacctggattgaacagccgtgggatatgggcgtggtgttcgtaccgcctatcgcaggtcgttaa

SEQ ID NO: 252596 - DNA, 1245 bp, Klebsiella pneumoniae
atgtcccaggctaaccttagcgaaacgctgtttaaaccccgattcaaacatccggaaacctctacgctggtgcgccggttcaataccggagcgcagcaaccgatccagtccgcgctcagcggcaataacgttgatcactggtatcgattgattaatcgcctgatgtggatctggcgtggcgtgacgccgcaggaaatcctcgacgtgcaggcgcgcatcgtcatgagcgatgctgagcgaaccgatccggagctttacgatacggttgtcggctatcgcggcggcaactggatctttgaatgggcgaaacaggcgatggactggcagcaaaaggccggccaggaagaggatctgctcatcagcggccgccactggctgcatgcggcaaacctgtacagcattgccgcctatccgcacattaaaggcgatgagctggcggaacaggcgcaggtgctggcataccgggcttacgaagaggcggctcagcggctgcccggcaagctgcgcgagctggagttttccatccctggcgcggcgccgatcaccgggttcctgcatatgccgccaggcgaggggccgttcccgacggtgctgatgtgcggcggccttgacgcgctccagaccgattattacaacctgtatgagaactattttgcgccattgggcatcgctatgctgaccgtggatatgccttcaattggtttctcgtcaaaatgcaagctgacccaggataccagtatgctgcaccagtatgtgctgcagcatctggccaatgtgccatgggtcgatcatacccgcgtggccgcctttggtttccgttttggcgccaacattgccgtacggctgggctatctggaatcccagcgcctgaaggcggttgcctgcctgggcccggtggtgcacggcctgctggtggatccgctgcatcagggacgggtgccggaaatgtatcttgacgttctggcttcgcgtctgggaatgcacgatgcttccgacgaagcgctgcgcgtggagcttaaccgctactccctgaaggttcagggactgctggggcgccgctgccctacgccgatgctttcgggcttctggaaagacgatccgttcagcccggaagaggagtcgcgattgatcacttcatcctcatcagacggcaagctgctggagatcccgttcaatccggtttatcgcaatttcgatcatgccctgcggcagatcgcccgctggattagccatagatttagttaa

SEQ ID NO: 252597 - DNA, 399 bp, Klebsiella pneumoniae; identical to SEQ ID NO: 175745

SEQ ID NO: 252598 - DNA, 507 bp, Klebsiella pneumoniae
atgtttgaggctatcaggctggtcggacgggaaatcaaatcctgcggcggcattaaagcgaaaatcgcgcttctgctctatcgtctggcaacgctctaccgcagtcgtaacccgctgtggaagatctgcgcaattcccttcgttattctcaatatcgtgattaacgagtgtttattttgcattgagctgccgtggcgagcgcgcattggatatgggctgaagctgtttcatccgcactgcatcgttattaatcggggaacgatcatcggccaaaattgtactctgcgccagggggtcactattggcagcgtgaccgatagccagggtcaggaaggcaacagcccgcgaatcggcgataacgtagaatttggcgcccacgccgtggtgatcggcgcggtcacgctaggcgataacgtcaaagtcggggcaggcacggtagtgaccaaagatctggccgcaggcatgattgccgtcggtcaaccctatcgggtattaaacggcaattag

SEQ ID NO: 252599 - DNA, 1419 bp, Klebsiella pneumoniae
atgagctctttttcactgcgccgcgccgcgctgcttttggcgctactgctggccggagccataccctctgcagcggtactggctgaacgtacggttgtcaccccgccggccttcaccggtctgttaacgaatcctgggatcggcgtggccagtttccacgatggttatggtcagaagccctctctgaaagagtatccggacaccggatttgaatacgatcgcttttactggagcgatctggagcctgaagaaggcgtctataattttgcgccgatcgatcatgccttcagcgtcgccgcccaacatcagccggcaatgaacgtcggattacgtttcatggcgctcgatgagccacaatcaggctcgaaaatccccgcctggcttatcgccaaaggcattcagggacaatgggtcgaaaatggcaaaacctttgtcccggatctcagcgatccgacttttatcgcctatgcgcaaaagctgcttaacgccctcggcgcgcgttatgacggcaatcctgaactggcgtttgtcgatatcggcatggtgggttcatggggcgaatggcataactccaatttccctgacgtcgcgccgttgatggaaaagtacactccgcaacagctcaatcgctacgttgatatgcacttcagcagtttcccgaaaacgcccaaaattatgttaatcagcggcggcgactcgctggcctgggccagccaaaagggcgccggatggcgcgcggactgctggggagactggcataacttttccccggagtggagccatatgcgcgatgactatcctcaacgcctggccgcagcgcagaaggcgtgggccggttttaacactggctggcagcacgctcccgttagtcttgaaatttgcggttatatggcggagtgggaaagcgttcagcactatacccgcgaggaggttcaggccagctttgactgggcattagcgcagcacgccagtaccctgaatctgaaatcgcgtccggtaccggccgcctatcgcgatatcgttgataacgcattattgcgtatcggctatcgctaccgggtgagccggctggaatttgatacgcccgtgcgtagcggcactccgcttacgctgaatgttacctggcgtaacgacggcgtcgctccagcctatctcccgtggcttgtacagtggcgaatagtgaatgatgcgggtacgacgatgacgcaagtccgtacgtcggacgatgttcgccagtggctgcccggcgaccatcaaagcaacgtcacgctgccgctgcctgcgggcctgcctgacggccagtaccgcctggaagcggcgctgaccaaccatcaaaatctaccgcgtatacaacttgctaacgaaggtcaaaccggtgacggatggtattcactggcttcgtttaaccttaaggaataa

SEQ ID NO: 252600 - DNA, 411 bp, Klebsiella pneumoniae; identical to SEQ ID NO: 175742

SEQ ID NO: 252601 - DNA, 1116 bp, Klebsiella pneumoniae
atgaagcttaaagtgacggtgctcggcacccgcggtataccgaacgtccagggcggcgtggagacccattgccagaatttgtatcccgaaatctatcaacagaatcatgctgatatctgcgtcattgcccgctcgccgtacgtcgactaccgccgtagcgaatataaaggcgtacagctgaaaagcctgtgggcgcccaaaagccgcaagttcgaagccattattcactctacgctggccgccttcagtaccctgttcgacggttcaaatgtcgtgcacgttcacgcggtcgggcctggcctggtggtcccgctgctgcgcctgctcggcaaacgcgtcgtttttacccaccacggcccggactatgaccggcagaagtgggggaaaatggcgaaggagatgctgcgcctcggtgaaaaatgggcggtgaaatatgccaacgaggtcattgttatctcggaagtgattaatacgttgattcagaccaaacatggtcgttataacgcgaacgtgatctataacggcgtgcgccagtcgcagcttcccgccgaagaggcccggcaggccacgttggatcagtactctctcaaagccgggcaatacgttgtcgccgtcgcccgctttgttgaagaaaaagggctgcacgatctgattgccgcccacaaagccgccaactgctcgcagccgctggtgctgattggcgatgccgatcatccggatgagtatagcgagcggctgaagaaacaggcggccgctaccccgggggtgatcatgaccggttttattagcggcgatccgttgcataccctgttctcacaggccgggctttttgttctaccgtcttaccatgaagggctgcctattgccctgctggaggccatgtcctggtcactgccggttatcgtcagcgatatccccgctaacctggagattggcctgcctgccggggactatttcccggcaggtgatgtcgccgcgctggcgcaaaagttgcagtcctggagcggcgaggagaccgtggattacagccagttaatgcccaaataccgctggccggacattgcagcgaaaacggctcaggtctatcagcgattaacgaataagagtcaaccgtga

SEQ ID NO: 252602 - DNA, 1137 bp, Klebsiella pneumoniae
atgctgcaagccggctatcaggttgtcgacttcagcatgcagcatgcggaaaataagccttcgccctgggagaatttcttcgtacataacgtggattatcatcaaagccatggcctgacgggtaagctcaaagcgggtatcgattttatctacaacgccgaggcctgcaataaactcaatacgctgctgctggaacagcgcccggatattgtgcactttcacaatatctatcatcagctgacgcccgcattgattggcgtcgctaaacgctttggctgcaaaacggtactgacggcgcacgattataaaatcgtttgtccatcttacaccatgctgcgcgatggccacgtctgcgatgactgtcttaccggttcggtgagcaatgcctttcgccatcgctgccagcagggagacacctttaaaagcctgctgctctcgcttgaggcctactggcaaaagttcgcgcaaaattacgccatgctcgattgcattatcgctcccagcgaatttatgcgtcagacgctgctgcgtaaattacccaggtcgcggatcgatgtgatcgtcaacggtattgatgccagcaccacggtcccgggcgatactgcgggggattatttcctctatatcggccgcttgagccgtgagaaaggcgtggctaccctggcgctggcgcagcaaaaaatgcagcagtccatgccgctgaaaatcgtcggcgatggccctctcggcagcgacctgcgcgcccgctttagcggtccggaatttctcggctatatgcgccatggagaagcgctcaacgcgctgattcgcggcgcgcgagcggtgatcgtcccttccgaatattatgaaaactgctcgatgtcggtgctggaggcgatggcgttcggccgccccgtcgtcggcggcaatatcggcggtattccggagcagattcgcgatggcattgatggctatctggtggaacctggagatgccgacgcgctggcgcgcatcatggatagcctggccgccaatcctcagcaggcgcgtgaaatgggcattaacgcacgccagcggttagaggataaatacgatctcgcccggcatatgcaggttctgcaggaactctatcagcagcttgtgggggaagcgaaatga

SEQ ID NO: 252603 - DNA, 1218 bp, Klebsiella pneumoniae
atgaatttaattaagagtatttcttcaatcgccagctcctcggttctttcgcaggcgatcggcgcattttccgtgtggctgatttcccatcgctacggcatggcggaagtcggacactatgcgatgatctacagcaacgtgctgattggcgctcaggtttgcacctttgcgtcgcagctgctgatcccgcgccaggaggagcatgagctggggcagaacgtagtgttttgcctgctacaaagcctgattctggcgctgccctgggcggtcatcaccgggctgattttccatctcaatattgcgtttctctatctgctcaccttcggctatgcgctggttttgattgccgagaacctctcgctgcgcggcggcaactatcagtttctgacctttcagcgcatcgccgtgtcgctggtcgtagcgatagccctgctggcgatgccgaataccacgctgttctatatcgcctggatggccggtattttgctgctgctcagcctctgtctgctgcgcttgttccgcttcaggaccctgacgccagcgcatttttctccgcgcgcgaacgctctttttgcgcgtcagcactggcagcatctcagtcgcgtcggcagcgcggaagtgctggcgatggccagcaataacctgccgacgatgttgataaatgtctggttttcaccgctggtcgcgggctatttctcggtggtaagccgcttctgtttatctccggtgatgattgtcggtaacgcggtgcgcaactccatcttttcaaaatggtcgatggattttcgcaacagcacctttaactatccggagtacaaaaagattcgcctgctgctgatggccgcggcgctgatctgtatccttgggatctggattttctatccgctggtgatgcgcctcggctttagccaggagtggctcaattccattccgacctcacgctatatgttgccctatctgttcgccgcgctggccgtcagtccgctgaccgttattgagcttatctttggttctaaacgctattttttacgtattcagatagagcagttgctaatcatcgccgtcgcttttgtcgttctgcctaagttgggccagagctatgagatagccctgctgacgttctctcttctgaccagcattcgctatctgttcatcctgctgaaaatgaacaaacgggcgctacagctctcccggcaggagcagaaaatatgcagctaa

SEQ ID NO: 252604 - DNA, 2088 bp, Klebsiella pneumoniae
atggctatttcattagttgaaaatggaaagaagaaagaaggctttatcgacttcacgccttatttcaacaaaatcaagcacaagctgatttggtgcctggtggtggtcgtggtggctgcggcggcgtcgtggatcctgacgcgctttatgtcatccagctataccgcaaccgcaacggtgctgtttaaagcgcagtcgcaggatgtaacccccctgccgcggctggaaaactacgattccacccgcagcgattactatgaaaccaaatacgcgctgatgggctcccgcgtggtactggaagccgcagtgaaagcgctaaagctggatcaggacccggaatttaacggcggggataagcttgatgaggccgcgcgcgtcaataatgccgtgcgcgccctgcaaaaaaacctgaccatctccggcgtgcgcaccacgcagctggtatccgtttcgatggaggcgaaatcgccgcaaaaagccgccgatattgccaacggcgtggcgcaggcctttatcgattacagcctggcgcagaagcagaaaatcttacttcaggctcagggctggaacgaaaaaatgatggacgatctgcgcaataaactcgatcgccagaaagccgatatcgatgattttctcaaacagaacggtctgctgacttttcgcagcatggatggctacgaaaccgagcgcctggggatcgtgattaaccatctggctgacgcgacccagcgccgtttgaaagcgcaaacggtatgggacaaagtgcgccgccagcagggaaaagcgccggaagcgatcatctcactgccggaaatttccggtcatccgcagattcaggatctgcggatcgcgctgatccagacgcgacgtaacttatcggaagcggcaaaacactatggtcctaagcatccgaaatacctccaggctcaggcccagctgcaggtcgttaacggacaaataggccaggtgctgggtgaactgctcaatgggttacgtcagcagtatcagattgcgctggacgatgagcagcactatcagcagatgctcaacgatcagaaagccgacttccaggcgctgggcgctaagcgcgataaatacaacaccatgatgaccgcgctgaacaaaaccgaagagctgtataaatcgctgtatcagcgggcgaacgagcagaagctctccgagagcttttcggttcctgatgaagtgatctacgatgccgccgtgccgccaaatcaaccgtctaaaccgcagcgcggtctgcttatcgtgatggcgaccctgatggcgctggcgctgtacattatgtacctgattgtcagcaccgcgctggataaaacggtcaacagcatcagcgaacttaaagctaaaacgggccttgatgccagcggtgaattcccgcaattgcctcaggcgaacagcgcgaagctgacgttccagaacctgctgtatgccgacatgatccacagcctgcgcctggcgctgctcggtcagaataatcatggagggatgatactggtgacctcggcacaggccgatgccggcagcagcctgattgccgaaatgctggcgtggtccgccgctaagtcaggtaaaacgctgctcattgatgtggactacctggcaagcgatgggctctccgcgcgctatccgcagcataaaacgggctttagcgagcgtcttgctgaccgcagcgccgcgcctcaggcggtggtccccctggccgacacgcttgattttatgccccgaggcgagctgagcgactccgcgctgctgctgttcacctctgagcggctcccggcgctgctgacgacgctgcggcagacctacgattatctgattattaatgcgccttcgctcgggctggcgcaggacgccctgctgctggcgccgcacgtcgatattaccctgctggcgatcaacgctggcgagcaggcgtcgcgcattcgcgacgcgcagaatcgtctgcaaaccgccgcgcctacgccagtcgccaccatgcttaaccgggttcaagaagagaatctggagactcaggaaggcaaacgcctgcccgagcgcggcatgggcgaactgatttcaccgaagtag

SEQ ID NO: 252605 - DNA, 1287 bp, Klebsiella pneumoniae
atgcgttctgaactcactttcctcgcgggtctgctggcgataccttgcgcatgggcggacctgcaggcaaaaccacataccggcgtggctggcatcgatttcgagagccaggtgggttatgacgtcggttacaatgacaacgtgacctggcaacgctacggcggcaacgaaaccgcttcctcctggcagggtattaagccgatttttaaagcgatcggcgagcgctatgaagatcgctatttactgatgtactcgggcgattaccgccgctacgccagcgatagcgctgataaccgtgataaccatttttttatgtttaacggtaagtggcgcttcggcagtatgcatggcctgtcgttggatcttgatgaaacgttcggccatgaagagcgcggccgcgataccaccgaggggtttctgcccgagcagttcaaagagtttggcattaataaacccatcgccacgcgcttctttaacagtgaactacgctatagctacggggcgccggaagggcgcggcaaagcagaagttgcgctgatgcataaacagctgcgctttcgcaatcttgacagcattgaggacgccagcgccgactttcattactacatgcacgatcaggagtggcatgaaaacagcctggtcgccgagctttttgatcaaaaagccaaaacgctgcgctaccgctacagttttattaccaaccagcgtcgctatgagctcaacccgttaaaagacagtaatgaatactatctgctgatgggtatgaaaaaccgcctttccggcaagaccgagatcaacggcaacgtcgcatggctgtataaagattttatccataaccccgactcacaggggttcaacggcctgaactgggatattaatgccgactggaaaccgcttgaacagataaaactcaacttacacagttcacaacggataaaagatcctaccgactccggcggctatattctggtatccaattttggcctgggctacgagcaccactggctggtcgacagattctccaccctggttgattactcttatattacagaggcttacaagcaccagaccaacggacgcaaagatcgatcaaacctcgtatcgctgaccttcaactacgactatcgaccatccgttaattttcagctgaagctgcaatggaacacgatgcattcgaataaagaaaaagatgccttttatattgggccagactatgaccatgaggtcgagcgcacgctgggctacaacgactcggccattatttttatgacgcaggtacaaatatga

SEQ ID NO: 252606 - DNA, 1449 bp, Klebsiella pneumoniae
atgcaacttaacgaccctaccctttttcgccagcaggcatttattgacggacgctggcgcgacgccagcagcggagaaactctcggggttactaaccccgccaacggtcagcagctgggcagcgtgcccaaaatgggcgccgaggaaactcgcgaggcgatcgatgccgccgctcgcgcgctgcccgcgtggcgcgcccttaccgccagggagcgcgccactatcctgcgccgctggtttgatttgatgatggagcatcaggacgatttagcgcgcctgatgacgctggagcaggggaaaccgctggcggaagcaaaaggagagatcggctacgccgcctcctttatcgagtggtttgccgaagagggtaaacgcatttacggcgacaccattcccggtcatcaggccgacaaacggctgctggtgattaaacaaccgattggcgtaaccgccgctatcactccgtggaatttcccctcggcaatgatcacccgtaaggcgggcccggcgctggccgcaggctgcacgatggtgctcaagcccgccagccagacgccgttctccgcgctggcgctggcggagctcgctaatcgcgccgggatccccgaaggcgtatttaacgtggtgaccggttcggccagcgaagtgggtaacgagctcaccggtaacccgctggtgcgcaaactctcctttaccggctcgacggaaataggtcgccagctgatggaacagtgcgcgaaagatatcaagaaggtctcgctggagttgggcggcaacgcgccgtttatcgtttttgatgacgccgatctggataaagctgtcgaaggcgcgttggcctccaagttccgcaacgccggacagacctgcgtctgcgccaaccgcctgtacattcagaatggcgtctacgatcgcttcgccgaaaagcttcagcaggcggtcagtaagctgcaaatcggcgatggcctgcagccgaacgtcaccatcgggccgctgattgacgagaaagcgatcgccaaagtgcaggaacatattgccgatgcgctggacaaaggcgcgcgggtggctaccggcgggaaatcccatgagctgggcggaaacttctttcagcccacaattctggtggacgtccccagcgatgcgaaagtagcgaaagaagagacctttgggcccctcgccccgctcttccgctttaaagatgaggcagatgttatcgctcaggccaacgataccgagttcggcctggcggcttatttctacgcccgcgatctgggccgcgtctttcgcgttggcgaagcgctggaatacggcattatcggtattaataccggccttatctccaccgaggtggctcccttcggcggcgtgaaatcctccggcctcggtcgcgaaggttcgaagtatggcatagaggattacttagaaatcaaatacatgtgtattgggatttaa

SEQ ID NO: 252607 - DNA, 252 bp, Klebsiella pneumoniae; identical to SEQ ID NO: 175731

SEQ ID NO: 252608 - DNA, 2091 bp, Klebsiella pneumoniae
atgtttgcgaaaactcgcctggcgctactggtaggatgggtgaccggcggcgtcgctttcccgctgctggcccaggaaacaacaaaaaacgaaaccatcgtcgtcacttcgcagatgcaaagcggcgcgaccaaaattgccacgccggatattgagaccccgcaatcggtatccatcatcacgcgcgagcagtttgaagagcagggagcgatcagcgtccgtcaggccgtgagctacacccccggtgtttatagcaaccagattggcgcttccaaccgctttgactatatcgtcctgcgcggcttctccgatggcagcctggataacgtctatcttgacggcctgaaaatgatgggcgataccaactcccatagctcactggtggtcgatccgtggttcctggagaatatcgaagtggtgcgcggcccggcctcggtgctgtatggtcgctcttcgcccggcggcatcgtcgccctcacctcgcgtaagccctctttcgatcccggaggggaaatcaagctgtttgccggtaataacaaccagcgcggggcggcgtttgacgtcaccggcgcgctggacgataacgatcgggtggcggcgcgattaagcggcatgacccgctatgcggactcccagtttgataccttgaaagagcagcgctacgcgattatgcccagcctgacctggcgcatcaccgaccagacgcgccttgatttaatggcctatctgcatcgcgatccggagggcggcagccactcgggtctcccctatgaaggtaccgtggtaccgcactacggcaagaaaattgctaacaccttcttcgaaggtgaagatgattacgacaagtacgaccgccgtgaaaatatggtcggctacaatttcgagcatatgtttgataacggctggtcggtgcggcagaagctgcgctacctgcataccaaagtcgagctgaatcaggtctatgccgcgggctggctgaacgaaaccgaactgaaccgcggttactccggctcggacgaaaagatgaacgccatcactctcgataaccaactcgacggcagcgtcgatacctgggccgtgaaccatcgcctgctgataggcattgactatcaggatcgcagcaacaacaccaccggctactatggcgcattcccggccatcgacgcgtttaatccggtctacggcgcgaagccggattacatcaccatgtacagccgtgaaaaacacaagctgcgccagaccggctactatcttcaggaccagatgtcctgggaccgctggcgcttcaccctgggcgggcgctacgaccaggtcagcgtgtcgaatatcgataagctgaatcaaacgcgcagcgatctggataagaacaatttcagcacccgcgccgccctgctgtatctgttcgacaacgggtttgccccgtacatcagctactctaccgcctttacgcccaccagcttcgccgacgaaaacggcaacgtgctcgatccgatgaaaggcaagcagtgggaagccgggctgaagtatgagccagaaggaatgaacagccagttcagcgcctcggtattccgcatcaatcagaccaatatcgccaccaaagaagagccgaccgatccgtaccgctcgattggcgaaattgagtcgaaaggggtggagctggaggccatcagtcagctaaccgacagcctccgtctgcaggcggcctatacctacaccgacatccgctataagaaaagcagcccggaagagcaaggcaagcgcgccgtttacgccccgcgcaaccaggccagcgcctggctgagctatgatgtgaaaagtggcccgctggatggtctgacgctgggttccggcgtgcgctacgtcaacggtattaccagcgaccgcttgaatacgcatacccttccatcctatacgctggtggatatgacgattggctatgacctgtcgcaggtcgggattaaaggccttagcgcgcagctgaacgtcaataatctgaccgataagagctacgttgccgcctgtaactcgctctcttactgctactttggcgcagagcgcagtatcgtcggcagcgtctcctggaagttctga

SEQ ID NO: 252609 - DNA, 990 bp, Klebsiella pneumoniae
atgaacaatactcctgggcagaacgagccggcccgccgggcgctgagaagaaccttctccgtcagcgagtttatggcgtttggtgaacgctatggtatcgactatcgctttccgctgctgcaaacgccggagccctcgcacgccagcccggtgctgcaaggtgaagtggaagagatgacgctgccctgcgggatgtgcatcacccactcagatgttcacgtattgcagccctatgaaaccacctcccgccatagcagccctctctatatgctggtggtgctggaaggcagcgtttccctgactctcaacggcgagcagcaccttgtgcgttccgggatggcgttcacctcacgccttagcgaacatcaggccatgtgcgcccgtcacgatgccaacagcaggctccgcacgctctcccttggactctacccggacggcgcctggcgcgacggactgcttgcttcattaatgcgcgaatgggaaagatgccagacgccaacgctcatctggcagataccgggttttctgctgagcggcctgcaatatgcccagcagagcgcgccgggccgcgtttcccggcaactgatgctggaggggctgatcctgcagctgttcggccatggcctgagcgtgtgccaggatgaaagcgcgaagcagatcctcccggcgggcggcgagcagctgcgcctggagagagttcgccgcctgctggagcaggcgccggaaaacgactacaccctgaacgagctggcccagcgggccgcgatgagctccagcagcttgcgcagtaagtttcgccaggcctacggctgttcggtttttgattacctgcgcgattgccgactggcgcgggccagaggctatctgctggaggggtacagcgtgcagcaggcggcctggatgtcgggctatcagcacgccaccaatttctctaccgcctttcgtcgacgctacggtatctccccctgcgacgtgcaaaagacgggctaa

SEQ ID NO: 252610 - DNA, 777 bp, Klebsiella pneumoniae
atgaaatcacaaacttctcagcacagaccttatcaggaagtcggcgcgttaattcgcgatctcatcgtcaagacgccctataaccctggcgatcgcctgccgcctgagcgcgagatcgccgagatgctggatgtaacccgtaccgtggttcgcgaagcgctgatcatgctggaaattaaagggctggtcgaagtgcgccgcggcgccgggatctatgtgctggataacgtcgcggcggaaggcgcggtggagagcgcggacatgaagcattgtaatgatgccggtccatttgagctgctgcaggcccgccaactgctggaaagcaatatcgccgaatttgccgccctgcaggcaacccgggaagatatcatcaaaatgcgccaggccttacagctggaagagcgcgagctggccagcagcgcgccgggcggttccgaaagcggcgatatgcagtttcatctggccatcgccgaagcgacgcacaacagtatgctggtagaactgttccgccagtcatggcagtggcgggaaaataatcccatgtggatccagctgcaccgccatctcggcgacactcactaccgcgaggagtggctggtggatcataaacggatccttgccgccttaatcaaaaaagacgcccgggcggcaaaactcgccatgtggcagcatctggaaaatgttaaacgccgtctgctggagttctccaacgtcgatgatatttacttcgacggctacctgtttgactcctggccgttggataacgccgacgcctga

SEQ ID NO: 252611 - DNA, 1476 bp, Klebsiella pneumoniae
atgactgcaaccattgccgacagcaacctgccggttacgcgccctgcgtgggatcgttctcgtctcgaatcccgcatcgttcatctgggctgcggcgcatttcaccgcgcgcatcaggcgctttatacccatcatctgctggaaaccagcgatagcgactggggcatctgcgaagtcaacctgatgccgggcaacgaccgcctcctgattgagaatctgaaaaatcagcagctgctttataccgtggcggaaaaaggcgctgacagcaccgcgctgaaaattatcggttcgatgaaagaggcgctgcatccggaaatcgacggctgtgacggcattctgcgcgccatgacgcgaccgcaaacggcgatcgtttcgctgacggtaacggaaaaaggctactgcaccgatgcggccagcggtcagctcgatctgaataatccgctgattcaacacgaccttgcccatccggcgacgccgaaatccgctataggctacatcgtcgaagcgctgcgcctgcgccgtgaagaggggctaaacgcctttacggtgatgtcctgcgataacgttcgcgagaatggccacgtggcgaaagtggcggtacttggcctggcccaggcccgtgacccagcgctagcggcgtggattgaagctcacgcgaccttcccgtgcaccatggttgaccgcattgtgcccgcggcaacgcctgaaaccctacaggagattgccgaccagcttggggtctacgatccgtgcgccatcgcctgtgaaccgttccgtcagtgggtgattgaagatagcttcgtcaacggccgcccggagtgggacaaagtcggcgcgcagtttgttgaagacgtcgtgccgtttgaaatgatgaagctacgcatgctcaacggcagccactctttcctggcctatctcggctatctcggcggctatgaaaccatcgccgacaccatgactaacccggcataccgcaaagcggcttttgccctgatgatgcaggagcaggcgccgacgctctcgatgccggaaggcaccgatcttcaggcctacgccacgctgctgattgcccgtttcagcaacccttccctgcgtcaccgcacctggcagatcgccatggacggtagccagaagctgccgcagcgcctgcttgacccaattcgtctgcatctgcaaaacggcagcagctggcgccatctggcgctcggcgtggcgggctggatgcgctatacccagggaagcgatgagcagggacaacccattgatgttgtcgacccgctgctaacggagatccagcagattaatcagcgttatcagggcgcggagcgtgtcgccgcactgctggccatcagcgggatctttgcccacgatctgccggacaatggcgacttcgtcaacgcggttaccctggcgtatcaacagttgtgcgagcgcggcgcccgcgagtgcgtggcggcggttagcgccagtctgtaa

SEQ ID NO: 252612 - DNA, 1185 bp, Klebsiella pneumoniae
atggaacagacatggcgctggtatggccctaacgatccggtcactttagctgacgtccgtcaggcgggcgcgaccggagtggtcaccgccctgcaccatatcccgaacggcgaagtgtggacggttgacgagatcctcaagcgtaaggccatcgtggaagaagccgggctggtgtggtcggtagttgaaagcgtaccgattcacgaagagatcaaaacccataccggcaactacgcgcagtggatcgctaactatcagcagagcctacgcaatctggcccagtgcggcattcgtaccgtgtgctacaactttatgccggtcctcgactggacccgtaccgacctggaatacgtcctgccggacggctccaaagccctgcgtttcgatcaaattgaatttgccgcgtttgagctgcacatccttaagcgtccgggtgcggaagcggactacaccgccgaagaggtcgcccaggcgaatcagcgcttcgccaccatgagcgaagaggataaagcgcgcctgacccgtaacatcatcgccggtctgccgggcgcggaagaaggatatactctcgaccagttccgccagcatctggcaacctacaaagatatcgataaagccgcactgcgcgagaacttcgccgtcttcctgaaagcgattattcccgttgccgaagaggttggcgtgcgtatggcggtccacccggacgatccgccgcgtccgatcctcggcctgccgcgcatcgtctcaacaattgaagatatgcagtggatggtcgataccgtgaacagcatggcgaacggctttaccatgtgcaccggctcctacggggtacgcgccgacaacgacctggttgatatgattaagcagttcggtccgcgtatttactttacccacctgcgctctacgctacgtgaagagaacccgaaaacgttccacgaagcggcgcacctgcacggcgacgtggacatgtatgaagtggtgaaggccattgtcgaagaagagcaccgccgtaaagcggaaggtaaagaggatcttatcccgatgcgtcctgaccacggccaccagatgctcgacgatctgaaaaagaaaaccaaccccggctattccgcaattggtcgcctgaaagggctggccgaagtccgcggcgtggagctggcgatccagcgcgctttttttagccgctaa

SEQ ID NO: 252613 - DNA, 552 bp, Klebsiella pneumoniae
atgacaaaccataacttcacctttcacatcacctcagagcgtgatgctgatgatattcgcgaagttgaaacccgggccttcggctttagcaaagaggccgacctggttgccgatttgctcaacgatgaaagtgctcacccgagattatctctgctggccaaacataatggaaaagcagttgggcatattttgttcaccctggcgacgttcaaaggggagtctgactctccgatgatgcatatccttgcccccctggcggtggtgccggaataccagggcatgggtgttggcggattacttatccaaagcggtattgagcatctgaaggcaatggggagcctggcggtattcgttctgggacatgccacttattacccgcggcatggctttgaaccctgtgccggagataaaggctatccggcgccttatcccattcccgaggagcataaagcctgctggatgctgcagcggctttcgtcccggccgctggggataaccggtcagatacagtgcgcccgggcgttaatgaaacccgagcactggcgcgagtaa

SEQ ID NO: 252614 - DNA, 1164 bp, Klebsiella pneumoniae
atggctaaccaacaaaaatggaaagtatttttcctgctgttcgtcaccatgttccttcttggcggcatacagaacaccaagggtctgattcttgagcaggtccagcacgatatcaatctgaacatggggcagataggcacgttgatcatgttcttccagataggctttctggtcgccagtctgctcaccggctactttaccgataaaaaggggctgaagatcatgatgctgattggctcgctgatgatggccgttggtctggttggcaccagcctggcgttcagcgtgctgctgtttttcggcttctatttgattgttggcctgggtatcggctcgatgctggtctccatcattaccgtcattccgaccttctacaaagaaaaagccggcatgatgttcaacgtttccaacgcgatgttcggcgtggggatgatcgccactccgctgattttacagcagcttttctcgcatcatgtctcatggcgcctgttctatgtcgggattgccattattgttgcgattatcattctggtactcagcagtctgcggttagaaaaagcgcaggggatggatatgcagctctctgattttatgcatatccttggccagaaacgcctgatgctggtgattggttttatcctgttctacgttgctgcggaagcggcttttctgaactttttccctatcttctacagctcgctggatatcgtcggcgctaccgcagaagagaagattgtgacggcggcctacgtcatatccagttttgccatgctgttcaccgttggccggtttattggcgggtttatcaatctgaagttgggcgatcgcaaaacgctgatcctgttttcactattctcgctgattgccattattgccagccgctactttgccagccagtttgtctggctgtttatggtatttggtttcgcgatgtcggtactgttccctacggcctccgccgtggcgacaaaactcaccgataaaagcggctcaacgatgggactgatctatgtcgcctcaggcatgggcggagcctttgcaggctggctgattggtcaggtttctcagatttacggcgtctcgctgggcttcaacttgattattgctttcgtggcgattttcttcgtgctgacgttgtttattaaagaacatccgcaacattaa

SEQ ID NO: 252615 - DNA, 1278 bp, Klebsiella pneumoniae
atggccgggatccatctacacccacacgatattcttgatgaaggcgtcgattcagtactggaacgtattaacaaaatgaacggcgtcgatagcctctttgttgaggttaacaccatttttgaacgtaacccctaccccaccggccgcctgccgcacaatccaaaacatgagtttgtgcaaggtaccgccacgctgcatgtcaaactcgatatgccgccactacgtctgcaccagcgcgttgatcctacgattgttgcgggcgccgatcctctgcgggatctgcagcaggccaccgatcgcggcccttataaagtgatcccctgggtgaatattctcaacggcgattttgccgggcagatcgaaaacaatcaggtgatcgattttcgcggcaatccggttgaacactggctatgccctaatggccctgacgtcattgaactgtggatcaacaccttcagcgcgattaaggcccggtacggttattcgacgtttctgatcgaccgcatccgctaccccgactgggcaggaaagagcgtgagccccagaggattattcacctgcttctgcccgcactgtcagcgcgaaatgcatcggacaggcatcaatgctgatgcggtccgccaacgtctggccaccctcacggcgcaaatgcacagcggccagtatgatgcgaccgtcgatgcgttattaaatgatgaacttctgcagcgctggatggcattccgccagcatagcgtctcccgctttgtccagaatctgctggccggcattagcgaccgggatgctggcggcagcgaactgtggctcgatctctggcccccggcttactcgtggattttaggtcaggattatcagtctcttacccgttattctaaagcactcaagcacttcccctaccataagctcggcggcggtgcggacgtgcagggactcattgaacatttcgccaaagatgatgcccagcgtgaaagcgccttcagcgcctttatgcgcctgttcaaactgccttacaacattagctatcaacagttcaaagccgaaggcttcccgattgaatttgtaaaacagcaaaacaatctggtgcgtgaaaaatcacagccaggcaccttcatttacagcggcatccagatgtggaacctgaccccgacggcactactggaagccatcgatgcggcagaacagagcgactgcgacgacctgctctattactgctacggctgggcggaacagtcgcttttcgacgccgctggccaccattaccaaaagcccacttgctaa

SEQ ID NO: 252616 - DNA, 1188 bp, Klebsiella pneumoniae
ttgaagctgaatgttcccaacacattaagacaaatgaacgcctctgtggtcctcaacgtcatccgtgagaactctcctctttctcgcgctcagatcgccaaggcaaccggcattactaaagccacaatttctgaaatcgtgagcgacctgctggaagagaaaattatctacgaaagcggcgtcagcgaagaaggcggtctcgggcgcaaagggattctggttaacttcgatcccaaccatggccttgggatcggcattgacttaggcggaacgaaaatcaccttctccctcttcaatctcaatgcgcagcttctggcccagcatcaggaatcaacctatgaggtcacgactcgccgggagtttctcgaccgattcagcgccagtatcgaggcgtttatcgaacggcagcctatttctcgcgacaagctgaaagtcatcggcatcgccacgccgggcatcgttgattaccgtagcggaacggtgcttgaaggctcccccaatctccctgagtgggacaacattccgcttgccgatgagctcaacgcgcgtctgaacatcagggtggtactggaaaatgatattcgggcagcgctgattggcgaaatgtggcaggggaaatgtcgccacgttcatagcgccgcacttattggtatcggcaccggcctgggctcggcgctgctgatggatggcaaaattatccggggtatcaataatgctgccggtgagatcggctatatgctcttcgaacgcaaccatctgactcagaactggaaaaataagggctgcttcgaaaactactgctctggctccggactcaaagagagaatgtccgcgctcagcggccaaagcatgaacgcccatgaaatacttatcgccgctgcccagggggaaacggtacccgccatgttgctggaggagatggcggactacttaaccatcggcattctcaatatggtgacaatagccaaccttgagaaagtcattcttaccggcggcgtttcccaatccgcagagctttttctcccaagagtacaagccaatctcgatagacatctgtttgccaatacccgggtatccgttgagctttccgatttaaaagaaaaagcaccgctgtatggaatggcgatgctggcgctccatgcggtgtatccctcgattcaatttatgcccgacacgcagcttatttaa

SEQ ID NO: 252617 - DNA, 1047 bp, Klebsiella pneumoniae
atggcgaacattcgtgatgtcgcaaaacacgctggcgtttccgtgagcaccgtatccaacgtgctaaacggtcgtaccgatcaaatgcgggctgaaacgctgacgcgcatccagcagagcatgcagacgctgaactacttcccgaatcgcgtggcgcagcagttgaagaccggccaggccaaaatgattggcttgctggttccctccattgtgaatcccagttttgccgcgctggcgcgtgaagtcgatctggcggcgaaagaacgacagtaccgggtactgattggcaacacctatcggcaaatcgaagaagaagcagcctttcttgatgatatgttctcccatggcgtgcgggggattatcgtcgccgcttgcgatatcgaaaagccgcattttgcccgcgcggtagagcagggcatggtgatggtgaactatgatggccgtatgcctgtgcgggcacaggcggataatttttccctcgacagcgtctcaatggacaacattgctgcggggcgaatggccgcagaacatcttatcgcgcaggggtgtagtcgtctggcgtttgccaccgtggctggaatgacgccgagccgcgctcacaaaatagaagggtttctttgcgcggtgaaagagcaggggatatatcgcgatgggatgatcgtggaaggacaggcgatggcggcctatggcgacaccgaaatgaccgaactggggcgcgcgctggcgttaaaaatcagccagcagcctacgctcccggatggtatcgtagcgattaacgatgcgctcggcatcgggctgatgaccggcctgcaccaggccggaatcacgataccgcagcaaatttcccttgtgggcatcgataatatctccctttccgggttgattttcccgggtctcacttccatcatgccgccgctgaaaacgatggcagaggtgatggtagaccggttgattatgcgcatagataacccgtctatcccgcctgcggagtttttattcccgccatcgctggtttcccggcaatctgtgcgtagcccggaggcctga

SEQ ID NO: 252618 - DNA, 420 bp, Klebsiella pneumoniae; identical to SEQ ID NO: 177376

SEQ ID NO: 252619 - DNA, 765 bp, Klebsiella pneumoniae
atgggattattaacgggtaaaaaagcgtttattaccggcgcagaacaaggtattggtaaagaaagcgcgaaaaaactgatcgaggccggatgtgatatttatatacattatttcagcggcgaggaaggccccagggaattaattgcatttgccgaacagcggggagctcgcgcggcctgcggtttcgctgatttaaccaatgaggacgatgccgcacgctgcgtggcggaggcggcagaatttttgggcggcattgatattctggtcaataacgtcggcggtattattgcccgcaaatggctgggagagattgacccgcatttctggcgcacggtcatcgacgtcaatatgaccacgatgatgaacgtcacccaacaggcgctcccctggctgaaagcagcctccgaaggcgcaagtatcgttaacctggcttctttagccggacgttctggcgggcatgctggatctctggtctattccaccaccaagggagccgtactgacctggacgcgctcgttggctgcggaattgggcgaacacggcatccgcgttaatgccgttgccccggggctgattctggggacacgttttcataaccagcatacaacccaggcctctgccgatcggacaattcaggagattcctttaggcagagcgggcaccgcggaagatgtagcaagggttatttgcttcctcgcatccgaatatgacggttttgtttccggagcgaccatcgatattaatggtggagtttatcgggcataa

SEQ ID NO: 252620 - DNA, 1875 bp, Klebsiella pneumoniae
atggctgatatctctatgaaaacaaaggatgaaaatactttgttgacgctgttggggcagctaagcaaatgcttaacctgcttcacctcctgggccggagcgctggtgttatttatcaacgtcctggtggtatttgcttccgttatctggcgttacgcgctgcattcgcccattcattgggcagaagaggtggcgcgcgcgctgatgatagcgctggtcttttttggtgtcgctacctcaacgggcagaggaggacatattggcgtcgatcttttcctgcgctttctacctgatgccattagaccgtatgtcgtgcatgccagtcgctggatcctgttcctggtctccgtcggcctggtcatctccagctacgatctcgtccaggctgcgcggctacaaaccaccgaaacgggcttaccgcaaaccatctatgtgatcccggtcctgatcggctctgtggtgatgatggtggctgcgctggaacatgccctacgcgaacgagcaaagatcgttctgctcagcggtgcggggatcctggcgctagcggcactgggttatctgaaactctcgctgatggccgatccggccagcgcggctgccggactcatgctgatttgctttgtcatgggcatcctcgccggcgtgcccattgccttcacgctcggcatgtcggcaatggtattttttatctgcgacccttccctgccgtttgttttcttttctcaacaggtcgcggctggggttgatcactttgtcctgctggcaattcccttcttcttacttgccggtgcggcgatggaaatcaacggcatgtcaacgcgtctggtggagcttattgtgcgtggcatgggacgatttcgcggcggcctgaatatgacaaccgtactatcgatggccttcttttccggcatctcgggttcaaagctggcggatgtggcggcagtaggcggcgtgttaatgcctgcggtgcgccgggcgaaacaagacggcgaagaggccgccggggtctttgccgcatctgcggtaatggcagaaaccattccaccctgcgtgaacctgattgtgatggggttcgtcgccaatatctctatcggcgcgctgtttatcgccggtctggtgccggcagcctgcctgttggtgctgttaatggtggccgccaaccgcttcggcgggaaaatcaacgtcagcgaagcgtacccggaattgcgcccgcgaacccagctttatcttggcgccgccgtcggtctggttatgatcttcatgattggccgtggagtgatgatggggattgccacatcaacggaaatttcagcttttgccgtcatctacgccattgtggtgggccgactggcgtttcgtgagctgacgctgaaagcgacgataaaaatgttcgtggatattgcggcgatgtcgggtgttttactgttcatcgtggcctgcgcgaccagcttgtcctatgccctgacgatacaaatgatcccccagcagatcgctgaactgctggtcggaattggtatggagcaaggtgcctggctgttcctgatattaaccatcgtgattttgataatctttggcgcggttctcgaaggcgcgcctgcgctgattattttcgctcctatcctggtgcctattgccattcagcttggctttaatcccttgcactttggcatcgtgatgatcatggcgatgggttttggcctgttttcccccccgatcggtctgggattatataccacctgcgctatttgcggcgtagagatgaagcacgtgattaaacccatggcgaaatatctggcggtggtttttgtcggcatcattattgtcgccatggctccccctttaaccacctggttgccaggactcgccggctattag

SEQ ID NO: 252621 - DNA, 1044 bp, Klebsiella pneumoniae
atgatgaaaacaaaaccgtttcgttccgccaggcgctttctggcactcgcttgcctcggtaccgcgctcatagcaggtagtgtgctgaccgcttcagcacaggccgccatcaattttcgtgtgtactcttctttgccggctgatgattcctccgcccactatatttggttcaatcgtttcgaggaaaatatcaataaaaacgagaagttaaaaggccagatcaagctcaattacttcgcaaacgcgatgctcggaaaagaggctgatgctactcagcaggtgcgtatcggcgccattaacatgatgatttcaggcacttcaatctgggcgacgctggtacccgaaattggcgtactggatttggggtatctgttcaaagattacgatcaggtgggaaaagcgctggatggcaaagtcggcgaaaagctttccagcctgatgatggataaagcaaacgttatggtactgggctatggctataacctcggcgcacgtaacgtgtataccaaaaagacgattgaaaaaccggcggatttaaaaaatctgaaaatccgcgtgctgccggttcccaactttatcgccacgctaaatcacatgggtgccgttgccattcctatgccgggcggggaagtctattccagcctgcaaatgggcgttatcgacggagtggaacacgatgccccaaccatctacgccagcaaatactatgaaattatcaaaaacggtacgctgactcgccacagctataacccgctgatgattgccatgaacaagaaaagcttcgagcaaattccgcaacccttacgcgcagacgtactggccgcggcaaaagaagccaccgagtacgaacgtcagcaggccagtcaaaaagagcttgaggcgattaaaaacctcgaggctaaaggagtgacctttcgggaaaccgatcgcgcttactttgcgcaggccgtacagcccgtgtggaaaaccttccttgataaatatcctgatttaaaaccgatgatggatgagttcagcgctacggcgtcgagcgctaaaccctaa

SEQ ID NO: 252622 - DNA, 1341 bp, Klebsiella pneumoniae
atgaataaactcatccacagcggcacgatgctgctggctttactacatccttttctggcgctggccaacgagacgcttttttctcccacggcaaaaaatatgaccggagagtggggaggcgtgcgtacggatctgcgccgtcatggttatgattttacgctggaatatagcgcaatgacggccacaaatatgtccggcggttacgatcgcgataaaactctgcgctatagcgaccagtatattctcggcatagatatggacctggaaaaggtttttggtattcaggacggtgaatttaaagcctcggtgaataatcgtaacgggcgagacctgactcaggatcgcctgcaggatccgcgtgcgccggtaattggctccggtgtgcagagcaattacggtcggggacaaacatggcacgcgacgcagttttggttcaaaaaaacggggtgggataaaaagctggatctcaaggtgggcctgatgccgccaggagaggattttgataacaacggctgcttttttcaaaacctgtcgctgtgcggctctttagccggccacggcagcggcgtctggtataacacccccataggccagtggggcggccgtattaaatacagccctgccccggcgctttacgtccaggccggcgcgtttcagtacaaccctgcctacgtcacccgccacggaagcttccagctggatggtaccgggcatctggggtacatgtacctttttgaactgggatatcgacctactctcggcgcggcaaaactccccggaatctggaaactcggcggatggtataacacggcggacgccaatgatgtgctggatgacgacaatggcgatccctatgtcctcacgcagcaggccgcccggcgacacggagggcgttacggaggttatctctatataggccagcagataacccactctagcagccagcgccaaaatggcctgagccttttcggccatctggcaataaatgataaaaagacggcgaccatggattatcagatccaggcgggggctatttataaaggccctttcgccagccgtccgcaggactttatcagcttcggcgtcagtaaaatgcacgccaacgacagagtcgcccgtcgggcgcagctcctgaaccagatgcgggggatcgatgattatgataaccccctgtatgtcccggttcgcagagccgagtatgccgcagagctgcattatagctttcgcgcgactccatggctgagcgtccgccctaacctgcagctgctcgttcatccgggaggaagcgaagagattaaaaacgcgtgggttgtcggcaatcaggtaaccatcaaattctga

SEQ ID NO: 252623 - DNA, 1398 bp, Klebsiella pneumoniae
atgtcaactcaggccattgcttcagattacgccgttgccagcggaacggcgtccacgccagatgcgctgctggcaaggctggaacgcctccccatcacccgacggctgaaagcgatccgcgttatcgtcggcttatcaacgtttttcgatgcttataccattattgcaatcgcatttgctctcccccagcttactcaggaatggggtcttacgccgacatttgtcggtcttattattgcggccagctatgtgggacagctgtgcggcgcacttttttttggctcactggcggaaaaaataggccgtatcggcgttttacgtatcaccattatcatgttcgtgctgatggatgccgcctgcctttttgcctggaacggctggtcaattcttatcattcgctttttacagggcgtgggcatcggcgccgaggttcccgtggccagcgcctatatcaatgaatttgtcggcgccaaaaagcgcgggcgtttctttttgttgtatgaggtaattttccccatcggcatgatgtttgccgggttggtggggtattttctggtgcccatctatggatggaaagtcatgtttttaatcggtctggtgccttctgcgctgaccgttcccctgcgctggctgatgccggaatcaccgcgctggttgaccgcaaaaggccgactgaaagaagcggagaacgtcgtatcaacgctggaatctgaggttatcaggcgcgggatgtcattgcccgaaccggaaataaaagccccgacggtgcacaaagcggctccggaaggagtaaaagccctcttcggcggtatctacaaatcccgaacctttatgctgtgggggctgtggctgaccgtatatagcgtcaacaatgggatgatcacctggttccctaccctgtacaaaacctggtttaacctctccctcgacaccagcctggcctacggctggatcacctcctcctgcggcgtcgtggcttcggtgatctgcgccttgatgatcgaccgtgtcggccgcaagcgctggtacacatgggcctttctcctggccgtcgttccgctgattgcgctttctgttctgggggcaaaatccgccgttgaaattctgattctgggcagcctcacctacgccattctgcaaaccatcgccttttcgctttatctgtacgcggctgagctttatcccacccgactgcgcgctatcggcaccgcctattccagcgcatggctccgggcggggtcttccataggcccactgatggtcggttttatcgtcagcggcttcgggatccgctttgtgtttatcactttcgcggtcattgcgctgattggcggtttaattacctggctttttgccattgaaaccaaagggaaatcgttagaagagctgtcgccatag

SEQ ID NO: 252624 - DNA, 1032 bp, Klebsiella pneumoniae
atggatcaagaaagtgaactgaacgatttgccggaaaaaaaactggcgacaatgcgggatgttgctcgcgctgcgggcgtgagcgtctcgaccgtttcgcgcgtactcgatgaaaggttacccacctcgcgcagcgcctcggcagataaaattcgccaggtggcgcgagagcttggctaccgtcgggactatgttgcttccagcctgcggcgtggcgataccggaacgcttggcgtcctggttccgagactgaccgatgccgtcacggcgatgctttttgaagagatagccagggcggcggcccggcgaggctactttgctattgtcgcgacctgcggtgatagcaaggagcaggagaaaaacgccgttgaatcgctgctggatcgccgcgtcgatgggctgatcatgtccacctgccggctggacgatcctttgccgcaaaccctgcgtgaacgggatgttcctcacgtactggcgctgcgcaccgatggctttagtccctcatcggtcggggacgatgagcttggcggctatctggctacccgacacctgattgatttaggccaccgggatattggcctgattggcggccctgattttgcctccaacgcgcgcaaccggcgtaagggttttgagcgggcaatgcaggaagccgggctcaggatcgaagcggaatggtgctgtcactctgattttaatatcgcctcgggggagcagcagggaatgaagatcctcagccagcctcatcgcccgagcgcgctgtttgccgttaatgatgagctggcgattggcgtcctcgcggccgcgcaccagcaggggctggtgattggcgaagatctctccctggtgggctacaatgacattcccctggtgagcagactccccgtggcgctgacctcggtcaggacgccgctggagcatattgccagcaatgcggttgatatgttattgaatccagagataaataataatatgcgggttaccacgccctcccttattccacgtaagtctacctcgtctccacgtaaataa

SEQ ID NO: 252625 - DNA, 849 bp, Klebsiella pneumoniae
atgaaactattaagctttcgcgttaatgataaaaacaaatatggcctggcgaccgctgacggcgtcattgatctacaggcgcagtttcctcaatatggcagcctgctggaatttataccgcatcttcatcttgttgatactctgccgccgtctgcgaaacaagcgaactactctttcgacgagatcgcttttctgccggtcattactgaaccgaaaaaaatcatctgcgctggcgtgaattatcgcgataaaaacgctgccggtaacgagaagtcctctaatcccgtgttgtttatccgctttgcggattcacagaccggccatctgacaccgctcctcaagccggagtgcagcaatgagtttgactatgaaggcgaaatggcgctggtgatcggccgtggggggcgcaatattcctcagcaggaggcgctgcattatgtggctggctacagctgctatatggatggctcggtgcgcgactggcagcatgcctgctttaccggcgggaaaaactggcctgcgacgggcggcttcggcccctggctggtgacggcggatgatatccccgacccgcaaaatctgaatattaccacccggctcaatggccagacggtgcagcaggataatacgggcagcatgttgtattcaattgccgaactcattgcgtatatcagcaccttcagcgcgctctctccgggagatgtcattctgaccggtacgcccggaggtatcggaaaaaaacgtaccccgccactctttatgcagcccggggacagggtggaagtcgagattgagcagatcggatgcctgatgaataccgtacgcagcgatgccgctgtagcgcgataa

SEQ ID NO: 252626 - DNA, 1290 bp, Klebsiella pneumoniae
atgatattggttcagtttctggtggtgctgctgtttctgtacatcggcatgcgggtcggggggatcggcgtggggtttgccggcggtgccggcgtaattgtgctcagtgcgctcggcgccacgccgggtgatatgccgatgctggttatcgtatttatcatggtggtgatcgtggcgattgccgccatgcaggaggcgggcggtattgaatatcttgttgacctcaccgagcgtctgctgcgccgctatccgcgattgttagtcatcaccgcgccgctttccacctggctattgaccatgatggccagcaccggtcaggtctcctttgcctgtatgccggttattgtcggcgtggcgaaagagaacaatataaaacctacccgggcgcttgctctttccgtcagcgcctctttgctgggcattgtggcgtcgcccatttctgcggcggtgattttcttctcggggattctggaaaagggtcattccggctggggctatattgagctcattgcggtatccataccctccacctttctggcgctgctggtcacctccgttttttatctgtgctgggacaggatccgccagcaggatcggctcgatggcaatccggttccgattaaagcaaggactgagcgggcgatcccgccctgtgccggacgttcggtgctgatttttatcgtcggactggttgtggtgctggtttatgcgattgtcaccagtccaaaattagggctgattgtccatccggccatgagtagcggacaggcgcgggtaggggtgatgctgggcgttgcgctgctgattgtggtgtgctgccgggttaacgtacacaaggtcccgtccggatcggtgtttaaaaccggcatgacctcctgcatctgtatcctcggcgtcgcctggctgggttcaacttttatggatagcaatcaacagtggttgcaaagcgcggtctcgtcacacttgttggattcgcccattatgttggccatcattatcatggcggcctcatgcttcttgtattctcaggcggcctccacaaaaattttatttcccgccgcgctgagcatgggcgtagccccggctattttagtggcctgcttcccggccacggcttctctttttattttgccaaactatccgacgctgttggcggcggtagagctggatgataccggctccaccagactgggccgacatattatcgatcatccttttctgctgcccggcctggcatcggtgctgctgtcaatgctcttcgccgcggggctggcttatggcattcagtga

SEQ ID NO: 252627 - DNA, 528 bp, Klebsiella pneumoniae; identical to SEQ ID NO: 177366

SEQ ID NO: 252628 - DNA, 1389 bp, Klebsiella pneumoniae
  misc_feature (30)..(39): n is a, c, g, or t
atggcgggattcagttatggtggctgtctnnnnnnnnnnttcagttatggtggtttcggtgacggtacaacctggagtaaagagcggggaacgggtccattaccaggtggaggatcttcaggcaacagtgggaaccatagtaatacgacaccagctgagcagaaacagatcaatgccatacgtgctgataaaaacgtaagagccaggctttcaaatctaattaaggccgcgcgcaagctcaacccttcagtgaagattacagtgcacgcaatctccccggaagggactatggcgataagtatggaaggtcttactgcctctcaggccagacaggctggtctcacggggctagtcatgggaataactgtacccggatatattggttcggtcggagattttgaaacaggacataaatacaatctgaaaaatccggaaaagctcaattctatcggagtcggtactccactggatggttttaacggaggtgaaaatatagatactaccccaaaaaaataccggaactggagagcgactgacgagaaatccttttattatgtcggaacgacagtaccaatgcggctactacaccatcttacagtctcaaggaataaagagactgatacatacaccatgtattttaaggctaaagatatcaaagcactgtataaaattgaggtaaaaaacggtgacctggataacatgaaactcaccacccttgcgcaggggcatcctttatttactgcagaatttgctaaagatattgtcagaaattttgcatcagttaaaaatgagagtgataaagaggttctggataaaaccagcggagtcatcatcagcgtcggggataaggccggtgctcttctgggggaaaaatataaagcgctatcctgcgaagttgccagtaatatccaaaattttcaggggaagcagatccgcacctatgatcaggcgatggcttcaatgaataaactgataactaaccccaatatgaagatcaaggctgcggataaaactgcagttattaatgcatggaaagcatttaatgttgaagatatgggaaacaaattcactgcgcttggtagagcctttaaagtggctgattatgtcacgaagggaaataatgtcagggagaagtcaattacgggttacgagaccggtaactgggggcctctgatgagggaagtagagtcctggactgtcagcggactaacctcatcagtagctctggccgttttttcggccacattgggggctatgctcgttgctgctggtgtgtctacagctgtggtcggcattattggcattattatcgcgggtctcataggggcgttgattgacgataagttcattgacaagctgaacaacgagattattcgcccggcctactaa

SEQ ID NO: 252629 - DNA, 618 bp, Klebsiella pneumoniae
atgaagtatcgcctcaatggaaaagagaagcgtatggcttttggtgtttatcaagcagtgtcccttgcacaagcgagggcactacatgatgaagccaagaaaaaactggccgaaggtatggatccatcgtttgccaagaaagaagaaaagctggttcgcgatgtgcaactcaataataccttccagtctgtggcgcttgaatggcacggtacgaaggcgagcagatggtcagaagggtatgcttctgacattatcgaagcctttaataaaaatattttcccctttctcggccacttgccggtgaaaaacattaagcctttggtgctgctgaatgtactgcgtcgaatggaaagccgcggtgcgacagagaaggctaagaaatctgttctccgactcttccggcgtcagcccaccgttgtaatggtgaggcctgacgctattgtagtagctccatatataatcattaatttgctgccgggccctgtccttgcctgcgtaaacctccgtcggcacccatactgttttctgactgcggaagaagcgctccatgggactattatcccagcagtttccccgccggctaatgctgtgacttattctgtaacgccagagaagtga

SEQ ID NO: 252630 - DNA, 1254 bp, Klebsiella pneumoniae
atgctggaacaaatgggcattgctgccaaagcggcctcgtacaaactcgcgcagctttccagccgcgaaaaaaaccaggtgctggaaaagattgccgactatcttgaagcgcagaccgacgcgatcctgcgggctaacgctgaggatctggcggaagcgcgcgctaacggtttgagcgaggcgctgctcgatcgcctggcgctcaacccggcgcgcctgagcgggattgctcacgatgttcgtcaggtctgcaacctggcggacccggttggtcaggtgatcgacggtggcctgctggacagcggcctgcgcattgagcgccgccgcgtgccgctgggcgtggtaggcgtgatttacgaagcgcgcccgaacgtgaccgtcgacgtcgcctctctgtgcctgaaaaccggcaacgcggcgattctgcgcggcggcaaagagacctggcgcaccaatgccgccacggtgaaagtgattcagcaggcgctgcaggagtgcggcttaccggcagccaccgtccaggcgattgagagtccggatcgggcgctggtcggcgagatgctgaagatggataagtatatcgatatgctgatcccgcgcggcggcgcaggtttgcataagctgtgccgcgaacagtcgacgattccggtgatcaccggcgggatcggcgtttgccatatttatatcgaccactccgctgacgttgccgaagcgctgaaagtgatcgttaacgccaaagtgcagcgcccgagcgcctgtaactcggtcgaaacgctgctggtacatcaggatatcgccgaacgcttcctgcccgcgctgagcaagcagatggcggaaagcggcgtcagcctgcacgccgatgcggcctccctgcccgcgctgcaaaacggcccggccagcgtagagccggtgaaagcggagcagtatgacaatgagtacctgtcgctggatctgaacgtgaaggtggtggccgatcaggatgaagcggtagcgcatattcgcgagcacggtactcagcattccgacgccatcctgacgcgcaccctgggcaacgcgaacagctttatcaacgaggtggactcctcggcagtgtacgtcaacgcttctacccgctttaccgacggcggccagttcggcctcggcgcggaagtggcggtcagcacccagaagctgcacgcgcgcggcccgatggggctggaagccctgacgacctataagtggattggtttcggcgacgataccattcgtgcttaa

SEQ ID NO: 252631 - DNA, 933 bp, Klebsiella pneumoniae
atgcactatatgagcgactatgacagcaaagatggcgatcagacttacgttcgtttcggcattaaaggtgaaacgcagattaacgacgatctgaccggctacggccgttgggaatcggagttctccggcaacaaaaccgaaagcgactccacgcagaaaacgcgtctggcgttcgccggggtgaaagtgaaaaactacggctcattcgactatggtcgtaacctcggcgcgctgtacgacgtcgaagcctggaccgatatgttcccggaattcggcggcgactcttccgcgcagaccgataactttatgaccaaacgcgccagcggcctggccacctggcgcaacaccgatttcttcggcgtggtagatggcctgaatctgaccctgcaatatcagggtaaaaatgaaggtcgcgacgcgaagaaacagaacggcgacggtttcggcaccgccctaagctacgacttcggcggcagcgacttcgccgtcagcgcggcctataccagctccgatcgcacgaacgaccagaacctgctgtctcgcggtacgggtaaaaaagcggaagcctgggcaaccggcctgaaatatgacgccaacaatatttacctggcgaccatgtactcagaaacccgcaaaatgacgccaaccagcggcggttttgccaataaagcgcagaacttcgaagccgtggcgcagtaccagttcgatttcgggctgcgtccgtccctgggctacgtgctgtcaaaaggcaaggatattgagggcgtaggcagcgaagatctggtcaactatattgacgttggcgtgacgtattacttcaacaaaaatatgaatgcctttgtggattacaaaattaaccagctgaagagcgataataagctcggcatcaacgatgatgatatcgttgctgtcggtatgacctatcagttctga

SEQ ID NO: 252632 - DNA, 564 bp, Klebsiella pneumoniae
atgaagcccagactctctcacgcgctactgtttgttccttttttgcttttggcaggatgttcatcctcatcgaaaccgcataaaaccgccgcccagagtagtcactcgaccatcgacggaggttcagacgatctgatcccggtgatcgccgcgctgcacgatcaaatgcatacttgggagggaacgccctacgaatggggcgggacggagcaaagcggcgtcgactgctccgggtttgtctggcgcacgctcaaagatcgcttcaacctgccgatggagcgcattacgacgcgcgagcttctgcatatgggcgagcgcgtgagcccgcggcagctgcggccgggagatttagtcttcttccgtattaaaggcggcatgcacgtcggtttctatgataccgaccgtaattttcttcatgcctccaccagccagggcgtgatgcgctcttcgctggataatccatactggcaatcggtattctaccaggctcgccgcctgccgaaggaatataacgcccagataaccatgaataacgataatctgcatctggcaaaaaatcgttaa

SEQ ID NO: 252633 - DNA, 876 bp, Klebsiella pneumoniae
  misc_feature (41)..(50): n is a, c, g, or t
gtgcctgtcgcagtcggcattcagccgcagcatccaggcgnnnnnnnnnngctggagcagagcgtcgggcatcctttatttgaccggcagagcaagctaccgacgctcactctgcatgggcaaaagctgctgccttacgcccgccgttttcaggaacttaacgtcgagctcagcagccagctgcgcgaagcggacgatgcgcaaaacggcgaggtcgcctttggctgcggcccggcccccgccgcgaggctgattccggctgccatcggcgagtttcatcgtcttttgccgcaggcgagggtacgctttcagattgataactggctggctctgcatcaggcgctcacctcccagagctatccttttgtcgtcgccgacagctggcaggccgagctcgacccgcagctgcgcgttcagccactcagcccgcagcgctgctttttcgtctgccatgccgggcatccgctggcaaaacaggggccggtctctattcaggcgatgctgcgttacccctttgcggcgccctatctgccgccgggcgtgcgcaaggtgctggcgaccctcagccagcagcaggacttcacgccggcgattcagtgcgaccatatctacgcgctgctttcgaccctggcgcgaaccaatgcgattagcttcgccagcgaggatggcttcgcgctatgccagcacagccatcggctggttaagctggagctcagcgatctgcctgaagagtggcggctgatgcagacccggtttgccattatctctccggttcatgcggctcagccgccgctggttgcgaagctgattgagatgatcctccataccgatcgtcagcatcagctgcagctgctggcccaggaggaggggagttaa

SEQ ID NO: 252634 - DNA, 1068 bp, Klebsiella pneumoniae
atgatgaaagcaatattcaaccgcaccttgctggcgctggtcgcggtcatcggcctggcgtccagcgtccaggccgaaacgctacgcactatccgcatcggcgtgccggaccagagcgcgggcagtaaaccctttattgaggggccggtcggcatggcgtttatccgccatcagctggaagaggtgtttaagccgcagggcgtggaagtgcagtggcagtttttcaaaggcgccggtccggcggtaaatgaagcgttagccaaccgccagctggattttgtctacctcggcgatctggcggcgattatcggtaaggccaacgggctgccgacgcgcctgctgctgggcagccggggttcggaatcttacctcgcggtgaccaaagcttccgggattaaaaccctcgccgatctgaaaggcaaacgggtggcggtttatcgcggcacggcggaccagctggcctttgaccgggcgctgcaaaccgtcggcctcaacgagcgcagcctgcaggtgatcaacctcgactggaacgccggcaaagcggcgctggcggccggtcgcgtcgatgcggtgtggggcggcgtttcgctgctggcgctacgcggcgataagattaatgtggtcgtcaaaagcggtgactccggccgccagaacaccactcaggccgggttcctcggcacgcagacgtttatagacgcctggccgcaggcgacccagcagatcgttaacgtgttggtgaagaacgccgctgaaatcagtgaccccgccaatcgcgacgcctggtccgccgagatggcgcagcagagccagatcccgcaggcgctatttctcgaagagctgcagccgcaggatctgaactttaccacctcgccgcgcatcgacccgttcctgaccgccagctttagcagcagcgtcgggcaggctcactcgggccgcctgatccgcagcgctttcgacgtcagccagtgggtggacggccagtttgtcgagcgggcgctgaaagcccagcagctggaaaaccgctggccgcagtacgatgcccaaggccaggcgaaaaacgccggttaa

SEQ ID NO: 252635 - DNA, 1569 bp, Klebsiella pneumoniae
atgtcgcagatgatcttaagaacggatgctcccggcagtccggggttcaggcttaacggctggccgtggctgctgcctgcgttactgctgctgctgtggtacatcgccgctcgcgagggatggatgccggagcaaattttgcccgcgccgtcggtggttgccgatactgccctgtcgctgctgagcggcgatctactggcgcagtggggattcagccttcagcatctggcgcttggcctgctgctgggcgccatcgcaggcacgctgctcggggcgctgttcggcctggtgccggccgccgcgcagcgggtggaaccgctgttttacgcgctggcgcaaatcccgacgctcggctggatcccgctgtttatggtgctgttcgggatcgataacggcctcaagctggcggtgatcgtcaaaaccaccgtagtaccgatgaccattaatacgcagcaggcggtggccggcgtgccgttgaccctgagcgaagccgcaagagtaatgaatttttcccgctggcagcggctgcgctggctggtgatcccggcaagcctgccgggctggtttaccggcctgcgtctggcgctatcgcaggcctgggtgtcgcttatcgtcgtggaactgctggcttcttcggaaggtattggctacctgatggtctggggtcgtcagctgtttcagctggatatcgtcttcgtcaccattgcggtggttggcctgagcggcatgctgatggagtgggcggcgaaccgggcctgttcccggctggtgttctggccgcagcctgccgccggacgcctggcgtggaaaccgcaggccagctggcgggcgctgcagctgccgttagttctgctggcgctgtggcagctggccagccagtcaggctggattgatgaagccttgttctcttcgccgctggcggtagcggtgcgctttattcagggcatcctgagcggggagctgactacggcgatgttggccagtctcggacgggcctttgtcggcggcgcgctggggattacgggcggcctgctctgcggactgctgctggcgctgcgcccgcgcgccgggcaaatcttcacgcccacgttaaacgtgctgcgccatatcgccctgtttgcctggctaccgctgctgaccgcatgggtgggcaacgataacggcggcaaaatcgtctttatcgcgctggcgtcgttctttccgatgttcttcagcacgctgcaggccgtgctgcagcgtaacccgcagctcgatgaagtggccagggtactgcgcctgggcgaattagcgcgcctgcgcagggttattcttcccggcgcggcgccggggatcttcgccggtctacggctggcgctgatttacgcctggcttggcaatatcggcgcggaatatttcatgtcctccggcgtcggcatcggcagcctgatgatcaacgcccagcagctgctggatatgcccaccattctctgcggcatggtgctggtcggtatcaccggcgcggcgctggataaagccggacgtttactggaaatgcgcgccacccgctggcgtcaacaggagcagctatga

SEQ ID NO: 252636 - DNA, 744 bp, Klebsiella pneumoniae
atgacctcttcaactctggtctcttttcgccacgtgcgtaaatcctggcaacaggtaacggcgctacagaatttcagcctggatatcgccgccggtgaactggtggcgctggtgggcagcagcggctgcggtaaatcgacgctgctgcggatgctggtaggcctggagtcagcgacccagggcgaaattcgcattaacggcgagccggtcaccggcgtgggcaaagagcgcggcatcgtatttcaggagccgcgcctgtttccgtggctgaaggtgatcgacaacgtgatgctcggtctggcggatgaaaagctcagccgggcggataagcgccagcgggcgctggaaatgctggaacgcgtgcagctcagcgaattcgccaacgcgctgcccgcgcagctctccggcggtatggcccagcgggtcgccattgcccgcggcctggtggcccgtccgcagattctgatgctcgatgagcctttcggcgcgctggatgccctgacgcgccataccctgcagcaggaacttttacagatacatcagcgcgcgggaaccaccacgctgctggtgacgcacgatgtggaagaagccgtcgccctggccgaccgggtcgttgtgctctcgccgcgtccggggcggatacgggaagtggtaagcctggcgctgccccatccgcgccagcgcgacgatgccgcgtttaccgccgcctgccgccagatacgcaatctgattacttctgcctga

SEQ ID NO: 252637 - DNA, 1788 bp, Klebsiella pneumoniae
atgggacacccctccgtcttcccgaccggcgccaccctctacgatccgcagcgcgcctggagcggctacacccttttccaggccaccgaacacggcgcggtgctggtagatatgaacggtcacgtggtacgcgaatggcctgaactgcatggatttcccaataaaatcctgcccggcggcgccatccttggccacagcggcgagcgcgatccgcgctacggcatgcaggatatgctcgatctgatccaggtggactgggaaggcaatgtgacctggaaattcgatcgctatgagcaggtgagcgatcccggcaatgaaacgcgctggatggcgcgagctcatcacgactatcagcgggcaggcaatccggtgggctattacgcgccggggctggagccgcaggtggatggcggcaataccctgatcctcgcccataccaacctgctgaacgaagcgatctccgacaagctgctgctggacgacaccattattgaagttgactggcagggcaacgtggtgtgggagtggcgctgcagcgaccatttccacgagctgggtttcgacgacgcggcgcgtaccgcgctctacaacaatccgaatatgcgcgccagcggcggtggaatgggcgactggatgcatatcaattcgatgtcggcgctggggccgaataagtggtatgacgctggcgatgcgcgttttcatcccgacaacattatctgggacgcccgtgaatccaacattatcgccattatcgacaaacagagcggcaagatcgtctggcagctgggcccggactacagcaaaccggagttgaaacacatcggctggattatcggccagcatcatgcgcatatgatcccgcaggggctaccgggcgcgggcaatatcctgattttcgataacggcggctgggccggatacggcgcgccgaatccggcatcggcggacggagtgaaaaacgcctggcgcgattactcccggatcctggagatcaatccgctgacccttgatatcgaatggcgctattcgccttatgaagcggatttgccgcagccgaccgattcgtaccgcttttacagcccgtacatcagcaatatgcagcgcctggaaaacggcaataccctgattaacgaaggatcgaacggacgcatttttgaagtgacccgcgatcacgaaattgtctgggaatatatttcgccgttctggggcaagacgctgaacaacaatatggtctatcgcgcctaccgcattccctacgcctggatcccgcagctggcgcagccgcaggagacgccgattgcggcggtcgatgtacgaaccctgcgccagcccggcgcggcggcagcgggaccggcgcaaagcgtggtgcgggtggcgggcgtacagccgtacagtaagagcgccgatgcgctgtgcgtggcaaccgataacgataccctgcgccgcagtccgaagctgttccgcgtcgcggaaagcgcgttcacgccgataagcgcggcgagcgagctggagagtgaaaggcccgtgctgctgttcgtaggcgcggagcgctgcgtgcactgccgcaagctctggcaactgctggcgcatgagaaactcagctcgcgaattgctcaactggatacgcgctatctggatgccgaccagcatcaggatctggcgaccacgctcggcgtgcgcggcctgccgacgttgctgctgcttaaagcggggcagccagcaacgcgcgcgcccgcgcagctttcggtggacaatctgttcgactggctgaatcgcgcagcagagtaa

SEQ ID NO: 252638 - DNA, 798 bp, Klebsiella pneumoniae
atgcgcaacgttgcgattaatgacgtcgatcatctgcctcgccgggtgctggcgctgggcagcgactacccgcccaatacgctgctggagcgccacagccaccgccgggcgcagtttctgtacgcgatgaacgggttaatgaaggtcgaaacggatgacggccagtggctggtcccgccgttcagcggagtatggattccagcgacaaaaccgcatcgcgtctggatgcccggcgtcagcacccacagcctgtatattgatgcgcaggtcgccccgcgtgatagcgagcgctgcgaagtgttacaggtttctccgctgacccatcagctcctgctggccgcctgccagctaccgctgctgtatgaagagagcgggcgcgatgccgccctgattgcgctcctgctccatgaactgggcgccgccgcgccgctgccgatgtttaccccgctcccgcagaacagccatctcgcggcgctatgcggcgattttcagcaacagcccagtatccgcagcacgccgcagcagtgggcgcaaaagctgagcaaaagcgtacgcacctttaatcgtctgtttcgccgggagaccgggatggcgttttgcgactggcgccagcaggcgtgcctgatgtacgccatgacggcgctgcgtgaaggggattcgattaccgaagtcgcgctgagtctgggctatgagtatccggccgcctttaccgcgatgttccgcaaagcgatgggctattcgccgatggcctttatccgccagatcaacggcggaccggcaaacgccagtccgcaataa

SEQ ID NO: 252639 - DNA, 810 bp, Klebsiella pneumoniae
atgagcgactggctttttctgtgcggcatactatccggcgtgaccacctggctctttggtttcggcggcggtttcgttaccgtcccgctgctctatttactggtcaccggcgcgtggggagcgcaaagcgcagtcggacagcaggcgatgcaaatcgcggtcgccacttcggcgctggttatgctttgttccgcgctgctggcgacctggcggcacgtgcgtaccggcaccctgagctggcgtcgtctgtgggccatgctcaccggcattgccgttggcggcatcgccggcgcgctgttggcgcttgaggtgagcggggagtggatccgctggctgttcgttatctacctgctggcaaccgttgccgattgctaccttcgcgccggatttatgaccccgccctcccgtcgggtggtgccgtcggtgccacatgagcttacgacaggcggtatcattggcctgatcgcctcttttcttggcgtggggggaagcgtgatgaccgttcctctgatgcgccgtcgcggcgtgctgatgtccgaagcagcggcgatggccaacgtgctgacgctgccgctggcggcaacggcgacgctgacctggctattgctcgcctggctgtcgccggtggcgttaccgaatgggtttatcggcaacatctggctatcggcggcggcgcagctggtggcgggaagctggctgggattaaaaatagcctcccgctggctggcgcgtttaccggatcgctggcatgtgagaatttatccgctattgctgatagccgtactgctggtgatgagcgtgcggggataa

SEQ ID NO: 252640 - DNA, 663 bp, Klebsiella pneumoniae
atgggtaaaacgctgaccattttcgatctggataatacgttgattaagggcgatagcagtacgctgtggagccgctttatggtgcgcgaagggtgggtaaacgatgccgattacctggcgcgggaagcgatgctgatggacgattacgatcgcggcgagatgaatatcgccgattatgtggctctgattcaggcgccgctggttggtgtggcaaagcaggacgttgatgcgctactggcgcgctgcgtgcgtgaagaaattttgccgcgcgtttatccgcaggcctgggatctgattcggactttacaggcaaagggcgagcagatactggtgatctcagcctcggtcagcctgctggtacaggcagtcgcggcgcagctgggcatcgagcaggcgctgggcattgacgttgagatggtggacggcggctatagcggagtgattgccggtacgccgagctatcagcaggggaaggtggtgcgtcttgagcagtggctggcggcgcatcccgcctgttcgggtgtggtgaccttctacaccgattcgattaacgatctgccgctgtgcctgcgcgccgatcgcgtacggctggtcaacccgtgtccgcagctgacggcggcgaatgcgcagcatcagtggccggtactgacgtggcggctgtga

SEQ ID NO: 252641 - DNA, 882 bp, Klebsiella pneumoniae
atgagacagtggcaaaatcaaccggatatcgctgccagccgtcgccagcatcggcatttgtatcaggcccaggggcgctatctgcgctatatcggcctgctgacgctggcctgcctgctctactatgtctggttctttatgcagttcggcatcagcggcgagcaactcgccagcggactggagcaaatcagtcgctatctgctgcggatgttcgtctggcacgacttttttaactggtcgttccgctattacttcacgcaaatcgctattaccctggcgattgttttcgccgggacgcttaccgcgacggttatcgccctgctgctctctttcctggcggcgcgcaacattatgcgcggcgtgattccggggacgattgccctgctgatgcgccggttgttcgacgtgctgcgcggtatcgatatggcgatctgggggctgatttttgtccgcgcggtggggctcgggccgctggccggggtactggcgataatcatgcaggataccgggctgctggggcgtctgtacgctgaggggcacgaagcggttgagcgctcgccgggacgcgggctgacggcggtaggcgcgaacgggttacagaagcaccgtttcagcattttcacgcaatctttccccactttcctggcgctgagcctgtatcagatcgaatcgaatacccgttccgccgcggtgctcggctttgtcggcgcgggagggatcggcctgatttatgcggaaaatatgcgtctatggaactgggacgtggtgatgtttattaccctgctgctggtggcggtggtgatggcgatggatacgttgtccgcctggctgcgccgccgctatattggcggcagcgtggtgccgctgtttaaagcggattag

SEQ ID NO: 252642 - DNA, 873 bp, Klebsiella pneumoniae
atgaataacacccacacccaattcgaacgctactatcagcaggtacgctcgcgacaaaagcgcgatacctttagcgggtccctcctgctgctggtactctattttgccgccggcagcctggccgagtttaatctccttaccatctggcactcgctgcccaattttctcgattacctgtttgagacgttgcccacgctgcacatcgccgatctgtttgccgattcgcatactaagggctctctggcttactggggctatcgcctgccgattcagctaccgcttatctgggaaacgctgcagctggcgctggcgtcgacgctggttgcggtggtgattgccaccctgctggcgttcgttgccgctaataatgcctggtcccctgcccccctgcgtgttgccgtccgcgtgctggtggcttttctgcgcaccatgccggagctggcgtgggcggtgattttcgtgatggcttttggtatcggcgccatccccggcttcctggcattaatgctgcacactatcggcagcctgaccaagctgttctatgaagcggtagagagcgcccaggataaaccggtgcgcggcctggccgcctgcggcgcgtcgcatctgcagcgtatccgctttgccctgtggccgcaggtcaaacccatcttcctctcatacggctttatgcgcctcgaaattaacttccgctcctcaaccatccttgggctggtgggtgcgggcggcatcggccaggagctgatgaccaatatcaaactggaccgttacgatcaggtcagcatcacgctgctgctgattattctcgtggtctcgctgctggatatgctgtccggccgcctgcggcagtgggttctggaggggaaaaaatga

SEQ ID NO: 252643 - DNA, 885 bp, Klebsiella pneumoniae
atggcgtggcaggcaagcgctgctgaacaaccgaaggaattaaacctgggtatccttggcggtcagaacgcaacgcagcaaattggcgacaaccagtgcgttaagcaattccttgataaagagctgaaggtcgatacaaaattacgtaactcctccgactattccggcgtcattcagggattactgggtggcaaagttgacgtggtattaagtatgtcgccgtcttcttacgcctccgtttatattaacaatccgcaagcggtcgatattgttgggattgccgtagatgataaagacgggtcccgcggctaccactcggtggtgattgtcaaagcggacagcccgtataaaaagttagaggatctgaagggcaaagcgtttggcttcgccgacccggattccacttccggctttttaattcctaaccacgcctttaaacagcagttcggcggcaccgcggataataaatataataacttcttctccagcgtgaccttctccggcggccacgaacaggatattctcggcgtgctgaacggtcagtttgccggtgcggtgacctggacctccatggtcggtgactataatagcggctacagcgtcggcgccttcaaccgcctgattcgcatggatcatccggatttgatgaagcaaatccgcattatctggcaatcgccgctgatcccgaacggcccgatcctggtcagcaattccctgcctgctgattttaaggccaaagtcattaccgcgattaaaaagctggataccgaggatcacgcctgctttattaaagcgatgggcggcacgcagcatatcggcccgggcagcgtggctgattttcagcagattattgatatgaaacgcgaactggttagcgcgcgttaa

SEQ ID NO: 252644 - DNA, 843 bp, Klebsiella pneumoniae
atgaacagttccctggctgcggttgcagaaaccgattatcaaccgtttacgccgccgtttatcgaccggcagcgtaaggtcctgagcgtacgcaacctgagtaaagcctggcgcgcgcagcaaaccgtactggatagcatcagtttcgatctgcatgcgggcgaattggttggcgtgatcggtcgctccggcgccggaaaatcgacgcttttgcacgtcattaacggtacccatcgcgccagcggcggcgaaatcctcagcttcccggaaggagggacgccgcaggacgtatcaaagctgtccgggcgggcgatgaacgcctggcgtagccagtgcggtatgattttccaggatttttgcctggttccgcgtctcgacgtgttgaccaacgtgctgctgggacgcctgagccaaacctcaaccctgaaatcattattcaaaatcttccccgacgccgaccgcgcccgcgctatctccctgctggaatggatgaatatgctgccgcatgcgctgcagcgagcggaaaatctctccggcggccagatgcagcgcgtggccatttgccgggccctgatgcaaaacccggggattttgctggccgatgaaccggtcgcctctctcgacccgaaaaatacgcagcggatcatgaatgtcctgcgcgaaattagcgaacagggcatcagcgtgatggtaaacctgcattcggtggagctggtgcgagaatactgcacgcgggttatcggcatagccaaaggcaagattatttttgacgaccatcccacgcagctgaatcaggatattctgcatcggctgtatggcgatgaaattagccaattgcattaa

SEQ ID NO: 252645 - DNA, 543 bp, Klebsiella pneumoniae
atggattataattattctttagatcagtgcatctggccggcgcatgatagcttttttttaaaaggtctcgctgagcttattctggatatcgatgacttaatctatctttcactagaaaaggtacgccgggaatttgtatttattaaccttagcgccagttcgctgaattattttatccgccgcgataatgagtggttggctgaaatgaaaggaaagcagattgtacttattgctgcaaggcgctcggaggcgctggccaattactggtattacaatggctccattcgaggcgtggtctacgtagacttagctaaggatattcgtcaggagctggcttacgttatcaatggccgttttctacgtaaagatataaagaaagataaaattactaaccgggaaatgcagataattcgtatgacggcgcagggaatgcatccgaaatctatcgccaaaattgagaattgtagtgtgaaaacagtctatacccatcggcgaaatgctgaggccaaattgtattcaaaaatatataagttagcgctgtaa

SEQ ID NO: 252646 - DNA, 588 bp, Klebsiella pneumoniae
atgaaaaaaaaggttcttgcaattgctctggtaaccgcgtttgccggtatgggtgtcgctcaggcagctgacgttactgctcaggcagtcgctacctggtccgcaaccgccaaaaaagacacaaccagcaagctggttgtgactccgctgggcagcctggctttccagtatgctgaaggggttaaaggctttaactcacagaaaggcctgtttgatgtggctattgaaggtgacaccaccgcgaccgcattcaagctgacctcgcgtctgatcaccaataccctgactcagctggatacctctggttccactctgagcgtgggcgttgactacaacggcgctgcggtcgaaaaaacggctgacaccgtcatgatcgacaccgctgcgggcaccctgggcggcaacctcagcgcgctgtctaacggctataacaccgctggtcgcaccaccgctcaggacggcttcacgttctccatcatcagcggcaccaccaacggcacaactgccgttactgactacagcacgctgccggaaggtatctggagcggtgacgtcagcgtacagttcgacgccacctggaccagctga

SEQ ID NO: 252647 - DNA, 669 bp, Klebsiella pneumoniae; identical to SEQ ID NO: 175667

SEQ ID NO: 252648 - DNA, 2529 bp, Klebsiella pneumoniae
atgcttataccagggattgccccaggacttaaagtgctccttgcctctggcatggccatcttgcttgttccgctcagcgtttccgccgcggctgacaaagtacagcaaatcggcggcgtcattatccctcaggccttcagccaggcgctgcaggacggaatgagcattcctctgtttattcacctcgaaggcagcaacggtacccaggacgatcagcgcatcggcaacgcttttatctggctggataacggcgtactgcgcgtccggcaaatacagctggaagagaacgataacaatgccaccgtcagtgaacagacccgcaagcagctgaccgcgctggccaatgaagcattcactaaagaactcaaaattagtctgacagatgatgcgcagctacagctcagcctgcgccagctgctgctgcagctggtggtgagaaaggaggcgctgggtaccgtgctgcgttcgcgcagcgaagatatcggtcagtccagcgtcaataccctcagcagcacgatgaactataacctcggcgtatataacaaccagatgcgcaacggcggcaacaatacctccagctatctgtcgctgaacaacgtcaccgcgctgcgcgagcatcacgtggtgctcgacggctcgctgtacggtataggctccggcaatcaggacagcgaagtctataaagcgatgtatgaacgcgattttgccggccatcgttttgcgggcgggatgctggatacctggaatttacagtccctcggcccgatgaccgccgtttcggcagggaagatttacggcgcctcatggggcaaccaggccagttcaacggtgttcgacaactcccagtcggcgacgccggtggtcgcctttttacccgccgccggggaagtgcatctcacccgcgacgggcgcctgatgagcgtgcagaactttgccatgggtaaccacgaagtggacacgcgcggcctgccgtatggcatttacgatgtcgaggttgaagtcattgtgaacggccgggtggtcagcaagcgtacccagcgggtcaataaattgttcagccgcggacgcggcgccggcgcgccgctggcctggcagttctggggcggcagcttccatatggaccgctggtctgagagcggtaaaaagacgcttccggctaaagacagctggctggcgggcgcctcggcctccggttcgctcagcaccttaagctgggcggcgaccggctacggttacgataacaacgccgtcgccgagacgcgcctgaccctgccgatcactgagtccattaacgtgaacttgcagaatatgctggccagcgacagctcgtggagcagcatcggcagcatcagcgctacgctgcccggcggcttcagctcggtgtgggtcaaccaggaaaaaacgcagattggcgaccggattcggcgcagtaatgccgacaaccgggctatcggcggtacgctgaatctcaattcactctggtcaaaactggggacgttcagcatcagctataacgatgaccgccgctataacagccactactacacggcggattactaccagacgctttataccggatcctggggatcgctgggcctgcgcgcagggatacagcgctttaataacggcgatagcagcgccagcaccgggaagtatattgcgctcgatttctcgctgccgctcggcaactggttcagcgccgggatgacccatcagaacggctacaccatggccaacctgtcggcgcgtaaacagtttgatgaaggcagcaccatccgtaccatcggcgccaacgtttcgcgtgcgatttccggcgacacaggcgatgataaaaccctcagcggcggcgcatatgctcagtttgatacccgctactccaccggtacgctgaacgtgaacagcggcgtggatggctacgtgaacaccaacctgaccgccaacggcagcgtgggctggcaggggaaaaatatcgccgccagcggccgcaccgacggcaatgccggggtgattttcaacaccggactggaaaatgacggcaagctgagcgccaaagttaacggtcgcattgttcagctctccggcaaccgcaactacctgccgctgtcgccctacagccgctatgaagtggagttgcagaacagtaaaaattcgctcgacagctacgacatcgtgaccgggcgcaagagccagctgaccctttatccggggaacgtggcggtgattgagccggaagtgaagcagatggtcacggtctccgggcgcattcgcgcggaagacggcacgctgctggccaatgcgcggattaataaccatatcggtcgtacccgcaccgatgagaacggtgagtttgtgatggacgtggataaaaagtatcccaccatcgatttcagttacggtaaaaaccagagctgcgaagtggcgctggagctaagccaggcgcgcggcgcggtatgggtgggcgatgtggtctgtagcggcctctccacctatgcccgcgtgcagccgacaggagaaggtaatgaaagctaa

SEQ ID NO: 252649 - DNA, 705 bp, Klebsiella pneumoniae
atgtccaggcgacgtggcgtaacattaactaatttgctgcggatgctgatctgcctgctgtcgctgggactggcgacagcagcgcaggctatctcggtggggaatttaaccttctcgctggcagcggaagacaatttcgctgctaagcgggttatcaacaacaataaaagtgcccggctgtatcgggtctctatcgtcgctatcgaccgccccggcggcaaagaggtgcgttcccgtccggcggacggcgagctgctgtttgccccgcgtcagctcactctacaggcgggggagagcgaatattttaagttttactaccacggcccgaaagataaccgcgagcgctattatcgggtatcgttccgggaaattccgacccgtaattacgtaatgcgtaatcaaagcggtacggaagtgagtatggatccggtggtggtcatggacactatcctcgtcgttcgcccgcgcgaggtacagttcaaatgggcttacgatcgcgcggcggggaccgtcagcaacaccggcaatacctggtttaagctgctgatcaagcccggatgcgatacgacggaagaggaaggggatgcatggtatttgcggcccggggacgttgtccgcaaggcttcgctgcgccagccggggaaccactacattatctataacgacaaatttattaaaatgacaaaagactgtccggtgaagtag

SEQ ID NO: 252650 - DNA, 351 bp, Klebsiella pneumoniae
atgagccagcactggcgccagggcggtcatcccgaccatcgccaggcccagcgcgcccatcgccataaacccttcttcaaactgaccgccggatccctcaatgcttttccccagtttgccgagaaagcgcgccgagccgccgaactgcgacaggatcctgtccacggcggcaatcagcataaagaacatcatgatgtacatgatgatttcgttaattcccatagcccttactccctgtcatttatgatttgtagatactgtgaataccgggacattagccgcactcaggcgactttcccgggccgcggcgtgaacgccttacccgggctacggcatagcagacggctgtga

SEQ ID NO: 252651 - DNA, 1389 bp, Klebsiella pneumoniae
atgctatccgatgaagcgctgcatcacctcggaactatgctgcgcttcccctcggtccacgaaatttatcctggtctgaagcaggttaaagacgcctgtacgccgcaatcgctcgccgccttcgcctgggatctctacagcgcctggataaaagccgattgtccaaaacaggaagagtgggcgtttatcgccttaggtattttgggcaatgatgataccgcccggaatttaacgtcactcattcgcaagtggccgggtaaatcactctactcccgcgcggctgctggagtcgatctgctggcccgtatcggcagcgatatcgccctgatgcagatccgcgccattgcacaaaagaccccctctccggcattgcaggatcatgcttacgccgtgctggacaaaatcgcagcccagcgccagctcacacctgctgaactcgaagacagaagtgcccctacgctagggctaaatgccaggggaacgttgctgctggattttggtccacgacagttcagcatcagtttggatgatacctggcagttcgtagtccgtaatatggccggtgagcgtgtaagcacgctcccggaggtggggaaaaaagacgatccggcgctggcggctgaagctatccaacagtttaaaatcctgaaagaagacgcacgaacggcaattccccagcagattcgccgtctggaaacggcgatgtgccagcgccgccgctggactcccgccaattttcggcgttatctggtcgaacacccgctactgcgtcacctgagccagcgtctgatatggggcgtctatagccaacaaaaccagctgctgcacgggtttcgaatagcggaagacggcagctacagcgatatcaatgaccagacctttgttctgccatcgggcgatttgctgataggtatcccgcatattatggagatatccgtagaggacgccgccgcttttgcgcaaatactggacgattacgcgctgctctcccctttccgccagcttagcagaactcgcagcgcgctgacgccggaagaacgcagcgctacgcggctatatcgctgggataagcaaacgtgcgccagtggacgcgtgatggggctgacggcgaaaggctggctgcgcggtgctccagggtatgagaacaaaattaactatctgctcaaaccgctgggcgagtggacgctggtgctggatctcaacgaaggtttcaaagcgggaatgccgcccgacaccctaagcgcacagcagacgttcatcaccgcctggctatggcacggtcagggacgagattacggtaaggactggcgtcaagagaatcccttctccgtcgtcgatgaggtcaccgcctgcgaactgatcaacgatattaattcgctatttgaatag

SEQ ID NO: 252652 - DNA, 3591 bp, Klebsiella pneumoniae
atgcacaacgcactaaccccaccctggctggcggatgacgcgcagctggagctgacctttaaaaaaggcaagacgccgttgagccaccgtcgctggccgggcgagccggtgccgctggtcaaagtggaacgacttcaacggctggcgaacgatattgcctcccgcagccagcccctcgcctgggatgctgaacaatgtactgctgagtggcaacaggcgattgcgcaggcgatgcgctgcgtgggcgaggccagagcggcaatgcccgcccgcgcgctggcggtgctgactcgtctggctgaagaggatagcccggcgcttttggatgaaatcgtccagctgcacggcgtcgaatacgcgaccgaggtggtgattgcccggcagaatatcgcggtgacgcacagcgagatccgcacgcctgatatcgtattttgtcatccagataaagggagcaatcgcggttttcggtccagtacctacaacgctttcgatctgcggctacgtaaacatctttcactggtggaagaggacatctggcaacgctgcgctgacaaactgactcatgcgcttcctgataccccaccagagcggcagccgtttattgccctgctgctgcccgagcggccggaaattgcaaatagcctgatcgaaccggtcagatatgtcggaccgtcatcaaaagagtggttaaaagccgtcgcgactgaccagggcaaactgactattctggatgagtgtagctggattaatatctttaccgatcgcgaagccagcgatatgcattacgagaactgctacggctatgccgcctgcgctgcggttttacgcgaacaaggtctggctgcggtgtcccggttggcggcctatgcacacagggacgactgcggtagcctgctggcgcaaatcaaccatccgcaggttattcgcctgctgctgctggtggcggataaaaacaagcccagccagctgcgcgtggcaaaatatgccagacaatttcccgcctcgacgctggcggcgctggcagagctgctggcgctaccggagccgcccgcgcgtccgggctatccgcatattgaagcgaaaaagctcccgcagcagcagaaaaaacgcgaagaaagctggcgaatgctgctccggacgctgctgaatacgcatccgccactggccgaacaggttagtccctggctaagcgcgcaggcgcgggaacttctggcgacgttccaacaggcgctgcccgcaggcgtcacggtggccgtcgataaccccggcctgccggaaattctgctctcgccgccgtggcgcagtaaaaagaaaaaagccgccgcgccgcgttttgcgctatcgccgctgaagcttgcgccgcaggagtactggcagcctggagagcgggaggcgctggccgccggcaaaccggcctgctttttcaacgatcttccgctgcgggaacgcattagccgcaaaggtgaggtggtattagaggaactgggctttcaggatatggattatctttttcatcaatatactttgaatggacagcaagggcatttagggtcgccgtggcacagcgcatacaggactaaaacaggctgggataaagccgctatcagagcgctgcacagcggtgataacgaagcgcttctcaaagcctggcgagactatctcgaagaaagctatcaccccaacgagtgctggaatctttatctgcttatgcagctcccccgcaagcaggcggtaacgctctggcagcgcattaatgaagaaaatttcaaatttgtcggcgctgaatacctgttgagcatcctcgggactgacgccctgtccggcctgctgctggcgctccggcatcggccaaaagagatctttccgctgcttatgcatctcggcgcaacggagctggcgctgccggtggcccgcgtctggcggcgctttcaggcgcagagccatctcgcccgccagtggctactacgatggccggaacacgccgccgccgcgttaattccgctggcgttcgataaagcgggcgatagccgcgaagcggccattaacgccctgcgtctgctgtatcaggaaggccatcacgcgctgctgcaaacggtggcgcaacgctggcacgaaccgaggctatggccagcgctggagcaactgctgacgcaagatccgctggataattatccggcccgcacgccgaaagcgccggatttctggcagcccgcgctctggcgcaggccgcggcttctcagcaacgatcagccgctgaccgacgatgcgctggaaattctcggcgatatgctgcgcttcgcccagggcggccacttttactgcggactggatttagtcaaagccgcctgtcagccccaatcgctggccgctttcgcctgggatctcttcaaagcctggcagaatgccggtgcgcccggcaaagagaactgggcttttcagacgctggggatctttggcgatgagagcacggtgcgtgatttaacccagcttattctcgcctggccgcaggaagggaaatctgcccgcgccgccagcggcctgcatcttctgacccgcatcggcagcgatatgtcgctgctgcagctggaccatatttcgcaacgggcaaaatcccgcccgctgcgcgacagcgcggaacgttgtctgcaagagattgccgaagcgcgcgatttgagcgaagagcagctgcaggatcggcttacgccgacgctggggctggatgaccccggtgcgctgacctttgatttcggtacccgcagctttagcgtgcgctttgatgaaaatctgcagccggtaatttatgaccagcagggagcgcggcaaaagagcctcccgcgcctgcgcgccgaagatgaccagacaaaagccgcggaagcgctgctccggctgaaaggattgaaaaaagatgccgctcgcgtggcgaaacgcctgctaccgcatctggaaaatgccctgcggctggcgcggcgctggacgcgcgcggagtttcagtcgctgttcgtcgaccacccgctgacccacaatgtgacccgccgcctggtatggggagtgtacgccgctaatgagcctcgtcgcctgctcgccgcttttcgcatcgcggccgagggagagttctgcgacggccaggatgagcccatcacgctgccggaagatgcactattcggcatcgttcatccgctggaaatggacgacctgacgcgggcggcgtttgaacaactctttgccgattaccagctattgccgccgttccgtcagctgacccgccatactctcctgctgctgccggaagaaacttcagtcagcaagctaacgcgctggcagggaaggtcgacgacctgcgggcagctgctgggcatccgcggccggggctggtggcaaggtagcgaaagctatttctgttacgatgttgctcagcatcggctgatactggaaatcacgccgggatttgttcactacagcatagacgctaaagctcctcagcagtttggcgcgataacgctctattacggcgaacaacccgttgcgttttcccggctcgatcctcaggatctcagcgaagcgctaagcacaatagagattatttcccgctag

SEQ ID NO: 252653 - DNA, 1089 bp, Klebsiella pneumoniae
atgatacaacaggaaaaacatcttcagcgcccccccgccgccgtgctctacgccgatgaactcgcgcggctgcaacagaatgaccctttcccctgcccgcccggctggcagttaagcctgcctgcggcgcgcgcgtttatcctcggcgatagcgctcgcgacatcagccgtaaagtggttatcagccccgccgccgtcgagcggatgctggtcacgctggcgaccggacgcggcctgatgctggtcggtgagccgggcacggcaaaatcgctgctctcagagctgctggccaccgccgtctgcggcgatgccgggctcaccattcagggcggcgcgtcgattaccgaagatcaaatcaagtacgcctggaactatgcgctgttgatcaaccagggaccctcgacccaggcgctggtccccgcaccgctgtatcaaggcatgcgcgacgggaaaatcgtccgcttcgaagagataacccgcacgccgctggaggttcaggactgcctgctggggatgctttccgaccgggtaatggcgatcccggagctgagcggtgaggatagcctgctctatgcacgcgccgggtttaatatcattgcgaccgccaatacccgcgatcgcggggtcaacgaaatgagcgcggcgctcaaacgtcgtttcgacttcgaaaccgtctttccaatcatggattttcagcaggagctggagctggtggctaacgcgtcggcccgcctgctggcgcatagcggcattccgcataaagtgcccgatgccgtactggaactgctggtccagaccttccgcgatctgcgcgccgagggcggaaagaaaacctcaatggatactctcaacgcaattatgtccaccgccgaagcggttaacgtcgcccatgccgtcggcgtgcgtgcctggtttctggccgctcgcgccggagagcccgccgacctggtagactgcatcgccggtacaatcgtcaaagataacgaggacgaccgagcccgcctgcgccgctattttgagcagcgcgtcggtacgcataaagaagcccactggcaggcctattatcaggcccgccaccgcctgccgtga

SEQ ID NO: 252654 - DNA, 2286 bp, Klebsiella pneumoniae
atgccagagcagccgttaattatcggcgttcgacaccacagcccggcctgcgccaggctggtaaaagaacgcatcgaacaaacgcgtccgcgctacgttctgattgaaggtccggtggactttaatcagcgcctggatgagctgtttttaccccatcaattgcccatcgccatctacagctactgccagtctcaggagggcggcgcggcgggacgcggtgcctggacgccgtttgccgaattctcccccgagtggcaggcgctgctgagcgcccgggcgacgggcgcgcatattcgctttatcgatttaccggtctgggcgcaaagagaggatgacagcgatgcctctgacgctcgccgcgtcgatgaccagcagcgtctgtttgtcgccagcggaatggagaataccgacgcgctgtgggaccatctgttcgaagatgaaacccagcgcgccggtctggagcaggcgctgaaaacgtactttatccagctgcgcggcgatagcagcggcggggaaaacagccggcagcgggaagcctggatggcccgctgggtggcatgggccatgcagcaaaatgacggcccggtcgtggtggtctgcggcggctggcacgccccggcgctggcagccctgtggcggaattgccgggcgccagcgcaggaacctgaatccccgccaccaccgacgcccgacgccgtcaccggctgctacctcaccccctacagcgaaaagcggctggacgttctggcgggctatctttccgggatgccggcgccggtctggcaaaattggtgctggcagttgggcctgcgtcaggccggggaacggctgctgaaaactatccttgcccgcctgcgccagcatcgccttcccgcctcaacggccgatttcgctgccgcccacctgcgcgcaatggcgctggcgcagatacgcggccatacccagccgctgcgctgcgactggcttgacgcgctggcgggctcgttaatcaaagaagcgctcaatgccccgctaccgtggagctatcgcggcgtgattcatccgcaaaccgatccgattctgctgaccatcgtggatgcgctggcgggagccggtttcggcaagctcgctcagggaacgccgctgccgccgctgccgcaggacgtcgatcgcgagctggcgcgcgtcgggatcgccgtaccggcaaacctgaacatcaatcgctatacgcccgagggattagcaaaaagtcaggtcttacaccggttggccatcctcgacattcccggtttccagcagcaaacgggcagcgcggtgacgctttccggcgatggcgaagagcgctggcgactgtttccaaccctggagcagcacgcggtcctgatcgaggcctcccgctacggcgcttccctggcggaggccgcgcgccagcggctggaagcggctattctggcctccggggggatcaaaagcctggccgccagcctgaatcaggccgcgctggcggggctctccaccttcagccagcagatgctggaacagctggcgcagctgattgccgaagagagccagtttgccgaaatggggccagcgctggaggtgctttacgccctctggcagcaagatgagagcagcggtatgcaaaacgccgcggtgctggaaatcacgctttgcgcggcgcttgaccggacgctgtggctttgcgaatccagcggcgttgccgacgagcagcagtttcacgcccatctgcatagctggcgcaccctgtgccacatcctgcgcgatctccacagcggcagcgttttaccgggagtttcgctcagcgccgccctggcgctgcttgaacggcgaattcacgccgcagatgccgcaccgctcgaccgcggcgcggcgctcggcgcgctgattcgtcttgagcatcccgcggcgaccgctgaagcagcgctgaccctgctgacgcagctctctccgcagcgtctgggagaggcggtccacggtatgctggcgctggcgcgccatcagctcgcctgtcagcccgcttttatcgcgggattcagcgcgctgctcgcccggctggcggacgatgagtttattctcgcgctgccggatctgcgggcggcgatggcgtggctgccgcctcgggaacgcggcgagctggcccgccaggtgctcgatcactatcacatgtccatgctaccgacctctgcgctacaggcgccggttgcctgctcgccggagcagttactctatcatcagcagctggaacagcaggcgctggccgcgctacgccattggggagtacgctaa

SEQ ID NO: 252655 - DNA, 1137 bp, Klebsiella pneumoniae
atgaacaggttatccgatattctggcaacccaggagctccagcgctggcggctgattctgggcgaggccgccgaaaacaacctcggcggcctcgatgagcatgcccgtcaggtagaccatgcgctggagtggctctacggccgcgatccggagcgactacggcgaggcgagcgccagggtggactggaggattccagcctgacgacgccggaatggatcaacgctatccactcgctttttccgcagccggttatcgagcggctggagagcgatgcggtactgcgctacggcatcgatgaggtggtgaccaatctggaagtgcttgaacgtatcgagccttccgaaagcctgctgcgagcggtactgcatactaaacatctgatgaatccagacgtgctgaacgccgcccgcaagctggtgcgccaggtggtagagcaaattatggcccggctggcgacagaggtgcgccaggctttttccggcgcgcgcgatcggcgccgcccctcgcgtatcccgctggcgcgcaacttcgacttcaagaataccctgcgcgccaacctcaagcactgggacccgcagcgcagcaagctgtacattgaatcgcctaagtttatcagccgtattaaacgccacagcgaaaaatggcagctgattttgctggtcgatcagagcggttcgatggtggattccgttatccattcggcggttatggcggcctgcttatggcagctgcccggcattcgtacgcacctcgtggcgtttgataccagcgtggtggatctcacggacgacgttgccgacccggtagagctgctgatgaaagttcagctcggcggcgggaccaatatcgcccaggccgttgaatatgcgcgacagctgattgaacaaccgcaaaaaagcgtcatcgtgctggtgagcgactttttcgaaggcggggcgaactcgctactgattaatcaggtcaagctgagcgtgcaaagcggcgctaaagtcctcgggctggcggcgttagacagttcggcatccccctgttatgaccacgatatggcccaggcgctggttaacgtcggggcgcaaatcgccgccatgacgcccggcgagctggcctcctggctggcggagaatttacaatcatga

SEQ ID NO: 252656 - DNA, 2007 bp, Klebsiella pneumoniae
atgatgcctttacgccccgaattactggaactcaccccgcaggcgctcatggcgctaagcaacaccggattcgtaaaacgcagccagaaagagctggataacggcaatatccccgaacttgcgcaggatgaagacggcaccctgaccgccgtatttcacgacggcacccgcacccggctggcaaaaggccaggcgctcaaagaatccagctgtacctgcggcgccagcggcatgtgtcgtcatcgcgtgatgctgatcctcagctaccagcgcgccaataccggtgatgagcatcccgaaggggaaccggagagcggcgaacgctggcatccgggactgtggcaagcggaactggccgctctccccgagtccgttctgaagcgggcgcagcagctggcggataaaggcgtcgcggtggagctattctgccgacctaacgaaacgccttcggcaaagctgccgatgagcgatgtgcgtttttattcccgcagcagcatccgttttgcccgctgcgactgcgtcgacggctcgctgtgcgaacacgtggcgctggcggttcaggcttttaccgatgccgaagcccagcagcctggctttacgcacctggtctggcaaacgcgcagccgcaaggccgccgcccgcggagggccctttgatacccctgacggcgaggcctgtcgacaaagcctccgccagctcagccaactgctgtggcaaagcggcgtcagccagccgcctattggcttcgaggctgcgttcacccgggcgcagcgcgcggcgcagacggtaaactggcgctgggtcgtcggcgcgcttgctcagcttcgtgaaggcgtcgaggcccttcagcagcgcgccagtcattaccatcctgaacagcttctcagccagttggcaggacttaacgcccgccttgagagcgccgacagaatggcgcagcttgccgatgccgaccagacgccgcccctgccgtggcgcaccgtggtgggccagggtatcgccggtgaagcgctgctcgatcatttgcgacttatctccctgggaatgcgcagctggcaggataatcaccgctacggtttacgcatctggtttagcgacccggataccggcagcattatgcatctgtcgcgcagctggccgctggcggaacgggcgcaaagcccgctgtggcagcgccgcctgtttagcttccaggccggcgcgctggcgggcgggcagatgattactcaatcagcgagccgcaacgccagcggcgaactgctgctgagcgcgcgccaccgcctgagcagcaacgttccgctcagtgaagaggcctggcttttgctcagcgcgccgctgcgccagccgggggttgcggcgctgcgtgagtatctgcgccagcgccctccggcgtgggtgcgtccgcttaatcaggtggataatctgtttattttgccggtagatgcctgtcttgccgtcggatgggacgccgcccggcaaacgctggatgcgcaggttctcagcggcgaagggcaagacaacgttttgctgctgtcccttcccgccgccgccagcgcgccctatgccgttgagcgaatggcggcgctgctcagccaggaggacgatccggtagtgatggtgtccgggatggtcacctttagccgcgggcagcttagcctggagccgctggtaatgatgacccgcacccgcggctgggcgctgaacgcggaaccgcttcccgttgggccactgcctgccgccgatatcctgccgccgcggtcgctggccctgacgctgttgcagcgcacccgggcgctgctgatccagattatgcgcaacggcctgcgctatcagcaaaagggcctttttcgcgatgcgatgacgctgagcgacgatttaaccaacggtggatttaatcatctcgcgcgcctgctccgccagttggccgagcgcgaaacggcgacttccgaggatacgctcagcgctatcgcccaactctgtatacaattagagatgatgattgattaa

SEQ ID NO: 252657 - DNA, 462 bp, Klebsiella pneumoniae
atgaaatttaaccgcaggattaccgccgctctgggcgcaacgttaatgatggccgcgctcgtcggctgcgataacaacaaagatgaggtcaagacgtttcacaacacgatgaacggcgtagacctgacctatacctatcactacaaagacgatgtcgttacccgccaggacgcggagaatactattccctatacatcactcggggtgagtaacgaagagcaggcgcgcaaaatcatcgatcctatcggcgtggcctacagcaaaatcaaaggcgtcacccacagcgtcgactataaagagagcgccgcgcaggaacacctctccatcgactttaatcaggctaaaatcagcgagctgtgtcaattacccggggccagctttaccgactgttcgcaaaagtttatttcgctgagcgagtcggaaaaaatgttgaaatcacagggttttaaagaagtgaaataa

SEQ ID NO: 252658 - DNA, 468 bp, Klebsiella pneumoniae
atgatcagtaacgatattctccgtagcctgcgctacaccctgaaaaccaataacagcggcctggtacgtatttttgcgctggcggatgcgccggtcagcgccgaacagctggtaccctggttgaaaaaagaagacgaagaggggtttgtgcgctgcccggatgtcgtgctgtcgaattttctcaacggcctgatttacgacaaacgcggtaaagatgcgtcggcgccgccgctggcggtcgaacgccgggtgaataataatatcgtgctgaaaaaactgcgtattgccttttccctgaagacggatgacattctcgctatcctcactcagcagaaattccgcgtctcgatgccggaaatcaccgccatgatgcgcgccccggagcataaaaacttccgcgaatgcggcgaccagtttctgcgctacttcctgcgcgggctgaccgagcgcgaacacgcgaaatcctga

SEQ ID NO: 252659 - DNA, 720 bp, Klebsiella pneumoniae
atgttaaaagtattaattgtcgacgacgagccgctggcgcgtgaaaacctgcgtattttgctggagacccagccggatatcgagattgtgggcgaatgcggaaatgccgtagaggcgattggcgcggtacataagctgcacccggacgtgctgtttctggatatccagatgccgcgtatcagcggcctggagatggttggcatgcttgacccggagcatcggccctatatcgtctttctcaccgcatttgacgagtacgcggtgaaagcctttgaagagcacgcgtttgattatttgctgaagccaatagagtccgccaggctggaaaaaacgctggctcgactgcgccaggagcgcagcctgcaggatatgaccgccctcgacgatacccagcaggcgctaaagtatattccctgcaccggccacagccgcatctggctactgcagatggaagacgtggccttcgtcagcagccggatgagcgggatttacgtgaccgaccgcgaaggaaaggagggttttaccgagctcaccttacgcacccttgagagccgaacgccgctgctgcgctgccatcgccagtacctggttaacatgtcccatctcaaggagatccgctttgaggaaaacggccaggcggagctgctgatgcgtgccgggcaaacggtgccggtgagccgccgctatctgaaaagcctgaaagaggcgattggtctgtaa

SEQ ID NO: 252660 - DNA, 1689 bp, Klebsiella pneumoniae
atgtacgagtttgatctggtgttgctgctgcttcagcagatgtgcgtgtttttggtcattgcgtggctgatgagcaaaacgcgtctgttcatcccgttaatgcaggtcaccgtccgtttgccgcataagctcttgtgctacgtgaccttctctattttctgcatcctcggcacctactttggcctgcatatcgaagattcgatcgccaatacgcgagccatcggcgcggtgatgggcggcctgctgggcggaccggtggtcggcggcctggtgggactgaccggcggccttcatcgctactcgctgggcggcatgaccgcgctgagctgtatggtttccaccatcgttgaaggactgctcggcgggctggtgcacagcattctggttaaacgcgggcgaccggataaagtcttcagcccgctcacggccggcgcgattaccttttttgctgaaatggtgcagatgttgatcattttgctgatcgctcgcccgttcgaagatgccctgcatctggtacaaagcatcgctgcccccatgatggtgactaataccgtcggggcggcgctgtttatgcgtatcctgttggataagcgggcgatgtttgaaaaatatacctcggctttctcggccaccgcgctgaaggtggcggcgtcgacggaggggatcctgcgccaggggtttaacgaagagaacagcatgaaggtcgcgcaggtactgatccaggagctggatatcggcgcggtcgcgatcaccgatcgcgacaagctgctggcgtttaccgggatcggcgacgatcaccatctgcccggtaagcctatttcttcgctctatacccaaaaggcgatcgataccggcgaggtggtctatgccgacggtaacgaggtgccctaccgctgctcgattcatcctaactgtaagctgggctccacgctggttattccgctgcgcggcgagaatcagcgggtgattggcacgataaaactttatgaagcgaaaaaccgcctgttcagctccatcaaccgcacgctgggggaggggattgcccagctgttatccgcgcagatcctggccggacagtatgagcggcaaaaggcgttgctaacgcagtcggaaatcaagctgctgcacgcccaggtgaatccgcacttcctgttcaacgcgctgaataccctgaaagcggtgattcgccgcgatagcgaccaggcggggcaactggtgcagtatctgtcgacctttttccgcaaaaacctgaaacggccagcggagatcgtgaccctggcggatgagatcgaacatgtaaacgcctatttgcagattgagaaagcgcgctttcaggccaacctacagatccacatgctggtgccggaagcgctggcccagcatcaactgccggcttttaccctacagccgatagtcgaaaacgccattaagcacgggacttcgcagcaccttggggtgggggaaatcaccattcgcgccagccagtaccagcgctggctgcagctggatattgaagataacgccgggttatatcaggacaaacccagcgccagcggactgggcatgaatctggttgatcgccgtctgcgggcgcgcttcggcgccgattgcgggatcaccgtcacctgcgagccggaatgttttacccgcgtcacgctgagactgcctctggaggaaaacgcatgttaa

SEQ ID NO: 252661 - DNA, 759 bp, Klebsiella pneumoniae
atggcgctttatacaattggcgaagttgcccagctttgcgatatcaatcccgtgacgttacgcgcctggcagcggcgctacggattactgaaacctcagcgtaccgacggcggccaccgcctgtttaatgaatatgagatagaccgtattcgcgaaatcaaacgctggattgactccggcgtgcaggtcgggaaagtgaaaacgctgctgatggataatgagcaggagagggtcgacggctggtgcgatcggcaggagatgctgctcggctatctgcaaaacggaagttatcatcgcctgcggatgtggctgaaggagcgtaaccacaccgactctgcgcaaaccctggtgaagcacctgatcaaccccttacgccagcgcctgctcagcccgcagccaacgttgctggcaatgcggggcatcctggacggcattctgattaatcatatcgcccgattgctgtcctcgacggcaaaatatcccggcgaccatgcgctgattatgggctggaatgtgaacgatatcacccggctatggctggagggctggatagccagcgaacagggctggcgggtggatattctcgcccattcgctgaaccagatccgaccggagcttttccccgacagtacgctaatggtctggtgcggagaggcgccctgtagcgcccaggtgaatcaaatgcgtcaatgggagcagcagggccagattatctggctgaatcaccccaccgcaacgtctcccggaggcggcgcctga

SEQ ID NO: 252662 - DNA, 738 bp, Klebsiella pneumoniae
gtgaaggtgctacgtgatccgctgctgtggctgagtgcaatgtttgtcacgctgctgctggcgttgccctacagcgcgccgctattcagcgcgctgtttcccgagctgccgcgcccggtttatcagcaggagagttttatttcgctgaccctggcgcactgttggctggtggcactctccagcctcgcggctacggtggtgggcttcggggcagggattgcggtcacccggccttccggccatgagtttcgccccctggtagagacgatcgccgcgatgggacagacgtttccaccggttgcggtgctggcgattgcggttccggtgatgggattcggctggcagcccgcgctgatcgcgctggcgctgtacggcatattgccggttttacagggtacgctggcgggattgggggcggtaccgtccggcgtattatctatcgctcaggggatgggaatgaccggctggcagagattgataaaggtggagctgccgctggcggcgccggtgatgctcgccggcattcgtacctcgaccatcgtgaatatggggacggcgaccattgcgtcaaccgtcggcgcgaatacgctcggcacgccgattgttatcggcctgagcggatttaataccgcttatgtcattcagggggcgctgctggtggcgctggcagcgattatcgtcgatcgcggctttgaacggctgacccggctaatcagccgacaccgccgcgaacaataa

SEQ ID NO: 252663 - DNA, 597 bp, Klebsiella pneumoniae
atggccttgctggggctcgagccggtgctgcgcgaacgttatccccatcagctttccggcggccagcagcagcgtgtcggcgtggcgcgcgcgctggcggcgaatccgcaggtgttgctcatggacgaaccctttggcgcgctcgatccggtgacgcgggaagctctgcaacaggagatgatccgcattcatcgcctgctgggacgcacgattgtgctggtgacccacgatatcgatgaggcgctgcggctggcggatcatctggtgttgatggacggcggcgaagtagtgcagcagggcgagccgctgcagatgctgctggagccaaaaaatgcctttgtgcagaccttctttggccgcagcgaactgggcgtgcgcctgctgtcgctgcgcggcgtgagtgattatctgcgccgcgatgagcgcctggcgggagatgcgttaaacgtggcgatgaccctgcgcgaggcgctatcgcagtttattgctcatcgctgcgaggtattgccggtagtggatgagcggggagagtcctgcgggacgttgcattttgccgacctgctgcgcgaggaggcccggcgtgaaggtgctacgtga

SEQ ID NO: 252664 - DNA, 408 bp, Klebsiella pneumoniae
  misc_feature (273)..(282): n is a, c, g, or t
gtgattgagttcgacggcgtcaataaagcctttgccggacagcctgcggtgaaaaacctcaatctgcatctgcgcgagggggcattttcggtgctgattggcacctcaggttcggggaaatcgaccacgctgaaaatgatcaatcgcctggtggagcacgatagcgggacgatccgtttcgccgggcaggatatccgccagcagccggtgctcgaactgcgccgccgaatgggctatgccatccagtccatcggcctgtttccccactggacnnnnnnnnnngaatgggctatgccatccagtccatcggcctgtttccccactggacggtggcgcaaaacattgccaccgttccgcagctgcaaaagtggtcgcggcaaaaaacgcaggcgcgggttgatgaattga

SEQ ID NO: 252665 - DNA, 744 bp, Klebsiella pneumoniae
ttgctcaatgcgcaaatctggctgctgcccgcgctgctgctgggactggggagcctcgatgaactctctctgctgaaagagtatttcaatcgccgggaagtgtttgacgatgcgctgtcgcagcatgtgactctgctgctcggtaccctgctgccggggctgctgattgggctgcccattggcgtttggctctggcgcttccctcgctggcaatcgccggtttttgcggttctcaatgtgattcagaccgttccctccgtggcgctgttcggcctgcttattgcgccgctggcggggctggcgcgccagtttccttcgcttgcccagctcggcgtttccggaaccggcattacgcctgcgctgattgcgctggtgctgtatgcgctgttgccgctggtacgcggggtgacggtcggcctgcagcaggttccgcgtgaagcgctggagagcgcggtggcgatggggatgagcggcggacagcggtttcgtcaggtacagctgccgctggcattgcccgtattgttgcgcagcctgcgggtggttagcgtacaaaccgtcggtatggcggtcgtcgcagcgctgattggcgcaggcggctttggcgcgctggttttccagggcctactcagcagcgcgctggatctggtgctgcttggggtgatcccgaccatcgcgctggcagtggtggtggatgcgctattcgcgctgtggggcgcattactcaaaggagaggcccgtgattga

SEQ ID NO: 252666 - DNA, 492 bp, Klebsiella pneumoniae
  misc_feature (343)..(352): n is a, c, g, or t
gtgacgattcgttgctgtaaccgcgttgcgctgctgctggcattattactgctgctggcgatggcgctgccgtttatcaattatgcgcctaaccggctgttatccggcgagggccgttggctatggcaggtctggccatggctggcgggcgtgcaggcgggggcggcgctgttaatcgcgctgctgtgctggcggccggggcgcttcccgctgctggtcatcttcctgctggcggatctgctgctgcctgcgctgctttggggggccggtggggcggcggggcagctggcgcagaacggttcgtcgctggcccgtacctcgccgggcagcggcctgtggctgnnnnnnnnnntggctggcgctggcgctctgtctgcttatcgccagcgatgccgttcgccgtctgacttcccgtgccctgtggcgctggttgctcaatgcgcaaatctggctgctgcccgcgctgctgctgggactggggagcctcgatga

SEQ ID NO: 252667 - DNA, 918 bp, Klebsiella pneumoniae
atgataaaggcaagtatgtggtccggcacgctggcgctggcggccctgataagtctgccgctgcaggcggcggagccggttaaagtcggctcaaaaatcgataccgaaggggcgctgctcggcaatattattttgcaggtgctggaaagccacggagtgaaaaccgtcaataaaatccagctcggcaccacgccggtggtgcgcggagcgataaccgccggtgaactggatatctatccggaatataccggtaacggcgccttcttctttaaagcggagaacgacccggcgtggaaaaacgcgcagcagggctacgagaaagtcaaaaagctggacgcggaaaagaataagctcgtgtggcttaccccggctccggccaacaatacctggaccatcgccgttcgtcaggatctggcggaaaaaaataacctcgcctcgttaagcgaccttgccggctatctgcaaaagggcggtgactttaagctggccgcttcggcggaatttattgaacggccagacgcgctgccggcatttgaaaaagcctacgactttacgctcaaacagaaccagctgctgtcgctggcgggcggcgatacggcggtcaccattaaagcggcggcgcagcagacctccggcgtaaatgcggcgatggcctacggcaccgatggcccggtcgccgcgctgggcctgcaaaccctgagcgacccgaagggcgtgcagccaatttacgccccggccccggtcgtgcgtgaagcggtgctgaaagaatacccgcagatagccgactggctacagccggtctttgccagcctggatgaaaagaccctgcaaaagctgaacgccagtattgcggtagagggcctggatgcgaagaaagtcgccgccgactatctgcaacaaaaagggctgctgaagtag

SEQ ID NO: 252668 - DNA, 2298 bp, Klebsiella pneumoniae
atgaaatggctttgtactgtaggcgtcgctgtgagcctggcgctgcaacccgcgctggcggatgaattgttcggcaatcatcccttaacgccgcaggcgcgggatgcgtttgtgaccgaactgctgacgaaaatgacggtggacgaaaaaatcggtcagctgcgcttgattagcgtcggtccggataacccgaaagaagccatccgcgaaatgataaaagaggggcaggtaggggcgatttttaacaccgtgacccgccatgatatccgcgctatgcaggatcaggtgatggcgctcagccgcctgaaaatcccgctgtttttcgcttttgacgtgctgcacggccagcgcacggtatttccgatatctcttggcctggcttcctctttcaacctcgatgcggtgaataccgtcgggcggatttcagcttacgaagcggccgacgatggcctgaacatgacctgggcgccgatggtcgacgtctcccgcgacccgcgctggggccgcgcctcggaaggctttggcgaagatacttatctcaccaccatcatgggggaagagatggtgaaatccatgcagggcaaaagcccggcggaccgctactcggtgatgaccagcgttaagcactttgccgcctacggcgcggtcgaaggcggcaaagagtacaacaccgtcgatatgagcccgcagcgcctgtttaacgactatatgccgccgtataaagcggggctggacgcaggcagcggcgcggtaatggtcgcgctcaactcgcttaacggtactccggcaacctcggattcctggctgctgaaggacgtgctgcgcgaccagtggggcttcaaaggcatcaccgtgtccgaccatggggccataaaggagttgatcaaacacggcgtggccgcggacccggaagacgcggtgcgcgtggcgctgaagtccggtatcaacatgagcatgagcgatgaatactacagtaagtatctgcccgggctggtgaagtccggcaaggtgacgatggcggagctcgatgatgcaacccgccacgtgctgaacgtcaaatacgatatggggctgtttaacgatccctatagccacctggggccgaaagattccgatccgcaggataccaacgccgaaagccgtctacatcgtaaagaagcgcgtgaagtggcgcgcgaaagcctggtgctgctgaaaaaccgtctcgacacgctgccgctgaaaaaatcgggcactatcgcggtaatcggcgcgctggccgacagcaagcgcgacatgatgggcagctggtcggcggcgggcgtggccgatcagtcggtcaccgtgctggccggaatgcaaaaggcgctgggcgatcagggcaaaatcatctatgccaaaggcgccaacgtcactgatgataaaggtatcgtcgacttccttaatctgtacgagaaagcggtgcaggttgatccgcgctcgccgcaggagatgattgatgaagcggtggcggcggcgaagcagtccgacgtggtggttgccgtggtgggtgaagcgcagggtatggcgcatgaagcctccagccgcaccgacatcaccctgccgcagagccagcgcgccctcattagcgcgctgaaagcgaccggtaaaccgctggtgctggtgctgatgaacggccgtccgctggcgctggtgaaagaggatcagcaggccgatgcgatactcgaaacctggttcgccggtaccgaaggcggcaacgccattgccgacgtgctgttcggcgactacaacccgtcgggcaaactgccgatgtccttcccgcgttcggtcggacagatcccaacctactacagccatctcaataccggtcgcccgtacaatgcagataagccgaacaagtacacctcgcgttactttgacgaggccaacggcccgctctatccctttggctacggcctgagctataccacctttagcgtttccgatgtgaaaatgtcggcgccgacactgcagcgcgacggcagcgtaaccgccagcgtgcaggtgaccaataccggcaagcgtgaaggggcgacggtgattcagctttatctgcaggacgtcaccgcttccctgagccggccggtgaaaatgctgcgcggctttaagaaggtgaccctcaagccgggtgagacgcaaaccgtcagcttcccgattgacattgaggcgctgaagttctggaaccagcagatgaagtacgacgccgagccgggcaaattcaacgtctttatcggcgtcgattccgcccgcgtgaagcagggcgagttcgaactgctgtaa

SEQ ID NO: 252669 - DNA, 1743 bp, Klebsiella pneumoniae
atgtcatctgcaacaactcataacaacgcttttctggctgaactcgctcgcctggttggcacctcccatctgttgaccgacccggccaaaacccagcgctatcgcaaaggcttccgctccggccagggggaagcgctggcggtggtctttcccggcacgctgctggagctgtggcgcgtgctgaacgcctgcgtcaacgccgataaaatcattctgatgcaggcggcaaataccggcctgaccgaaggatcaacgccgaacggcaatgattacgatcgcgacatcgtcattatcagcaccctgcgcctggataaactgcacctgctggataaaggcgaacaggtactggcttatcccggcacaacgctctattcgctggaaaaagcgctgaagccgctgggtcgcgaaccgcactccgtcattggctcatcctgcatcggggcatcggtggtcggcgggatctgcaacaactccggcggctcgctggtacagcgcggcccggcgtataccgaaatgtcgctgtacgcgcaaattgatgaaaacggcaagctgacgctggtgaaccacctcggcatcgacctcggcaccacgccggagcagatcctcagccgcctcgacgacgagcgggttaaagatgaagatgtccgccacgatggccgccacgctcacgatcacgattacgtcacccgcgtgcgcgacgtgaatgccgataccccggcgcgctacaacgccgacccggaccgtctgtttgaatcctcgggttgcgccggcaagctggcggtgttcgccgtgcgcctcgatactttcccggcggaaaaacgccagcaggtgttctacatcggcaccaaccggccggaagtgctgaccgaaattcgccgccatattctcgccgaattcagccatctgccggttgcgggcgagtacatgcaccgcgatatttacgacatcgccgagcagtacgggaaagataccttcctgatgatcgacaagctcggcaccgataaaatgccgttcttctttactatgaaaggtcgcaccgacgcgatgctggagaaagtctctctgtttaagccgcacttcaccgaccgctttatgcagaagctgggtcacgtcttcccggcgcacctgccggagcgaatgaaaacctggcgcgataaatatgaacaccatctactgctgaaaatggcgggcgatggcatcgaagaagcccaggcatggcttggagagtatttccagaatgccgaaggggatttcttcgcctgcaccgcggaagaaggcagcaaagccttcctgcaccgctttgccgctgcgggtgcggcgatccgctatcaggcggttcacgccgatgaggtggaagatattctggcgctggatatcgccctgcgccgtaacgataccgaatggtttgagcatcttcccgctgatattgacagccagctggtgcataagctctattacggtcactttatgtgtcacgttttccatcaggattacatcgtgaaaaaaggcgtcgatgtccacgaactgaaggagaaaatgctggtgctgctgaaagagcgcggcgctcagtatcccgccgagcataacgtcggccatctctatgaggcgccggaaagcttaaaacgtttctatcgtgagaacgatccaaccaacagtatgaacccggggatcggcaaaaccagcaagcaaaaatactggggagaaacgccggataacgcggcaagcactaccgacccgcaataa

SEQ ID NO: 252670 - DNA, 375 bp, Klebsiella pneumoniae
  misc_feature (305)..(314): n is a, c, g, or t
atgtccgcagtggataaattacacgacgctgacttagagatccgcgaggcgctgcccgatgacgcccacgccatcgccgcgctgtacgtctggcacgtgctcaatggacgcgcctcttttgaagagatcccgccgaccgtcgacgagatgcgcaagcgtattaaaaccgtgcgcgatagcgggctgccgtggctggttgccctgtggcgcggaaccatcgtcggctactgctacgccacgttttatcgccctcgcccggcctaccgctacactctcgaagagtccatttacgtggaggcgggaannnnnnnnnnatttacgtggaggggggaatgggcggacgcggcatcggcagcgcgctgctctcccggttaa

SEQ ID NO: 252671 - DNA, 252 bp, Klebsiella pneumoniae
atgggcggacgcggcatcggcagcgcgctgctctcccggttaatagagaaatgcgaacagggaccgtggcgacagatgttggccattatcggcgacggccacagtaacgccgcgtcgattgcgattcataaaaagttcggttttagcgtggcgggccagctgcgcagcgttggttataagatgggcgactggcgcgacaccttgattatgcagcgcccgctcggcgatggcgactggacgctgccggagtaa

SEQ ID NO: 252672 - DNA, 588 bp, Klebsiella pneumoniae
atgaaccatgtctgggggctcttctcgcatcctaatcaagagatgagcgttattaaaagcgaaaacgaaaccgtttcgcatcactacacgcaccatgtgctggttatggcagcggttccggttatttgcgcctttatcggcaccacgcagctgggctggaacttcggcgacggcacggtgataaaactgtcgttgatgaccggcctggcgctggcggtgctgttttatgccgtgatgctcgccggggtcgcggtgatggggcgggttatctggtggatggcacgaagctatccgcagcggccttcccttaaacgctgtatggttttcgccggctatgtcgccacgccgctattcctgagcgggatcgtggcactctatccgctggtgtggctgtgcgcgctggtgggaaccgtcgcgctgctctataccggctatctgctgtatctcgggatcccgactttccttggcatcaataaagaagaggggctaagtttcgccagctcgaccctggcgattggcgtgctggtgctggaagtgctgctcgccatcaccgtgatcctctggggctacggctatcgactcttctga

SEQ ID NO: 252673 - DNA, 570 bp, Klebsiella pneumoniae
atggatatcaataacctgattacccagtacggctacgcggcgctggtcattggcagcatggcggaaggcgaaaccatcacgctgctcggcggcgtggcggcacatcagggattattgaagttctggctggtggttatctcggtcgccctcgggggaatgattggcgatcaattgctttatttgctcggcagacgctttggcggacgcatcctgcgccggttttcccggcagaagaagcggatccagaaagcccagcgcatgatccagcgtcgcccctacctgtttgtcatcggcacccgctttatgtacggcttccgggttatcggcccgctgctgattggcgccagtcgactgccaccgaaggtgtttctgccgctgaatattctcggcgcgattatctgggcgttaatttttaccacgctcggctatctcggcggcgaagcgataggcccgtggctgcaccatctggacgcgcatttgaaacactggatctggctgattctggcggtggtgctggtggttgcggcgcactggtggctaaagcgccgcgaggcaaagaagaaagagtga

SEQ ID NO: 252674 - DNA, 1440 bp, Klebsiella pneumoniae
atgaacctgactttgagcaaacgcgcgttggctggcctgccattggccatcgcgctggcgggctgcgcgccatcgcacgatattggcaatccgctccagcagcaaaccccggcatcccacgtctcaatggaactgcccgccgccgtgaaaaacggctggccgcaaagcaactggtggcaggattatcatgaccctcagctcaatagcctgattcagcgtgccttagccaatgcgccggacatgcagattgccgggcagcgcatcaaactggcggaagcgcaggcgcggatgtcgcaatccaccctgggaccgaatctggatttttccgccgatcttgaacggcagaaaatgtcttccgaggggctgatgggaccgtttgccaccgataccgacggcaataccgggccgtggtacaccaacggtaccttcgggctgaccgccggatgggacctggatctgtggggtaaaaaccgcgcgctgttacaagcgcgaatcggtgaagtcaaagcccaggtcgctgaagaagcccagacccgtgaactgctggccagcagcgtcgcccgcctttactggcagtggcagaccgaggcggccattaaaaacgtgctgacgcagatgaagcgcgaacagaataacgtcgttaccgtggatactgcgctgtatcaacgcgggatcaccaactcggccgaaggggcggagaacgacattaacgtcagtaaaaccgatcagcagcttgccgacgttgccggcagtatgaaagagattgaagcgcggctgatggcgctgaccaacaatcagagccaggcgctgaatctgcatccggcggatttgcctgccgtcagcgcgcaaatgcccaatgagttgggctatgagctgctggcgcgacgtcctgatctgcaggtcgcccactggtatatcgaagcttccttaagcgaaattgatgccgcgaaagccgcgttttatccggatatcaacctgatggccttcctgcaacaggatgctctgcatctcagcgatctgttccgccactcagcccagcagatgggcgtcactgccgggctgaccctgccgatctttgatagcggtcggctgaacgcgaatctggatatcgccagcgcgcaaaatggcctgtcgatagcgaagtacaacaaagcggtggtcgatgcggttaatcaggtggcgaaaaccgccagccaggttgagacgctgatggcgaaaaatcagcagcagcagcaggttgaaaaggatgctcagcggatggtcgctctggcgcaggcgcggatgaatgccgggattatttccggttcgcgcgtcagcctggcgaagctgcccgctttgcaggagcgcattaccgctctgcgtctgcgcggccagtggcttgatgccagcatccagctaaccaccgcgctgggcggcgggtatcatcaggcggcgaagtag

SEQ ID NO: 252675 - DNA, 735 bp, Klebsiella pneumoniae
atgagtcagaacatctatgacgatcccgctttttttgccggatacgccaccctcgaccgttcagttaaggggctggaaggcgcgcctgagtggccaaccatacagcaaatgcttccgccgttatccggtttacgcgtcgtcgatcttggctgcggttacggttggttttgccgctgggcccgcgatcggggcgccgcgcaggtcgagggactggatctctccagccggatgctggagcgcgcccgcgaaatgacccgcggcgaaggtatccgctaccgctgtgaaaacctggagaacctgaccctgcccgcaaatagctgcgagctggtctatagctcgctggcgctacactatctgcccgacgtggcgccgctgttcgctaccgtttaccaggcgctgacgcccggcggtacgctgctgttctccgccgagcatcccatctataccgccccgccgcagcagggctggctggaagatgagaacggacagaagcgctggccggtgagccactaccagcaggagggcgaacgtatcagcaactggtttgccgacggggtgaagaagcagcaccgcaagctgtccacctggataaacctgctggtggccgccggttttatcatcgagcatctggatgaatgggggccaacggcggagcagattgccgcccagccagcgctggatgaagaaaaagagcggccgatgatttttctgctgcgcgcgcgcaagccggcgtaa

SEQ ID NO: 252676 - DNA, 1395 bp, Klebsiella pneumoniae
atgaagacattcccacaggcgtttttatggggcggcgcgaccgcggcaaaccaggtcgaaggcgcttatctggaagaggggaaaggattaaccacttctgacgtccaaccgcgcggcgtatttggcgatgtggtagaacgcgtacctggcgatagcggcataaaagacgtcgccatcgatttctatcatcgttacccggaagatatcagcctctttgccgaaatgggttttaactgcctgcgcgtatcgattgcctgggcgcgtattttccctgagggcgacgaaacgcagccaaacgaagccggactggccttttacgataagttgtttgacgaaatggcgaagcataatatcactccgctggtgacgctgtcgcactatgagatgccgtgggcgctggtgaaaaactacggcggctggggcaatcgcaaagtgattggcttcttcgaacgctatgcccgtacggtgtttgagcgctacaagacgaaggtcaaactgtggctgaccttcaatgaaatcaatatgtccctgcacgcgccgatgaccggcgttggtctgccggctgacagcagcaaagcggacgtctaccaggccattcaccatcagctggtggcgagcgcgctggcggttaaagcctgccatgacatcgtgcctgagggcaaaatcggcaatatgctgctcggcggcctgatgtatccgctgagctgcaaaccggacgatatttttgaaacgctgcagcagaaccgcagctggcagttctttggcgatgtccagtgccgcggcgcttatccgggctatatgctgcgctatttccgcgacaacggcattagccttgagatcaccgatgccgatcgcgaagccctgaaagagaccgtcgattttatctcttttagctactatatgaccggctgcgtgaccgccgacgaagagctgaacaaaaaatcgcgcggcaatattctcagcatggtgccaaacccgcatctggcaagttcggagtggggctggcagattgacccgctcggtctgcgcacactgctgaacgtgctgtgggatcgctatcagaagccgctgtttatcgtggaaaacggcctcggcgcgaaagataaagtggaagctgacggcagcatcaacgacgattaccggatcagctaccttaacgaccatctggtgcaggttcgtgaggcaattgaggacggcgttgaggtgatgggctacaccagctggggacctatcgatctggtgagtgcttcgaaagcggagatgtccaaacgctatggctttatctacgtcgatcgcgatgatgaaggcaacggcaccctggcgcgcagccgcaagaagagcttctggtggtataaagaggtgattgccactaacggcggcagcttaaaagagtaa

SEQ ID NO: 252677 - DNA, 1860 bp, Klebsiella pneumoniae
atggaatataaagcactcgcgcaggatattcttagccgggtaggcggcaaagagaatattgtgagtctggttcactgcgcaacgcggctgcgttttaagcttaaagatagcaagaaggcggatgccgaaggactgaaggcgaatcctggcgtcatcatggtggtggaaagcggcggccagtttcaggtggtcatcggtaaccacgtacatgatgtctggctggcggtgcgcagcgaagccggcctgacggacgacagtgagccggttgcggtgaagggcgaaaaagtgtcgattatcggccagattatcgacgtggtttccggtattttcaccccgtttatcggcgtcctggcggcctcggggatcctcaaaggactgctggcgctggctgtcgtttgcggctggttaacgacgcaacaggcgacctataaaatctggtttgccgccagcgatgcgctgttcttctttttcccgttatttctcggctacaccgccggcaagaaatttggcggtaacgcctttattacgatggtgatcggcggcgcgttaactcatccgctgatgattcaatctttcgaagccagtatggcgcctgacgccgcggcggaatatttccttggcattccggtgacctttatcaattacagctcgtcggtcatcccgattatcctcgcctcgtgggtgagctgctggattgagcggcggagcaacgcaatactgccctcgtcgatgaagaacttctttaccccggcgatttgcctggccgtggttgtcccgctcacgtttctgattatcggcccggttgcgacctggctgagccagcagctggccaatggctatctgcttatctatcaggttgcgccctggcttgccggggcggcgatgggcgcgctgtggcaggtgtgcgtcatcttcggtttacactggggcctgataccgttgatgattaacaaccttaccgtgcttggccatgattcgatgatgccgatgctgttgccggcggtaatgggtcaggttggcgccgcgctggggattttcctgcgcactcgcgatgcccggcaaaaagtgctggcgggctcggcggtatccgccgggatcttcggcgtgaccgagccggcgatttatgggctgaatttgccgctccgccgtccctttatcttcggctgcgtcgctggcgctatcggcggcgcgattgtcggcttcagcgacagccacgtttattctttcggtttcggtaacattttcaccctggcgcagatgatcccgccgcagggcattgacgccacggtgtggggcggcgcgctgggaacgattagcgcattaatcatcgcctgcgtgctcacgttagtcgccgggctgccgcgcagcgccgccgaacaggcggccgttgtcgtggccccggcctcggaaaacgatattctggcgccgatgaccggcagcgtgctggcgctcgatcaggttcccgatagcaccttcgccagcggtttacttggccagggtgtggcgattatcccttcagtaggcaaagttattgcgccgttctcgggggaagtcgcctcgattttccagacgaaacatgctatcggcctgctgagcgatagcggaattgaactgcttatccatgtgggcatcgacaccgtcaagctcgatggcgcgccgttcaccgcccatgttaaagagggtgacaaaattaaagcgggcgatctgctgctggagtttgaccgtcaggcgattctgaacgccggttacgatctggcgacgcccattattatcagcaacagcgacgattaccgtgctctcgacattgtttccgccagcgcggtggatgccggtcagccgctgttgtccgtaagccgttaa

SEQ ID NO: 252678 - DNA, 834 bp, Klebsiella pneumoniae
atgcaaatcgccaaagtacttaataataatgtagtggtggttgtcgatgagcagcagcgcgaacaggtggtcatgggccgaggacttgcctttcaaaaacgcgttggtgactctcttgatgaaagtaaaattgaaaaagtcttcgcgctgcagagcgatgaactgattggccgtttaggcgaattactcagtcagataccgttagaagtgatgaccacctgcgatcggattatcgatctggcgcgcggtcgtctcggtaagttacaggacagcttgtacattaccctgaccgatcactgccactttgcgatcgagcggcagaagaaaggcctcgccattcgtaatgtgctgctgtgggaaataaaacggctgtatcctaaggagtttgagttagggcaggaagcgcgggcgattatcgccaaacggcttggcgttgaactggccgaagatgaggcgggttttattgccctgcatctggtgacggcgcagctcaacagcgaaatgccggaggtgatgcacgttacccgggtcatgcaggagattctgcagctggtgaaatatcagctgacccttaactacgacgaagagtcgctgagctaccagcgtttcgttacgcatcttaagtttttcgcccagcgtatgctgacgcgaacggtggtcgaagatgatgatgtgacgctgcacagcgcggtaaaggataactacccaaaagcgtggaagtgtgcggaaaccgtcgcccggcacctgcaaaagagctaccagcggccgctgacgacggaagaaattatgtttctcgccattcatattgaacgggtgagaaaagagggacgctaa

SEQ ID NO: 252679 - DNA, 1359 bp, Klebsiella pneumoniae
atgactcaacgactcgaactacagaaactgcttaatgccgcgccggtcggcgcccggcagtggcgcgtgattatctgctgtttcctggtggtcatgctcgacggtttcgatactgcggcaattggttttatcgccccggatattcgtcaccactggcaattaaccgcaggcgatctcgcgccgttatttggcgcaggattgctgggcttaaccgccggggcgctgctctgcggtccgctctccgaccgctttggccgtaaacgggtcatcgagttctgcgtcgcgctattcggcctgtttagcctgctttccgcgttttcccctgacctggagacgctggtgatcctgcgcttcctgacggggctgggattgggcggcgcgatgcctaacaccattacgatgacttcggaatatctgcctgcccggcggcgcggggcgctggtgaccctgatgttctgtggattcaccctcggctcggcattcggcggcgtggtcagcgcgcagctggtaccgctgattggctggcccggtatcctggtgctggggggcgtgctaccgctgatgctggcggcggcgctaatcccgctgcttcccgaatctccgcgctggcagatccgtcgtcagttgccacaagcgatgattgccaaaaccgttggcgcgataaccggcgaacgctataccgatacccatttctggcttgatgagcctgccgccggcgcgaaaggcagcatccgccagctatttgccgggcgtcagctgcccatcaccttgatgttgtgggtcgtgttctttatgagcctgctgattatctatctcctctccagctggatgccgacgctgcttaaccatcgtggaattgatttacagcatgcttcctgggtgactgcggccttccagattggcgggacctttggcgcactgctgctcggtgtgctgatggaccgtttcaaccctttccgggtgctggcgctgagttacgccctggggtcggtctgtatcgtcatgattggcctgagcgagaacggtctgtggctgatggcgctggcgattttcggcaccggtatcggcatcagcggctcgcaggtagggctaaatgctctgaccgcgacgctgtatcccacccaaagccgcgcgaccggcgtgagctggtcaaacgcgattggccgctgcggagccattgttggttcgctctccggcggcgtgataatggcgatgaatttctcttttgacaccctgttttttgttatcgcagtaccggctgtggttagcgccgtgatgcttgtcctgctgacgcttgccgttcgcaacccaacatctgtacctgccgcgctgccttctgcgggcatcgtgaataaataa

SEQ ID NO: 252680 - DNA, 918 bp, Klebsiella pneumoniae
atggcaggctggacgcagaaactgaagctgcaccatttacagatgctggtcgcgctgggggaacaaggcaacctcacgcaagtggctaaaatgatgaatattactcagccggcgctctccaaatggctgagccagtttgaagatgaagtcggcatgcccctgtttgaacgtcacagcaaaggcctgcgcccgacagaaggcggaaagctgctgcttcaacacgcccagcggctgattaacgatatgtcgcgttcgcagtatgaaatcgagcgtttcaaacagggcggacaggtggggagtctgatgatcggctgttcaccggtggccaccgactgcgtttcgcaggcgatcctcgaactgcttaaagagatgccgaccctgcatcttaatatcgaagagaaagtcatgacgccgctgcttaacgatctgctcgccggggtgattgatgtcgtggtcgggcgagtcggcgggcgggcgctggagctgccgctgagctaccgggtgctctacaccgagccggtctgctttgtcgcccgccccgatcatcctctggcgcaaaaatcgcagttaagctgggctgacctctctccgtggcgctggattgtctggcccaccggcacaccgattcgcctgagcatcgacaacgcgctggtggataacggcgtcatgctgccggagaacaccattgagtccgcctcgatgaacgtcaccagcaacctgttacagagtagcgatatggtgtcgatactctcactgcgcctggcgcagcgctatgcggcccagcaccagctggcgattcttaatttgccgcgcattgaacaaaaaggtagcgttggggttttctggcgaaaaagtgaagcgccgtcgctggcgttgagccgatttctgcactgtctgtcgctgcaatcgacacactga

SEQ ID NO: 252681 - DNA, 696 bp, Klebsiella pneumoniae
atgatccatgaaatctggtggtcgctgccgctaacccttatcgtctttttcctcgcccgcatgctggcggcgcgattcaagtttccgctgcttaatccgttactggtggccatggtggtgctgattccctttttgctaatcaccggcatctcctacgagcgctattttcagggcagcaaaattcttaacgatctgctgcagccggcggtggttgcgctggcctttcctttatatgagcagctacaccaaatccgcgctcgctggaaatcaatcatcactatctgctttatcggcagcgtggtggcgatggtcaccggtaccaccgttgccttactgatgggcgcaacgccgcagattgccgcctctattttgccgaaatcggtcacgaccccgattgcgatggcggtgagcagcagcattggcggcattccggcgatcagcgcggtatgcgttatttttgtcggcattctcggcgcggtcttcggccatacgctgttgaatgtgatgcgcattcgtaccaaagcttcgcgcggcttatcgatgggtaccgcctcacacgcactgggtaccgcccgttgcgctgaactcgactatcaggagggcgcgttcagttcgctggcgctggtactttgcgggattattacctccctggttgccccgtttttgtttccgctgatcctggcaatagccggatag

SEQ ID NO: 252682 - DNA, 885 bp, Klebsiella pneumoniae
atgcacccacgttttcaagctgttcttccccaactggcggcggacctgcaagcggccatcgccccgatgctggccgacccgcattttccggccctgctcaatgcagatcaggtcgctgtgctgcaaagcgcgacggggctggacgaagacgcgctggcctttgctctgctgccgctggcggcggcctgtgcgcgtaccgacctctcccactttaacgtcggcgccattgcccgcggcatcagcggtacctggtacttcggcggcaatatggaattcctcggcgccaccatgcagcagaccgtgcacgctgagcaaagcgccatcagccatgcctggctgcgcggcgaaaaatccctgctggcgattaccgtgaactacaccccctgcggccactgtcgtcagtttatgaacgaactgaacagcggactggcgctgcgcatccatcttccgggccgcgaagcccattcgctgcaacactatttaccggacgctttcggcccgaaagatctgaatatcaaaaccctgctgatggatgaacagaaccacggcttcccgctcagcggcgatgcgctggcccaggcggcgattcaggcagccaaccgctgccatatgccgtacagccattcgccctccggcgtcgcgctggagctgaaagacgggactattttcaccggtagctatgcagaaaacgccgcctataacccgacgctgccgccgctgcagggcgcgctgaatctgctgagcctcaatggttacgattacccggatatccagcgcgctgttcttgccgagaaggccgacgcggcgctcatccagtgggacgcaaccgccgcgacgctgaaggcgctgggctgtcataacatcgatcgcgtcctgttaggttag

SEQ ID NO: 252683 - DNA, 717 bp, Klebsiella pneumoniae
atgttaaagcgtgcgttatacagcctgttagtcctgttcggcttgctgctgttaaccgtgctggggcttgaccgctggatgagctggaagacctctccttatatctacgatgagctacaggacctgccctatcgtcaggtcggcgtggtactcggcaccgctaagtactatcgtaccggcgtcatcaaccaatattatcgctaccgaattcagggcgcgctgaacgcctacaacagcggtaaggtgaactatctgctgctcagcggcgataacgcgctgcagagctataacgaaccgatgaccatgcgccgcgatttaattaaagctggcgtcgatccggcggatatcgtgctggactatgcgggtttccgtacccttgattcgattgttcgcacccgtaaagtcttcgacacgaatgattttattatcattacccaacgcttccactgcgagcgggcgctgtttattgccctgcatatgggtattcaggcgcagtgctacgcggtgccgtcgccgaaggatatgtggagcgtgcgcctgcgcgagtttggcgctcgtttcggcgcgctggccgatctctatatttttaaacgcgaaccgcgattcctgggtccgctcatcccgatccccgcgctgcaggaagtcccggacggcgcccagtcctacccggcggtcacgccgcagcagctaatggatctgcagaaaaaagagaagtga

SEQ ID NO: 252684 - DNA, 1011 bp, Klebsiella pneumoniae
atgagtgcgttaaataaaaagagttttctcacctggttgaaagagggtgggatttacgtcgttcttttagtattgctggccatcattattttccaggacccgactttcttaagtttgctgaatttaagtaatattctgacccagtcctcggtgcgtattatcatcgcgctcggggttgccgggcttatcgtcactcaggggaccgacctttcggccgggcgtcaggtcggcctggcggcggttatcgccgccacgatgctacaggcggtggacaacgccaacaaagtgttcccggaaatggccacgatgccgattccgctggttatcctgctggtttgtgcgatcggcgcggtgattgggcttatcaacggtattattattgcctacctgaacgtgacgccatttatcaccaccctcggtacgatgatcatcgtttacggtattaactcgctgtattacgacttcgttggcgcctcgccgatttccggctttgatagtcacttttcgcaatttgcccaggggttcgtagcgctgggctcgttccgtctgtcgtatatcaccttctacgcgctgattgccgttttcttcgtgtggatcctgtggaacaagacccgctttggtaaaaacatctttgctatcggcggcaacccggaagcagcgaaggtctccggggtgaacgtcgcgctgaacctgctgatgatttacgcgctctccggcgtgttctacgcgttcggcgggctgctggaggcggggcgcatcgggtcggcgaccaacaacctcggctttatgtatgaactggatgcgattgccgcgtgcgtggtcggcggagtctcgttcagcggcggcgtcggcaccgtgttcggcgtggtgaccggggtgattatcttcaccgtcattaactacggtctgacctatatcggcgtcaacccgtactggcagtacattatcaaaggggccattattattttcgccgtggcgctggattcactgaagtacgcgcgtaagaaataa

SEQ ID NO: 252685 - DNA, 1521 bp, Klebsiella pneumoniae
atggtcagcaataatagcgaacggtcaggcgaatatttgttggaaatgaccaacatcaacaaatcgtttcctggcgtcaaggctctcgataatgtgaacctcaaggttcgtccccactctattcatgcattaatgggggagaacggtgcgggcaaatcaacattattaaaatgcctttttgggatctatcaaaaagattccggcagtattctttttcagggacaagagatcgatttccattcggcaaaagaggctctggaaaacggtatttcaatggttcatcaggaattaaacctggtattgcaacgttcggtgatggacaacatgtggctggggcgttatcccaccaaaggtatgtttgtcgatcaggacaaaatgtatggtgataccaaagcgatttttgacgagctggatattgatatcgacccacgcgctcgcgtcgggacgctatcggtatcgcaaatgcagatgattgaaattgcgaaggcattttcctataacgccaaaattgtgattatggatgagccgacgtcttcgttaaccgaaaaagaggtcaatcatctgtttaccattatccgcaagctgaaagagcgcggctgcggcattgtctacatttcccacaaaatggaagagatcttccagctatgcgatgaaattaccgttctgcgcgacggccagtggatcgccacccagccgctggaagggctggatatggataagattatcgcgatgatggtgggccgttccctcactcagcgcttcccgacccgggaaaataagccgggcgagataattcttgaggtgcgtaatttaacctcgctgcgtcagccgtcaatccgcgatgtctcgttcgacctgcacaaaggcgaaatcctcggtatcgccgggctggtaggggcgaaacgtaccgatatcgtcgagacgttatttggtattcgcgagaagtccggcgggacaatcaagctgcacggtaagaagattaataaccataacgccaatgaagccatcaaccatggttttgcgctggtgaccgaagagcgtcgctcgacggggatttatgcgtatctggatatcggttttaactcgctgatctccaatattaagaagtacaaaaataaggtcggcttgctggataattcacgcatgaaaagcgatacccaatgggtcatcgattcaatgcgcgtgaaaactccggggcagcatacgcaaattggttcgttatccggtggtaaccagcaaaaagtgattattggtcgctggctattaactcagccggaaattctgatgctcgatgaaccgacgcgcggcattgacgttggcgccaagttcgaaatttatcagctgatcgccgaactggccaaaaaagataaaggcatcattattatctcctccgagatgccggagctgctgggtattaccgaccgtattctggtgatgagcaatggtcttgttgccggaattgttgagactaaaactaccacgcaaaacgaaattctccgtcttgcgtcgttgcacctttaa

SEQ ID NO: 252686 - DNA, 999 bp, Klebsiella pneumoniae
atgaataagaaggtgttaaccctgtctgctgtaatggctagcatgttattcggcgccgccgctcacgccgcagatacgcgtatcggcgtgacgatttataaatacgacgacaactttatgtcggtagtgcgtaaggcaatcgaaaaagacggtaaatcagcgccggatgttcagctgctgatgaatgactcgcagaacgaccagtccaaacagaacgatcagattgacgtcctgctggcaaaaggggtgaaggcgctggcgattaacctggttgaccccgcagcggcgggtacggtaatcgataaagcccgtggccagaatgtgccggtggtattctttaacaaagaaccttcccgcaaggcgctggatagctacgataaagcatactacgttgggactgattcaaaagagtccggcgtaattcagggcgatctgattgccaagcactggaaagcgaacccgaactgggacctgaataaagatggccagattcagtttgtcctgctgaaaggcgagccgggccatccggatgccgaagcgcgcaccacctacgtgattaaagagctgaatgataaagggctgaaaacccagcagctggcgttagataccgccatgtgggataccgcgcaggcgaaggataagatggatgcctggctctccggcccgaacgcgaacaaaattgaagtcgttatcgccaataacgacgcgatggccatgggcgcggtagaagcgctgaaagcgcacaataagagcagcatcccggtattcggcgtcgatgctctgcctgaagccttagcgctggtgaaatccggcgccatggcgggaaccgtactgaacgatgctaacaaccaggcgaaagcgaccttcgatctggcgaaaaacctcgccgatggtaaagaaccggctgccggtactaactggaaaattgataataagattgtccgcgtaccgtacgtgggcgttgataaagataatctgagcgagtttatcggtaagtaa

SEQ ID NO: 252687 - DNA, 1023 bp, Klebsiella pneumoniae
atgatcaccattcgtgatgtcgcccgtcaggcgggggtttccgtggctacggtttcgcgcgtgctgaataacagcgcgctggtgagcccggatacgcgagaagcggtaatgaaggcggtaacgctgctgggctatcggcccaacgccaacgcgcaggcgctggcgacccaggtcagcgataccatcggcgtggtcgtgatggacgtgtcggacgccttttttggcgcgctggtcaaagcggtagataccgtcgcccagcagcatcaaaaatatgtgcttatcggcaatagctatcatgaagcggaaaaagagcgtaacgccattgaagtactgattcgccagcgctgttcggcgctgatcgttcactccaaagcgttgagcgatgcggagctgggggattttatggagcacatgccgggaatggtgctgattaaccgcatcgtgccgggatacgcccaccgctgcgtcgggctggataacgtcagcggcgcgctgatggcgacccgcatgctgctccatcatggccaccagcgcatcggctacctctcttctaatcacggtattgaagatgatgatttacgtcgggaagggtggagcagggcgttacatgagcaaggcattatcgctcccgacggctggataggctcaggttcgccggatatgcagggcggggaagcggcgatggtagagctgctggggcgtaacctcggcctgaccgcgatctttgcctataacgacagcatggcggccggggcgctaacgacgcttaaagataacggtattgccgtgccgcagcacctttcactgattggttttgatgatattcccatttcgcgctacaccgacccgcagttgaccacggtgcgctacccgatcatgtcgatggcaaagctggcgacagagctggcgctgcggggggctgccgggaagctggatcgcgaagccagccactgctttatgccgacgctggtgcgtcgacattcggtggcgcagaggcaaattgtggggccgatcactaactaa

SEQ ID NO: 252688 - DNA, 669 bp, Klebsiella pneumoniae
atgtcatcactgagtaaagaagccatactcgttcatgaagcgctggtcgctcgtgggctggagacgccgctgcgtccgccagtacaagaaattgataatgaaactcgcaagcgtctgatcgccggacacatgaccgagattatgcagctgttaaaccttgatctaagtgatgacagcctgatggagactccgcatcgcatcgccaaaatgtacgtcgatgagattttctccggcctggactacgcccggttccctaaaatcaccgtcatcgaaaacaagatgcaggttgatgaaatggtcaccgtgcgtgatatcaccctgaccagcacctgcgaacaccactttgttacgattgatggtaaagcgacggtggcctatatcccgaaagattcggtgattggtctgtctaaaatcaaccgtatcgtgcagttcttctcccagcgcccgcaggtgcaggagcgactgacgcagcagatccttaccgcgctgcagaccctgctgggaaccagcaacgtcgcggtttccatcgatgcggttcactactgcgtaaaagcgcgcggtattcgcgatgcaaccagcgccaccaccaccacatcgctgggcggcctgtttaaatccagccagaatactcgccaggagttcctgcgcgccgtacgtcaccacaactaa

SEQ ID NO: 252689 - DNA, 837 bp, Klebsiella pneumoniae
atggaactgctcgaagagcaccgctgttttgaaggtcggcagcaacgctggcggcacgactccgccacgctgaactgcgcaatgaccttcagcatctttctcccccccgagaccgcagacgcgccgccgccggttgtctactggctctccggcctgacctgcaacgatgaaaacttcaccaccaaagcgggcgctcagcgcatcgccgccgagctcggcattgtgctggtgatgccggacaccagtccgcgcggtgataacgttgccgacgatagcgcttacgatctgggcaaaggcgcgggcttttatctcaatgccacccaggcgccgtggtcagcacatttccgcatgtacgattaccttcgcgacgagctgccgcagctgattgcccgcgagtttacgctcagcgatcgctgcgccatcagcgggcattccatgggcggccacggtgcgctggtgatggcgctgaaaaatccgggccgcttcgtcagcgtatccgcctttgcgcctatcgttaacccgacccaggttccctggggcaaaaaagcctttaccgcctatctgggagcgaatgaagcagactggcaggcctgggacagctgcgcgttaatgcaggccagcagcgagtcagatgcgatcccaaccctgattgaccagggcgataacgatgcattcctcgccgaacagctgcagccggcggtgctggcggaaaccgcgcgtcagaaaagctggccgttaacgctacgtattcagcccgggtacgatcacagctactactttatcgcctcatttattgaggaccacctgcgtttccatgcccggcacctcttctcctga

SEQ ID NO: 252690 - DNA, 1974 bp, Klebsiella pneumoniae
atgttcaggctaaacccttttgtccgggccggattatgcgcgtccgtcgtatccttagcgtttccggcgctggccgacgttaatgaagaaacgctggtcgtcaccgctgcggcaactgaacagagcgtcaaagatgcgcccgccagtattagcgttatcacccaacaggatctgcagcgtagaccggtacaaaacctgaaggatgtactgcgggaagtgccgggcgtgcagctcaccaacgaaggggataaccgcaagggggtgagtattcgcggcctcagcagcggctatacgctgatcctcgttgatggcaaacgcgttaactcgcgcaacgccgttttccgccacaatgattttgaccttaactggatcccggttgatgccattgagcgtatcgaagtcgtgcgcgggccgatgtcttccctctatggttccgacgccctcggcggcgtagtgaatatcatcactaaaaaagtcggccagcagtggaccggcaccctcagcgcggacaccaccattcaggaacaccgcgatcgcggcgatacgtacaatggccagttctttaccagcggcccgctgattgacggtgtgctcggaatgaaggcctacggcagcctggcaaagcgcgccaaggacgatcagcaggcttccagcaacgcagctggcgaaacgccgcgtattgaaggcttcaccagccgcgacggcaatgtcgaattcgcctggacgcccaatgacaatcaggacattaccgcaggctacggttttgatcgccaggatcgtgattccgactctctcgaccgcaaccgccttgaacggcagaactactccctgagccacaacggtcgctgggatgtcggcaatagcgagctgaaattctacggcgagaaagtggataataaaaatcccggacaggccggcaccatcacttctgagagtaacgcggtggatggcaaatacgttctgccgctgggaatgattaaccagctgctgaccttcggcggcgaatggcgccacgataagttgaaggatccggtcaacctgagcagcggcggtaaatccacttccgccagccagtatgcgctgttcctggaagatgaatggcggataatcgaacctctggccttaaccaccggcatccgtatggacgatcaccagacctatggcgatcactggagcccgcgtgcttatctggtctataacgctaccgataccgtgaccgtgaagggcggctgggcgacggcatttaaagcgccatcgctgctgcagctgaacccggactggaccaccaactcctgccgcggttcgtgcagcattatcggtaacccggatctgaagccggaaaccagcgaaagcttcgagctgggtttgtactatcgcggcgaagagggctggcttgaaggcgtggaaggaagcgtcaccaccttccagaacaacgttgacgatatgatcgatattctgcgtacctccagcgccagcgaagcgccgggctatccgaactttgtcggctggaaaacggtgaacgggaaacgcgtgccggtcttccgctacttcaacgtcaataaggcgcgaatcaaaggggtagaaacggaattgaaagtaccgtttggcgatgaatggaagctgacggtgaactacacctataacgatggtcgcgacctgagtaacggcggcgataaaccgctgcagacgctgccgttccatacggctaacggcacactcgactggaaaccgctggacgactggtccttctacgtcaccgccaactataccggcgaacagcgttcggtcagcacgacgggcaaaacgcccggcggctacaccatgtttgatatcggcgcggcctggaacgtcaccaaaaacgtcaagctgcgctccggggtgcttaacgtcggcgataaggatctgagccgcgacgactacagctatacagaagaaggtcgccgctactttatggccgtcgattaccgcttctaa

SEQ ID NO: 252691 - DNA, 1470 bp, Klebsiella pneumoniae
atggtttcggatactaaaaccacagaagcgcccggtttacgtcgtgaactgaaggcgcgccacttgaccatgatcgctattggcggttccataggtacaggtctttttgttgcctctggcgcaacgatttctcaggcaggcccaggcggggcgctgctctcctatattctcatcggcctgatggtttatttcctgatgaccagcctcggcgagctggcggcgtttatgccggtctccggctcttttgctacctatgggcaaaattacgtcgaggaaggttttggcttcgcgctgggctggaactactggtacaactgggcggtgaccatcgccgttgacctcgttgccgctcagctggtgatgacctactggttcccggacgcgcccggctggatctggagcgcgctgttcctcgggatcatgttcctgctgaactggatttcggtaaaaggctttggcgaggcggaatactggttttcgctgatcaaagtcgccaccgtcattatcttcattattgtcggcgtgatgatgatcttcggcatcttcaaaggcgcacagcctgcgggctggagcaactgggttgtcgacgatgcgccgttcgcgggcggctttgcggcaatgattggcgtggcgatgattgtcggcttctcatttcagggaaccgagcttatcggcatcgcggccggcgaatcggaaaacccggagaagaacatcccgcgcgcggtgcggcaggtgttctggcgtatcctgctgttctatgtgttcgccatcctgatcatcagtctgattattccttataccgacccgagcctgctgcgtaacgacgtgaaagatatttccgtcagtccgtttacgctggtattccagcacgcagggctgttgtcagcggcggcgattatgaacgcggttattctgactgcagtattgtcggcgggtaactccgggatgtatgcgtccacccgcatgctctataccctggcctgcgatggcaaagcgccgcgtattttctctaagctgtcaaaaggcggcgtgccgcgtaatgcgctgtatgccaccacggtgattgctgcgctgtgcttcctgagctcaatgttcggtaaccagaccgtttacctgtggctgctgaacacctcggggatgaccggctttattgcctggctggggattgccatcagccactatcgcttccgtcgtggctacgttatgcaggggaacgatctgaataacctgccgtaccgttcaggcttcttcccgctggggccgatcttcgcgttcgtcctgtgtctgatcattaccctggggcagaactacgaagcgttcctcaaagacaccatcgactggggcggcgttgcggcaacctatatcggcattccgctgttcctggtgatctggtttggctacaagctggcgaaaggaacgcgctttgtgcgctacagtgaaatgaagttcccggatcgcttcaaaggctaa

SEQ ID NO: 252692 - DNA, 483 bp, Klebsiella pneumoniae
atgaaacgcaagaacaagcgcaaacgccgcaccatgtcgctcgctgagggagtctacgcagcttgcttttgcttcattctttttatcattggcttctatcaaagcatcaaaattattgaagagtggtacttccgtccgaattatattgtcgacagcgccgactcgctcttctccggcatcctcttcctcggtctggcactgctgatggcgctgattgccgcctgcaccgccagcggcacgcctggcgagcgctacgccacgctcctgtttttgttctttattgcgatggggccggtgtggtctgtcagcctttatgtcctgcaatacgtcactattgagcactataaaagcccacaatttggcgtgtgtatcagcaaaggcggccatgggacaacgtatatgtacgtcaggaatagccgctggtgccagcattttggctacaccattatcaggccatcgccggatgagcgagggagcaattga

SEQ ID NO: 252693 - DNA, 486 bp, Klebsiella pneumoniae
atgcgcaaagtgcaaccgccgccgcatgactggccggtctgggtcggcgtttcgctgatttgccctctgcttgctttgtgctctctttacctggcaggcgactatttcaagctactcaggctgcctcgggcgccggatttctgttcgcagaatattttaaaagcaaactttgtctgcctggggcctgcgctgctgatattgagcatagagggaaataaaaaactctttttcccccaggctgcgccgctaccttttgcaacccctatcgtcaggtcttgcctttacttgacgccgctattgctgctcaccgcaaatacgctgattctggttttacatttcaccctttttagccctgaccgctatattcgctgctgggaaccttatccatggggaacatggtattacgcgaaaacagcggatatttgcgttcaacacgggctggcgccggtgcaaaacctcgcgtatcaggttgcgatctcgcaatag

SEQ ID NO: 252694 - DNA, 741 bp, Klebsiella pneumoniae
atgcatatcacgctacggcagctggaagtttttgctgaagttctgaaaagcgggtcgacggtgctctatccgcgggcgctggcgctgctggagcgggcgctggagatagagcagctgtttcgcggcgacaacggcgcgattcgcgtctacgccagcagcaccatcggcaactatatcttgccggagatcattgcgcgctatcgacgcgacctgccggatttaccgctggagctgagtgtgggcaatagccaggacgtgatcaacgccgtggccgatctgcgggtggatatcgggttgattgaaggtccctgccacgcggcggatattatcgccgaaccctggctggaagatgaactggtggtctttgccgcgccggattcaccgctgctggaaggggaggtgacgctgcaacggctggcggaggcgccgtggattctacgcgagcacggctccgggacccgggaaattgtcgactatttattattatcgcatctaccggcatttcatcttggaatggaactgggtaattcggaagccatcaagcacgcggtgcgccatggtctgggcattagctgtctgtcgcgacgcgtggttgcggagcagcttgaagtgggatcgctggtggcgctgaagattccgctgccgcgcttaacccgcaccctgtggcgtattcatcaccgccagaagcatatttccaaggcattacagcgtttcctgagctattgcgagatcgcaacctga

SEQ ID NO: 252695 - DNA, 1050 bp, Klebsiella pneumoniae
atgacagcactcactttaccgactaaacatcgcccattgcggcactttgcacctggactggcgctgaccgccctgctcaccggcgcagcgctgtgggccggtagttttccggcaatcgctggcgcgggcttcagcgcccttacgttggccattttgttcggcatggtcatcggtaacacggtttacccgaaaatctggcagccctgcgacggcggcgtactctttgccaaacagcacctgctgcgcctcggcatcattctatacggctttcgcctgacgttcgcccagattgccgacgttggcgtcagcggtatcgtgattgatgtgctgacgctttccagcaccttttttatcgcctgttttcttgggcaaaaggttttcggcctcgataaacataccagttggctgattggcgccggtagcagcatttgcggcgcggcagcggtcctggcgacggaaccggtcgtcaaagcggaggccagcaaagtgacggtcgccgtggccacggtggtgattttcggtaccattgctatcttcctgtacccggcggtttatcctttcctggcgcactggtttacgccggaggcctacggcatctatatgggttcgacgatgcatgaggttgcccaggttgtcgccgccggccacgccgtaagtccggatgcggaaaacgcggcggtgattgcaaaaatgctgcgcgtgatgatgctggctccgttcctgctgttccttgccgctcgcgtgaagcaattagccccggcaaacggcggcgagaaaagcaaaatcaccattccgtggtttgcgatcctgtttattctggtggcggtatttaactccttccacctgctgccgaaagcggtagttgatatgctggtgaccctggataccgtgctgctggcgatggcgatggcggccctcggcctgaccacccacgtcagcgcgctgaaaaaagccggcgctaaaccgctgctgatggcgctgatgctctttgtctggctgattgtcggcggcggcgcgattaaccttgctatccacagtctgatggcctga

SEQ ID NO: 252696 - DNA, 858 bp, Klebsiella pneumoniae
atgaaatacattggagcgcacgtcagcgcctccggcggtgtagccaatgccgccattcgcgcagtcgaaatcggcgcgaccgcatttgccctcttcaccaaaaaccagcgccagtggcgcgccgcgcctttgagcgacgacaccattgctgagtttaaagccgcctgcgagaagcatcatttcggcccgggacaaattctgccgcacgacagctatctgattaacctcggccacccggttgcggacgcgctggaaaaatcccgcgatgcctttattgatgaactctcccgctgccagcagctcggcctgacgctgctcaattttcatccgggtagtcatctgcagcaaattccagaagacgaatgcctggcgcgcattgccgagtccattaacatcgcgctggccaaaaccgaaggcgtgacggcggtcattgaaaacaccgccggccagggcagtaacctggggtttaagtttgaacacctggcggccatcatcgatggcgtggaagataaatcgcgcgtcggcgtgtgcattgatacctgccacgccttcgccgccggctacgacctgcgtagcgccgaagagtgtgaaaaaaccttcgctgattttgaacggattgtcggttttcagtatctgcgcggtatgcatctgaacgatgcgaaaagcacgttcggcagccgcgttgaccgccaccacagcctgggtgaaggcaatatcggccacgatgccttccgctggataatgcaggataaccgctttgacggtatcccgctgatcctggaaacgatcaatcctgatatctgggcggaagagatcgcctggctgcgggcgcagcagacggaagaggccgtggtctga

SEQ ID NO: 252697 - DNA, 1089 bp, Klebsiella pneumoniae
atgaacgatagggaaaagcagatcctcaaaattttgcggcgcaatccgctgattcagcagcatgagattgccgatattctgcagattagccgctcccgcgtagccgcgcatattatggaccttacgcgtaagggggctatcaagggcaaaggctacatccttaccgagcaggagtattgcgtctcgctgggcgcggtgaatatggatatccgcggcattgccgatattcattatccccaaccggtctccaacccgggcaatatccagtgctccgccggcggagtggcgcggaacatcgcgcataacctggcgctgctgggccgcgatgtgcatctgatttccgccgtcggcagcgacttttacggcgaaacgttgcttgagcagacccgacaagccggggttaacgtgcaaagctgtatccgcctgcacggtcacaataccgccacctatctctccatcgccaatccgcaggaagagacggtgctggcgattaacgatacgcatatcttacagtcgctcaccccgcagctgctgaatcaatatcgggatctgctgacccatgccggcgtcatcctggtcgattgtaatttaacggagccgttgctggagtgggtatttacgctggccaacgctattccggtatttgttgataccgtgtcggagtttaaagcgcaccgcattcgcccgtggctgggaaagatccataccctcaagccgacgctgcgcgaactgcagatcctctggggagaacccattgaaaacgaggccgatcgcgatcgcgcgttagcctggctgcacgaaaggggaacgcggcgcgtggtaatttgctcggaagacgattccgttttctgtagcgaagccggcggtgaacgttttcagatgaagctaccgggccataccacgatagacagctttggcgccgacgatgcgctgatggccgggctgctttatagctatcttgacggcagcgatttcaaagagagcgtcgctttcgccatggcctgcaccgccattacccgcgccagcgacagcatcaacaacccttctttatccgttgataacgcgctcaatttacttcccagcctatag

SEQ ID NO: 252698 - DNA, 1251 bp, Klebsiella pneumoniae
atggacatcatgagaagtcttttggggatggtggtattgctggccatcgcctttgcgctgtcagtaaataaaaaacgcatcagtatcagaaccgtaggggccgcactgctgctgcagatcgtgattggcggagtgatgctctatttcccgccgggcaagtggctggtggaacaggcggcgctcggggtacataaagtcatgtcctacagcgacgccggaagcgcgtttatttttggatcgcttgtcggtccgaaaatggatgtgctgtttgacggcgcgggttttatcttcgccttccgcgtgctgcccgccatcatttttgtcaccgcgctgataagcctgctttactacctcggcgtgatggggctgctgatccggattctcggcggtatcttccagaaagcgctgaatatcagcaagattgagtcctttgtcgccgtgaccaccatctttcttggccaaaatgagatcccggcgatcgtcaaaccctttatcgaccgtctcaaccgcaatgagctgtttaccgccatttgtagcgggatggcgtcgatcgccggatcgatgatgatcggctatgccggcatgggcgtaccgatcgattatctgctggccgcttcgctgatggctattcccggcgggattctgtttgctcgcatgctgagcccggcaactgaagcctcccgggtcactttcgataatctctccttcaccgagacgccgccgaaaagcattatcgaggcggcagcatccggggcgatgaccgggctgaaaattgccgccggggtggcaacggtggtgatggcgtttgtggcgatcatcgcgttgctgaacggtattatcggcggcattggcggctggtttggctacggtcacgccacgctggagggtattttcggtttcctgctcgcgcctctggcgtggattatgggcgttgactggagcgatgcgacgctggcgggaagcctgattggccaaaagctggcgataaacgaattcgtcgcctacctcaacttttcgccttatctgcaaaccggcggtaccctggacgtgaaaaccgttgcgattatctcgtttgcgctgtgcggtttcgccaactttggctcaataggtgtggttgtcggggcattttcggctatttcaccgcagcgcgcgccggaaattgctcagcttgggctgcgcgctctggcggcggccacgctctctaacctgatgagcgccaccattgccgggttctttatcggtctggcataa

SEQ ID NO: 252699 - DNA, 936 bp, Klebsiella pneumoniae
atgtctgaattaaatatttcctctgaattattacaggtttctgcggaagttcagcaggcattaaagaataaccaacccatagtcgcgctggagtcgactattatttctcacggaatgccgtttccagaaaatgcgcagaccgcgctggaagtcgaagaaacgattcgccgtcagggagcggtgccggcaacaattgcgattattcatggcgttatgaaagttggcctgagccgcgaagaaattgaattgctcggtcgtgaaggacataacgttaccaaagtcagtcgccgtgatttaccttttgttgtcgccgcaggattaaatggcgcgaccaccgtggcttctaccatgattattgccgccatggccgggataaaagtcttcgcgaccggcggtattggcggtgtgcaccgcggagctgagcacacttttgatatttccgccgatttacaggaactggccaataccaatgttaccgtagtttgtgccggcgcaaaatctattctcgaccttggattaacaaccgaatatttagaaacgtttggcgttccgcttattggctatcaaacttcggcgcttccggcatttttctgtcgaaccagtccgtttgacgtcagtattcgcctgaatagcgctaaagaaatcgctaaagcgatggcggtgaaatggcagtcgggcctgaacgggggcatggtggtggcgaacccgataccggaacagtttgcgatgccggaagcaaaaatcaacgccgccatcgatcaggcggtgaaggaagcggaagagcagggtgtggtgggtaaggagagtacgccgttcctgctggcccgcgtagcggagctaaccggcggagatagcctgaaatccaatattcagctggtcttcaataatgccgtgctggcctgcgagattgccaaagagtatcagcagatcgcctga

SEQ ID NO: 252700 - DNA, 936 bp, Klebsiella pneumoniae
atgcctgaaaatgattacgttgtaattattggatcggcaaatatggatgttgctggttattcccatgtatcgttgaactatgctgattctaaccccggaaaaataaaatacactcccggtggagtggggcggaatattgcgcagaatattgctttattgaataaaccatcctggctactgtcggttgtcggagatgatttctatggccactccctattaaaacaaacggctcagtccggcgttcatgtcgataaatgtcagatcgtccacggcgaggggacatcgagctatttatcgctgctcgataataccggtgaaatgctggtggcgattaatgatatgagtatcaccgagcatattacgccagcctttttaagccagcaccgggattttattcgcagcgctgcggtcatcgtcgttgactgtaatatcagcgaatcggcgctggcctggttgatggaaaatagcggcccgacacccatttttgttgacccggtctctgcctggaagtgcgtgaaaatcagccagcatctggggcgtatccacactctgaaaccgaaccgaattgaagctgaaacgctgagcggaattgcgctttccggcactgatgacgtcgcgcgcgttgccgactggtttcaccagcgtggcctgcggcgcctggtgctgagcatggggggcgacggggtttacttcagcgagaaagacggcgagcgcggctggtcggcgccgttaaaaacccaggtagtcaacgtcaccggcgccggtgacgccatgatggccggtctggcctgctgctggctcgacggctgttcattttcgcaagcggtgaagtttgctcagggatgctcttctctggcgctctcatcggaattcaccaataaccctgaattatcttacgccaacgtaaaaaaggtagtggagaacgaacatgtctga

SEQ ID NO: 252701 - DNA, 1689 bp, Klebsiella pneumoniae
atgaaaacgctgctgattattgatgccgggctcggacaggcccgcgcctatatggcgaagaccctgttaagcaccgcggcgcaaaaagcgcaacttgaactgattgataacccaaacgacgctgagctggcgattgtgctgggcgcgacgctgccagctgacagcgcgctgaacggcaaaaaggtttatctcggcgatattaatcgcgccgttgctcacccggaactattcctcggggaagccaggagccatgccacgccatatgccgctccggctgctacagctttaccggcggaaactcatggtccgaaacgcattgtggcggtcactgcctgcccgaccggcgtcgcgcacacctttatggcggcggaagcgattgaaaccgaagccaaaaaacgcggctggtgggtgaaagttgaaactcgcggctccgtgggtgcgggtaatgccatcactcctgaagaggttgagcaggcggatctggtggttgtcgcggctgatatcgaagtggatctggcgaaatttgccggcaagccgatgtatcgcaccactaccggtctggcgctgaagaaaaccgctcaggagctggataaagccgttgttgaagcgaaaccatatcagcctgcgggtaaatcccaggccgcggcagaaggcaaaaaagagtccgcgggcgcctatcgtcacctgctgactggcgtatcgtatatgttgccgatggtggtagcgggcggcctgtgtatcgcgctctccttcgcttttggtatcaaagcctttgaagtaaaagacactctggccgccgcgctgatgcaaatcggcgggggatcagccttcgcgctgatggtaccggtactggcgggctttattgccttctccatcgctgaccgccctggcctgacgccaggtcttatcggcggtatgctggcggttagcaccggatctggctttatcggcggtattatcgccggcttccttgccggttacgtggcgaaagcgatcagtaccaggctgaaactgccgcaaagtatggaagcgctgaaaccgatcctcatcattccgctggtttccagcctgatcgtgggtctggcaatgatttacctgattggtaaacccgttgccggaatcctcgaaggcctgacccactggctacaaactatggggacggcgaacgcggttctgctcggtgcaattctcggcggtatgatgtgtaccgacatgggcggcccggtgaacaaagcagcttacgcctttggtgttggtcttctgagtacccaaacctatgccccgatggcggccattatggcggcaggtatggttccaccgctggcgctgggtctggcgacgctgattgcgcgtaaaaagtttgacaaagcgcagcaggaaggcggtaaagccgcactggttctcggcctgtgctttatcaccgaaggagcaattccttttgccgctcgcgatccgatgcgcgtcctgccttgctgtatcgttggcggcgcggtgaccggtgcgatgtccatgtgggttggcgcgaaactgatggcgccgcacggcggtctgttcgtcctgctgatccctggcgcgattaccccggtgctcggatatctgatggcgattgtggtcggtacgctggtcgcaggcctttcctacgcggtgctgaaacgtcctgaagttcaggtggaagaaaaagtcgcctga

SEQ ID NO: 252702 - DNA, 939 bp, Klebsiella pneumoniae
atgagcagacgtgtcgcaacgattactttaaacccggcctatgacctggtgggttttaccccggaaattgaacgcggtgaggttaaccttgttcgcacgaccggcttgcacgccgcagggaaggggatcaacgttgcaaaagtgctgaaagatctcggtatcgacgtcaccgtgggcggttttctcggtaaagataatcaggatggctttcagcaactgttcagtgagctgggcatcgctaaccgttttcaggtcgttcagggccgtacccgtattaacgtcaagctgacagaaaaagatggcgaagtgaccgacttcaacttctccggctttgaagtcacgccgggtgactgggagcgttttgttaacgactccctgagctggctgggccagttcgatatggtctgcgtgagcggcagcttaccttccggcgtaagtccggaagcgttcaccgactggatgacccgcttgcgcagccagtgcccgtgcatcatttttgacagcagccgcgaagcgctggttgccggtcttaaagcggcgccgtggctggttaaacctaaccgtcgtgagctggaaatctgggcgggtcgcaagttacctgaaatgaaggatgtgattgaggccgctcatgcgctgcgcgagcaggggattgcccacgtggtgatctcccttggcgaagaaggcgccctgtgggttaacgcctccggcgagtggattgccaagccgccttcagtggaagtggttagcaccgttggcgcgggcgattcaatggttggcggcctgatttacggactgctgatgcgtgagtccagcgagcatacgctgcgcctggcaacggccgtcgccgcgctggcggtgagtcagagcaatgtcggtattaccgatcgtacccagttggccgcaatgatggcgcgcgtcgacttacaaccctttaattaa

SEQ ID NO: 252703 - DNA, 1131 bp, Klebsiella pneumoniae
atgttccagttatctgtgcaggatattcatcccggtcagcaggccggtaataaagaagaggctattcgtcaggttgcctccgcgctggttagcgcgggcaatgtggctgaagggtacatcaacgggatgctggctcgcgagcagcaaacctccactttccttggcaacggtattgcgattccgcatggcaccaccgacacgcgcgatcaggtgctgaaaaccggcgttcaggtttatcagttcccgcagggcgtgacctggggcgaagggcagaccgcctacgtcgctatcggtatcgccgccagttcggatgaacaccttgggctgctgcgtcagctgacccatgtgctgagtgacgactcggttgctgaacagctaaagtccgccaccaccgctgaagagctgcgcgccctgctgatgggtgaaaagcagagcgaagcgctgaagctggataacgaaacgctgaccctggacgtggtcgccagcgatctgctgaccctgcaggcgctcaacgccgcgcggctgaaagaagcgggcgccgtcgatgcttcctttgttagccatgcgattaatgacaaaccgctgaacctcggccagggcatctggctgaacgacagtccggaaggcaacctgcgtagcgccattgccgtgagccgcgcggccaacgcctttattcgcgatgagcagccggtttccctgctgatcaccgtggcgatggccgatgaccagccgacggcggtccttaatcgcctgagcaatttgctgctggacaaaaaagctgaccgtttgctgaagtccgatggcgcaacgctgctggcgctgctgaccagcgacgatgcgattgctgaagatgttctcagcgctgaatacgttatccgcaacgagcacgggctgcacgcgcgtcccggcacgatgctggtaaataccattaaacaattttccagcgacattacggtcactaacctcgatggttcgggcaagccggcaaacggccgcagcctgatgaaagtcgtggccctgggcgtgaaaaaaggtcaccgcttgcgcttcaccgcgcagggtgaagatgcgcagcaggcgctggatgcgattggcgaagcgatcgccgcaggccttggggagggcgcataa

SEQ ID NO: 252704 - DNA, 1194 bp, Klebsiella pneumoniae
atgaaagccgacatgcaaaacagtagcgccgccctgccacgacgcgggttcgatttaacctcttccgccttcctgatcgtcgccttcctgacgggcattgccggggcgctacaaacgcctaccctgagcctgttcctgactgacgaagttcacgtacgaccggcgatggtcggcttcttttttaccggcagcgcggtgatcggcattctggtgagccagtttctcgccgggcgctcagatcgcaaaggcgaccgcaagcagctgatcgtcttctgctgcctgatgggcgtgctggcctgcgtgctcttcgcgtggaatcgtaactactttattttgctcttcgtcggcgttttcctcagcagctttggttccaccgcgaacccgcagatgtttgccctcgcccgcgaacatgcggacaaaacgggccgcgaggcggtcatgttcagctcgatcctgcgcgctcaggtgtcgctggcatgggtcatcggcccgccgctggcctacgcgctggcgatgggtttcggctttacggtgatgtacctcagcgcggcgattgccttcgtggtctgcggcgcgatagtctggttttttctccccagcatgcgcaaagagccgaaggtggtgacgggacatcttgaagcgccgcgcaccaaccgccgcgacgcgctgctgctgtttatcatctgtacgctgatgtggggaattaacagcctgtacatcattaacatgccgctgttcattattaatgagctgcatttacctgaaaaactggcgggattaatgatgggcaccgccgccgggctggaaatcccgaccatgctgattgcgggttactacgccaaacgtttcggtaagcgtttcctgatgcagatctctgcggttgccggggtgctgttctatgtcggcatgctaaccgtacacaccccgggacttctgctggccctgcaggtgctgaatgctatttttatcggcattctggccggtatcggtatgctctattttcaggacctgatgccaggccaggccggtgcggccacgaccctctataccaatactatccgcgttggctggattattgccggttcgctggcgggggtcgttgcggaagtctggagctatcacgccgtattctggattgcgctggtgatgggcctcgccactcaggcctgcctgtggcgcattaaagacgtataa

SEQ ID NO: 252705 - DNA, 252 bp, Klebsiella pneumoniae
atggaatgccgccctgaatgcggagcttgctgtatcgctccttctatctccagccctatcccgggtatgccgcagggcaaaccggcaaatacccgctgtatacagctttcggacaataacctgtgcgcgatttttggctcgccgttgaggcccaaagtgtgcgccagcctgaagccggaagcggagatgtgcgccacaaatcgcgaagaagccatgatctggcttcttcatcttgagctgagtacttcgtga

SEQ ID NO: 252706 - DNA, 573 bp, Klebsiella pneumoniae
atgccaagagcgaatgaaattaagaaaggtatggtgctgaattacaacggcaaactgctgattgttaaaaatattgatattcagtcaccgagcgcccgcggcgcagcgacgctgtacaaaatgcgtttctccgatgtgcgcaccggcctgaaagtggaagagcgcttcaaaggcgacgacattgtcgataccgttaccctgacccgccgcttcgttgacttctcctatatcgatggcaatgaatacgtctttatggataaagaagattacaccccgtatatcttcaccaaagagcaaatcgaagaagagctgctgtttatgccggaaggcggcatgcctgacatgcaggttctgacctgggacggccaactgctggcgctggaactgccgcagaccgtggatctggaaatcattgagacggcgccgggcatcaaaggcgcatccgccagcgcccgcaacaaaccggctaccctcagcaccggcctggtcgttcaggtgccagaatacctcagcgcgggcgagcgcattcgtattcatatcgaagagagccgctacatgggccgtgcggactaa

SEQ ID NO: 252707 - DNA, 1467 bp, Klebsiella pneumoniae
atgactaccattgcgacggccacgctgccggaaggcgtacagctccctcattatgaccgcagccagctgcgctcacgtattgtgcatttcggctttggcgcttttcatcgcgcgcatcaggcgctactcaccgatcgggtgcttaacgccagcggcggagactgggggatttgtgagattagcctgttcagcggcgatcggctgatgagccagcttcgccagcaaaaccacctgtttaccgtgctggaaaaaggcgcagagggcagccagccaattgttgtcggcgccgtgcatgaatgtctgaacgctaaactcgattcgctcgccgctattattgagaaattttgtgaaccgcaggtggcgattgtctctctgaccattaccgaaaaaggctactgcatcgaccccgccagcggcctgctggatatgacgcagccgcgtattattcacgatctgcaaaacccgactttgccgcaatcggttcctggaatactggttgaagcgctggcgcgccgccgtcagcgagggctgtcaccctttaccgtgctctcctgcgacaatatccctgataatggacgtgtagtgaaaaacgccgtgctgggcatggctgaaaaacgcgatccgcagctggcacagtggattgctgagcacgtcagcttccccggcaccatggttgatcgcatcgtaccagccgccaccgaggagtcgctggcggaaattcgcgccgcgttgggcgtagaagatccctgcgccatcagctgcgaaccctttattcagtgggttattgaagataacttcgtggccggtcgcccggactgggaaacggcgggcgttcagatgaccgacgacgttttaccgtgggagcagatgaagctgcggatgctcaacggtagccactcgttcctcgcctggcttggctacctggcgggccatgcgcatattagcgactgcatgcatgatccgatttttcacagcgccgcataccggctgatggttgatgaacaggcgccgacgctatccattcagggcgttgacctgtcggcatacgctgacagcctgatcgaacgtttcagcaacccggcgctgaagcaccgcacctggcaaatcgccatggacggtagccagaagctgccgcaacgtatgcttgacggaattcgcgtccatcttgcgcaagagagccgctggccgctactggcgctgggcgtcgctggctggatgcgctatgttagcggcgtggatgacgccggagccgtcattgatattcgcgatccgctggccgataaaatacaccacctcgttgccaccagcgatgagcgacagcgcgtagcggcgctgcttacgcttgaggagatcttcggccgcgacctgccgcagaatccgcagttcgtcgctgatgtcaccgccgcgtggcatcagctcgccgcttttggcgcgcgccaggccgtcgccgccgcgctgaatgattaa

SEQ ID NO: 252708 - DNA, 978 bp, Klebsiella pneumoniae
gtgaccaaaaccaacttgatcacggggtttctcggcagcggtaagaccacttccattctgcacctgctggccaataagcccgcaaatgaaaaatgggccgtactggtcaacgagtttggcgaagtgggcattgacggcgcgctgctggcggaaagcggcgcgctgctgaaagagatccccggcggctgcatgtgctgcgttaacggcctgccgatgcaggttgggctcaacaccctgctgcgccagggcaaacctgaccgtctgctgatagaacccaccggactaggccatcctaaacagatcctcgatatgctgaccgcgccggtctacgcgccgtggatcgatctgcgcgccaccctgtgcatattggatccgcgtcagctgctggacgaaaaagtcgtgagcaacgaaaactttcgcgaccagctggctgccgctgacgttattgtcagcaataaagccgaccgctcgacggaagagagccagcgcgcttttgtcgcctggcgtgaggcgtacgccggtgagcgtcgctgcgtcagcactagccaaggtaatatcgacccggcgctgcttgatttgccgcgccgcaatctggcgccgctacccgcaggggtcgggcatgcgcacgaccacgggcagaaaaaaggccttgccgcgcttagccttcccgcgcaccagcgctggcgtcgtagcctcaatagcgctcagggctatcacgcctgcggctggatttttgacgctgaaaccgtcttcgataccgtcgctctgcttgaatgggcgcgcctggcgccggttggacgagttaaaggcgtcatgcgtattgccgaagggctgattcgtatcaatcgccagcagctcgatctgcatattgagacgcagaacgttgccccgcccgatagccgtattgagctgatagccgatacggaaacggactggaatgctcttcaggcctctttgttgaagattcgtttaacttag

SEQ ID NO: 252709 - DNA, 708 bp, Klebsiella pneumoniae
atgattaaaaatcgaattcccctcatcctgctgttaaacgcggcaggtatagcgcttttctgttcatggtatcttccggttaaccatggtttctgggctccgctggacgcggcgattttctatttctttaaccacctggtcggcgtcaacaccgcttacacctggctgttggcggttatcaacaaccgcgcgtttgacgcctgttcgctgctggcgatgggcagcctgatgctgagcttctggtttaaagaacagagcgccggacgccgccgggtgattatcatcggcctggtgatgctgctggctgccgtcattatcaatcagctggcccagcacctgatgccggtgaagcgagccagcccttcgctctcgttcaccgatatcactaaagtcagcgatgtcatctcctttccgactaaagatgcgtctaaagacagcttcccgggcgatcacggcatgatgctgctgatttttgcctctttcatgtggcgctattttggccgtcgcgccttcgctattgcgctggttatctttgtggtgttcgctttcccgcgggtgatgatcggcgcgcactggtttaccgatattgccgtcggatcattaacggccgtgctcattggcgctccctgggtgttgatgaccccactgagcgataaagtgattactttatttgaacgttacctccccggcggaagaacgaaaatttaa

SEQ ID NO: 252710 - DNA, 570 bp, Klebsiella pneumoniae
atggtcaaatctcagccgattttgagatatatcttgcgggtcgcccccgcgattgcagttgcggttctgctttccgcgtgtagttcaaatagtaccgccagaaatatgcattctgagacgcttgctgtgggtagtggcgatttatcatcactgcaagcctctcaggatgaatttgaaaccatggtccgcaacctggacgttaagtcccgtttgatggatcaatatgccagctggaagggcgtgcgttaccgcctcggcggcagcactcgcaaaggcattgattgttccgcctttgtgcagcgtactttccgtgaacagtttggcctggagctgccgcgttcgacttctgagcagcaggattccggaaaatccatcagccgttcacagctgcgtaccggtgatttagtactgttccgtgcgggttcaacgggccgtcatgtaggcatctacatcggcaacaaccagtttgttcatgcttccaccagcagcggtgtgacgatttccagcatggatgagccgtactggaaaaagcgctataacgaagcgcgacgcgttctgagccgctcgtaa

SEQ ID NO: 252711 - DNA, 1563 bp, Klebsiella pneumoniae
atgcctacccgtcacctctctccccggcgaaaaatctggctaaccagcatatgcgttggcatagccgtcgccctgctggccggtagcatccagtttatggtgatctatcacaaccgcgcggagcgtttcgacgttatcatcaacaatgttcatgcttatctgacgggctattttcacgatttagaccagacgattgcgggactacagccgctggtgagtcagccctgcgaaaatatcgattccggattaaccgcccatgcggcattcagcccaaacgtacgcgctttcctgctggttaaaaatggtattgcgttttgctcctccgccaccggtgcaatgaacacaccttttaaccagctcattccacagctggatatcactcaagcggtggatatggcgatccttcccggtacgcccatgatgccgaaaagcgcggcgctggcgatgtgggttcgtagcccgcacggcggtaaagacggcgtttttgtctcgatcaatgcgaatctgacaccctatatactctactcctcacggcagaatgatttcagcggcctggcgctgtccattaagcacaccgcgatctcgaccttcagcaacaagcttatcgacccgcagaccctgctctcgccgcctattcgccagacgcagattgagggtttaccgttgaaaatctatctctatgctaacagctggctggcggagaatacgcagtttgccctgctgctgggggtggtgtgcgggctgctggccggactgttaagctattacattctcacgataaaatcagacccgcgaaaggagctgctgctggcgatcaaaaacgatcagttttacctggtctatcagccggtggtgaaatcggagacgctgcagatcagcggcgttgaggtactgatgcgctggaaacatccggtggccggagagatcccccctgacgtctttattaatcttgcggaaacccagcagatcatcattccgcttactcgccacctcttaaaactgattgcgcacgatgcgcctgttttgcagacgctcctgcccgcagggatcaagcttgggatcaatatttccccccttcatctgcacgcagagagctttcagcaggaccttaagcacttcgccgccgccatgccagccgaccactttaagctggtactggagatcaccgagcgcgcgatgatcgataaaaatcgttcattagagaacttcgactggctgcacgagcagggttttgaaatcgcgattgatgattttggtaccggccatagcgcgctcatctatctggagcgctttagctttgattacctgaagattgatcgcggcttcgtacaggctatcgggacggagaccgtgacctcgccggtgctcgatgccgtcatcactctaagccgccgcctgaagctcgctaccgttgccgaaggcgtggaaacgcaggaacaggcggaatggctgcgcgatcatggcgtaaactttttgcagggctactggttaagtcgcccgctgacgctggaagcgctgatcgccgcccacgcgcagccggcgaaatatttcccaacccgctaa

SEQ ID NO: 252712 - DNA, 1827 bp, Klebsiella pneumoniae
ttggaggacgataccctggttatgtttgcccgcatcagcctgatactgctgaccttatttagcctgcacagccgggcgcaaactattctgacgagcgatacgttcgcgattatcggccaaccgaagtacgccgcgggctttgaccactacgattatgcgaatcccgccgcgcctaaaggcggcgcgattacccttgcggctatcggtacctttgataatttcaaccgctacgccctgcgcggtaatccgggtattcgaaccgaagcgctatacgatacgctgttcaccacctctgacgatgagcccggcagttactacccgctgattgccgagcatacgcgctatgccgatgatttttcgtggatggagattacgctcaatccgcacgcccgctatcacgacggcagtcccatcaccgccagcgatgtcgcttttaccttccagaagtttatgaccgaaggggtgccgcagtttcgtctctattataaaggcactaccgttaaagctatcgccccgctaaccgttcgcattgagttagccaaaccgggcaaagagaacatgcttagcctgatgacgctaccggtgatgccggaaaaattctggaaaaaccataaactcagcgacccgctctccgctccaccgctggccagcggcccctaccgcattaccgcctggcgcatgggccagtacatcacctattcccgcgtgaaggactactgggccgccgatttaccggtcaaccgcgggcgctggaatttcgatacgctacgctacgattattaccttgatgacaatgtcgccttcgaagcctttaaggccggcgctgtcgatcgtcgggaagagaacgtcgccaaaaactgggcgacccgctacgtcgggcgcaactttagccacggctatattgttaaagacgaatacaccaatacctcggcgcaaaatacccagtggctggcctttaacattcagcgcccgatatttgccgaccgccggattcgcgaggccatcaccctcgcctttgattttgaatggatgaataaggcgctgttctatcactcctacagccgcgccaacagcttctttcagaataccgaatacgcggcgcgcgattatcctgatgccgacgagctcgccctgctgacgccgctgaaaaaagagatcccggccgaagtcttcacgcagatttaccggccgccggtttccagcggcgatggttttgcacgggagaatttactcaaagcggatgccatcctcaaccaggcgggatggatagtgaaaaaccagcggcgggtaaacgcgcagagcggcaaaccgttacgctttgagctgctgctcccctccggcagcagcgatcgctgggtactgccatttcagcacaatcttcagcggctcggcatcgttatggacattcgccaggtcgataactcccagtacagtaaccgcaagcgcagccgggattacgacatgatgccaaacgtctggcgcgcgtcgccctggcccgacaccggcctgcaaatctcctgggattcggaatatattaattccagctataacgcctcaggggttcaaagcccggccgtcgaccagcttattgcgcagatcattcgctggcagggcaacaaggaaaaactgctgccgctgggccgggccctcgaccgcgtgctgacctggaactattacatgctgccgatgtggtatatggcgcaggatcgcaccgcctactgggataaattctccttcccgaagactcgcgcgatttactcatccggtttcgaaaactggtggtacgacgccaacaaagcggccagacttcccgcggacagacgttaa

SEQ ID NO: 252713 - DNA, 1095 bp, Klebsiella pneumoniae
atgggtgcatatctgctccgccgactactgctcatcgtccccaccctgtgggcgattatcaccattaactttttcattgtgcaaatcgctcccggcggcccggtcgatcaagcgattgcggcgatagagttcggcgatcgcggcggtctgcccggagccggagacggcgggatggccgccagccatgcgcgtaccggcgtcagcaacatcagcgatggccactatcgaggtgggcgcgggctggacccggaagtcatcgccgagataacccaccgctacggctttgataagcctctccacgagcgctattttaaaatgctcggcgactacctgcgctttgattttggcgacagcctgtttcgcagctcatcggtcgtgcagctgatcggggacagcctgccggtctctatctcgctgggcttgtggagcacgctcatcatctatctggtgtcgatcccgctggggatccgcaaagcggtcagcaacggcagccattttgacgtctggagcagtacgctgattattatcggctatgcgatcccggcctttctgttcgccattttgttgattgttatctttgccggcggcagctatttcgatctctttccgctgcgcgggctggtgtcagccaacttcgacagcctgccgtggtatcaaaaaatcctcgactatctctggcatatcaccctaccggtactggccacggtgatcggcggttttgccgccctcaccatgctcaccaaaaacagctttctcgacgaaattcgcaagcagtacgtcgtcaccgctcgcgcaaagggcgttagcgaaaagcagatcctgtggggccacgtatttcgcaacgcgatgctgctggtgatcgccggtttcccggccacctttatcagcatgttttttaccggctcgctgctgattgaagtgatgttctcgctgaacggactggggctgctgggctatgaagctacggtatctcgtgattacccggtcatgttcggcacgctgtatatttttaccctgattggcctgctgctgaatatcatcagcgacatcagctatacgctggtcgatccgcgtatcgattttgagggccgctaa

SEQ ID NO: 252714 - DNA, 1026 bp, Klebsiella pneumoniae
atgtcatttttcagtcccgtcaatcaggcccgctgggcgcgctttcgccacaaccgccgcggctactggtcgctttggttattcttagtcattttcgcctgcagcctgtgcgccgagctgattgctaacgataaaccgctgctggtgcagtaccgcggcagtctctacgtaccgttattaaaaaactatagcgagagcaccttcggcggccgctttgctactgccgccgactatcaggacccgtggctgcaaaaacggctggacgataacggctgggccctgtgggcgccggttcgcttcggcgcaacgaccattaatttcgccaccgaaacccccttcccttcgccgccgtcaaggctgaactggctgggcaccgatgccaacggcggcgacgtgctggcgcgtattctgtacggcacgcgcatttccattctctttggcctgctgctgaccttcttctccagcgtgctgggggtgatggccggcgccgttcagggatattacggcggaaaaattgatctctggggacagcgctttatcgaggtctggtcggggatgccgaccctgtttctgattatcctgctttcgagcgtcgtgcaggccaatttctggtggctgctggccattactgtgctgttcggctggatgacgctggtcggggtcgtccgcgccgagtttctgcgcacccgcaactatgattatatccgcgccgcgcaggcgctcggcgttagcgatcgcgccattattctgcgccatatgctgcctaacgctatggtcgccaccctgaccttcctgccgtttattctgtgcagttcgattacgactctgacctcgctggacttcctcggcttcggcctgccgctgggctctccttcgctgggcgagctgctgttgcagggtaaaaataatcttcaggcgccgtggctgggcatcgccgcctttctgtcggtagcgctcctgctgacgttattgatttttatcggtgaagcggttcgcgacgcttttgacccaagcaaggcggtgtag

SEQ ID NO: 252715 - DNA, 1590 bp, Klebsiella pneumoniae
atgacgcaacctctgttagatatcgacaacctttccatcgcctttcgccagcagggggaaaccaccaccgtggtcagcgagctgtcgctccgcattgcggtcggtgaaaccctggcgctggtgggcgaatccggctccggtaagagcgtttccgcgctgtcgatactgcggctgctgccctcgccgccggtcagctaccccgcaggggatatccgctttcacggccagtcgctgctacacgccgatgaacatacgctgcgcggcgtgcgcggcaaccgcatcgcgatgatttttcaggagccgatggtttcactcaatccgctgcataccctcgaaaaacagctctacgaagtgctctctttgcatcgcgggatgcgtaaagaagcggcgcgcggagagatcctcgactgtctggatcgcgttgggatccgcaatgcgccgcggcgtctggccgactacccgcaccagctctccggcggcgaacgccagcgggtaatgatcgccatggcgctgttgactcgtccggagctgctcatcgccgacgaacccacgaccgcgctggatgtgtcggtacaggcgcaaatcctcgcgctgctgcgcgaactcaagcaagagttaaatatggggctgctgtttatcacccataacctgagcatcgttcgtcagcttgccgatcgcgtcgcggtgatgcagaacggccgctgcgtggagcaaaacggctgccgggcactattctccgctgccgaacacccttacacccgccgcctgctggacagcgagccgtcgggcgatcccgtgcccctcgcgccggatgcgccagaattactgcgggcggaaaacttaagtatcgcctttccgatccgcaaagggcttctgcggcgggtggtcgatcataatcgcgtggttaacgccctcagctttcaattgcgcgcgggagaaacgctgggtctggtcggcgaatccggatcgggcaagagtactacagggctggcgctgctgcgcctgattcattctgaaggcgcaatcgtctttggcggcgagacgcttcaggggcgcagccgtcggcagatgctgccgctgcgtcgacgcatgcaggtagtctttcaggatcccaactcatcgctaaacccacggcttaacgttctgcaaattattgaagaaggattgcgcgtccatcagccaacgctcacgccggccgagcgagagcaggcggtgattcaggcgatgcaggaggtcggtctcgatccgcaatcccggcatcgctaccctgccgctttctccggcggacagcgccagcgcatcgctatcgccagggcgctggtcgtcaaaccgcagctaatcgtgctggatgagcccacctcttcgctggataaaaccgtgcaggcgcaaattctggcgctgctgaaggcgctacagcaaaagcatcagctggcctatattttcatcagccatgatttgcgcgtcgtgcgtgcgctttgtcatcaggtaatggtgctgcggcagggagaggtcgtcgagcagggtgagtgcgaacgcgtgtttaccgctccgcaacaggagtatacccgtcagctgctggcgttaagctga

SEQ ID NO: 252716 - DNA, 345 bp, Klebsiella pneumoniae
gtgaatacactgcaactctctatcgtacaccgtctgccgcagagctatcgctggctggccggttttgcaggttcaagagttgaaccgattccgcaaaacggcgctcagagcgaaaatagccttgtggcgttgaaattacttagccccgatggcgataaggcctggccggttatgcataaactcagccaggcgctgagcgacatcgaagtcgacagttccgttgttgaatgcgagggcgaaccgtgcctgtttgttaatcgtcaggacgaattcgcggcaacctgccggctgaaaaatttcggcgtggcgattgcagaaccgttctccggcaacaacccattctga

SEQ ID NO: 252717 - DNA, 1197 bp, Klebsiella pneumoniae
gtgacggcaaagcagaattcttcattagggattgtgtttattcttggcctgctggccatgttaatgccgctgtcgattgatatgtatcttccggcgctgccggtgattgcggcccagtttaatgtgccggacggcagcgcgcagatgacgctcagtacctatattctgggctttgcgctgggccagcttttatatgggccgatggcggatagtcttggccgtaaaccggtgatactaggcgggacgctcatttttgccgcggcggcggtggcctgcgcgctgtcgcagactatcgatatgctgattaccatgcgctttttccacggcctggcagccgcagcggcaagcgtggtgattaacgccctgatgcgcgatatctatcccaaggaagagttctcgcggatgatgtcgttcgtcatgctggtcaccaccgttgcgccgctggtggcgccgatggtcggcggagcggtgctggtatggtttagctggcatgcgatcttctggatcctcgcgctggcggccctgttagcgtcggcgatgatcgcatttttcattagcgaaaccctgccgccggaacggcgacagaaatttcatattcgcactacgcttggcaacttcgccaccctgtttcgccataagcgcgtgctgagttatatgctggcaagcggatttagctttgccgggatgttctcgtttctgagcgctggcccgtttgtctatatcaatatcaaccacgtttcaccgcagcactttggctactattttgcgctgaacgtggttttcctgtttgtcatgactatgatcaacagccggtttgtgcggcgggttggggcgctgaatatgttccgcgcggggctgtggatccagtttgcgatggcggtatggatggtggtgtgcgcgctgtttgacgtcggcttctgggcgctggtgtttggcgtggcggctttcatcggctgcgtttcgatggtctcctccaacgcgatggcggttattctcgatgagtttccgcatatggccgggacggcctcctcgctggctgggacgttccgctttgggattggcgctattgtcggcgcgctgctgtcgatggcgacctttaccacggcctggccaatgctgatttccatcgccttctgcgccagcagctctattctgttctacctctatgccagtcggcggcgaaaagccgcacgataa

SEQ ID NO: 252718 - DNA, 720 bp, Klebsiella pneumoniae
atgcgacttgataagtttatcgctcagcaacttggcgttagtcgggctattgccgggcgtgaaatccgcggcagccgcgttaccgtggacggcgaaattgtaaaagactcctccttcaagcttcagccggagcatgacgtcgagtatgacggcaatacgctggttcagcagaacggcccgcgctactttatgctcaacaagccgcagggttacgtttgttctaccgacgatccggatcatccgacggtactctatttcctcgatgagccggtggcgcacaagctgcatgctgccggtcgtctggatatcgacaccaccggtctggtgctgatgaccgacgatggtcagtggtcgcaccgcattacgtctccgcgccaccattgcgaaaaaacctatctggtgacgctggaaaatccggttgatgactccaccgccgggcagtttgctaaaggcgttcagctgcataatgagaaagagctgaccaggcctgcggtgctggaagtggtgacaccaaccgaagtccgcctgaccattagcgaagggcgttaccatcaggttaagcggatgtttgccgccgtggggaatcatgtggttggcctgcatcgcgaacgcattggcgacattgcgctggatgcttcgctggcgccgggtgaatatcgtccgctgacggcagaagaagtcgccagcgtcggcggccaacatgcgcggagtaaaacgtga

SEQ ID NO: 252719 - DNA, 1758 bp, Klebsiella pneumoniae
atgacatttacattacgtccctaccaaaaagaggcggtcgacgccacgctcgcctggtttcgccgccatcatgaacctgccgcaattgtcctgccaacaggcgcaggtaaaagcctggtcattgctgaactcgcacgcctggcgcgcggtcgcgtgctggtgctggcgcacgtaaaagagctggtggcgcagaaccacgccaagtattgcgcgctcggtctggaagcggatattttcgccgcgggccttaaacggaaagagagccacggtaaagtggtctttggcagcgtgcagtcggtagcccgtaaccttgaccagtttcagggggagttctcgctgctgatcgtcgacgagtgtcaccgcatcggcgacgataatgacagccagtatcagcagattatcagccaccttcagcaggtcaatccgcatctgcgcctgctggggctgaccgcaacgccgtttcgcctgggtaaaggttggatttatcagtttcactatcacggcatggtgcgcggtgatgaaaaagcgctgtttcgcgactgcatttatgaactgccgctgcgctatatgattaagaatggctacctgacgccgccggagcggctggacatgccggtggttcaatacgacttcagccgtttacaggcgcaaagtaacggcctgttcagcgaagccgatctgaatcacgagctgaaaaagcagcagcgcgtcacgccgcatatcgtcagccaaatcgttgaattcgccgaaacgcgcaaaggggtgatgattttcgccgccaccgttgaacacgcccgtgaagtaaccgggttgcttccgcagggcgaggcggctcttatcaccggtgaaacgccggggccggagcgcgatcgcatcatcgaagcgtttaaagcgcagcagtaccgctatctggttaacgtcgcggtgttgacgaccggctttgatgcgccgcatgtcgatctgatcgccatcctgcgcccgaccgagtcggtgagcctttaccaacagatcgtcggccgtggcctgcgcctggcgccgggtaaaactgactgcctgattctcgattacgccggcaatccgcacgacctgtatgcccctgaagtgggaacgccgaaaggaaaaagcgacaacgttccggtccaggttttttgtccagcatgcggtttcgccaataccttctggggaaaaaccaccgctgacggcacgctgattgaacactttggccgccgctgccagggctggtttgaggatgacgaaggccatcgtgaacagtgcgattttcgttttcgctttaaaaactgcccgcagtgtaacgcggaaaacgatattgccgcccgccgctgccgcgagtgcgataccattctggtcgaccccgatgacatgctgaaagccgcgctgaagctcaaagatgcgctggtgctgcgctgtagcggtatggttcttcagcacggtgcggatgacaaaggcgcctggttaaaaatcacctattacgatgaagatggcgcggatgttagtgagcgcttccgcctgcatacgcccgcccagcgtaccgcctttgagcagctctttatccgaccgcatacccgaacgccgggcgtgccgctgcgctggataacgcctgccgatatcctcgcccagcaggcgcttctgcgccacccggactttgtcgttgcccgcatgaaggggcaatactggcaggtccgggagaaagtgtttgattatcaggggcgattccgccgggccaacgaactgcgctaa

SEQ ID NO: 252720 - DNA, 285 bp, Klebsiella pneumoniae
atgtttactatcaacgcagaagtacgtaaagagcagggtaagggtgcgagccgccgcctgcgtgcagctaacaaattcccggccatcatctatggcggcgaagctgcgccagtagcaatcgaactggatcacgacaaagtgtggaacatgcagaccaatgcagagttctacaacgaagttctgaccatcgttgttgatggcaaagaagagaaagttaaagctcaggctgttcagcgtcacccgttcaagccgaagctgtcccacatcgacttcgttcgcgcttaa

SEQ ID NO: 252721 - DNA, 594 bp, Klebsiella pneumoniae
atgcacgctgacgcaccgtgcgttcgccatatccgcgaaacgctattatcggacaactggtacacgctcaagaaatatacctttgaactactgcgacgtgacgggcgctggcaggagcagagtcgggaagcttacgatcgcggcaacggcgcggtgatcctgctctacaatcgtgaaaagcaaacggtagtgctggtccgtcagtttcgctttccggtatggattaacggtcatgatgggtttttgatcgaagccgccgcaggactgctggataacgcctctccggaagaacgcatcgttgccgaggccgaagaagagaccggttttcgcgtcacccggatcgagccggtatttaccgcttatatgagtcccggttcggtgacggagaagctttactttttcatcgctgaatactctgccgacgatcggcgcagcgacggtggcggcctggcgacggagggagaagatatcgaagtgctggagtggccgctggcaaaagcgctgcaggctattcgcgaaggagaaatcgtcgatgcgaaaacgattatgctattgcagcatctcgcgctgaatgcctcaacgctactcgcctaa

SEQ ID NO: 252722 - DNA, 759 bp, Klebsiella pneumoniae
atgcttgccagccagagaaaacagcacattttgcagatcctcgctgaggaaaaacaggtgatgtcaggcgatcttagccagcgcttcagcgtctcagaagactctattcgccgggatctgcgggagctggcagcggaaggcaaactgcagcgcgtgcacggcggggcgctgccggtatccgaagccatcgcgcctattgaaacaagaaagaacgtgcagatggcctccaagctaactattgcccagcgcgcggttgagcttattcagcccggtcaggtggtgattatcgacggaggcacgactaccggagagatggtgcgcctgctgcccgataacctcgcgtgtaccgtggtcacccatagcccgggaattgccgtcgcgctggtggagaaaccgcttatcgaggtgattttgatcggcggccggttgtttaagcattcggtggtcagcgtcggggccgcggcccttgaaagcatttcccgcatcaatgccgatctgtttttcatgggcgttaccggcgtgcacccgcgggcgggattaaccaccggtgattatgaagaagcgggcatcaagcgcgcgtttgcggcgcgggcagccgaaacggtggtgatggcgtcgcaagaaaagctgaactccgcttcggcctttgctatcggcgagctggggggcgtcagtacgctgatcgtggatacgactctcgacgaggcgctgcgacagcagctaaccctgaatggggtggaaatcctctacgcgctgtag

SEQ ID NO: 252723 - DNA, 150 bp, Klebsiella pneumoniae
atgtccgctgagtgccataagcggacattcgcctcaggtagagaaaccatcaaattcgaagttagcctgtttgctcgttatggcaattatgcggattataagcaagtttttttgctttatcgcgttagagctattgcaaaaatttcttag

SEQ ID NO: 252724 - DNA, 1344 bp, Klebsiella pneumoniae
atggagtttccagcaagtctcaaaggaagatatgcatatcattttacctgtctatacaaccttgaatcgataatcgagaatggactattatgtacaaacttaaaaaatgaacaggatataactcatcataatgttgccgagcatgggatacaaggaagaagaagcactatgcaggtaccgtgttctaatgggaactttgttcacgactatgtccctttttacttctcaaaaagaaattccatgcaacttgcggtaataaataaaaaaaatgtagaccaagcgtttcttatttactttgcaatccccttggaaattattgttaaaaatgctggcactgtattttcagatgcttcagcaaacacagatgtgccgccaaaattttataattctaaatcactaaatatgcttaactctttaaactgggatgctattgatagtaagaaatggtcgtgcccgtcagagatgtatcgtcatcagaagatggcagagttacttgttcccggtagcattaatatatcagaactggatcacataatagtttggaatggatgggttaaggataaagtagtggaggtgtttaaaaataaaggaatacaaccacctaaaattaagtatgatgaggaacactattacataaatttttacgatggcaaaagaaaatcaattgtgactgggccatactttttaaaaaaggccatggatgaaacaattgaaaaaatatataaaactgataataaattcaataagtataaaagtctacgtgatgcactagatgcaattgaaaaaaaattctcatcaataaaagaacttgatgatatagacgggttaaaggccagctattggccacacactgatgatgttggcacgcatagcagaaaagttgcaggtgctctcgaaaagttcaatgaatataatgaactgtctgatgctgataaagaaattgttcttatttccgcatacctacatgatataggtaaagggccgaagtctcgctgggggcaagatggaatgactaaagctgataatgaccatgctgcaaaatccttgcctatgttagagcgaatttttactgaagatattggcggactaagtgaggagtcaataagaaagatagtaacacttgtaacttatgacgacttaattggtgacatcgttgcgaaggaccgtgatgaaaagcaattgattgatataatcaaaaacgaaaatgacttgaaaatgctcattgctctatcaaaagctgacatgaatgcaatcaatcctgaatgggtaacaacccacaataaatcaatagcagatttagaatcgagagtactgtgtgtgattaggagtaatagcatatgttag

SEQ ID NO: 252725 - DNA, 1131 bp, Klebsiella pneumoniae
atgttagagtttgttaaaggaaacttctttgattttgatgccgatattagagttaacacagttaattgtgtaggtgtcatgggggcgggagtcgctctagccttcaaaaacaaatatcctgagatgttcaaagagtatgtccgtcaatgcaaagctaatgaaatattgcctggaaaacctagcgtatggaaaaaagaagacatgttttcaaaaggaattgaaattataaacttccctaccaaagatcattggcgaaacccatctgagtacgaatacattgaaagtggtctcatctggctttctgaatatgtaaagaacaaagaaggtttgacgataacactaccagctctcggctgtgggcatggcggattggattggaaaaaagttaaaaagctaattattcattaccttgcggaaacgaaaagcaatatcttagtttttgagccagaatcttcaaaaaatgctgaaatagagtcattcattacatctaacaaacttgcagatcttgaaaatctaggtgtaagtgtaataaggaaaaatgaaaaatcttacccgccagggttgattcgatatacagaaaaagacctctggtttttcggtagaataattacagagttcgatatttctttgatctcaagtaccaaacctaatgagcaagaaaaaaaggtcgtcctaaaattaatagaacactgtaaaataaaccgccttagtattttgtttggcggatcttcttttgataagaaaatggccttgcactctattagacaaggagttgaaactggaatttttttgccgagcggaatttcatactcagcagaaaaaaatcgggaaaaaggtgctacggataacttatctgttctttcaataggtgatccttttaaatcatttgatagaaaagcctacatgccgtctgttatggggcgaatgtttatctgtaagtcagttattttcaccactgaaaggttgaaatggctagaaaaacagaggagtaaaattataagtggtgggataaaatcgtatttcatgaaatacgaaaaccttcaagaggaggattgttttgctgctatcaatataaacgcgaaaccaatcaaaccatttgatggtgagcaaatttcagagatgaacctctga

SEQ ID NO: 252726 - DNA, 333 bp, Klebsiella pneumoniae
atgttctggctggtgcatattgatgcttcgtcaacttcttcaaatggctggaatttccatatttcactcgattttaaaagccgtcttgtgaagcagggtattcatagcttcggaataatgcagtggtttggtcgcagcacgcagtttatcgagaaatggaagagatccgacgcctatgttttcttcgactttaaagagcacattttttttctagccaataaaagattggcggaaaaacttaaccatggcattcctctaatgaagggagaattcgccctttgcttgcttactcgtgaagaatttatcgatgcagtgaaacgcccccgctcctaa

SEQ ID NO: 252727 - DNA, 204 bp, Klebsiella pneumoniae
atgctgctgtgcagctgcgccagcgcgccatcgatgctgccaactccatccccggatttgatgagcccgccgtgcaaagcaagtgacgccgggaaggatagcgatgaagatttacagtctgacatagaaaccgctcagtgcctacgccagctccgtttggataagtatcgctggcaggtgtactatcgggcggtgagtaagtaa

SEQ ID NO: 252728 - DNA, 723 bp, Klebsiella pneumoniae
atgtcctggggtaacgatggctggccgcgtatcggtgagcagattggcaactgcggcgtcggacagccggttttacgttggccgcgtcctaaagggttaacgacttcaccggcattggcgccgcaaaccagcgactattttgcgcaaggccaaccgggaatacagtggcagtggcaggctaaccccagccctgagtggctgctgccagcgaaaggcgaacttcgattacgctgcgtcccattatccgaagtcgatggacagagagcgttatactgggcgccgcagctgttgctgcagaaattcccggcgctaacttttagcgcgaaaacaagcgtaacgttatatgccgctcaggacggtgatgccggaggcctgatcgtatacggcgaacgctacgccgctttgctggtggagtttgggcaagggggttaccggctcgtgtggcgacacggttggatgagcgatgcgggcgtggtgcgcgaaactcgtcaggttcttgctgagcttaagtgcggcaagtgtcagctgcaggtggccgtaggcgaaggcggactgtgtcaattttcctggcgagccgaggaggagtggcggaaggttcctctttgttttgctgccgggaagggaaaatgggtcggcgcgaaatttggcctgctggctgcttcaatggttggcctacaaagcgagggctactccgctttgcaggactttgaggtcatgctttaa

SEQ ID NO: 252729 - DNA, 1107 bp, Klebsiella pneumoniae
atgaacgcggtacgtgcagtggtgttgtcgatatgcatgctggcggcggcgcaggcgagcgccgcctgccggtggccggcctgggagcagtttaaacaagagtacgtcagcgccgaagggcgggttatcgaccccagcgattcacgaaaaatcaccacctcggaaggacaaagctacgggctgttctttgccctggcggccaacgaccgcgaaggcttccgcaagctgttcgagtggacgcaaaacaaccttgccgagggcgatctgcgcgcgcatctgccgggatggctgtgggggaaaaagagcgatgacgaatggacggtgctcgataacaactcagcctcggattccgacctgtggatagcctgggcgctgctggaggccggacgattgtgggaaacgccccagtatacggaagtcggcaaagcgctgctggcgcgtattgctgatgaagaagtggctaccgtaccggggctggggccgatgattttgccggggagagtcggcttcgtcgatgacggcggctggcgttttaatcccagctatctgccgccgcagctggcgacctactttgcggcgtttggcgctccctggccaaagatacgcgacggcaatctgcgcctgctgctggagaccgcgccgaaaggcttttcgcctgactgggtccgttacgaaaaaggcaaaggctggcagttgaaggcggagaaacccattatcggcagctatgacgccattcgcgtctatctgtgggccggtatgctcgatgacggcgataagcaaaaagcccgcctgctgacgcgctttaaaccgatggcggcccggacggtagagcagggtgtgccgccggaaaaaaccaacgttgcgaccagtaaaaccaccggcaacggtccggtgggcttctccgcggcgctactgcctttcttgcagaatgaagatgcccgggccattcagcggcagcgcgtcgccgaccactatcccggcgcggatgcttactacagcacggtcctgacccttttcggccagggatgggatcaacaccgttttcgcttcactgccggtggcgaattacggcctgactggaaccaggaatgcacaagttctcattaa

SEQ ID NO: 252730 - DNA, 3486 bp, Klebsiella pneumoniae
atgcacaagttctcattaagcttattcacgctctccctaagcgtcgcgctgatgccgctggctcacgccgtgaacacgcctgttcaggagcatctgctggagcaggtgcgcctcggcgaggccagcaaacgagaggatttggtgcgtcagtcgctctaccgcctggaattgatcgatccgaacaatccggacgttgtcgccgcgcgagtgcgctatcttctccgtcagggcgatacggccggggcgcagaagcagctggcgcgtctggcgaagctggcgccggaatcggcggagctgaaagcttcgcgcgacgagatgaaaagcagcaccggcgatggccgccaagagctgcagcaggcgcgcctgctgggcgtggccgggaaagttgacgaggccatcgccgcttacgagaagttgtttaacggcgtcccggatgatgatgaggcggtgattgagtactggacgctggtggcgcgcctgcccgcccgacataacgaaggcatcaatcagctgaaaaaactcaacgcccgcttaccgggcaacgtccagctgcaaacggcgctggcgaaacagatgtttggcgataataagccggaagagggatttgcgtatcttgaacagatgtcgcgctcggcggcgggtcgtggcatcgcagcggacatctggtttaacgaagtgaaaagcatgccggtgagccgggccagcgtacaggcgctacagcggtttatcatgcaattccccaccggttccacctcggcaaatgcccgcgttctgctcgatcagcagcagacccagctcaaagatccgacgttccgcgatcgcgcggaggggctggcggcggtgaaggccgggaaaggttcggtggccgtggccgatttacaacaggctgtccgggcggatgccaaagacagcgacgcggttggcgcattggggcaggcgtactcccagcgcggcgatcgggcgcgggcggttgctcagttgagtaaagctatcaaaatggccccggatagcccgagccgcgataagtgggacagcctgctcaagactaaccgctactggctgctgatcaagcagggcgatagcgctctgaaaatcggccagctggcgcaggcgcaaaatgcttacgctcaggcgcagcggatagacactaccgatagctatgcggtgctggggttgggtgacgtggccgcggcgcgtaaagaaaacgccgcggcggagcgttactaccagcgcgcgctgcgaatggatcgcggcaatagcctggcggtacgcggtctggcgaatctgtatcgcggcgaatcgccggaaaaagccggcgcgtatatcgccagcctgtctccggcccagcggcgcagcattgatgatattgaacgtagcctgacgaacgaacgcctggagaaacaggccgaagcgctggagagccaggggaactgggcgcaggcggcggaagtgcagcgccgtcggctggcgctggatccggatagcgtgtggataacctaccgcctggcgcaggatctggtcagcgcgggcagccgcagcgaggctgacgcgctgatgcgcgcgatggtcaaccgccagcctggcgatgctgatcgggtttacgcctacggcctctatttatccggtaacaatcaggatgagatggcgctggcgcagataaacaccctgcctcaagggcagtggacggacaatattcgcgagctggaggcgcgtctgcaaagcgacaggatcttgcggcaggcaaaccagctgcgcgatagcggccaggaggcccaggctatcgcgctgattaaacagcaaccgacgtcagtgcgctacgcgctcacgctggcggactgggcgcagcagcgcagcgacagccagacggcgatagcggaatatcagcgggtgcttggccagcagccggataacggcgatgcgcgtctgggactcgcggaagtgtatcttgccgacggcgataagaatgctgcccgcgctcaggtggcgcagctcaagggcgaagacatcgattctatcaatatgcagcggcgtattgccctcgcgcaggccggtctgggcgatcgcgttcaggcgcagcaaaccttcgcccgcatcgtgccccaggcaaaagcgcagccgccgtcgatggaaagcgcgctggtgctacgcgacgccgcgcgtttccaggcgcagaacggcgagccgcagcaggcgctggaaggttataaggacgccatggtggcctccggggttactcgcgagcgcccgcaggataacgacacctttacgcgcttaacgcgtaacgacagcagcgatgactggctcaagcgcgggatccgcagcgatgccgccgatctttatcgccagcaggatcttaacgtcaccctcgagcatgattactggggctccagcggtaccggcggctattccgatctgaaagcgcataccaccatgttgcacgtagatgccccgctggccgacgggcgaatgttcttccgtaccgatctggttaatatggatgccgggagtttttctaccaatagcgacggcagctatgcgccgagctggggtacttgcggcgaaatcgcctgtaccggcggcagcaaacatcagagcgacagcggcgccagcgtagcggtgggctggcagaacgagacctggagcggagatatcggcaccacgccgatgggctttaacgtcgttgatgtggtgggcggcctgagctacagcagcgacgttggcccgctgggctacaccgttaatcttcatcggcgacccatctccagctcgctgttggccttcggcgggcagaaagataaccctaacggcggccatactggcaagacctggggcggggtgcgcgccgacggcggcggtgtgagtctgagctacgataaaggcgaggccaacggggtctggtcttcgttgggcgtcgaccagctgaccgggaaaaacgttgccgacaactggcgcgtgcgctggatgaccggctactactataaagcgatcaacgaagataaccgccgggtcaccgtcggcctgaacaatatgctctggcactacgataaagacctgagcggctataccctgggtcaggggggatattacagtccgcaggaatatgtctccttctcggtacctgtgacctggcgtcagcggacggagaactggtcatgggagctggggggctcggtgtcgtggtcccactcgcggaccaaaaccgaggcgcgctatccgctgctcaatttgatcccctctcagtatcgtcatgatgccagccagcttacggaagaaggcagcagcagctctggcgtcggctataccgcgcgggcgctgattgaacgacgggtaaccagcaactggtttgtcggggcggcggtggatattcagcaggcgaaggattataccccgagccatgcgctgctgtacgtccgctattcggcttccggctggcagggcgatatggatatgccgccgcagccgctggtcccttacgccgactggtag

SEQ ID NO: 252731 - DNA, 1950 bp, Klebsiella pneumoniae
atggcgtttgtactcgtcttctgttctattttgctgttccatttcgttcagcagagtcgctataccacggccacgcagttagagagcattgcgcgttccgtccgcgaaccgctgtcagcggctattctgaaagccgatatcccggaggcggaagctattctgagccgcattcagcctgctggcatcgtcagccgggcggatgttgtcctgcctaatcagttccaggcgctgcggatgcgctttatccccgagcgtccggtgccggtaaccatcacccgcatgtttgaactgccggtacagatttcgctgcctatctactcccttgagcggcccgctaacccacagccgctggcctatctggtgctgcaagccgattcatatcgcatgtataaattcgtgatgagcgccctggcaacattagtgactgcttacttacttttggtgctgatgctgacggtagccatcacctggtgcatcaaccgtctgatggtacgaccgctgcgtaaaatcgcctgcgagctgaatgatgtcccgcagcaggagcgtcttggccatcagctttctataccgcgcttacatcatgacgatgaaatcggcatgctggtgcgcagctataaccgtaaccagcagactctgctgcgcctgcacgatgaactctctttgcaatcgacccgtttcccggtatccgagctgccaaataaagcctttttgatggcgatgctggagcaaaccgtcgcccgtgggcaggcgtctgcgctgctgattgtcgcctgcgaaacgctgcaggataccgctggcgtactcaaagagacgcagcgcgaaatgctgctgttgacgctcgttgaaaagctgcgggcggttatcccgacgcagatggtcctggcccaggtgagcggctacgactttgcgattctggcccacggaattaccgagccctggcaggcggtgacgttaagtaagcaagtacttactgtcttaagcgaacgtttacccctgcacggcatccagctgcgcccctgcgccagcgtcggcattgcgatgtttaacggcgaaattaacggcgaacagctctatcgccgggcgttttccgccgccgttaccgcgcggcgtaaaggtaaaaatcagattgagttcttcgatccggaacagatggaaaaagcgcagcgccgcctgatggaagagcacgatattttaacggcgcttgataatcagcagtttgccatctggctgcagccgcaggtggatactatcagcggcgaggtctgcggtgcagaagcgctgctgcgtcagcgtcaggctgacgggagctggtcgctgcctggcgatctgattgagcgtatcgaagcctgcgggctgatcgtcccggtcggctactgggtgatggaagaggcctgccgacagcttgccgcctggcaaaatcaggggatcatgttgccgctatcggtcaacgtgtcgcagctacagctgctgcatcacgatcgcggcgcggagatgctggcgctgctcgcgcgctatcgtatcgcgccgggcacgctgatcctcgaagtcaccgaaagccgtcgaatagacgacccgcaggccatgatttccctgctgcgtccgctgcgtgaagcgggcgtgcggatcgcgctggacgactttggtatgggctacgccgggctgcgtcaactgcagcatattaaatcgctgccggtggatatcctgaaaatcgataaagtctttatcgatatgctacctgatgacatcagcatggtgcccgcgattatccagctggcgcgggggctgaatctgcacatcgtcgcggagggcgtcgaaaccgataagcagtatcgctggctgcaggaggcgggtgtcgagacggtgcaaggttatctttttggctgcgccatgccgcctgaggcttttaaggcccgctttttaccggctgttgttgaggatgcaagtttgtaa

SEQ ID NO: 252732 - DNA, 1287 bp, Klebsiella pneumoniae
atgaaaatctctttctttaaaagcctctatgtccaggttttatcggccatagcgatcggtattctgctgggccatttttacccggagctgggtgcgcagatgaaacccctcggcgatgccttcgttaagctaattaaaatgattattgccccggttatcttctgtaccgttgtgacggggattgccgggatggagagcatgaaggccgtcggccgcaccggggcggtggcgctgctctattttgaagtcgtgagcaccatcgcgctgatcatcggtctgatcattgttaacgtggtgcagcccggcgcgggtatgaacgttgacccggccacccttgatgcgaaggccgtggcggtttatgccgaacaggcgaaagatcagggtatcgtggcgttcctgctcgatattatccccggcagcgtgattggcgcgttcgcgagtggcaacattctgcaggtgctgatgtttgccgtgctgttcggttttgcgctgcatcgtctgggcagcaaaggccagctgatttttaacgttatcgaaagcttctcgcaggttatattcggcatcatcaatatgatcatgcgcctggcgccgattggcgcattcggggccatggcctttaccatcgggaaatacggcgtcggtacgctggtgcagcttggtcagctgatcgtctgcttctacatcacctgtatcctgtttgtcgtggtggtactgggctcgatcgccaaagccaccggcttcagcatctttaagttcatccgctatatccgcgaagagctgctgatcgtcctgggaacctcttcgtccgagtcggcgctgccgcggatgcttgataagatggagaagctgggctgccgtaaatcggtggtggggctggtgatcccgacggggtactcctttaacctcgatggcacctcaatatacctgacgatggcggcggtgtttatcgcccaggcgacaaacagccatatggatattttccatcagattaccctgctggtggtgctgctgctctcctcgaaaggcgcggcgggcgtgacgggcagcggctttatcgtcctggcggcgaccatctccgccgtcggtcatttgccggtcgccggcctggcgttaatcctcggcattgaccgctttatgtccgaggcgcgcgcgctgaccaacctggtgggtaacggcgtagcgactattgtggtcgcgaaatgggttaaagagctggactcacagcagctcgatgatgtgctgaataaccgtacgacggtagacaaatcgcacgaattatcctcataa

SEQ ID NO: 252733 - DNA, 1506 bp, Klebsiella pneumoniae
atgcagggcacaaaaattcgactcttaaccggtggtttgctgatgttggcgacggtcggttatgtgcaggcagaagcgctccagccggacccggcctggcaacagggcacactggcaaacgggtttcagtggcaggttttagccaccccgcagcgtcccagcgatcgtatcgaagttcgcctgtccgtgaatattggctcgctgagcgaaagcactcagcagagcggctttagccactttatcccgcgcctcgcgctgacgcaaaacggtggcctcccgaccatgcaggcccgttcgctatggcagcagagtattgacccgaaacgtcctctgccgcccgccatcgtctcttatgactacagtttgtttaacctgagcttaccgaataatcgtaacgacctgctgaaagaggcgctgagctggctggcgagcgccagcggtaaaatgtcgatcactccggaagcggtcaaccatgcgctgcagggcgaagatatggtggtcacctggcctgcggatactaaagagggctggtggcgttatcggctgaaaggctccaccatgctggggcatgatccggcggcgccgctgaagcagccggtggatattgctcagcttaaagactattaccacaagtggtacacgccggatgccatgaccctgattgtggtcggcaacgtcgatagccgcagcgtcgcggagcaaattaacaaaactttcggcggcctgaagggcaagcgcgaaacgccggtggcggttcctaccctgtcgccgctgccgacgacgccggtcagcatcatgaccgatgcagtgcgccaggataagctgtcgctgatgtgggatgcgccgtggcagccgattcgtgactcggtcgcgctgcagcgctactggcgagatgacctcgccagagaagcgctgttctggcacgttcagcagaatctgagcaaaagtaacatcaaggatatcggcctgggctttgactgccgcgtgctttaccaacgcgcccagtgcgcgatcaatatcgaatcgccgggcgagcggctgaacgccaacttaacgaccgtggcgcgcgagctggcgaaagtgcgcgataacggtctgccgcaggatgagtttgatgccctgattgcgcagaaaaaccttgaactgcagaagctgtttgccacctatgcccgtacggatacctatcttctgattagccagcggatgcgttcgttgcaaaatcaggtggtggatatcgctcccgagcagtatcagaagctgcgtcaggagttcctcaattcgctgacggttgacatgctgaatcagtacctgcgtcagcagctttcgcaggatatggcgctggtgttgcagcagccgcagggcgaaccggagtacaacatgaaggacctgcaggcgacgtgggaaaagctgatggcgccagcgccagcggccgccgcggcgtcgaacagcgccggtgatgttgcgcaaggacgtagcgaagcgacggatatcccgcctgcgcagtaa

SEQ ID NO: 252734 - DNA, 930 bp, Klebsiella pneumoniae
atgtctaagaaaattgccgtcattggcgaatgcatgattgagctgtcagagaaaggcgcggcggtaaatcgcggctttggcggcgacaccttaaacacttccgtctacattgcccgccagaccgacgccagcgagctgggcgtacactatgttaccgccctgggcacggacacctttagccagcagatgctcgaatcctggcagagtgagaatgtccagacggaccttattcagcgcatggccgaccgtttaccgggcctctactacatcgaaactgacgataccggcgagcgtacgttttactactggcgtaatgaagccgcagcgaagttctggctggagagcgagcagtctgcggccatctgcgaagagctggcgacctatgattatctttacctcagcggcatcagcctggcgatcctgagcccgacaagccgcgagaagctgctgaccctgctgcgggaatgccgggcaaacggcggtaaagttatctttgataacaactatcgtccgcgcctgtggagcagtaaagaagagacgcagcaggtttatcagcagatgctggcctgcaccgacattgcgttcctgacccttgatgacgaagacgcgctgtggggcgagaagccggtggcagaggtgattgcccgcactcacgccgctggcgttgaagaagtggtggtgaagcgcggcgccgactcctgcctggtggcgattgccggacagccgcagctggaagtcccggccgttaagctggcaaaagagaaagtcgttgataccacggcagcgggcgattcattcagcgccggctatctggccgtgcgcctgaccggcggcgatgccgaatcggcggcaaaacgcggccacctgaccgccagcacggtgattcagtatcgcggtgcgattatcccgcgcgaggcgatgccgcagtaa

SEQ ID NO: 252735 - DNA, 1323 bp, Klebsiella pneumoniae
atgcaagccacagccacaacactcgacaatgctcaggaaaccgttccggttaactcacgcaacaaggtcgtcgtcgcttcgctcattggcaccgccatcgagttcttcgacttctatatctatgccaccgcggcggtcattgtatttccgcatattttcttcccgcagggcgatcccgccgccgcgacactacaatcgctggcgaccttcgccatcgcgtttattgcccgccctatcggttctgcggtattcggccatttcggcgaccgcgtaggccgtaaagcgaccctcgtggcctcgctgctgacgatggggatctcaaccgtagtcatcggcctgctgcccggctatgaaaccattggcattatggcaccggtgctgctggcgctggcccgctttggccaggggctgggccttggcggcgaatggggcggcgcggcgctgctggcgacggaaaacgccccgccgcgcaagcgcgcgctgtatggctcattcccacagctgggcgcgcctatcggcttcttcttcgcgaacggcaccttcctgctgctctcctggctgctgaccgaccagcagtttatggaatggggctggcgtatgccgtttatcttctccgccgtactggtcattatcggcctgtacgtccgcgtttcgctgcacgagtcgccggtgttcgcaaaggtagccgccgcgaagaaacaggtcaaaatcccgctgggcaccctgctgaccaaacacgtgcgcgtcaccgttctcggcacctttatcatgctggcgacctacacgctgttttacatcatgaccgtctactccatgaccttcagtaccgccgccgcgccgattggtctcgccttgccgcgcaacgaagtgctgtggatgctgatgatggcggtcattggttttggcgtgatggtgccggtggcgggcctgctggcggatgcctttggccgtcgtaagagcatggtcgtgatcacgactctcatcatcctcttcgcgctgtttgcctttaaaccgctgctcggctccggcaatccgctgctggtctttgccttcctgctgattggcctgagcctgatggggctgacctttggccctatgggcgcgctgctgccggagctattcccgaccgaagttcgctacaccggcgcctcgttctcctacaacgtctcgtcgatcctcggggcatccgtagcgccgtatatcgccgcatggctgcagggcaactacggtctgcccgcggttgggctctacctcgccgccatggcggcgctgacgatgatcgcgctgctgctgactcacgaaacgcgtcatcaatcgctgtaa

SEQ ID NO: 252736 - DNA, 1032 bp, Klebsiella pneumoniae
atgacgccggaaaacgacgcccaacgaccagcccaggatccgggccagcagccggatgaaaataaaagcgccctggctgcgataaatgactccaccgtgacgaaaaaagccaaccaggcgctaaaaagcgtcaccggaacggcggaaaaagtccagcgtaaccccattattgcgcacctcatccgcgccgcagagcgtttcaacgacaggctgggcaatcagtttggtgcggcgatcacctacttctcatttttatcgatgatcccgattctgatggtctcttttgcggcagccggttttgttctggcctcgcatcctacgctgctacaggacatcttcgataaaatcctgcttaacgtcagcgacccgacgctcgcggcaacgctgaaaaataccatcaataccgccgtacagcagcgcaccaccgtcggcatcgtcggtctgctggtggcgctctattccggtattaactggatgggcaacctgcgtgaggcgattcgcgcccagtcccgcgacgtctgggagcgtacgccacaggatcaggaaaaaatttgggtgaagtactttcgcgactttatctcgctaatcggcctgctggtggcgctggtgatcaccttgtcgatcacctccatcgccgggtcggctcagcagatgattatctcggcgctctatctggactacatcgagtggctgaaaccggcgtggcggcttattggcctggccatttccatcttcgccaactatctgctctttttctggattttctggcgactcccgcgccaccgcccgcgccgtagggcgctgattcgcggcaccctgattgcggcggtcggctttgagataatcaagatcgtcatgacctggacgctaccgtcgctggtcaagtcgccgtccggggcggcattcggctcggtgctgggaatcatggccttcttctatttcttcgcccgcctgacgcttttctgcgccgcgtggattgcgaccgccgaatataaagacgaccgccggatgccgggcaaagcccacgactaa

SEQ ID NO: 252737 - DNA, 909 bp, Klebsiella pneumoniae
atggataaaattcacgcaatgcagctgttcatcagagtcgcggagctggagagtttttcccgcgctgcggatacgcttggcctgcctaaagggagcgtttcgcgccagattcaggcactggaaaaccatcttggcgttcgtctgctgcatcgcaccacccgccgggtgcagctgactcaggatggtatggtctactacgaacgcgccagagacctgctcagcaatctcgatgagctggacgggatgtttcagctcgatccctccagcattagcggacgcctgcgggtcgatatgccggtcgccgtggcgaaaaaactggttattccgcaactgccggcatttctgcagcagtatcccggcatcgaactggagctcagcagcagcgacaggttggttgacgtaatccgcgagggttttgattgcgtggtacgcgtcggtacgctgaaagattccgggctgattgcacgaccgctgggcaagctcacgcaaatcaactgcgccagtcctcaatatctcacccgctttggctacccgcagtcgctggacgatctcgccgatcatgcgctgatccactacgccagcaatctgggcgtgcgcccgctgggcttcgaagtggttagcgatggtgccgtccgctgggtcaaaaccggtggcgttctgacggttaacagcaccgaaacttatcaagcctcgtgcctggcggggctggggattattcaggtaccccgggtgggcgttcgtgaaatgctgcgcaccggggagctgatagaaattctgccccactaccgcgccgagccgctgccggtttcgctcatttatccgcaccggcgcaacctttcacgtcgggtacatctgtttatggagtggctgggcgggctcatgaaaagctatgttgatgagtccgcatga

SEQ ID NO: 252738 - DNA, 759 bp, Klebsiella pneumoniae
atgacacaacgtatcgctttggtgaccggcggcagccgcggactggggaaaaacgccgccctgaagctggcggagaagggaaccgatattattctgacctggcatagcaacccccaggcggcgcttgacgtggtagctgaaattgagaaaaaaggcgtaaaagccgcagtattaccgttaaacgtcggtgatatcaccagttttgatggttttgcacacaaggttggggaagtgcttcaacaacgctggcagcgggagacattcgactatttattaaacaatgccggtattggcctgaacgtcgcttttgccgaaaccagcgaagcgcagtttgatgaattaatgaacatccagtttaagggaccgttcttccttacccagcgtctgttaccgctattgcaggacgggggacgcatcctcaacgtttccagcggactggcgcgttttgctctgccgggttatgcggcctatgccgcgatgaaaggcgcgatggaggtactgacgcgctatcaggcgaaggagcttggggaacgcggaatttcggtcaatatcattgctcctggcgccattgaaaccgattttggcggcggcgtggtacgcgataacccgcaggtgaatcagcatatcgccgggcaaacggcgctgggaagagtggggcagccggatgatattggcgatgctatcgccgcgctactcagcgacgatctgcgctggatgaacgcccagcgcgttgaggtctctggcggaatgtttttgtaa

SEQ ID NO: 252739 - DNA, 609 bp, Klebsiella pneumoniae
atgcaggtaatcatgtttgacaggcaatcgatatttattcacggaatgaaaattggcctccagcaacacattcctgaacttgatatttttggcacctgtcaggcggatcagctctggcagaagctaacggcgaatcctgaagcactgctcattctggatggcgatatgcacagcgagttttgctgctggctactgcaggaaaagcagctccgcttcccggcgactcaggtgctgctgatcgtgtccgacgataataaaagctggctacagcgcgcgctttcctggaatgtgcgcgggattattcaacgcagggaaagcctgcaaacattcgcccaggcgatcaacagcattatgcatggcctgctctgtttgccgggcgattggctcatgacggcggaagcgcgggataataaattggttcatttaagccagcgtcagcgcgagattttacagctgctggcggcgggagattccaataaagagattagccgcgcgttaaatattagcgcgggcacggtcaaggcgcatctggagtcgctgtatcgccgactggatgtgaagaatcgaacccaggcggcgatggtgtttaatggcgtcagcgaaacttaa

SEQ ID NO: 252740 - DNA, 429 bp, Klebsiella pneumoniae
atgtcccccataacaccgtcgctaagcccgcagggcctggactttattaaacgaactcagggattagcactcgccccctatcgggacgagagcggcctgcgcgtgattggctatggccacgttctcaacgattatgaaacgttcaaccacttcacgcgcgagatcgcggagaccttgcttaccgtcgacctggtgcaatgccagcgccagcttaagcgcaacctgcgggtgaggcttaacccatcgcagtatgatgcgctggtctctttagccttcagctgcggcccggcgtctccggagcttgatattgttttaactcaccttaaccatcagcggttcgctgaggcgctgaccgcctgggaaaatattcgcagcggccacgaacagcggcgtgaagagtgcgcaagattcaaggcgacaaccgattaa

SEQ ID NO: 252741 - DNA, 549 bp, Klebsiella pneumoniae
atgccagaactgatgaccccacgtctgcgctgttccccgctgcagcttgacgactggccttttttcctcgccctccagcaggatccccaggtgatgctttacgtcgcggatcctcgcccggtcgccgacattcgtgaggcttttgattcgcggcttcccttatggtccccgggcgcggcccactggctgtgtctggtcgtgcgcgatcgcttcacccacgctccccttggcctcaccggctaccagcatctcgctggcgatagtgctgaagtgggttttctgttcgctccccacgcgcaggggaaagggtacggcagtgaatcgctgcgcgcgctgtgcgagtacgctttgactacgggcggtatccggcggctgacggcgaccgtcaccgcgggcaatctggcgtcaaaaaatctgctgctaaaggttggttttcatcaggaaggcgagctgcgtgaatgctactggctcaacggtcgctggcacaacgattggcttttcggcctgctgcgccgcgagcataaccagcctgggccatctggcgaatag

SEQ ID NO: 252742 - DNA, 1653 bp, Klebsiella pneumoniae
atgttcagccagaaattacgcaacgttgatgacgatgagctcaggatcgacaccgatccgtgctacgaagccgatccgtatgagttaaagctggatgaaatgttcgacgccgaacctgaaccggagatcattgaagggctgcccgcctcggatgccctcacccctgccgatcgttatctggagctgttcgcccacgtccagaaatcgcgaattttcgccgatagtaaaaccttcccggactgcgcgccgaagcaggatccgctggatatcttgattcactatcgtcgcatcaggcgcacccccggattcgatttacgccagtttgtggaagatcatttctggctgccggaaagccgcgccgaggactacgtctccgatcccacgcgatcccttaaggagcatattgataatctgtggccaatcctcacccgcgagccgcaggatcatattccgtggtcgtcgctgctggcgctgccgcagtcatatattgttcccggcgggcgctttagcgaaacctactactgggattcctacttcactatgctggggctggcggaaagcggccgcgaagacctgctgaaatgcatggccgataatttcgcgtggatgatcgaaatctatggccatattcctaacggcaaccgcacctactatctcagccgctcgcagccgccggtctttgccctgatggtcgaactgtttgaagaagatggcgtccgcggcgctaaacggtaccttgaccacctgcaaatggagtacagcttctggatggacggcgcggaatcgctgatccccaatcaggcgtatcgtcacgtggtgcgtatgccggacggctctttgctgaaccgctactgggacgatcgcgacacgccgcgcgatgagtcgtggcgggaagatgttgaaacggcgaagcgctccgggcgcccgccgaatgaagtttatcgcgacctgcgcgcgggggcggagtccggctgggattactccagccgctggctgcgcgatatcacccgactggcaagcatccgcactacccagtttatccccattgatctgaacgccttgctgttcaagctggagaataccatcgccaacctctccggcctgaagggcgaccgggaaaccgaggccgctttccgccagaaggccagcgaccgtcgggcggcggtgacccgctatctgtgggatgacgaaagcggttgtttccgcgattatgactggcgccgcgagcagctggcgctgttttccgccgccagcatcgtcgcgctctatgtcggtatggcgacccacgatcaggccgacaggcttgccgatgcggtacgcgcccgcctgcttacccccggcggtattatggcaaccgaatatcaaagcggtgaacagtgggataagcccaacggctgggcgccgctgcagtggatggcggtacagggttttaaaatgtacggtcaggatccgctcggcgatgagatagcccacagctggctgcaaacggtgaatcatttctataaacagcactttaagttgattgaaaagtaccacatcgccagcgccactcctcacgaaggtggagggggtgagtacccgctccaggacggcttcggctggaccaatggcgtggtgcgccggcttattggtctgtacggcgaaccgttgtaa

SEQ ID NO: 252743 - DNA, 1149 bp, Klebsiella pneumoniae
atgttgacctcttttaacgttttaacaccgggcaatatccgctttgggcgcggccttgctctaagcgcggccccctggctcgccgggcgctcgacaaagattctgctgattcacggcgccaccccgcagcgcgcggaatgcttgctaagcgaactccacgctcttcggctgcacgtcaccacactctctatcgcccatgaaccctgcctgcaggatattgaacggggcgtgagtctggcacgggaaaaaggcgtcggggccatcgtcagcctcggcggcggcgcggtcattgatgcgggcaaagctattgcggcgctggttcccgcgcaggggcccgcgatcgaatacctggaagtggtgggtagcggccgcatattagaggccaatccgctgccgttcgtcgccattcccacgacggccggtaccggcgcggaagtcacaaagaacgcggtgattaacgtccccgagcagcagcgcaaggtcagcctgcgtgacgaccgcatgctgccagagctggcgattatcgacccgtccctcaccgacagcgcgccgcgcgcggtgaccttagcctccggtctcgacgctatcacccaggtgattgagccctggctgtgcacccgcgcgaatccttttaccgacgcactctgtcgggaggcgatcccgcgcggcatgaaagcgctcagaacgctgatggaacatgagtgtccggatagccgcgatgagatggcgtgggtcagcctgtgcggcggactggcgttagccaatgccggactcggcgtggttcacggcctggcaggcccgctgggaggcctgagcaacgctgcccatggcgcactttgcggtagtctgctccccttcggcctggcgctcaacgaagcacaaattagcgacgcacgcctccgccagcgttttgcggatgtacgccagtggctggccgctgggctggattccgatcctgacagcgcatgggagagcctgcgcgaatggagccagcgcgccggtctgggtaatctgcgcgatctcggcgtcccccgcgaagcgctggagcctgcggccctcgccgccagcagctcctcatccatgaaggctaacccggtcacgttgaccagcgagcagctgctggagctgctggaagccgcgtgggagtaa

SEQ ID NO: 252744 - DNA, 624 bp, Klebsiella pneumoniae
atgataaaaatactgggcaaacgctcatcaattaacgtgcgtaaggtactgtggacttgtgaagaagcgggaatagcatatcagcaggaggattacggtagcgggttccagtccatcgagaccccggcgtttcgcgcccttaatccgaatagcctggtcccggtgctgctggatggcgattttgtgctgtgggagtcgaacagcatctgccgctatctggcgcgcaaagccgggcgggaagacctgctccccacggcgccgcaggctgccgccgaggttgagcgctggatggactggcaggcaacggaattcaatactgcctggcgctacgcctttatgggactggtgcgcaaggacccgcgttttcaggaaccgacggctatcaaagagagcattgtcgcctggacccgctgcgtgcagatcctcaatgcgcagcttcagcaaaccggggcatgggttgccggcagccagtttacgctcgcggatatcgtcctgggactgtcggtgcaccgctggaaaatgacgccgttcgcgcatccggaaatggccgaagtggagcgctggtatatggcgctgaatcagcgcccggcgtttaagcgccacggcaataacggcgtggcgtaa

SEQ ID NO: 252745 - DNA, 1353 bp, Klebsiella pneumoniae
atgagcaagcattatgactatatcgccattggcggcggcagcggcggtatcgcctccattaaccgtgccgctatgtacggccaaaagtgtgcgctgattgaagccaaagacctgggcggcacctgcgtgaacgtcggctgcgtaccgaagaaagtgatgtggcatgcggcgcagatccgtgaagccatccatctgtatggcccggattacggttttgataccacaattaatcacttcgactgggataagctggtcgccagccgtagcgcctatatcgatcgtatccacacctcttacgataacgtgctgggcaaaaacaaggtcgatgtcattaaaggcttcgcccgttttgtcgatgcgaaaaccgtcgaagttaacggcgagacgataaccgccgaccatattctgatcgccaccggcggccgtccgagccatccgagcattcccggcgtcgagtacggtattgattccgatggtttcttcgaactgccggcgctgccgaagcgcgttgcggtagtcggcgcgggctatatcgccgttgagctggcgggcgtgattaacggactgggcgcggagacccatctgttcgtgcgtaaacacgcgccgctgcgtagcttcgatccgctgatcgttgaaacgctggttgaggtgatgaacgccgaaggcccgcagctgcatacccatgccattccgaaagcggtagtgaagaacgccgacggcagcctgaccctggagctggaagatggccgcagccagaccgtggactgcctgatttgggcgatcggtcgcgaaccggcaaccgataacttcaatctcgccgctaccggagtggaaactaacgataaaggctatatcgtcgtcgataaattccagaatactaacgttccgggtatttacgccgtcggcgataataccggtgccgtcgagctgactccggtcgccgttgccgccggccgccgtctctccgagcgtctgtttaacaacaagccggacgaacatctggactacagcaacatcccgaccgtggtattcagccatccgccaatcggtaccgtcggtttaaccgagccgcaggcgcgcgagcagtacggcgatgaggcggtaaaagtgtataaatcctctttcaccgccatgtataccgccgtcacttcacaccgccagccgtgccgcatgaagctggtctgcgtcggcccggaagagaaaattgtcggcattcacggtatcggcttcggtatggatgaaatgctgcagggcttcgcggtggcgctgaagatgggcgcaaccaagaaagacttcgacaataccgtggcgatccacccaaccgcagcggaggagtttgtgacgatgcggtaa

SEQ ID NO: 252746 - DNA, 843 bp, Klebsiella pneumoniae
atgctcagttatcgccacagctttcacgcaggcaaccacgccgacgttctaaaacacaccgttcagagcctgatcattgaatcgctcaaagagaaagaaaaaccgtttctctatctggacacccacgccggcgctggccgctatcagctgagcagcgaacatgccgagcgcaccggtgagtatctcgaaggtatcgcccgcatctggcagcaggatgacctgcccgccgagctggagccgtatatctccgtggtccagcacttcaaccgtagcggccagctgcgctactaccccggttctccgctgattgcccgccagctgctgcgcgagcaggatagcctgcagatgacagaactgcatcccagcgattttccgctgctgcgcgcggagttccagaaagacgaccgcgcccgggttgaaaaaaccgatggctatcagcagctgaaatctaagctgccgccggtatctcgtcgtggcctggtgctaatcgacccgccttatgaaatcaaaagtgactaccaggcggtggtcaccggaattcatgaaggctacaaacgctttgctaccggcacctacgcgctgtggtatccggtcgtattgcgtgcgcagattaagcgcatgatcaaagaattagaggccaccggcattcgcaaaattctgcaaatcgagctggcggtgcgtccggatagcgaccagcgcgggatgaccgcctccgggatgatcgtcatcaacccgccgtggaagctggagcagcagatgaacaacgttctgccctggctacataaaaagctggtgccgaccggtatcggccatgccaccgtcagctggatcgtgcctgagtaa

SEQ ID NO: 252747 - DNA, 1362 bp, Klebsiella pneumoniae
atgaaacgcgtgcgcttttcgccgcgaagctcgtttgcccgtaccctgctactgatcgtcaccctgctgttcgccagcctggtgacgacctatttagtggtgctgaatttcgcgatcctgcccagtctccagcagtttaataaggttctggcctacgaagtgcgtatgctgatgaccgataaactgcagctggaagacggcacccagctggtggttccgccggcgtttcgccgcgaaatttaccgcgagctgggcatttcgctctattccaacgaagcggcggaagacgcaggcctgcgctgggcgcagcattatgaattcttaagccagcagatggcgcaccagctcggcgggccgaccgaagtgcgggttgaggtcaacaaaagctcccccgtggtgtggctgaaaacctggctctcccccaatatctgggtgcgcgtaccgctgaccgaaatccaccagggcgacttctcgccgctgttccgctacaccctggcgatcatgctgctggcgattggcggcgcctggctctttattcgtatacagaaccgaccgctggtcgatctggagcacgctgcgctgcaggtcgggcgtgggattatccctccgccgctgcgcgaatacggcgcatcagaggtgcgttcggtgacacgtgcctttaaccatatggccgcaggcgttaagcaactggcggacgaccgtacgctgctgatggccggggtgagccacgatttacggactccgctcacgcgtatccgtctggcgacggaaatgatgggcgaagaggacggctacctcgccgagtcgattaataaagatatcgaagagtgcaacgccattatcgagcagtttatcgactatctgcgcaccggtcaggagatgccggtggagctggtggaccttaatgcggtgctgggcgaagtgattgcggcggagagcggctatgagcgggaaatcgctaccgatctgcagccgggagagatcccgctgcgcgtgcatccgctctccatcaagcgcgcgctggcgaatatggtggtcaacgccgcccgctacggcaacggctggatcaaggtcagcagcggcagcgaaggtaaccgggcctggttccaggtcgaagacgatggaccgggaatcaagccggagcagcgcgaacatctgttccagcctttcgttcgcggtgacagcgcccgaacgattagcggaaccggccttgggctggctatcgttcagcgcatcatcgataaccataacggcaagctggaacttggctccagcgaacgcggcggattattaattcgcgcctggctgccggtgccgatgcatcgcgccctgccggcggtaaaacccacaaaagagagctaa

SEQ ID NO: 252748 - DNA, 720 bp, Klebsiella pneumoniae
atgcaagagaattataagattctggttgtcgatgacgacatgcgcctgcgtgcgctactcgaacgttatctgaccgagcagggcttccaggttcgtagcgtggcgaacgctgaacagatggatcgcctgctgacccgtgaatccttccacctgatggtgctggatcttatgctgccgggcgaagatggcttgtccatttgccgccgcctgcgcagtcagagcaacccgatgccgatcatcatggtcacggcgaaaggggaagaagttgaccgaatcgtgggcctggaaatcggcgccgacgactatatcccaaaaccgttcaacccgcgcgagctgctggcccgtatccgcgccgtgctgcgccgtcaggccaacgaactgccgggcgcgccctcgcaggaagaggcggttatcgcctttggtaaattcaagctgaacctcggcacccgcgaaatgttccgtgaagatgaacccatgccgctgaccagcggtgaattcgcggtgctaaaagcgctggtgagccatccgcgcgaaccgctgtcccgcgataagctgatgaacctcgcccgcggccgtgagtattcagccatggagcgttccatcgacgtacaaatctcacgcctgcgccgcatggtggaagaagatccggcgcatcctcgctatatccagaccgtatggggcctgggctacgttttcgtcccggacggctctaaggcatga

SEQ ID NO: 252749 - DNA, 123 bp, Klebsiella pneumoniae; identical to SEQ ID NO: 173417

SEQ ID NO: 252750 - DNA, 480 bp, Klebsiella pneumoniae
atgaaaacgccgctgatcacccgtgaagggtatgaaaaactgaagaaagagatggataccctgtggcgcgaagaacgtccggaagtcactaaaaaagtgacctgggcggcgagccttggcgaccgcagcgaaaacgccgactatcagtacaataaaaagcgcctgcgtgagatcgaccgccgggtgcgctatctgaccaaatgcctcgaacagctgaaaatcgtcgattattcgccgcagcaggaaggaaaggtctttttcggcgcctgggtagagattgaaaacgatgcgggcgagacgaagcgctttcggattgtcggctacgatgaaatctttggccgcaatgactacatctccattgattcgccaatggcgcgcgcgctgctgaaaaaagaggtcggcgatttagctatcgttaacacgcccgcgggcgaggcttcctggtacgtgaacgaaattgaatacgtcaaagctaaatag

SEQ ID NO: 252751 - DNA, 237 bp, Klebsiella pneumoniae; identical to SEQ ID NO: 173412

SEQ ID NO: 252752 - DNA, 270 bp, Klebsiella pneumoniae; identical to SEQ ID NO: 173411

SEQ ID NO: 252753 - DNA, 783 bp, Klebsiella pneumoniae
atgaacgcgatcgagtggcagaccatgggcgaaggaaattgtcatcttgtgctgctgcacggatgggggctgaatgcccaggtgtgggattgcatcacgccgcagctgcgctcgcattttacgctgcacctcgtcgatcttcctggctacggccgcagcggcggctttggcgctctgtcgctggaagagatggcgcagcgggtgctggagaaagcgccggagcgcgctatctggctaggctggagcctcggcgggctggtagcaagtcaggtagcattatcccatcccgatcgcgtgcaggcgctggttaccgtggcttcttccccctgttttagcgctcacgacagctggcctggcatcaagcccgaagtgctgagcggattccagcagcagctgagcgaagattttcaacgcaccgtcgaacgctttctggcgctgcaaaccatgggtaccgagagcgcacgccaggatgcgagaatgctgaaaagcgcggtgctgtcgctaccgatgccatcatcggaagtcttaaacggcgggctggagatcctcaaaaccgccgacttacgccagccgttatctaccctcactatgccgtttttgcgcctgtacggtcggctggatggcctggtgccgcgtaaaatcgtcccgattctcgacgccatgtggcccggcagcacgtcgttcgtctttgataaagccgcccatgcgccgttcatttcgcatccgcaggcgttttgcgctcaactggtcgaactgaagcgtgaggtcagtaaatatttttag

SEQ ID NO: 252754 - DNA, 675 bp, Klebsiella pneumoniae
atgctaacagcacacagcttatgctggctatgccaaatgccgctggccatcgcccgctgggggatctgttcgcgatgcgcgtcggcgctgctggcctgcgaaccgctatgccctcagtgcggactgccggcccagtcaaacacgctgccctgcggacgctgcttgcaaaaaccgccgccatggcagcggctggtaacggttaatgactatcgaccgccgctgagcggcctgattcaccagctgaaattcaataagcggcccgagctggcgcccgctctggcgcgtctgctgctgctgcgcatacgtcacagcccggatcttcctcatccggaccggataattagcgtgccgctctggcagcgccgccagtggaggagagggtttaatcagagcgacctgctgtgccgaccgctatcccgctggctgggctgcgcctggcgtagcgatgcgctgacccgcagacgccgcaccgccactcagcatcagctcagcgccagattgcgcaaacagaacctgaaaaacgccttccagcttgaattgtcgctacaggggcaccatatcgccattgtggatgatgtcgtcacaaccggaagcaccgtcgctgagatatcccgcctgcttttgcgaaacggcgccgcgacggttcaggtatggtgtatatgccgtaccttgtag

SEQ ID NO: 252755 - DNA, 576 bp, Klebsiella pneumoniae; identical to SEQ ID NO: 173408

SEQ ID NO: 252756 - DNA, 1317 bp, Klebsiella pneumoniae
atgccattagtcatcgttgctatcggggttgccctgttattgttgctgatgatccgtttcaagcttaacgggtttatcgctctggttctggtggcgcttgccgtcgggctcatgcagggtatgccgctggataaagttatcgtatccatcaaaaacggcgttgggggaaccctcggcagcctcgcgctgatcatgggcttcggcgcgatgctcggaaaaatgctggcggactgcggcggtgcgcagcgtatcgccaccacgctgattgccaaatttggtaaaaaacatattcaatgggcggtcgtgctgaccggctttaccgtcggctttgcgctgttctatgaagtcggctttgtactgatgctgccgctggtctttaccatcgctgcttccgccggtattccgctgctctatatcggcgtaccgatggcggctgcgctctcggtcacgcacggattcctgcctccgcatccgggcccgaccgcgattgctactattttccatgccgacatgggtaagaccctgctgttcggtacgattctggcgattccgacggttattcttgcgggaccggtttacgcacgtttcctgaaaggcatcgataagccgattccggaaggcctgcacaacccgaagacgttcactgaagaagagatgccgggttttggcgtcagcgtctggacttctctggtgccggtgattctgatggccatgcgcgccgtcgccgaaatggtgctgccgaaaggccacgctttcctgccgattgcggagttctttggcgacccggtgatggcaacgctgatcgcagtgctgatcgccatgttcactttcggcctcaaccgcggtcgttccatggagcagattaacgatacgctgacctcctcgatcaaaattatcgccatgatgctgctgatcatcggcggcggcggcgccttcaagcaggtgctggtcgatagcggcatggataagtacattgcgtctatcatgcacgaatccaatatgtctccgctgtttatggcctggtctattgctgcggtactgcgtatcgcgctgggttccgccaccgttgcggccattaccgcgggcggtatcgccgcgccgctgatcgccaccaccggcgtgagcccggaactgatggttatcgccgttggctccggtagcgttatcttctctcacgttaacgatccgggattctggttgtttaaggaatatttcaacctgaccattggcgagactatcaagtcatggtcgatgctggaaaccatcatctcagtgtgcggtttgattggctgcctgctgttggggatggtggtataa

SEQ ID NO: 252757 - DNA, 2043 bp, Klebsiella pneumoniae
atgaccaatccattactgacgcctttttcgctcccgcccttttctgcaatcaaacccgagcacgtggtccccgcggtcaccaaagcgctggatgattgccgggcggcggtcgaacgcgcggtggcgcaaggggcgccgtatacctgggaaaacctttgccagccgctggcggaagtggacgacgtactggggcgtattttttccccggtcagccacctgaactcggttaaaaacagccctgagctgcgtgaagcctacgaacaaactctgccgctgctctccgaatacagcacctgggttgggcaacatgaaggtctgtacaaagcgtaccgcgacctgcgcgacggcgaccattacgccaccctgaataccgcgcagaaaaaagcggtggataacgcgctacgtgattttgaactctccggtattggcctggccaaagagcagcagaaacgctacggcgaaatcgccgcacgcctgtctgaactgggcaatcagtacagtaacaatgtcctcgatgccaccatgggctggacgaagctgatcgccgatgaatccgagctctccgggatgccggaaagcgcgcttgctgcggcgaaagctcaggctgaagccaaagatcaggaagggtatctgttgaccctggatatcccgagctatctgccggtaatgacctactgcgataaccaggcgctgcgtgaagagctgtatcgcgcctattccacccgcgcttctgaccaggggccgaatgccggtaagtgggataacagtccggtaatggcggaaatcctcgccctgcgccacgagctggctcagctgttgggcttcgacagctatgccgataagtcgctggcgaccaaaatggcggagaatccgcagcaggtgctcgactttctgagcgacctggctaaacgcgcccgtccgcagggtgagaaagaactggctcagctgcgcgccttcgccaaagccgaattcggcgtggatgaactgcagccgtgggatatcgcttactacagcgaaaaacagaagcaacatctttacagcatcagcgatgaacagctgcgcccgtactttccggaaaacaaagcggttaacggcctgtttgaagtcgttaagcgtatttacggcattactgcgaaagagcgtactgacgtcgacgtctggcatccggaagtgcgcttctttgaactgtacgacgaaaataacgagctgcgcggcagcttctacctcgacctttacgcccgcgaacataaacgcggcggggcgtggatggatgattgcgttggccagatgcgcaagcttgacggcacgctacaaaagccggttgcctatctgacctgtaactttaaccgtcccgtcagcggcaaaccggcgctgtttacccacgatgaagtgatcacgctgttccacgagtttggccacggtctgcaccatatgctgacccgcatcgataccgccggcgtttccggtatcagcggggtaccgtgggatgcagtcgaactgccgagccagtttatggaaaactggtgctgggagccggaagcgctggcgtttatctccggccactacgaaaccggcgagccgctgccgcaggagctgctggagaaaatgctggccgcgaagaactatcaggcggcgatgtttattctgcgtcagctggagttcggcctgttcgacttccgcctgcatgcggaatttagcccgcagcagggggcgaaaatcctcgaaacgctggcggaaatcaagcagcaggtcgcgttgattcccgggccgtcctggggccgcttcccgcatgcctttagccacatttttgccggtggatacgcggcgggctactacagctacctgtgggccgatgtgctggcggcggatgctttctcgcgcttcgaagaggaggggatcttcaatcgcgaaaccggccagtcgttcctcgacaacattcttagccgcggcggttcggaagagccaatggtcctgttcaaacgcttccgcggtcgcgagccgcagctggacgcgatgcttgagcattacggtattaagagttaa

SEQ ID NO: 252758 - DNA, 765 bp, Klebsiella pneumoniae
gtgaaaatttgtttaattgatgaaacgggcgccggagacggcgccttatctgttcttgtcgaccgctgggggctggagcaggacgatgacaacccgatggcgctggtgatgacgccggagcatcttgagctgcgtaagcgcgatgaaccgaagcttggcggcattttcgtggattttgtcggcggggcgatggctcaccggcgcaggttcggcggcggccgcggcgaggcggtggcgaaagcggtgggaatcaaaggcgactatctgccggatgtcgtcgatgcgaccgccggtctggggcgggatgcctttgtgctggcgtcagtcggctgtcgcgtacggatgctggagcgtaatccggtggttgccgcgctgctcgacgatggcctggcgcgtggctacgccgacgctgaaatcggctcgtggttgcaggagcgcctgcagctgattcacgcctccagcctgacggcgctgaccgatattaccccgcgtccgcaggtggtctatctcgacccgatgtttccgcataagcaaaaaagcgcgctggtgaagaaagagatgcgggtatttcagtcgctggtggggccggatttagacgccgacggtctgctggcgccggcgcgtcagctggcgaccaggcgggtggtggttaagcgcccggactacgcgccgccgctggcgaatgttgcgacccctaacgcggtggtgaccaaaggccatcgctttgatatctatgccggaacggcggttgagccgcaggggtaa

SEQ ID NO: 252759 - DNA, 438 bp, Klebsiella pneumoniae
atggcttacaaacatattcttattgcagtagacctgtccccggaaagcaaagtactggtagaaaaagccgtttctatggcccgtccctacaatgcaaaagtttccctgatccacgtagatgtgaattactccgatctctacaccggccttattgatgttaacctgggcgatatgcagaaacgcatctccgaagagactcaccacgcgttaagcgaactctctacgaatgcgggctatccgatcactgagaccctgagcggtagcggcgatctcggccaggtgctggtcgatgcgattaaaaaatatgatatggacctcgtggtttgcggtcaccatcaggacttctggagcaagctgatgtcctccgcgcgtcaactcatcaacaccgttcacgtcgatatgctgattgtcccgctgcgcgacgaagaagaggaataa

SEQ ID NO: 252760 - DNA, 336 bp, Klebsiella pneumoniae; identical to SEQ ID NO: 173402

SEQ ID NO: 252761 - DNA, 1497 bp, Klebsiella pneumoniae
atgctacatttatttgccggtctggatttacataccgggctactgttattgcttgctctggctttcgtgcttttttacgaagcgatcaatggttttcatgataccgcaaacgctgttgcaactgtgatctacacacgcgcaatgcggtcgcagcttgctgtggcgatggcggctctttttaacttcttcggcgttctgttgggcggtctcagcgtagcctatgccatcgtgcatatgttgccgaccgacctgttgcttaacatgggttcagcacatggcctcgccatggtcttttccatgctgctggcggcaattatctggaacctcggcacctggtacttcggccttccggcctccagctcgcacaccctgatcggcgcaatcatcggtattggtttaaccaatgcgctgatgaccggtacgtcggtggtggacgcgctgaacatcccgaaagtcatgggtatttttggctcgcttatcatctcgccaatcgttggcctggtcgtggcgggcggcctgattttcatcctgcgtcgttactggagcggaaccaaaaaacgcgcccgtatccacctgaccccagccgagcgtgaaaagaaagacggcaagaaaaagccgccgttctggacgcgtattgcgctgattctctccgccattggcgttgcgttctcccacggcgcgaacgatggtcagaaaggcattggcctggtcatgctggttctgatcggcgtagctccggctggcttcgtggtcaatatgaacgcttccggctacgaaatcacccgtacccgcgatgcggtcaacaacgtggaaaccttcttccagcagcgtcctgagctgttgaagaaagcgaccggcgctgagcagctcatcccgtctccggacgcgggggcagccgcaaatggcgaattccactgccacccggcaaacaccatcaacgcgcttgaccgcgtgaagacgatgctgaccggaaccgaaagctacgacacgctctccgttgagcaacgcagccatctgcgccgcattatgctctgcatctccgataccaccgataaagtggcgaagctgccggaagtcagtgccgacgataagcgtctgcttaaaaagctgaaaaccgatatgctgagcaccatcgaatacgcgccaatctggattattatggcggttgcgctggcgctgggtatcggcaccatgatcggctggcgtcgcgtggcgaccaccatcggcgagaaaatcggtaagaaagggatgacctacgcacagggtatgtcagctcagatgaccgcagccgtatcgattggtctggcgagctataccggtatgccggtttccaccacccacgtgctctcctcctcggttgcggggacaatgctcgtcgatggcggaggtctgcagaagaagaccgtcaccagtattctgatggcatgggtactcaccctgcccgcggcgattctgctctccggcgcgctatactggctctcgctgcagattatctaa

SEQ ID NO: 252762 - DNA, 1152 bp, Klebsiella pneumoniae
atgttttgtgcggcgcaggcagggcaggcaggctgccgggtgctgctgctcgataatggcaaaaagcccgggcgcaagatcctgatgtcaggcggcggacgctgcaactttactaacatgtatatcgaacccgcggcatatctcagccaaaacccgcatttttgcaaatccgcgctggcgcgctacacccagtgggactttatcgatctggttagcaaacacggtattgcctggcatgagaaaaccctgggccagcttttctgcgatgattccgccgagcaaatcgtcaacatgctgctggcggagtgtgaaaagggcggcgtacaaattcgcctgcgtagcgaaattatcagcgttgagcgggatgatgagggctacatgctgcagcttaacggcgagacggtggcggcgaacagactggtggtggcctccggcgggttatccatgcccggtctgggcgcttcgccgttcggctacaagcttgccgagcagtttggcctgaaggtactgccgacccgcgcgggcctggtgccgtttaccttgcataagccgctgcttgagcagctgcaggtgctttccggtgtctcggtgccgtcaaccatcacggcggaaaacgggaccgtcttccgggaaaatctgctctttacccaccgcgggctgtccgggccggcggtactgcaaatttccagctactggcagccgggagaattcgtcagcatcaatctgctgccggattgccatcttgatgacttcctcaacgaacagcgcgcggcgcatcctaatcagagcctgaaaaacacgcttgcgatgcaactgccgaaacggttggttgagtgcctgcagcagctgggccaactcccggatgtcaccctgaaacagcttaacgtccgcgagcagcaggcgctggttgagacgctgaccgcatggcgcgtccagccgaatggcaccgaaggctatcgtacggcggaagtgaccctcggcggcgtagatactaacgaactctcttcgcgcaccatggaggcccgtaaggtgcccgggctctactttatcggcgaagtgatggacgttaccggctggctgggaggttataacttccagtgggcatgggcgtcagcctgggcatgcgcgcaggctttagcggaacagaaataa

SEQ ID NO: 252763 - DNA, 1884 bp, Klebsiella pneumoniae
atgaataataatgaaattgttatcttttcagtttccaggacaataacccaacgaatcatgaatgtccttattgaaaggaaactcgacatccccgtgtatgaatttcgttattcagaagttctcgataaagcccatgagatgattcaatccggcactaagataattattagccgaggcggtaccgccgcactcctgcgtagcaatattactatccccgtcattgaaatcgcccatgattttcatggcgtttatcgcatcttacaagaagcgaatagtaagtcgcaaaaaatcgccgccgttggtttcccgcagttttgcagcgccttacgccattaccagaacatgaccaatgaagattttaaaatttgtcaggtttataatcatcacgatattgaaaatgttataaaaaatctttcggaaaataattaccataccgtaatcggcggactgaccgttgctgaaatggctcaaaaatatcacctcaatgctattatgggggatactgataacatttccattgagcaggccatcaatgaagctcacagtttattgaaatacattaatcgtgaaaacagcaaactgatcatgagccactcagcattgaatcaggcgcgtgaaggtattatgtgcatcgatcagcttggtgaaattatcaatatcaacgctaccggcgtggcattattccaatgtcaagccggagataaaatattcaaaaaggaagcgtttaaagagatctacgccagtattattaatgaactagatatcaaagagcaggctatagacatcaacggcgtaacgattcatatttccgtgcgccacttttctaaccgaaaaatatcttatgccgttattacggggctaagccaggagagcacgctttggcaaaacagcgtcaacaaaaaaagtaagctgcgcggtttttccacaacctggtctttcgacgatattattggccagtcgccggccatcctcgatgttataaaaaaggccaaactgtgcgcccgccacgaactgccgattcatattttaggtgataccggcacgggcaaagaacttttcgcccaaagtattcaccactatagcgccagaggccatagtccttttatcgcgattaactgcgcggccatccccgagagcattctggaaagtgaactctttggctatgccgacggcgcgtttaccagcgcgcgaaagggcggcaaacctggggtgtttgaaatggcgatgaacggtacggtgtttatcgatgaaatcagcgaagcgccgctatcggtacaggttaagctgctgcgcgtattgcaggaaaagcagttttctcgtctcggcggcgatacgcttattaccgtcgattttcgcctgatcaccgccagcaataaggatctgcgccagctcgtcgccaacggtgaattccggcaggatctgtactacagaatcaatatccttgagttgactctaccggccttacgccaacgaccgggcgatattatgctgttaattcagcacttgcttcatcagcagggtaagcaaatcacctttacccccgacgcggtggattttttacatagctatcgctggcctggcaatattcgcgaactccaggcggtgatctaccgactcattgtgctgctcgatatagacagggtgaacaaggagattttactccaggttagtcaaattacacccgatgaccatcagcaactcgctcactccccggcagtgagcgtctcatccgatgaaaccgatctattaaagaaacaagagaaacaactgattaccagcgtaatagaaaaaaccgacggagacagaaccagagcatcggtcatgctgggcattagccccaccaccctgtggcgcaaattaaagcagcataatatcagcggataa

SEQ ID NO: 252764 - DNA, 1164 bp, Klebsiella pneumoniae
atgaaactggatattctgattaaaaacggtctggtcgccgatcttgatagccgcgattatattaatcgcaatattggcatcatcggcgatcgtatcgttgacttaaatgccgttgatgatttacaggccgaaacggttattgatgccgcaggttgtatcgtactgcctggcttaatcgacttccatggccatgtttttcatggcgggaccgccatcagtgttaaccctgatatcgtatgcttgcctaatggggtcaccagtatggtcgatgccggcagcagcggctgggtaaattatcagctttttcgcaatagcgtgattcatcctgccatggtgaaaatcaaaagctatctgaacgtggtcaacgtcggactttctaccctcggaggcgggccgaccggttatctggaaaataccaacccggcaaattacaacgaggtgaagatagcgcaaacgctgaatggcaacagagacaatattctcggcctgaaactacgctacagccaggatatcgctaaagggaaacagtacgccagcgaccctcttctatctaccgtctccctggcgcgtaaactggataccacgatttgcgttcacgtcacggactctcttctctgcgccgatgaactgatccgctattttaatgccgatgatatttacgcgcactgtttccacggcaccggccactcgattctcaatgaacagggcgaggtctatgcggcgataaaagaggcccagtcccggggcgttatcttcgactgttcaaacggcgtggcccactttgattttcacgttgccagaaccgccatggcgcagggattctatcctgatatcattagtaccgatctcactttaagaaatagcttacggacggataaggtctacagtctgctccacgtcatgtcgaaatatctcaacatgggaatgtccttcttcgatattgttcgcgcggtaaccgctacgccggcccgcctgatgaagatgcagggacaaattggtaccctggcgcccggcgcgtttgctgatatttcgattgttaaactgcaaaaagagaagattgtttttgaagatactcagggcgttaaaattgaaggcgaccgttacattgataactgcgctaccctgtgtaatggtcaaattgtctaccgccgcctgcgcttctaa

SEQ ID NO: 252765 - DNA, 1014 bp, Klebsiella pneumoniae
atgtcttccattcaactgtgcgccgcacaccaggcgacttcgactttcgacggcgacgcaattgcccagtacatgcgtaccgatttcattaccctgccggagcatctcagcgttcatgaggcgcgagaactgttcgtttctcagctggccagcgatgagatccccgggcaggtttttgtcgtcgccggaaaaaaactgcgcggcagtttatcgattaaaaagctgctgcaggagagcgataccgcgcaatccatccgttatttaatggatagctgtctgtttcgcgtcaggcccgacgacccgcgcccgcaggtggtcgccgaactcggcgagcgcgggctcgatctggtgccggtggtcgaaaagggtgagctggtcggctgcctgatggaaaaagagatcgctcatctgctggaagatgacgtgaccgaggatgctcagcgccagggggcaacgctgccgctggaaaagccctatctggaaaccagcccgtgggcgctgtggaaaaaacgttcggtatggctgctgctgctctttgtcgccgaagcctacaccagcagcgtgttacagcattttgaagaggcgctggaatcggctatcgcgctggcctttttcataccactgctgattggtaccggcggcaacagcggaacgcagataacctctacgctagtacgttcgatggcgctcggggaagtgcgactgcgcgatatgggacgcgtgatccgcaaagaggtctcaacctcgctgctgatcgccatcacgctcggcctggcgggctgcctgcgcgcctggatgatgggcatcggcatggagatcaccctgattgtcagtctgacgctggtatgcatcaccctgtggagcgcggtggtgtcgtcggtgatccccctgacgcttaagcgcgtcggcatcgacccggcggtggtgtcagcgccgtttatcgccaccctcatcgacggtaccggattaattatctattttaaaatcgcccagtattttcttggcctgaattga

SEQ ID NO: 252766 - DNA, 558 bp, Klebsiella pneumoniae
atgttgaaaaacagggttaatctccaggttattatctggactacgctgattgggggctttattagctccctggttaagtcgggaacggaggccaatatgccgcctcgcgtggcgggagaaatatcgcctccggcggcgcatatcgacgcctggcttggctggctcggtattaattcacactcgctggactacgtttaccagggagtgacgatccccggcgccgtcatgctttatcactggttattcagttttgctttcgcctttctttatgtctttatttccgcgtactggccaaagattcggctctggtacggcgcggcctatggtctgattattactctcgttatgcacggctttctcattcccgcgttgggcttcaggcacccggcctatttaaacggggaaaccggatggctgtggaacctgaatggctacgagctgtggagcgaaaccctcggtcatatttgctggtcgttttcgattgaaatcagcatgattgccgttcttgccctgctggcaaaaccgctacgaggcgcatgggctaacgagccagcatga

SEQ ID NO: 252767 - DNA, 417 bp, Klebsiella pneumoniae
atgcaacgaattaccattactctcgatgacgatttactcgatacgctggatagcctgagccagcgccgtggctacaacaaccgttccgaagcgatccgcgatattctgcgcggcgcgctggcccaggagaccgctcaggagcacggtacccagggcttcgcggtgctctcttacgtctatgaacatgagaaacgcgatctcgccagccgtttagtctccacccaacatcaccaccacgatctctccgtcgctactctgcatgtgcatattaatcacgacgattgtctggaaattgccgtgctgaagggggatatgggcgacgttcagcattttgccgatgacgttatcgcccagcgcggcgtgcgccacggccatttgcagtgcctgccgacggagaaggaatctcctcactcataa

SEQ ID NO: 252768 - DNA, 771 bp, Klebsiella pneumoniae
atgacattactgaccgcctcgacaattacccatcactacccggacttaaaggtgctaacagaggtctctttagcgctgaaaagcggtgaaaccgtggccctgctggggcgtagcggctgcggcaaaagcacgctggcgcgcctgctcgtcggcctggaatccccaacgcagggtcgcatctgctggcggggagagccgctctcccggctcaatcgcgctaaacaaaaggcgttccgtcgggatattcagatggtgtttcaggacgccatcagcgcggtcaatccgcgtaaaaccgtacgcgagattctgcgcgagcctatgcgtcacctgctatcgttgacgaaagcggagcagctggcccgggccagcgaaatactcagggcggtggatcttgacgatagcgtgctgaataagcgccccccgcagctgagcggcgggcagctacagcgcatctgcctggcgcgggcgctgacggtagaaccaaagctgctgatcctggatgaggcggtttctaacctcgacctcgtgatccaggcgagcgttattcgtctgctcaaaaagctccagcagcagttcggcaccgcctgtctttttatcacccacgatttacgcctggttgagcgcttttgccagcgggtgatggtgatggatgaggggaaaatcgtggagatacaaaccgtgggcgaggcattaactttttcctctgacgccggtcgcgtgttacaaaatgcggtacttcccgcctttcccgtgcgccgaaataaggtttaa

SEQ ID NO: 252769 - DNA, 762 bp, Klebsiella pneumoniae
atgccgcaacaaattgaactgcaaaacatcgccttacgggccgagcgtccgctggtgcacggcgtttctttgacgatcaaacgcgggcgcgtgctggcgctggttggcggcagcggcagcggcaaatccctgacctgcgccgcggcgctgggcattttgcctcccggcgtacaccagacggcggggataatccttgccgacggccagccggtttctccctgtgcgctacgcggcagcaaaatcgccaccattatgcagaatccgcgcagcgcttttaatccgctgcgaacaatggccgatcacgcccgggaaacctgccgggccctggataaagcctcagacgacgccacgcttattgcggcgctggaagccgtcgggctggagaacgcgccgcgcgtgctcaagctatatccgtttgagatgagcggcggcatgctgcagcgaatgatgattgctatggcgttgctgtgcgatgcgccctttatcgttgccgacgaacccaccaccgatctggacgcggtggtccaggcacgcattctcgatctgctggtaagtattatgcaaaaccgcggccccggcatgctgctggtgacgcatgatatgggggtggtggccaggctggcggacgatgtcgcggtaatggatagcggcagcattgtggaacagggcgatgtggaatctctgtttcgcgccccgcgacacgacatcacccgcgggctggtggcggcgcatctcgccctttatggtctggagctaagctga

SEQ ID NO: 252770 - DNA, 126 bp, Klebsiella pneumoniae; identical to SEQ ID NO: 171982

SEQ ID NO: 252771 - DNA, 1011 bp, Klebsiella pneumoniae
atgactgaaaacgctgaaatcatgacaatcccatcagtgacgttgtcacgccaccgggtggttgccctcgcctacgatggcctgtgtacctttgaatttggcgtcgcggtagagatcttcggcctgccgcgtccggaaatgggcgagcgctggtatcgtttcgccgtggccgcggtggatgaaggcgagctgcgggcaaccggcgggatacgtctgatgaccgacggcggcatgtcgttgttaagcgaagcggacacgatcgtagtgcccggctggcgcagtatcgattcccctgtaccgcctgacctgtgccaggcattggttgccgcccatgcgcggggctgccggataatttcgatctgctccggggtgttcgttctggccgctgccgggttgcttaacggccgccaggcgaccacccactggcgctacaccgatcagctgcgggcgcgttttccgctgattgaagtcattgatgacgtgctgtacgtcggcgctgagggcgtgatgacctccgcaggcagcgccgcaggaatcgatttatgtctgcatctggtgcgcgaggatttcggaattgatgcggcgaatattgtcgcgcggcgtttagtggtgtccccccatcgcgacggcggacaggcgcagcagattgttcggccggtagccaaagcgcgagaaagccagcgactcggactattattcgattttctgcaccagaatctcgccgccaaccataccgtggcatcgctggcggaaagagccggtatgggctcacggacctttttacgccgttttgaagacactaccggtaaaacccctgcccgctggctgcttgatgagcgactgctgcgcgcgacccaacatttaacccacagccgcctgagcgttgagcagattgccgagctttgcggtttcgcgaatgccagcaccctgcgccatcacttccgccagcagtatgcgcttagcccgttgcagtatcgaaagacaatgcagagtgaaacaaaccgagcgtaa

SEQ ID NO: 252772 - DNA, 393 bp, Klebsiella pneumoniae
atgagtgttgtaaccgcgattacccccgccagctctaccgatgccgccgcctggtttcgtcataagctaagcctcgaaactgactgcgccgatgtctacagcgcgatgcgcgaagaagacgtggattttgttctgctacatgtcgtcggcagtgaggaaacctttgcccgtcgtcatctgccgggggccctgcatttaccgcaccgacaaattgatgcaacccgaatggcgcagtggcctgaggatacgctgtttgtggtttactgcgccgggccgcattgcaatggagcagatgttgccgccatgaagctggcgctgctgggacgtccggtaaaaatgatgctcggcggcctgacaggctgggaagatgaagggctacctttcgcaaaatga

SEQ ID NO: 252773 - DNA, 1575 bp, Klebsiella pneumoniae
atgaacccattgcgccttatgagttattttgcgctgctgctggtattgatgccgtggcgggcgcaggcagccgacgccgacgatttcgtggcagccacccgcagccaacaggcgctgctgcttgagcagtgggccgtcgcgcctgcagcgcctcgtttaccgctgctaagggcgctgaaaagcgagacattacaatcggatagtcgcggtcatgcgttcagcaagcagggtgataagctactggcgctgggcgcggttgcggctcccgaaggaacaataaaaccggtacgcctgaccaatcgtctgcgtaacctcgcggcaggggcgctggccacgcatcagctggtcagtgacaacgtcacggaaagggcctctgcggcaaaaatcctccagcgcgaagcgacgccagaaatggcgggcctgttacagcagcgcctgacggcggaaaccgacggcgcggtcaaatcgctgctggaaattgcgcttgctcgtctgcagctaaccagtccgcagcctgcgcaaaggctggcggccattgaacggctcggtcactcaggcgacccggaaacccaggcgctgctgacgccttataccgacgcccggcatgagccagacccggcgatccgcgcggcggcgcaggagagcctgagcaaaatccagcaccgcctgctgctgggcgatctgctcggacaggcgtttatgggcctctccctcggctctgtcctgctgctcgccgcgctcggcctggcgatcacctacggactgctgggggtcatcaacatggcccacggcgaaatgctgatgattggcgcctacagctgctggctggttcagcaggcgctggcgcagctggccccgcagtggctggccttctatccgctgattgcgctgccggtggcgtttctgattgccggcgggatcggcatggcgctggagcgcaccgtgatccgtcatctctacggtcgcccgctggagacgctgctggccacctgggggatcagcctgatgctgatccagctggtgcggatgctgtttggtgcgcagaacgtcgaggtcgccaatccggcgtggctttccggcggcgtgcaggttctgccgaatcttatcctgccgtggaaccgtctggcggtactggcctttgtgctgctggtgctgctcttcacctggttgacgctgaacaaaacccgcctggggatgaacgtgcgggcggtgacgcagaaccgcgcgatggcggcctgctgcggcgtccctaccggccgggtcgatatgctggcgtttggtctcggctccggtattgccgggctgggcggcgttgcgctatcgcagctcggcaacgtcgggccagagctgggccagggctacattatcgactccttcctcgtggtggtgctcggcggcgtcggtcaactggccggcagcgtggcggcggcgtttggtcttggcatctttaacaaaatccttgagccgcaaatgggggccgtgctgggcaaaatcctgatactggtactgattatcctgtttatccagaaacgtcctcagggactgttcgccctcaaagggagggttattgactga

SEQ ID NO: 252774 - DNA, 1074 bp, Klebsiella pneumoniae
atgagccaacctgttaccttaacgctggcgcgcaaagcgccgcgcccgctgcggtggatcggcattctgctgctgttgggcctgctgagtatgccgtttctggcgctgctgcctgctacgcatccgctggcggtttccgcctggctgctgacgctgaccggtaagatcctctgctacgctattgtcgccgtcgcgctggatttagtctggggctatgccgggatgctctcgcttggccatgggatcttttttgccctcggcggctacgccatgggcatgtatctgatgcgccaggcggcgggagacggactaccggcctttatgtcgtttttatcgtggagcgagctgccgtggttctggtggggcacccagcattttgcctgggcgatgctgctggtggtgctggtgcccggtctgctggcgctggtgtttggctggtttgcctttcgctcgaaaatcaaaggcgtctatttttcgatcatgacccaggcgctgacctacgccggaatgctgctttttttccgcaacgaaaccggctttggcggtaataacggctttaccggctttaccacgctgctcggtttccccgtcaccgccattggtacccgggcggcgctgtttatggcgacggtgctgctgctgttgctcaccctgtggattggctatttgctggcgcaaagcaaatttggccgcgtgctgacggcggtgcgcgatgctgaaaaccgcctgatgttctgcggctacgacccgcgcggatttaagctgctggtctggacgctttctgccgtgctgtgcggcctggcaggggcgctgtacgtgccgcaggtcgggatcatcaaccccagcgaaatgtcgccaaccaactctatcgaagcggccatctgggtggcgctgggcggtcgtggaaccctaatcggcccggtgcttggcgcagggctggtcaacggcgcgaagagctactttaccatggcgatgccggagtactggcagctgtttctggggctgatttttattatcgtgacgttgtttttaccgcgtggcgttatcggcctgctgcgtaaaggagatcgctga

SEQ ID NO: 252775 - DNA, 798 bp, Klebsiella pneumoniae
atgcaaccggatgaagagctctttacccgccagctgccgacggaccgttttcgtgagcagaccgatccggtgctgcagctggaaaagattaacgtcaactttgacggttttcaggcgctgaccgacctgtcgctgcagattggcgttggcgaactgcgctgcgtgattgggccgaacggcgccggtaaaaccaccctgatggacgtcatcaccggcaaaacccggccgcagagcggtagggcactttacgatcagtcggtggacttaacgaccctcgatcctatcgccatcgcccggcaggggatcggacgcaagttccagaaaccgacggtctttgaggcgctgacggtggcagaaaatctcgaactggcaatgaaaggtgataaatcggtgtgggccagcctgcgggcgcgcctgaccagcgagcaggccgaccgaatcagcgaaaccctgcgcctgctgcggctggagggcgaacgctatcggccggcggggctgctgtcgcacgggcaaaagcagtttcttgagatcggcatgctgctggtgcaggagccgcatctgctgctgctggacgagcccgcagccgggatgaccgatgcagaaacggagtatacggccgagctgttccgcacccttgccggtcagcattcgctgatggtggttgagcatgatatgggctttgtcgagaccatcgccgaccgggtgacggtgctgcatcagggacaggtgctggcggaaggatcgctgcgcgaggtgcaggccaacgaacaggtgattgaagtttatctcggacgctaa

SEQ ID NO: 252776 - DNA, 699 bp, Klebsiella pneumoniae
atgttacaggttaatcaactacatcaatattatggcggcagccatattctgcgcggcgtcgattttgccgcgcgtcagggggaggtcacctgcctgctcggacgcaacggggtggggaaaaccactttgctgaagtgcctgatggggctgatcccggcgcgcagcggcgaagtgctgtggcaggagaagaatatcacccaccgtaaaccgcaccagcgggtgcagtccggaatcgcctacgtgccgcaggggcgggagatttttccgcgcctgacggtcgaggagaatctgctgatggggctgtcccgctttcccgcccgcgacgcgcgcgcggtgccggaagagatttatcagctgtttccggtgctgaaaaccatgaagcagcggcgcgggggcgatctttccggcgggcaacagcagcagctggccattggccgcgctctggccagtcgcccgcagctgttgattcttgacgaaccgacggaaggtaatcagccgtcggtcatcaaggagattggcgaagttatccgccagctggcgaatcgcggtgatatggcgatcctgctggtcgagcagttctacgatttcgccgccgggctggcggaccgctacctggtgatgtcgcgcggggcgattatccaacagggcagcggcagcgatatggaagctgaaggcgtccgcgggatggttaccatatag

SEQ ID NO: 252777 - DNA, 471 bp, Klebsiella pneumoniae
atgaacagtagcaatcaggttaaacaattacgtttacagcgcgcctggtcccaggagcagctcgccgagctggcgggcgtgagcgtgcggaccattcagcgcattgagaacggtgaccgccccggtctggagacccttagcgcgcttgcggcagtctttgaagttaacgtcgccgagattagcggcgattcgccggaaggccatgacgaatcgctggatttacgcattgaggaagccaaagcgcgtgtcgaacgcgaaagccgtttttaccgttcactgaccgtggcggtcgtggtttgcgtcctgctggcggtgctgaactggctgaccggcgcggacagctactggtccgcatgggtggcgatcatctggggggcgctgctggcggtaaaaggattacgcctgtttgtgtttggcgaatggatcaaaaactggcgtcaggcgcggctgcagcggctgctgcgaaagtaa

SEQ ID NO: 252778 - DNA, 1194 bp, Klebsiella pneumoniae
atgataccgacactcaggcgctcaacggcggcgctgctggcttcgtcgttgctgttaacgattggccgcggcgcaacgttaccttttatgacgatctacctcacccggcagtaccagctggaggtggataaaatcggctatgcgctgtcgagcgcgctgatcgtcggggtgctgttcagcatggggtttggcattctcgccgataagttcgataaaaagcgctatatgactctcgccgtgctggcgtttattggcggtttcatcgctattccgctggtcaatagcgtcgcgctggtggtgtttttcttcgcgctgattaactgcgcctactcggtattctccaccgtcctgaaagcgtggttcgccgacgtgctgtcgccggaaaagaaggcgcagattttttcccttaactacacctttcttaatattggctggaccgttgggccgccgatcggcactctgctggtgatgtacagcattaacctgccgttctggctggcagcgggctgcgccgcgctgccgctggtgtttattcagctgtttgtccagcgtaccagcgccgcgattgctgaggataatgcggtccagtggtcgccttcggtgctgctgcgcgatcgtgcgctgctgtggtttacgctctccggcctgctggcgtcattcgtcggcggctctttcgcttcctgtatttcccagtatgtgctggtggtagcggacagcgattttgctgaaaaagtggttgccgtggtactgccggtcaacgccgccgtcgtggtggcgctgcagtacgcggtcggccgtcgcctcaccgcgcgtaatattcgcccgctgatgacctttggtacggtctgttttgtactcggactgggcggttttgttatttccgataatagcctgctgctgtggggcctctctgccgccgtctttacgcttggtgaagtgatctacgcgccgggtgaatatatgctgatcgataacattgctccgccgggcatgaaggccagctacttttccgcccagtcgctgggctggctgggagcggcttttaacccgatgctgaccgggacgattctgacccatctgccgcactggtcgctgtttgcaatattgatgctcgctattattgccgcctggctgatgattttccgtgggatgaacgtacgcccgtggaacggtagtgcggtcgcccgcgcctga

SEQ ID NO: 252779 - DNA, 900 bp, Klebsiella pneumoniae
atgacgcgaaaagacgggctgctggcattactggtggtggtggtatgggggctgaatttcgtggtgattaagctggggctgcataatatgccgccgctgatgcttgccgggctgcgttttttgctggtggctttcccggcgctgctcttcgtcgcgcggccaaaaattccgctcactctgctgctgggctacggtctgactattagctttggccagtttgcgtttctgttctgcgcgattagcctcggtatgcctgccggcctggcctcgctggtgctgcaggcgcaggccttttttaccattatacttggggcgtttatcttcggcgagcgtttgcaggcgaaacagctggcaggtatcgcactggcgattttcggcgtcctggtgctggtcgaggccagcctcggcggacagcatgttccgctggtgggctttatgctgaccctggcggcggcgctgagctgggcctgcggcaacatcttcaataaaaaaatcatgtcccatgcgagccggccgccgattatgtctttagtcgtgtggagcgcgctgatcccggtgctgccttttatgctggcctcctggcttctcgatggtccgcagatcatggcggcaagcctgctgcatatcgatggggtaacgattctgtcgctactgtatctggcgtttgttgcgacgattgtcggctatgggatctggggttcgctgctcggccgctatgagacctggcgcgtagcgccgctgtcgctgctggtgccggtggtgggaatggccagcgccgccttgctgctcggcgaaacgctgaatagcctgcaactgctgggggccgtgctcattatggccgggctgtatatcaacgttttcggcctgcggatcgtgcgtcctggaatggcgagaggataa

SEQ ID NO: 252780 - DNA, 219 bp, Klebsiella pneumoniae; identical to SEQ ID NO: 171994

SEQ ID NO: 252781 - DNA, 381 bp, Klebsiella pneumoniae; identical to SEQ ID NO: 171995

SEQ ID NO: 252782 - DNA, 435 bp, Klebsiella pneumoniae
gtgaaaagtacaagcgacctgtttaacgaaatgatccctctcggacgcttgatccagatggttaaccagaaaaaagatcgcctgctcaacgactacctctcaccgatggatattacgtccacccagtttcgggtgctctgttccattcgttgcgaagtgtgtattacccccgttgagctgaaaaccgtcctttccgtcgatccgggcgccatgacgcgcatgcttgaccgcctggtctgtaaaggctggattgaacggttacccaacccgactgacaagcgtggcgtactggtgcagctaacgccagacggcgcagccctttgtgagcagtgtcatcaggttgtgggtcagaaattgcaccaggaactaacaaaaaatctgtcgacggatgaagtggccactcttgagtgcctgctcaaaaaagttctgtcgtaa

SEQ ID NO: 252783 - DNA, 669 bp, Klebsiella pneumoniae
atgatggatctttttaaagcgataggcctgggactggttgtgatcctaccgctggcaaacccgctgactaccgtggcgctgttccttggcctggccggaaacatgaataacgccgagcgtaaccggcagtcgctgatggcctcggtctacgtgttcgctatcctgatggtcgcgtggtacgccgggcaggtggtgatgaacacctttggcatatcgattcccggactgcgtatcgccggggggctgattgtcgcctttatcggcttccggatgctgtttccgcagcaaaaggcccatgattcgatggaagctaagctcaaatcggaagagctcgaagatgaaccgacggccaatattgccttcgttcccctggcgatgccgagcaccgcagggccggggacgatcgcgatgattatcagctcggcgtcgacggtgaagcacggcgcaaacttcccggagtgggttgtgctggcggcgccgccgattacttttgcgctagtcggcattattctgtggggctgcctgcgcagctccggagcgattatgcgtctggtcgggaagggcggtatcgaggcgatttcccgcctgatgggcttcctgctggtctgtatgggcgtgcaattcatcatcaacggcgtgctggagattatttcgacctatcacgcctga

SEQ ID NO: 252784 - DNA, 1200 bp, Klebsiella pneumoniae
atgatgacaaatacggtttcacgcaaggtcgcgtggctgcgcgtagtcacgcttgcgattgcggcatttatttttaataccaccgaatttgcgcccgttggcctgctgtcggacattgctgacagcttcggcatggaaacggcgcaggtggggattatgctgacgatctacgcctgggtcgtcgcgctgatgtcgctgccctttatgctgttgaccagcaagatggagcgccgtcgtctgctggttggcctgtttattctgtttatcgccagccacgtgctgtcgttcctggcatggaactttaacgtgctggtgatcagccgtatcggtatcgcttttgcccacgcggtattctggtcgattacttcagcgctggcgattcgtatggcgccagccggtaaacgggcgcaggcgctgagcctgattgctaccggtaccgcgttggcgatggttttcggtatcccgatcggccgtatcgtcgggcagtactttggctggcgcaccaccttcctggttattggcctgggagcgctgatcaccatggtatgcctgatcaagctgctgcccaggctgccgagcgagcattcaggttcgctgaaaagcctaccggtgctgttccgccgccctgcgctgctgagtatttatttactgacggtgattgtggtgaccgcgcactataccgcctatagctatattgaaccgttcgttcagacggtcgccggcctgagcggcaacttcgcgaccgtgctgctgctgacgctgggcggcgcgggtatcgtcggcagcattctgtttggtaagctcggcaacctgcatgcttccggattaatcaatgcggcgattggcctgctgctggcgtgtctgttactgctgctgcccgcctcgcacaacgctaaccacctgatgctgctgagcgtcttctggggcgtggcgatcatgattatcgggcttggtatgcaggttaaagtgctggcgctggcgccggatgcaaccgacgtggcgatgtcgctgttttcggggatctttaatatcggcatcggcgctggcgcgctggtgggcagtcaggtcagtacccatctgtcgatggcatcgattggctatgtcggcgcgatcccggccgtcgtcgcgttaatgtgggcggtgatgattttccgccgctggccgatctcgctggacgaccatcagccgcatcactcctga

SEQ ID NO: 252785 - DNA, 792 bp, Klebsiella pneumoniae
atgcaggaaattaatttttatctggtcgatgcgttcagcgaccatagctttggcggcaacgcagcggcggtttgcccgctcaccgaatggctgccggacgaaacgttgctgaaaatggcgcaacagcataatcagtcggagacggcgtttttcgtccgcaccgatgaaggatacgagctgcgctggtttaccacgctggatgagatcaacctttgcggccatgcgacgctggcggcatcgcacgtgatttttgaatatttcgatcacccgtcatcaacgattgtctttagcacccgttttgttggcgagcttcgcgtcacgcgcagcggcgactggctgaccctggatttcccggcctgggcgacgaccgccgttgagcagccgcctgcggaactgctggccgggctcggactgcgcgaagcgcaggagatacgcgtggcgcgcgattatctggtgattctggccaaccgccagcaggtggaagccgtgcgcccggatatgcagagactccagcgcctcggtaaaatgatctgtatcagcgcggcggatgaagagtatgactttgtcagccgtttcttctgcccgggcgaggcggtggcggaagatccggtgaccggttcgacccacagcatgctgattccctactggggcgaaaagctcggcaaaacggagatgcaggcgcggcaggtttcggcccgcggcggcgatctgcgctgccagtggcggggcgagcgggttctgatcggcggtcaggcgacgacctatttaatcggcacgattacgctgcgttaa

SEQ ID NO: 252786 - DNA, 807 bp, Klebsiella pneumoniae
gtgacggaaatccctttttatctggtggcggctttcagcgaccagccttttgccggcaatccggcggcggtatgcctgcttaaagagtggctgccggatgcgctgctgctcaacatggcgcagcagcacaaccagtcggaaaccgcgttcgtggtgccagaaaacgatggttttgcgcttcgctggtttaccacccgcaacgaggtcaatctctgcggccacgctacgcttgccagcgcgcacgtgatatttcatcacctggattatcctgacgcggtcattcacttcgcgaccgcttccggtcgcctgaccgtgagccgtgaaggcgagtggctgacgctggatttcccggcgggagaaacgcaggagggtgagccgcccgccgcgatgctctccgcgctgggtattgatagctatctgcacgcgcgtaagggacgcgcatggcttatcgagctggcctctcgcgacctgctagaagccctgcggccgaatattaccgcgatgatcccgggtgagcataaagttaccgttaccgccgcaggcagcggcgaatatgacttcgtcagccgctttttctccccgggagaagcggtgtgggaagatccggtaaccggttctgcgcatactatgttgattccctactggcgtgcgaagctgggcaaaacccagatgctggcgcggcaggtttccgcgcgcggcggtgatattcgctgcgagctaaagggcgagcgggtattaatgagcggccaggcggtaacctatttaaatggcgtaatcacgctacgtgaaataacgtcaggcgagtaa

SEQ ID NO: 252787 - DNA, 1281 bp, Klebsiella pneumoniae
atgacaatggaaatgattctggcgctgggcattctggtgctaatgatagttcttattatgtcagacaaaatggcgtttggcgcaccgccgctgctcgcctgtctgctattggttgtgacagggctctccaacgttcagcaggcctttgccgggtttgttaactcaagcgtcattatgatcgccggctttatggtggtgatggcggcgctgcagaaaacgcggctgatcggtaacgtaaaatcggcgatggttaatctggtaaataaaggtagctataaaagctacgcgctgctactggtgattgtcatgattggcgccagcctggcgggtaccggttcaaccggctactacgtgctgattctgtcactggtttcgaccatcccctacagcaagaagctgccgacctcaaagctgatgatgccgctgggattcgcaaccaatcatcctctgttcccggttaacgtcgcgctgctgtttggcgtcaccgccacggtactgcaaaccgccggtttcaacgaggagatttcaatggtgaaatttgctctggtcaatctggtgatgtcgctggcctttttggcctggtgcctggttgcgtatcgctttttacccgatcacccgatcgccgatgcctccgaggaagcgatggcggtacgcgaagaggaagccgtggtgctgcccgcgtggaaagagtattgcaccgttggcgcctttgcgttcagcgtcgtgggtatgatgctgatgaaccagttaggcaacatcgcctatgtcgtaccgggtctcgccgctgccttcgtgatgatgattaacgttgtcgacttcaaagaggttcgcgatcatatgggcgcgccggttatcctgatgatggccggggtgatcggcgtcgccgatgcgctggcaggcacgggcttcacggcaatggtcggcgatgcggtggcgggcgtgctcggcgcaaacgtatcgcccttcgtgtttatttttatctttgcgctactgaccagcacctgctcaacctttaccgggtcgaacatgggctcggtgtatatcttcgcgccgatcgcgatcgccgcctgtaccagcctcggcctcaaccctaccgcagccgcgattgcggtggtcatttctggctggaacggtggctatatgccgattgacggtatgccggcaatgattctgggaatgggaaaatataaattaccggaattctggatattctcggtgccgatgtacttaatacggattctggcactgtgcgtcggcgcgattgtgatattcccgatgtag

SEQ ID NO: 252788 - DNA, 471 bp, Klebsiella pneumoniae
atgatcgtcggcaaccttaacgccctgccgctggcagggcttcccccggcgctgcggcagatcctctcccttccgcaagccacgctagcggcgctgcgcggcaggccggacggccgctggcagccggaaaactgtcgctggtattgcaatatcggcgaagcgcatacccagccgaccgcccagcggcacaccgaatatcaccatcagtgggccgatattcaggtgatgctggcgggctgcgaggtgattaacgccggaatgctctgcgtcgcgcaggatagcgatgaagagcgcaaaccggatctgtttatcgcccgcgattgcccgttgccggtatccatcaccctgtatcccggtgattttgcgatatttctgcccggcgaaccccatcaggcgctgtgcgcggtagacgtgccgtcaacggtacgcaaagccgtatttaaagtgccgagcgacatgctggaagggtaa

SEQ ID NO: 252789 - DNA, 1173 bp, Klebsiella pneumoniae
atgtctgtaaccgcaattcgtgacggaataattaatcagcatgaacaggacgcgcgggtcgaaaccgcgatgttaccgtcatcctgcccgcaaaaccatgcggcaaacctgctgccgctgccggacggctccctgatgtgcgtctggttcggcggtacccaggaaggcgttgccgacatctccgtttggggatcgcgtctgcagcccgggagccgccagtggagcgatgcggtcaaattgtctgatgacgccagccgttccgagcaaaacccggtgctgtttctggcgccggataacgtgctatggctgctgtggaccgcgcagatctccggcaaccaggataccgccatcgtgcgctatcgccagtcaacggatctgggtcaaacctggggcgagattgccaccctgctcgataagcccggcacctttattcgccagccgatcatcgtcctcgacaacggcaactggctgctgccggtcttctactgccgcactcaaccgggtgaaaaatgggttggcaacgacgatatcagcgccgtcaaaatctcctccgattgcggcaaaacctggcgcgacgtcgaagtaccgcaaagcctgggctgcgtacatatgaacatcaccgcgctgccgggcggcacgctggttgcgctgttccgcagccgttgggccgacaatatctactacagtcagtccgtcgataacggcgaaagctggtcagtgccggaaccgactgaactgcccaataacaactcatctattcaggtgactaccctcgccagcggcgaactggcgctggtctttaaccacatgagcgccgccggcgcgcgggaacgccgggcatcgctttacgacgaaatcgacgatggcgataacagccgtaaagagccggaagtgaccagcgggcgttcggccttctggggagcgccgcgcgcgccgatgaccgtagccatctccgccgacggcggtaaaacctggccatggcagcgcaacctcgatgaaggcgacggctactgcatgaccaataactcgctggataagcgcaatcgcgagttctcctacccgagtatcaaacaaggggcggacggcacgctgcacattgcctacacctggttccgccaggcgattaaatacgtgcacgtttcgcccgagtgggtgaaggagtccgcacgatga

SEQ ID NO: 252790 - DNA, 762 bp, Klebsiella pneumoniae
atgtttatatggatgcttgaccctgaaatatggttgacgctggtaacgctcacctttctggagattattctcggggtcgataatattatctttctctcgctggtagtggccaaacttccaccgcatcaacaaaatgttgcgcgtaagttgggattaagcggcgcaatggttatgcgcgtgctattgctggtatctattgcctggctggcgcatataacggtgccgctgtttactattgcgcattttgtcgtatcggtgcgcaccatcattttatttgtcggtggttgtttccttatttacaagtcactgcaggagatacgcggtgaactgcagctggaagaagagtcgcacggcggcggccagcgtcagctttcgctggcgggcgcggttgtccagattatgctgctggatattgtctttagcctggattcagttattaccgcagtcggtttgtcgcaacatattttcattatgattacggcagtcattattgctgttggcattatgatgttcgcggcaaagaccattggcgattttgtcaataacacgccaacgatgaaaatgctcgctttaacctttttgttgctggtggggatattattggtcgcggatagtctggagatacacattgcaaaaggttatctctattttgccattttcttttcgctggcggtggaaacgctcaatattattcgtaataaaaaaatcattaaggcttcgcagcccgcagaagcttacgactcattacagctaaacaaatag

SEQ ID NO: 252791 - DNA, 885 bp, Klebsiella pneumoniae
atgagcaattcaattactggcgttctgaccgccatcgtcacgccttttaccgcagagggagccgtgaatatcccggcgctaaggcagcaggtgcagcgccagctcgccgcgggcaacggtattttttgcggcggtaccaacggcgaattctttgtgctgaatgaagcggaaaaaatcgccgtcgctaaagcctgcgtggatgaagttgccggtcgggcgccggtggtggcgcatattggcgaagtgtcaactcgcgaaacgatccgcctgggtcaacagatcgaacaactgggcgttgacgcggtctccgtgattaccccctggtttgtgccgttaaagcaggatgagctgatcgcccactataccgccattgctgacgccctgagcgtaccggtatttctctacaacatcccggcgcgcaccggcaacaccattgaaccgcaaaccgcgcgcgcgctggcgcagcatccgaacattatcggcgtcaaagacagcgccggcagctacgaaagcctgaagggtttcctcgatgcggtccgggatatcgccgattttgacgtgctgaacggccctgattcgctgatacaccagggttttgttgatggctgctccgcctgtatttccgggctggcaaacgtcgcgccaaaagagatcaacgccatctgggcaaattttaaagcgggcaatgttgagggctcccgccaggctcaggagagcgtcaccggtctgcgcaccgatctttataaagttgccttctcgccggcggcggtaaaaaaagcgctgcagctgatgggccacgatgttggcgacagtcgctacgcggtgagcttcacctcggcgcagtgcgcggaaattaatcaaattattgccaaatatatttcctga

SEQ ID NO: 252792 - DNA, 1146 bp, Klebsiella pneumoniae
gtggcaaccattaacagcaccctgattagcggcgcgggcgcgtttaccgccctgctaccgctgctgaccggcaaacagcgcattttgctggtcaccgatgccaacgttggcaaactcgatgccgcacggcagatccgtacgcttctggaagacgaagggcgtcaggttcagatcgttgattccgtacccgcagagccaagccagcatgatatgacgcaaattctgcgcctcgtcagcgctaaccagccggagctaattgtcgggattggcggcggtagcgttctggatgtggccaagctgctctcggttctgctgcatcccgactcgccggggcttgaggcgctgctggcaggcgaaaagccgcagcaaaaggtgacctcgttattaattcccgccactgccggcaccggctccgaagccacgccgaacgcgatcctggcgatcccggaacagaatacgaaggtggggattatctccccggttctgctgccggattatgttgccctgctgccggaattaaccaccagcatgcccgcgcatatcgcctcctctaccggcattgacgcgctgtgtcatcttattgagtgctttacttcgaccgttgccaatccggttagcgataacgcggcgctgattggcctgcgcaagctggtgcgcaacatcgagctatcggtgagcgagccgcacaatctggcggcgaagctggagatgctgtgggcctcttattatggcggtgtggctattaaccatgcgggcactcatctggttcatgccctttcctatccgttaggcggcaaatatcacctgccgcacggcgtggctaacgccattttgctggcgccttgtatgaaggtggtgcgcccacacgcggtggcgaaatttgcccaggtctgggatctgctccctgaagccgacctgacgcttagtgaagaagagaaatcccatgcgctggtcgcctggctcgccgcgctggtgaaacgcctgcagctgcccgataaccttgccgcgctgggcgtaccgccagaaagcatcagcgaactgagcgaagcggcgctgaacgtcaagcgtttactgaataatgcgccatgcagcgttaaccaggatcaggttgaggcggtttaccgcaccctgtttcccgcacaataa

SEQ ID NO: 252793 - DNA, 1239 bp, Klebsiella pneumoniae
atgggcagcggcgataacaaggtgctggttctggcggatgactttaccggcgcaaatgacgcgggagtcagcctggcggagacggggatgcgggcggaagtggcgtttagcgccagctaccagggagaggcgcaggcgctaatcctcaatagtgacagccgcgcgcagcccgccgcagaggcggcacggcgcatcacgcatcttttacaggcggtgttgccgcgttttcagccgcgctggacggtgaaaaaaatcgactccacgctgcgcggcaatctcggcgccgagctggaagcaacgatgcgcgcgctgaactgcgccgtagcggttctggcgccggcttttccggcggctggccgggtgacgcgccgggggctgtgctatgtgcacggctcgccggtgaatgaaaccgagttcgcgaccgacccgaaaacgccggtcagcagcgcggatatcgccgccgtggtcgcccaacaaagcgatttgctgtgccgtaggacaacggtcgccgggctggcggcagagctggaacaaacggttgagacgccgcgggtgctgatcgtcgatgccgaagaaaaccagcagctggacgccattatcgccacggtcgctctgtgcgagcagcgggtgctgctggtggggtctgcggggctatgcgacgccctggcgcgtcggctggcgactatgccgcacggcccgctgctggccgtggtcggttcaatgagcgaaatcgcgcaacagcaggttgcccgtcttaatgagcatccgcgcgtccggcgggtcgacattgatgtggctatggcctttgacggcgatgccgcccttgatgcccggcgtatcgtggcggtattgagcgaaaataatcattgcgttatcaccacccgacccgatagcgaggcgcgaaaggcggttgaagccttgtgtcgtcggcatggggtcgatcgcaccgcccttggcgagcgcatctgcgcatacctggcgcgagtcagcgcgctggccatcgcgcagagccagccgggagcgctctatttatccggcggcgacgtggcgatcgccgtggcgcaggcgctgggcgccagcggatttcatattacaggccgggtggcgcaatgcgtgccgttcggcaattttctgggtagtagctggcagcggccggtaatgaccaaggcaggcggattcggaacggaaaccaccctgctggaggttgtgaattttattgaggagaaaatgagtgactaa

SEQ ID NO: 252794 - DNA, 987 bp, Klebsiella pneumoniae
gtgactaacatcattgcggtaacgatgggagacccggcaggcattggcccggaaattattatcaaatcgctggttgaggggaaactcaacggcgcgccggtcgtggtggtgggctgcgcgcagacgctgcggcggatcctggcgatggggataaccccgcccgccgagctgcgtatcattgatcgtccggaacaggcgcagttcagcgcgggcacgattaacgttatcgacgaaccgctggccgatccgcaaggactacgcgcgggggaagtgcaggcgcaggcgggggatttagcttaccgctgcatcaagcgagcgaccgcgctggcgatggcgggtgaggtgtttgcgatcgctaccgcgccgctcaataaagaagcgctgcatctggccgggcacaacttcccgggacataccgaaatgctcgcccatctgacgcaaaccaaagattttgcgatggtgttatataccgataagctcaaagtgatccatatctctacccacgtggcgctgcgaaaattccttgataatctgaaccagccgcgagttgaaacggtgatcggcatcgccgatagcttcctgcgccgggtgggtttcactaatccgcgcattgccgttgccggagtgaaccctcacgctggggaaaacggtctgtttggcgatgaagagattcgtatcgtgggtccggccgttgaagcgatgaaggccagagggctcaacgtgaccgggccatgcccgccggacacggtatttatgcagtgtcacgaaggtctgtttgatatggtggtcgcgatgtatcacgatcaggggcatattccgctaaaattacttggattttatgatggggtaaatattaccgccggcctgccgtttatccgcacttccgcagaccacggcacggcgtttgatattgcctggacaggtaaagctaagtctgacagcatggcaacctctattgagctcgccatgcaaatcgcacaggaataa

SEQ ID NO: 252795 - DNA, 762 bp, Klebsiella pneumoniae
atgaagggatataaccggttagagcagattatggattttctgaagagccataatctggtgacagtggaccagctggtggcggcgactcacgcctcgccggcgacgattcgccgcgacctgattaagctcgatcaggaaggggtcatcagccgtacccacggcggcgtcacgctcaaccggtttattccttcacagcccaccacccaggagaagtcccagcgcagtctgcaggaaaaatacgccatcgccagcgcggcggcggcgttagtcaaggccggggacgccatcgtcctcgatgccggaaccacgatgatcgaacttgcccggcagataacccacttgccgctgcgggtgatcaccagcgatctgcatatcgccctgtttctctcggaatttaagcaaattgaagttaccatcatcggcggacgcatcgacgacagcagccagtcctgcatcggcgatcacggacgccgtctgctgcaaaatatctggcccgatctggcgttcgtcagctgcaacggctgggatctggagaagggcgtaacctcgccaacggaagagaaagcggcgctgaagcgggatttaatcgcgaacgcccggcggcgcattctgctggcggacagctcaaaatacggcgcctggtcgctgtttaacatcacccatctcgactcgctcaccgatatcatcaccgataatcatctgccggaagagacgcgtgaactgctggggcatatccatccccggctgatcattgccgactag

SEQ ID NO: 252796 - DNA, 945 bp, Klebsiella pneumoniae
atgaataccaaagcgcgcaaggtcatgattatcggggcaggcaacgtcggcgcctctgcggcctatgccctgttgaatcagaatatttgcgaggagttaatcctcgtggacctgaataaagcccgcgccgaagcgcacgcccaggacctgagcgatgcggcggcctacatgccggggatgatgacgatttcctcgcgggaagccagcgactgcgccgatgttgatattgcggtgctcaccgtttccggcggtgcgctcaaaccgggccagactcgactggacgaactgaccaacacggcgacaattgtaaaaagcctcattccgcaaatgatgagcggcggtttcaacggtatttttttgattgccaccaacccctgcgacatcatcacctggcaggtatggcggctttcaggtctgccgcgcagccaggtgctgggtaccggcgtttggctggataccacgcgcctgcgcagagtgctggctcaggaactggatatcggcgcgcagagcatcgacgcctttattctcggcgagcatggcgacacccagtttccggtctggtcgcactcagcggtttacggcgccgccatcggcgatgtgtaccaaaagcatactggtcaaattctcgaccgggagcggattgcggaaaaggtgcgcaggctgggatttgaaatttacgccggtaaaggctgcaccgaatacggcgtcgccgggactatcgccgaaatctgccgccatattttcaccggcagccatcgtgcgctggcggtatcgtgcattctggatggcgagtacggcatcaccggcgcggcggcaggcgtacccgcggtgcttacccaaagcggcgtacagcagatcattgagctgcagctggccgatgatgaagcagagaagttccgccgctctgtggaagtgattaaagccaatatcgcccgcctaccgtaa

SEQ ID NO: 252797 - DNA, 483 bp, Klebsiella pneumoniae
atgtacacaatcaccccaaccccgcaaaaccacccggatctgatggccttaattgccgaactggacgcgtatcagcagacgctctacccggctgagagcaaccatttgatcgacctgagcgcgctaccggcggagtcggttattgcgcttcttattcgcgatacgcagcgccacgccgtcggctgcggggcgatcgtacttggcgaagagggggttggcgagatgaaaagggtgtttattcacccggcccatcgcgggcagcagctgggagaacgactgctggccgcgctggaggaagaggcgataaatcgcgaatgccataccgtgcgcctggaaacgggcatccatcagcacgccgccgttgcgttatatacgcgcaatggttaccagacccgcagcgcctttgcgccgtatcagccggatccgttaagcatctttatggagaagatgctgcttgccgatcttcgttcagcagcgctataa

SEQ ID NO: 252798 - DNA, 879 bp, Klebsiella pneumoniae
atggacctgacccagcttgaaatgtttaacgccgtcgccagcaccggcagcattacccaggccgcgcagaaggtgcatcgcgtgccgtcgaacctgaccacgcgcattcgccagctggaggcggatctcggcgtagagctgtttattcgcgaaaaccagcgtctgcgcctgtcgcctgccgggcatagctttttacgctatagccagcagatcctcgccctggtagatgaggcgagaatggtggtcgccggagatgaacctcaggggctgttttccctcggctcgctggaaagtaccgccgccgtgcgcatttcaccaaccctggcgcactttaatcaacgttaccccaaaattcatctggccctctccaccggcccttccggcaccatgatcgacggcgtcctggagggaaacctgagcgcggcgtttgttgacggcccgctggtgcatccagggcttgaggggttaccggtatttcccgaagagatgatgatcgtcgcgccctttggccacccgcccattgcgcgcgccagtgaagtgaatggcgccagcgtctatgcgtttcgcgccaactgctcctaccgccgccattttgaaagctggtttcatgccgatcgcgccacgccgggacgcatccatgaaatggagtcctaccacgggatgctggcctgcgtcattgccggcgccggtctggcgctgatcccacgcagcatgctggagagcatgccgggccatcagcaggtttccgcctggccgctggcggaagagtggcgctggctgaccacctggctggtctggcggcggggggcgaaaacccgtcagctcgacgcgtttatagcgctgctgaacgaagatcggcaagcagcatcttctccataa

SEQ ID NO: 252799 - DNA, 1386 bp, Klebsiella pneumoniae
atgaatgtatctgccactcatgcggtttccgtgaacccgaccacaggtgaaaccatatcgtctctgccctgggcgagcgagcaagaagtcgattcggccgttgcccttgcggaacaagcttatcgtcagtggcgcaacgttagcgttgcggaacgcgcggcagcgctgcgtcatgtcggtaacgcgatgcgcgcgcgcggcgaagcgctggcgcaaatgattagcctggagatgggaaaaccgatcgctcaggcgcgcggggaagtcgcgaaatcggcaaatctctgcgactggtatgccgagcacggaccggcgatgctcaaaaccgaagcgacgctggttgaagataataaagcggtcattgagtaccggccgatgggcgctatcctcgccatcatgccctggaatttcccggtgtggcaggtgctgcgcggcgcggtaccgattctgctggcgggcaacagctatctgcttaagcatgcgccaaacgtactgggaagcgcggcgatgatcggtgaaatctttgccgcagccggcgttccggccggggtgtttggctgggtgaatgccaccaacgatagcgtttcgcagatgatcaacgattcgcgtatcgccgccgtgaccgttaccggcagcgtgcgggccgggaaggcgattggcgcgcaggccggcgcggcgttgaaaaaatgcgtcctggagctgggcggttcggatccgtttatcgtgctcaacgatgccgacctcgacgaggcggtgaaagcggcggtgatcggccgctaccagaacaccgggcaggtctgcgccgcggcgaagcgttttatcgtcgaggcgggcattgccgagacctttacgcagaaatttgtcgccgccgtcgccgcgctcaaaatgggcgatccgcgcgatgaacagaactacatcgggccgatggcgcgtttcgatctgcgcgatgagctgcatgagcaggtgcgcgcgaccttaaaagaaggagcgaccctgctgctgggcgcggaaaaaatcgccggcgcgggcaactactatgcgccgacggtgctgggcaacgtcaccgctgagatgaccggcttccgccaggagctgtttggcccggtggcgacaattaccgaagctcgcgatgccgaccacgcgctggcgctggcgaacgatagcgagtttggcctttctgcaacggtatataccaccagcgaagcacaggcccaacgctttgccgatgagctggagtgcggcggcgtgtttattaacggctactgcgccagcgatgcccgcgtggcgttcggcggcgtgaagaaaagcggatttggccgcgagctctcccattttggtctgcatgaattctgcaacgtgcagaccgtctggagagatcgccgctag

SEQ ID NO: 252800 - DNA, 927 bp, Klebsiella pneumoniae
gtggcgacggtaattaataacgcaatgctcgatgccattctggctgaagtcaggccgctgattggccgcggtaaagtggcggactatattcctgccctggccagggtcagcggcgataagctcggcgtggcaatctgtacggtggacggtcagcactacagcgccggtgacgcccacgagcgtttctcgattcaatctatctccaaagtcctcagtctggtggtggcgatgaaccactatcaggaagaggagatctggcagcgggtgggtaaagatccctccggccagccttttaattcgctgttgcagctggaaattgagcaaggcaaaccgcgtaacccgtttattaacgccggggcgctggtggtctgcgatatgctgcaaagccgtcttagcgcgccccgtcagcggatgctggaaatcgtgcggcgcctgagcggggtgagcgatattgcctacgatccggtggtcgcccgctcggagttcgatcattcggcgcgtaatgccgccattgcctggttaatgaaatccttcggcaactttcacaacgatgttgccacggtactgcaaaactattttcactactgttcgctggagatgagctgcgtagagctggcgcgtacctttctgttccttgccgaccggggtatcgccccgcatcttgcgacgccggttatcgcgccgattcagtcgcggcaggtcaacgctttgatgatgaccagcggcatgtaccagaacgccggtgagtttgcctggcgcgtcggtttacctgcgaaatccggcgtcggcggcgggattgtggccatcgttccgcaggagatggcgattgcggtctggagccccgagctcgatgacgccgggaactcgctggccgggatcgctttactggaaaaactgacgcaaaaactggggaggtcggtattctga

SEQ ID NO: 252801 - DNA, 1413 bp, Klebsiella pneumoniae
atgtctccactgtcgattcggtcattcacgctgtttcgtgaggaacaacccgtgcgtgatgcgctggtgttgttcactttaacgctactcctgcatttctttggcgcgatgctgcgtctggtacaagaactgtcgtttttctggccgctgaatgcggtaatggcggggatttttgcgcgttatatctggctaaatcgcagttatttttacgccatctgttttgccgccatgctggtatatgacggtttaacctcgcgctgggggatgggcttcgcctccttcctgatcaacttctccaatctcgtttttattgtcactctggcgcagctcattttatgggacaagcgccggacggactcgatgccgggaccgattaacgcgcttagcctgttttgctactgcctgctggcggcgctgctctgcgccgccgtgggcgcgctggggtcggtagatgtcgagcgcgcaacgtttatcccgcagctggcggactggtttagcgaacagttctcaaccgccgtgctgatcctgccgtttatcttgaccctcacgctcccttcggcgttcgggcgttttcgcctgcgccagctgctgccggcgattgcgctggtgctgtcgattgtgctcggcgtagcggttggcggcgccgggagcatcaccttcccgttaccggcgctgatctggtgcgctattcgctacccgctgccgctgacctgtctgctgacctttattaccggcattagcgaaattctgctggtggcgaactcgcttatccacctttcgcccgatagccggatgcagccgtggcagctgttttcgacgcgtctggggatcgctgcgatgctgataagccccgttatcgtcgcttccagcgttgaggcgattaacaatctggtcaaacagctggccctgcgtgccgactttgacttccagactcgggtctattcccgctctgggttaagcgaagcgctgaagcgccagccgatcgcggaaaatacgctgctaacggtgatggtgctggatatcgacggcttcaagcaggtcaacgatcgctggggacatgaatgcggcgactgtatgctggcccagtttgcgcagcaggtgcggcagctggtgggagaagagggcatggtcgcgcgtatcggcggggaagagtttgccgtcgcagcgctgacctcatccggtcaggaagcgcagctgctggcagaaaaaattcgccagggtattgaagcgcaaaccttcacctggggtcagagcaaaatccagctgaccatcagcatggggctcgagagccagccgcttggcgccgccagaattacggatctgttcaaccagctgctgatggctgccgacgattatatgattcaggcgaaaaatgccgggcgcaatcgtatttttacgcaaaagatggcctga

SEQ ID NO: 252802 - DNA, 486 bp, Klebsiella pneumoniae
atgaccacatccttttctctgcgcacgctgtcgcgtgacgatattctcgaacatcttcctgaattaaccgatatcctcgtcagctgcgtcaacggcggggcctcggtgagctttatgctgcctttcgcccctgaaaccgcgacggcgttctggctgcgaatggcgcagagcgtggcagccggggagcgggtcgtcatcgccgcggcggatgagcagcagcggctcgttggtacggtgcagctcattatcgaccagccggaaaaccaaccgcaccgcgccgacgtcgctaaacttctggttcaccaaaatgcgcgtcgcctgggtctggcgaatgcgctgatggccaggctggaagcgatcgcgcgcgagcagggcaagagcgtttacgtgcaatgcggttgggaaaaggccggggaaattcctcgctatgcgctgatgccggacggcgaactgacggcgacatcgctgttctataaacttttgtaa

SEQ ID NO: 252803 - DNA, 1452 bp, Klebsiella pneumoniae; identical to SEQ ID NO: 172018

SEQ ID NO: 252804 - DNA, 441 bp, Klebsiella pneumoniae
atggtcattgagattcgcgaacccgatcggcaggataaagcacagtggttatcgctttggcagggttatacccgtttctacggtagcccgcagccaacggaggtcacagaatacacctggcagcggatgcttgatgccgcttcgccgatgctgggtcgtttcgcggtggtggatggcaatgtggtgggctttgcgatttgtatcctccacgaaggaacatgggttaagacgcccatttgctatctggaagatctgtttgtcgccccgcagatgcgcgggcaaggcatcgccagaaccttaatacaggcgctgcaaacggaaggaaaagaaaaagggtggtcgcgcttgtactggcacactcgcaccgacaatccggcccggcgtctgtatgatgaattcacgccagccgatgactatgttcgttaccgcgtgacgctctga

SEQ ID NO: 252805 - DNA, 753 bp, Klebsiella pneumoniae
atggcagactggaatccctcactctatttgcaatttggcgctgagcgaacgcggcccgccgccgagcttcttgcgcgcattgcccattatcccgtgacgctggccgttgatttaggctgcgggccaggcaacagcaccgctctgctgcaagatgcctggccggacgcgacgattatcggcattgataattccccggcaatgctggaagaggcctcacaaaggttgccgaactgtgggttcgttgatgcggatattgccgcttatcgcccggagcgtccggcggatctgatatacgccaatgcttcgctgcaatggctcccggatcatcagcggctgttcccttttctggtgagcaatcttgcagaaaacggcgtactggcggtgcagatgcccgttaactggcaggagccgtcccataccctgatgcgtcaggttgcagaagagcttgggaacccggccagcggacggcatccgctgccagaggtacaggagtattatgatatgctcactgcctgcggctgcgaggtggatatctggcgcaccacctactatcacccgctggcatcgcatcaggccattatcgaatggctgcagtcaacgggtctgagaccatttttacagccacttgatgagccacagcgcgaagcgtttctcaagcgctatctggaagagttgaagcggcactatccgttacagtgtaacggaaaggtattgttattatttccgcgcctgtttatcgtcgcgcgccgttag

SEQ ID NO: 252806 - DNA, 807 bp, Klebsiella pneumoniae
atggctttaatcattaagatgttacttgagaaccggcttggtaaggacaaggataaactgttgcaggtgaaacctgggctaagccttgttgttgaggatgaaacctgccgggttctgtttgataccggccctgacggcagctttttgcataatgcgcagcgcatgggggtttctttatctaacctgaccgccacggtactttctcacggtcattatgaccactgcggcggcgtgccgtggctgccggacaatagccgtattatttgccatccgcaggtcgggcaaacgcgctattcggcgttatcgatcggcgggcatcgtgtaaagctcaaaaagctgtcgcgagagatcgactattcccgccaccgcatggaatacagtcgccagccgctggctatcagcgagcggctgatgtggtcaggtgagatcgcggttgccaagccgcgagcttatggcgtgctggcggggccatccccagcggaggattatattgccgatgagggcgtactgatttaccgctcgacgcgaggcttaatcattatttgcggctgcggacatcgcggcttgatcaatacccttcgccactgtcagaaggttaccggcgtccagcagatatacgccatcatcggcggacttcatctgcgccgcgcgcctccgtggagaatacgccagataaggcaatttttgcaccagcagaaggtggagaaagtgatggcctgccattgtaccggttcgtggggacgctggtggttatcggcggatagtgccccggcgaccggcgatacgttagtactggatcagggatga

SEQ ID NO: 252807 - DNA, 420 bp, Klebsiella pneumoniae
atgattcagtcactacaggcattattcaaacaagccacccgacgccggcttcgcatccgcgccgggcttgttattgcctgttggctgctactcaatctacagcttgccgtcgctgcacaccacggcggccagcagcagccggtcgcgccgcaggtgcaaattcatcacatcgttgatggcatgatgaccatgtccggcatggaaaacgtcgggcagaaagtcatctgtgagaaacactgcgaccccgacactgcgcaacctaatacctccacctctctacagctgaatgcattgcccgccgaaaccaccctgctggtggtttcgccgcagcaggagatttgcgctgaacgtatggactggcacacgccgccggtcaccggtccgccggctgaaatacgtttctgccgtttcagagaataa

SEQ ID NO: 252808 - DNA, 369 bp, Klebsiella pneumoniae
atgcgttcgacctctatttttctgctttttaccagcgttctgaccttttctttcaccgcatattccgccagcgcggaagatggcgcgatgcatcagcataatatgtccgcgatggcggaaatgccggggatgaataagcccgagaataccgccgcgctttattcggcaagcggggtgattaaagcctggcgcgacgatgcggtggtaattgcccattctccggttcccgggctgaactggccggcgatgacgatgagctttgcgctcgatggacatcaagataaaaagctgccggtgggacagcaggtcgatttcaccttccgccagaccgactccggctacgcgctcgtttcgattaccgcgcaataa

SEQ ID NO: 252809 - DNA, 1248 bp, Klebsiella pneumoniae
atgcacatcttaactaaggcggcctgcgggctgccgctcttgctgtcgctgacgtccaccagcggctgggcgacgacgctctcagaggccctgtcggcggcggaaagctactctgccgagctctccgccaacgatcatcaggttaacgctttgaagaatatggcggattccgccatggagcttcccgatccgaagcttaagtttggtcttgaaaacgtcccgttggggggaagtaacgccagccgcctgacccgcgagggcatgaccatgcagcggattggcgtaatgcaggactacgtcagcagcaccaagcgcgagcgcaaagccgactcgataaccgccgacgcgcggcgaaccgccgccaacgccgatgttatccgcgccaggctacagcgggaaaccgctcaggcatggctggcgctggcggtagcgcagaagtcgctgcgctcggtacaggcgctgattagcgaaacctcccggcaaattggcgtgcataaggcggccgtcagcagcgccagcgctacccccggcagcgtgctcgacgtcgaactggcgctcaatgctatgaaaaatgagcaagataacgcccggcgcgatgtgcagatcgctcaggcgcgtctgatgcagctaaccggtaaggatatccgcgttatttccggcccgctgccgcgcattgagcgcctgcctgccgatgaagcgaccttaattgaggggataaaacttcatccagaagtgattcaggccgcgcgtgaggctgatctggctaaagcaaaatccgggcagtcggaagtggcggcgatccccgacgtaggcgttgaggtctattacgccagacgcggagatgactatgacgacatggtcggcgttatgtttaccgtcgatttgccggtttttcagggtaaacgtcaggataaagaccacgctgcggatgtctcccgaacctatgaagccaacgatcggttgaccttattgatgcgcgagcatcaggcgcagcagtatcagctgatcgcgcagtataacgccgcgaaagccatttacgatcgccagcaaaacgaggtcctgccgctgctgcgcaagaaggtgagtctcgtcaatgcccagtatcggggcggcagctccgcgctgcctgaactgctcgccgcccgtcgcgacctgctgaacggggaaatcgccagcaacaacgccgagaaagcgctcgctgacgcgtgggccgccgttcgctaccttattccacaggatgttaaataa

SEQ ID NO: 252810 - DNA, 1470 bp, Klebsiella pneumoniae
atgaagctgaaaactgcttttacccttgtggcgctggccgtcgctcttgccgccgcgggcggatactggctgggatcgcggaacgcctcgactgtcactccgggcggaaccgaaacggctgcgggacgcaaagtgctctactggtacgacccgatgacccccgttacccgttttgataaaccgggcaaatcgccgtttatggatatggacctggttccgcgttatgccgatgaagaggctgacgatgatgcgggaggggtgaagattagcacccgccagcagcaaaatcttggcgtacgcacggcgagcgtttcccgtcagccactggcgccggagcttaacgcttttgctaccgtcgccgtggacgaacgcggcgtcgagacggtgccggcgctggccaacggcttgattgagaaactctacgttaacgcctctcagcagtttgtgaaaaagaacgaggcgctggccgaactgtggatcccgcagtgggcggcggcgcagcaggagtatctggcggtgaggcggctgggcgacagcgggctgaccgccgccgctcgcgatcgtctgcagctgcagtttatgccggaagcgattatccgcagcgttgagcgcagcgggaaaccgcaaacccggatgacggtacgcgcgccgcacgatggttatgtcagcaagctggatgtgcgcaccggcgcgcaggtcaccccagcccagccgctgttcgagctggcccgcctcgacccggtatgggtcgtgattgattatccgcaaagccaggccagcctgctgcgcgtgggtagccgggtgacggcgaccaccggcagttggcccgggagcgtttttcagggctccgtgcgcgagctacttcccgatctggaagcgaccacccgcaccttaaaggcccgggtagttttgaacaatccgcagcatcagctcaaacccggtatgtacctgaacgttcagctggccgaggcgcatcaggcgcgcgccgttctgaccatccctgaagaggcattgattgccacgggtagcagcaatcgggtgttaattgccgatggcgaggggcatttccgtccggtcgaagcgatcgtcgggcgcacgcaaaatggtctggtcgagataaaatccggcctcaaagagggccagaaggtggtcacctccggacagttcctgattgactccgaagcgagcctgcgcagcgcgctgccgcaaatggccggggaggatccgcaggaaaaaagctataccacgcacggggtcatcaaagctgtaaccgatggggcggtgaccatcgcccaccagccggtgccggcgctgaagtggccggcgatgatcatggattttgccattacgccgcagcagcagggacagatgcgccccggcgagtcggtaatgtttagcttcgtcctgaccgacgatggagcgcgagtcacctcaatgatgccgatgaacggcgctaaggagcagccatga

SEQ ID NO: 252811 - DNA, 3069 bp, Klebsiella pneumoniae
atgattgccgccgttatccgctggtcgttacgcaaccgtctgctggtactgctggcgtcgctgattatggccgcctggggcgtctggtcgatacagcaggcgccgctggatgcgctaccggatctctccgatacccaggtgattattcgcgtaagctatccgggaaaagcgccgcaaattgtcgaagatcaggtgacctatccgctgaccaccaccatgctgtcggtgccgggggcgaaaaccgtgcgcggtttttccatgttcggcgatgcttacgtttacgtactgtttgatgatggcaccgatccgtactgggcgcgctcccgcgtgctggagtacctgagccagatccagagcagcctgccgccggaagcgaaagcttcgctggggccggatgctaccggcgttggctgggtgtttgaatatgtgcttaccgataaaagcggtcagcatagcctcggggatttgcgagcgattcaggactggatcctgaaatatgaactgaaaaccgtgccggacgtatcggaggtcgccagcgtcggcggaatggtcaaagagtatcaggtgatccttaatcctgaccgcctgcgggccctgaacgttacccacgaacaggttatcagcgcgattcagagcgccaaccaggagggcggcggctcggtactggaactgggtgaagctgaatatatggtgcgcaccaccggctatctgaagtccatcgacgactttaagcaggtcgttatcgctgcgcgtgacggcgtgccggtgctgctgtccgacgttgccagcgtgcgccggggaccggcgatccggcgcggcgtcgccgagctcaacggtgaaggcgaagtggcagggggaatcatcattatgcgttcgggcaaaaatgccctgaccaccattaatgcggtgaaggcgaaactggctgaggtgcaaaaaagcctgccagcaggggtagaaatagtgccggtttatgaccgttcgcagctgattaaaaattcagtcgagaccctgacccacaagcttatcgaagagtttatcgttgtggcggtggtctgctcgctgtttctgttccatttccgcagcgcgctggtggcgatgatcacgctgccgctggggatcctcggcgcatttatcgtgatgcactatcagggcgtcagcgccaatatgatgtcgcttggcggaattgcgatcgccatcggagccatggtcgatgcggcaatcgtaatgattgaaaatatgcataaggtgctggagcagtggcggtatgagcatcctgagcgccagccgtcttccgccgattactggcaaattgccctacatgcggcatcggaggtggggcccgcgctgttttgcagcctgctgatcattaccctgtcgtttattccggtattcaccctcgaggcgcaggagggcaagatgttctcgccgttggctttcaccaaaacctggtcgatggcggtggccgccgggcttgggatcaccctggttccggtgctgatgggctactttattcgcggcaaaatccctgatgaggccgctaatccgctcaaccgctggctgatacgcgcctatgagccgctgctggataaggtcttgcagtggccgaaggcaacgctggcggcggcgggcctgctgctggtcgccacgctatggccgctggcgcagctcggcagcgaattcctgccgcaaatcgacgagggcgacctgctgtatatgccgcagcagaccgaccgtctgatcaagacgattcctgaagtacaaagcgtgttcggcaaggccggtcgggcggagagcgccaccgatccggcgccgctgaccatgctggaaaccaccattcagttcaagccgaaaagcgaatggcggcccggtatgaccatggataagctgatcggcgaactggacagtgcggtaaaagtgccgggcatcgccaacgtctgggtaccgccgattcgcaatcgcctggatatgctggcgaccggcattaaaagcccggtcggcatcaaagtgaacggcaacaatctggcggagatcgaaaaaaccgctgaggagattgagcgcatcgtgcgtcatgtcccgggtgtgacctcggcgctggcggaacgcctcgacggcggtcgctatatcgatatcgctatcgatcggctgaaagccgcccgctacggcgtgtcggtgaaggagctgcagtcggtggtcgccagcgtggtgggcggcgataacattggcgagactatcgaggggcgtgaacgctatccgataaacgtgcgctatccgcgcgaaatgcgcgactcgctgcagaagctgcgcgatctgccggtggtaaccagcagcggggcacaggtgacgctcgccgagctggcggatattgctatcaccgatggcccgccgatgctaaaaagcgaaaacgcccgtctgtcggactggatctacgtcgatattcgcgggcgcgatctgaaatccgcggttgatgaaatgcagcgcgaggtcagcaaacaggtcaggctgccggatggcatctcgctgacgtggtccgggcagtacgagtatctggaacgcgctaccgcgaagctcaaaatcgtactgccgtttactctgatgattatctttatcctgctttacgtcaccttcggtcgcgttaaagatgcgctgttgattatgggcacgttgccgttttcgctgatcggcggcgtctggttgctctggctgctgggctataacctgtcggtggccgccgccgttggctttattgcgcttgccggcgtggccgcggagttcggggtaattatggtgctctatttaaaccaggcgctcgcgaagcggcgcggtgagcttaatgaccggacgctcaacgaagcgatacacgaaggagccgtgctgcgcgtgcgcccgaaagtaatgaccgtcgcgacgattatggccgggctgctgccgattatgtggggtggcggtacaggttcagaagtgatgcagcgtattgccgcgccgatgatcggcgggatgatcaccgcgccgctgctgtcgatgctggtgatcccggcggtctatcttctgacgcaccgcaacaaaccctaa

SEQ ID NO: 252812 - DNA, 330 bp, Klebsiella pneumoniae
atgcccggccgcaacctgattctggcgggaataaaagacatgcaccaaagttttaatcagcgcgttcatttctattactgcattctggtggcgctgaaaatacacgcaaaatcgaagaaatcgggcggtatccgcgggaaaaataatttcctgctcaagtggctacgcaaagcgcaggacaacaatatcttccacccggatattaccagtgagatcgaatggctgcggggcaaaatcattcaggccggctacgataccgacctcgagccgatgctggactttgtctacgccaccgccaaacgcgcgtccgatctcaaaaacgccgactga

SEQ ID NO: 252813 - DNA, 1191 bp, Klebsiella pneumoniae
atggccacatccgtcagcaccacccagcttaatctgcgtattatttctatcgttgtctttacctgtatctgctatctctccatcggtttgccgctcgccgtgctgcccggctatatccattatcagcttggctatagcacctttatcgccggcgtggttatcagcctccagtacatttcaaccttgctcagccgcccgcatgcgggccgctataccgatatctgggggccgaaaaaagtcgtcagcctggggattatttgctgtctgctcagcgggctcttcaccctgctcgcggtcttgctgcaatctgcgccgccgctggcggttgccgcgctgttggtggggcgaattttcctcggcgtcggggaaagcttcactgccaccggcgcgaccctgtgggggatcaaaaccgtgggcgcgatccacacgtcgcgcgtgatctcctggaacggcgtggcaacctacgtggcgatggcggttggcgccccgctgggcgtcatgctcaacggctattttggcatcagcggatttgccgccgtcgtggtgctggctgcggcggttggcctgctctatgcccgtacgcgccaggacgtcagcgtgacggcgggaatccgggcaccgtttcacgtggtggtacgcaaaatctggccctatgggatggggctggcgctgggtaccgtcggttttggggttatcgcgacctttattaccctctacttttcggctcatggctggcaaggcgcggcgtttaccctgtcgctattcagcatcggttttatctgcattcgcctgattttaggtaacaccattacccgctacggcggcgtgccggtatcgttaatctgttttgcgatcgaatgtctcggcctgctgatcatctggtatgcctcctcggcatggatagcgggtattggcgcctttctcaccggctcgggcttttcgctgatcttcccggcgcttggcgtggaagcggtaaaacaggttgaagagcagaatcagggcaccgcgctgggcacctattcggcttttctcgatctggcgctgggattaaccggaccgctagccggctgggtggcaggctactacgagctggagactatttatttgttggccgcagcggtggtcgcgctggcatttatcctggttttgcgcatttacctgcaacaacgcgctgctctgccgcgaacctga

SEQ ID NO: 252814 - DNA, 447 bp, Klebsiella pneumoniae
atggaatacgatttagacggtatggatgttctttttgtcgcgggctttggaccgatcacccaatcaacgccagccagcagggaattttatgtggcggcgctgggcctgccgctcaaaccgatgcccggcaacgaagagtatttgctgaccgaacagcatgccctcgatggggtaaaacattttgcgctgtggccgatggctcaggcggcgcgctcctgttttgactcggatctctggccggactatctgccggtgccgcaggcgtgggtggagtttgaagtgcgcgatatcgacaccgccaccgacgcgctgaaggccagaggctatcgtctgctggtggataatcgcgtggagccctggggacagaccgtcacgcggttgctgagcccggaagggctgctggcagggattaccgtaaccccgtggctgcgcgagggcaaagcatga

SEQ ID NO: 252815 - DNA, 219 bp, Klebsiella pneumoniae
atgttgatttatgacgtattcggacgccacattggcgtccagcgtcgggacgggcgatggttactcttccgcgtcgatctcaacgaacggaaatattcgccgctgcatggggttatcatcccggatgacctcacggaagcagaaattcccggctggctgggcgatatttttcatgaagccgcaagcccgcgccatcctgacgtccggctgatggagtag

SEQ ID NO: 252816 - DNA, 390 bp, Klebsiella pneumoniae
atgactcttaacgctatgcgcatcgcccggccggtcaccgacctttctttgagcagcagcatgtactgcacgggccttgggctggagcagatcgcgcagtttgccgatcacgctggcttcagcggtgtcatgatcggacgcggcgatctcggctggcatcttgagttcaccctctgccaccatcacccggtgaagccctccccgagcgaggaagatttgctggtgctctattatccgcacaccgccgaatggcaggaacggtgcgagagaatgctgaccgccggctttacaccggtcagcgcgtttaatccgtactggaatgtgcacggcaaaacctttgtcgaccgcgacggttaccgggtggtgctgcaaaacagaagctggcggtag

SEQ ID NO: 252817 - DNA, 552 bp, Klebsiella pneumoniae
atgaacattaaacgcgtaattctttccgctgcaatttcttctgcattgatgtctggcagtgttatggcggctgagaccggtaccgtgagtttcagcggcctgattaccggtgccacctgtgatgtcaacatcggtggtgcaggcgcaaacgcggccgtagtgctgccaaccgtcagcgcgaatacacttgatggcgcgactaaaacaaatggtaaaactcgtttcagtcttgaattgagcggttgtaccggtgcattaactcaggcgaaagccttctttgaaggtggtaatacagtaaataacgcgaccggacgtctgataaatacagagacgtccggtgcagagaatgtttctctacaattacgcgatggtcagaacaatagcgttattaatgttggcgatgctgcgcaatttgattccgcagctattggttatgttgatatatcttccggtactgcttcacttccgtactatgttgagtattacgctgaaggcgccgtcgtagccggtactgtcgcttcccaggtgacctatagcctcatctataagtaa

SEQ ID NO: 252818 - DNA, 714 bp, Klebsiella pneumoniae
atggatgtaaggaaaactattttcttgcctgctgcgctgagttgtctgatgagtgcgctgtgtacttttccggttcaggctggcgtggtaattaatggtacacgggttatctatcccggcgatgaaaaagaaattaccgttcaggttagtaataatgggcagcgtccggtattggtgcaaagctggctggataccggcgatagtgaggctacacctgatactatcaccaccccctttattctgacgccgccgatcaatcgtcttgactctggcaaggcccaggccttgcgcattagcagcctgacaacctcagcgctgccgcaggatcgtgaatccctgtactggctcaacgtgctggaaatccccgggcgccccggtagcgagatcaaaaatgaaaactatctgcagctggcggtgcgttcacgaattaaattcttctggcgtcccgcttcgctgaaagagggcgcagcgagagcgccgcaggcgctgagctgggccgccacggaacaggggctgaaagccatcaatccaacgccctattttatttccctcgccaccctcaccgtggcaggaaaaactgcggatgtggatatggtggacccgttcagcgatcgtatttttccccacgtgaaggcctcacgaggaagccaggtacaggctgaatggattgatgattacggcgccattcgttcgcagaattttaccgttaagtag

SEQ ID NO: 252819 - DNA, 2493 bp, Klebsiella pneumoniae
atgcagggaatcgcactccccggtaaagcggcgctgctgtccgtttccgtattatctgcccttgcgctaaacgtcagggctaaagaaaacgctgagattcattttgatccttcattcctgagactgggcaccggtccagcgccggatttatcgcgttttagccatggcgcgagcctgtctgagggaacgcatcggctgcggatatggtttaacgaaaagccggtagtgaatcaggatgtccgttacgtcgcagaaggacatggtaccacgccctgcctgacgcctgagctgattacgcagcttccgcttcgccacgagatgctgcccgatagcgcctgggacagcggtgctgatgtctgtacagacctgacggcgctgattcctggggcgacggtgatgagtgacagtaatgcgcaaacgctcaatattcaggtgccgcaagtctgggaacagcgcagcgcgcgcgacgcggtaccgcccgcattgtgggatagcggtattcccgccgcgctattgggctacaaccttagcgcatatagcagtgagaacaacggctataaccatgacagcctttatgccagtctcaacggcggcatcaatattggtagctggtacctgcgccataacggcaactggagccgggataatcacgcaggcggccattatcaaacacagaatacctatattcagcgggatctccctgctttaaagggccggatttctgtcggccagatcaacacctcggggcagctttttgacacgctgcctctaagcggactaaagctggagagcgatgagcgcatggagccgctctcccgtcgcggctacgcgccggaaattcggggcattgcccgtacgagcgctcggattgctgtccgccaaagcggtaacctgatttatgaaacaaccgtcagtccgggggcgtttgtcattgatgatctttatcctaccggctatggcggggatcttgacgtcaccgtttacgaagctgacggcagcgaacagcattttcaggtgccattcgcttccgttacgcagctattacgtccgggccagtcccgttatgaactctcaataggtgaactgaactatcgttcgttgcccgccgacccttcactctggcagatgacctggcagcagggcgtgaccaactggctaacggtttacggcggaatgcaggccagcgagcgttaccgggcgggtcagggcggtatcggcattgcgacccccataggtgcagtgagcgcagatgccaccctcgctcgtacggaattgggtaagcggggccaggatgacgaaatacgcagcggcgagagctaccggctcagctatagcaaaaatatcaccgaaacggccagtcatttttccctggccgcctaccggttttcgacccgcggatatatggactatttgaccgccatgcagacgcgtgaagcgattttccaggggaaccatgccgatagtatacggcgtaataaaagccgctatacgcttacggcaagccagggattgccgggtgggtgggggcagttttacctgagttcatcggtgcagaactactggaacgccaaaggtgtagacaagcaatatcagtttggctacagcaacaattatggccgattcagctacggggttaacgccggacgcagctggagcgcctacggacgttcccaggacacgctttccgtgaatctcagtttcacgccaggcagtagccgacaggccgtaacggggcgccttagctatgaccatactcgtcacggtgagcagagtctgcgaaccggtataaatggctcttttggcgaagatagccgcttcagctacggcctgtctggcacgacgagcagtcagggtaacggcagcagcgcggcggcgagcgcgcagtacctggccaatttcgcttcgctgaatgcggcgttcggcagcggtcgacattaccgcagcgtttcgggcggcgtaagcgggaccgtgataggccacagcggcggtctgacgctgagcccctttcagggagacaccttcgcactggtagaggctaaaggcgctgagggcgctggcgtcaatggctatagcggtatccaggttgacaaacggggctatgcagcagtgccgtatctcagtccgtatcagctgaacgatatccatcttgacccgaaaggaacaactcggggcgtagagctggataacacatctcaaagagttgccccgcgtgatggcgcggtagtgaagatcagctatcaggcccgtcagggatatccgctattaattaccgtgacaggtgccgcccatccactgcctttcggaacggaagttcatgacgcttcgggacgtacggtgggttatgtaggtcagggcgggcaaatctacgcgcgggtcgagcaggtccgcggggtgttaacggttcgtgctggcgaacaatcttgccgcctggcttatgttctgagcaacggacaagcggagacactggaacagctctctctacgttgtgaatag

SEQ ID NO: 252820 - DNA, 1059 bp, Klebsiella pneumoniae
atgattatgagcaaaattatcaaaaaaaattgcctcccggcaggggcgttctcggtattggtcgtcttactttttgtcaccaccaatgctcaagcggcctgcactataaccagtacgccagcaccagctgcgctgcaaacgtattcgttgccaattaatcggatctctcctaatgtccataacaataatgttttattgagtgtgcggaaatattttgatgccgcagcggtacgttgcgctacgggcacgatttactgggtgcataaaatagaaaatacctccggtactaccggcgtgtttgttaatggttctccggtgtataaaactaatattaacggcctgggggtatattatactcgtagtaattcaagcggcatggaggtaggctcaactggcgcagatattgtcctggtgcctgaagttaacatgaacctaattaagttaaataactctacgattagcggcgtcttagatgcctcgacgctgccggtggtgagtttctacgcaacagaatccagcagcggtgcattcaacagcagcgcggtgcaaattactaaaatggctttcagaggcactgtaagttatgttgtacccagctgtagtgctcaggataaagatatctggttgggagaatataccaccggcgatttcaccggcaactcaacgacgccgtgggtggatgccagtattgtactgacctgtgatgcgactttccgcaatgcttacaacaacgttgcggattcttatataacgggcaatatcactacgaccaccagacctgataattattattccgtatctctggagtccgttaatggttttgttgacagctcgcgaggcatcatggcgctggacagcggtggcgccaccggtcttggcgtacagatatcccgtacccggtcagaacaggcatggtcctctctggcatggactggggaaaataaagccggagccaatacgattaacattccgctctatgctcgttatatccagactgatagcaatgttagtgccgggcaggcgaacagtaaacttctgtataccgttcagtataaataa

SEQ ID NO: 252821 - DNA, 522 bp, Klebsiella pneumoniae
atgcagcaagaaagggaagtgagtccgctggcgctgaacggccttaaagctttggaacgagaacttgataaatattatcgcggtagatcttttatctatctgccagcgatgcatttgcagtcagaatgctattgccatttaacccgcaaatatatcgttgtaggcgtctcgcctccggcggaaaatatgtttctcaaacgccatattagccttaaggattctctggcaactatcattaagaaacttaatttatatcgagagtatcgctctcaagacaggtgtgaattttgctactttcttaataatttaaaagaagatgagcgaagaattttcagtatgttatgtaaaacaagcaattatcgaatggctgcaaatgaacttaacattaatgaaaagaatctgcggcgaaaagtttatacttttacgcaaaagatgagtattccaaatcggcgttggtttctctggtggattacctatatgagcaggcgccgaccccatttttttaacgtaagcgcggattag

SEQ ID NO: 252822 - DNA, 621 bp, Klebsiella pneumoniae
atgtccgttgcagattccctgtttgcttactcttttgctgccctgctgctcacccttaccccaggcctggataccgcgctaattttacgaaccgcgaccgttgaaggcggaaaaaaagcctttcaggcggcgttgggtattgatacgggatgttttatctggggagctgcggtcgccttcggtctcggggcgctgctggcggcatcggaactggcgtatgacctgctcaaatggtgcggggccgtctatttatgctggctgggcattcagttaattctcaagccgcgtcgtcatttggttcatcaggacagggcggcggccccggcaggtaactggtttgtaaaagggatgatggggaatgtgctcaatccgaaaatggggatcttttacgtctctttcctgccgcagtttattccggcagggcactcgcccatcgcctggacgttcctgctggtcgccattcatgtggcgatcggcacaatctggtcattaacgctgattgtgaccagccgctctgccgttcggctattaaaaacgccgctgttcattcggtggatggatcgcgcgaccggcggcctctttatgctgtttgctgccaggctggcttttagccaccgctaa

SEQ ID NO: 252823 - DNA, 1188 bp, Klebsiella pneumoniae
gtgaacgtttttcaactcaggccggagtggaaggcctttctgctggcgctggccggatcggtggtactgatcgtcggtatgggctatggccggtttgcctataccgggatcctgccgctgatgcttaatgaacaggtactgacgctacgcgaaggtaatctcgccgcttcggcaaactatgccggttatctggcgggggcgctgctgctggcgaaagccagacccacggacgccagatggctaagcctgctttccgcgctattgacgctactgtgcctggctttactggcggttttagtttctccgctggcgattatcgcggttcgcggtattgccggattattaagcgcggtgacgccgattgccgcctcactctggctgctccagcatatgaagcacccaaacggtgcgccggtgcttttttcgggcgtcggaatgggcatatttttgtcggcggaatttatctccctggggaaggcgctggcgctctccagccagcagatctggctgatgtgcgcgctaagcgccggcgtgctttttatcctcgcgctgcgtctattgctgagccccgcagactaccttatcgcttatcaacccgcagcaaccgcacagcatgagcaggccgaggggccggtgcgcgaagcatggaaactgctgctgatttatggcctggccggcttcggctacattattaccgccacctatctcccgctgtttctcagcggttcgctgaacgctatcgatccggtgcagatctgggccatcttcggtcttgccgccgtcccctcctgttttctctggcatcggctggtcctcaggctcggctaccgccgcgcgtttacccttaatttgctgatacaggccgttggcgtgatccttccggcgtggagccatacgttgccgttttgcatattgagcgcgctgctggtggggtgcacctttttgggcaccgtgaccatcgcgctgtcccaggggcggcggctgaatcatctggtttcgttcaatatgattgccgctatgaccgcaacctacggcatcgggcaaattgtcggcccgctggttgccggggcgctgtatgaccgcagcgggtcgtttaatccttcgctcagcgcggcggctatagcgctgctggctgccgctgcgctggtggcagcgggggcgcggcgagcctcaaaggtcggaggctga

SEQ ID NO: 252824 - DNA, 837 bp, Klebsiella pneumoniae
atgaaccacaccacattagagatttttaaaacggtggcggaagagcgcagcgtgactcgcgcggcaaaactgttgggacgggcgcagtccaatatcaccacccgcattcaccagctggaagaggagctgggcgttgagctgttttctcgcggcaataaaaggatgcttctgtcccccgccggcgagcattttttgggctacgcgctgcgaatcctcagcctggccgaggaggccagacaggcgctgcacccggcgacgccgggcggtaatctgcgcatgggggcgatggacgccaccgccgcaagccgcctgccgcagctgcttccccgctttcatgctcagtgcccggaggtcaaactgacccttaagacccagccaacccggcaacttgctcaacaagtcctggacgccgagctcgattgcgcgctggtgagtctgccgcagggagcgcctccgcctgacgacctggaatttgtcccgatctttcaagaacagctggtgctggtgcttcaggctcacccgcaaccttttcgttttgccgcctttgcggagggttgtacctaccgggcgatgggggaagcgtttctggcgcaatcagaggaggcggagatcgagatccaggatgtcggctcctaccacgcgatgctcgcctgcgttgcctccggcggctatgccggcatcgtgccgctgagcgtgcttgagaccctgacgctgcccgaagccagccagctgcaaccggttggccaggcgatcacccagcttatctggcgcaaaggctacgcctccccggcccttgagaagatgcgccagctccttgaatcagcctccgacctttga

SEQ ID NO: 252825 - DNA, 1047 bp, Klebsiella pneumoniae
atgaaaaaccggctgacgcagcagcttgctattgattatcccattattcaggcgccgatggctggcgtgtcgacgccggaactggcggcagcggtcagcggcgccggcgcgctcggctcgctggggctggggtcgtcaaccgtagagcaggctgaggcgctgattaaccagacccggcgcttaaccagccgtccgtttaacgtcaacctgttttgccacgcaccagcggtaagggatcggcagcgtgaagccgggtggctggctcggctgcgtccggaatttgcccgcttcgccagccatccgccggagacgctggcggaaatctacctcagttttaatcagcagccgcgaatggccgagctgctgctcgatcttgccccggcggcggtgagcttccattttggcgtgccggatcgtgaaacgcttcgccgactgcgggataagggtatcgttaccctggcgagtgcgaccagcgtggcagaggcgctgctggccgaggcgcagggagtcgatatggtggttgcccagggctacgaggctggcggccatcgcggcatatttgaccccctggggccagacggacagatgagcacctttaccctgattcaggcgatgagacggcatactgatctaccgattattgcggcaggcggcatcatggacggcgcaggaattaactgcgtaatgaacctgggcgcagacggcgcgcagctgggaacagcgtttctgctctgccctgaatcgtccacggatgccggctatcgtgaggccatcaaaggcgcgcctgacgggcaaacggttttaacctcggcgatctccggacgtccggcaagatgtctggttaacggctggcgtgaaataaacgatccgcatctcgttccggcttatcccgtagcttatgatgccggtaaagcgctggcatcggcggcaaaagcgcagggaaatcgtcaattcggcgcccactgggccggacagggcgttagcctgattcgcgagttgccggcagcggagctgatacgaaagctggtgagcgaaagcgggttttaa

SEQ ID NO: 252826 - DNA, 672 bp, Klebsiella pneumoniae
atgcggagtagcatgagttgggaagatctctggccgctgttgtttcagggcacggtggataccgtttatatggtcggcctggcggcgctgtttaccgtgctgctcgggctgccaaccggcgtgctgctgtttgtttcacgccgcaacgggctggcgccgatgccgaagctcaacgccatcctcggcgcgattatcaactttggtcgttcgctgccgtttatcgtgctgctgatcgcgctgattccgttcacccggttgattatcggcaccaccctcggcagtaccgccgcggtggttccggtcaccattggcgcctttccgttctttgcgcggctgactgaaaatgcgctggatgaagtggactacgggcgtatcgaagcgattttatcgatgggcggcaatatctggcacgtcatctttaaatcgctgctgccggaagcgctgccgaccctgctggcaggcatcacgctgaccatcgtcatgctgatcggcttctcttcgatggcgggcgtgattggcggcggcggactgggcgatctggctatccgttacggctatcagcgctttaataacgaggtgatggtcggcacggtgctcattctggtcgcgctggtacagggggtgcagatggccggcgaccgtctggttcgcggcctcgcccaccgccgttaa

SEQ ID NO: 252827 - DNA, 792 bp, Klebsiella pneumoniae
atgattgagattgtcgggctgagtaaaacctatgccggaacaggccgaccggcgctaaacgatgtctctctgcatgtgccgggcggtgccgtttacggcatccttggccgcagcggtgcgggcaaaagtacgctgatacgctgcctgaatttgctggagcggcccacggcgggccgcattattgtgaacgggaatgatattacccggatggataaaagcgcgctgcgcgaataccggctgcgcaccggcatgatcttccagcactttaatttacttcacgcccgcagcgtcgctgataacgtcgcggtgccgctggagatagccaaagtgccgaaagcggcccgccaggctcgcgtggcggaactgctggagctggtcgggctggcggatatagccgccgccttcccgtctcagctttccggcgggcaaaagcagcgcgtggggatcgcccgcgcgctggccgcacggccggatgtgctgctgtgcgatgaggccaccagcgcccttgaccccgagaccacggcctcggtgctcaacctgctggcggacatcaatcagaagctgaacctcaccatcgtgctgatcacccacgagctggaagtggtgaaaaccctctgcgaccacgcggcgctgctggagcacggtgagattattgaaagcggcagaattgccgatttgctggtggcgccatggtcgcggctaaggcagtcgctgctgcacgacccgcaggcggagcgggacttcctcgctcgccacggtttacacgggaggcccttatgcggagtagcatga

SEQ ID NO: 252828 - DNA, 810 bp, Klebsiella pneumoniae
atgatgaaatatgccgcatttaaactggcaggggttgcactgtctctctctctggcctggacttccgctcaggccgccgcgctgcgcgtcgccgccgacccggtgccgcacgccgaaattcttaattatattaaaaaaatcgatcccagcctcgacctgaaaatcgtcgaactcaccagcggcgtaaacgccaacgagctgttggctaacggcgacgtcgacgccaactacttccagcacgtcccctatctgaaagatcaggaaaaagcgctgggcaaaaccttcgccgtcgcggcgaccgtccatattgagccgctggggatctattcgcgcaagcataaagattttaaatcgctgcccgagaacgccaccgtggcggtaccgaataacaccactaacctgagccgcgcgctattcctgctgcaaaatcagggtttgattaagctggcggcaaaattcaccgacccggcgaccaccctggcaacgccgaaagatatcgtggaaaacccgaagcacctgaaaatccttgagattgaatccccgcagatcccgcggtcgctggatgatgttgatctggcggtgataaacggcaactacgcgctggaagccgggctggtgccggcgaaagacgcgctgggtctggagagcgccaccaacaacccgtacgctaatattctggtgacaacgccggcgctggcgaacgatccgcgcatcaaggcgctggccaaagacctcacctcgccgcaggtcgctgaatttattcgtaagcagtataacggctcggtgatcccggttgcccctcagtcatga

SEQ ID NO: 252829 - DNA, 1029 bp, Klebsiella pneumoniae
atgaacgcgacaaccttaccgatactggatcttgcccgctacgcggaccccgctgaaaaagcggcgtttctcgccgacctgcgccacgccgcccgcgatatcggcttcttttatctgatcaaccacggcgttgatgagtcgctgcagcaggccgtgcagcagcaatcccgcgccttttttgccctgcccgacgatcaaaagcagagggtggcaatgattcactctccgcattttcgcggctacaaccgcgccgcgtctgaattaacccgcggtcaacccgactggcgcgagcagttcgatatcggcgccgagcgcccggccctgcagcttagcgaacgcgccccgcgctggcagcgtctgcaggggccgaatctctggccagaggcgttgccctcgctcaaacccacattactgacctggcaacggaaaatgacccaggttgggatcaccctgctgcgcgccttcgccgaagcgctgcgcctgccgcaggatgccttcgatggcctgtatggtgataagcccaatgaacatatcaagctgatccgctatcccggccagcaggagacccagagcgcccagggcgttggcgcgcataaggactccggctttctcagcttcctgctgcaggatgagcagaaaggattgcaggtcgaagtctctcctgaccgctggattgacgcgaccccgctggcgggcagctttgtggtgaatatcggcgagctgctggagctggcgaccaacggctatctgcgggcaacggtgcaccgggtcgtttcgccgcccgccgaccagcagcggctgtcgatcgctttcttcctcggtgcccagctggatgccgtggtccccgtctacaccctgcccgatgagctggcccgcgaagccctcggaccggatagcgacccgcaaaacccgctgctgcgcgaggtgggctggaattacctgaaagggcgtctgcgctcgcatcctgatgtcgccgagcgctactaccaggatgtttttcgcgaacgcgccgagcaattgatcgtgtag

SEQ ID NO: 252830 - DNA, 276 bp, Klebsiella pneumoniae
atgcagcatccaaacgatcctctgcacggcatcacgctggaggcgctgttaaacgcgctggtcgcgcaatatggctgggccgaactggcgaaacgcatcaacattaactgctttaaaagcgatccgagcattaaatcgagtctgaagtttttacgccgcacgccgtgggcgcgcaaagaagtggaagcgctgtatatcgattcgctgtccgataccgatacggcaaaagcggaagcgccggcggataatccgtgggcacactggcagaaaaagtaa

SEQ ID NO: 252831 - DNA, 189 bp, Klebsiella pneumoniae; identical to SEQ ID NO: 172046

SEQ ID NO: 252832 - DNA, 126 bp, Klebsiella pneumoniae
atggcaaccttaacgtggggccacgcggtccagtttgttaatcagccggaagcggcggttcaggtgttatgcgggcaaaagctcaacgcggtggccggtgggcgccacccgggctgggggacctga

SEQ ID NO: 252833 - DNA, 957 bp, Klebsiella pneumoniae
atgactcagcacgccctcgatctcaccagcgaacttctgcgcggcatgcgcctttccggcgtcaactaccgccgcatcgaaacctcccgcccttttggcgtcgaatttggcttcgtacctggtaaagcgcagttccactttatcagccggggaccggtactgctgcgcatggtcagcggccagcgcctgatgctgcagagcggcgatgcgctgtttattcctaacggcgatggtcacgtgctgctctccgatgaccaggcaacggtggttaacgtctccagactgcccagcgaaccggtttgcgactcggtaagctgcgtcaaaaacgcctgcgacgacgcgaaaagcgacagcgccattatcttcagcgcctgtatggactttgagctgggcggcatgcagccgttagtcaaagcgatgcccgaagtgatgctggtcagcagcctgctgaccagccgtccggagatcccgccgatgctggcagccatggaacgcgaaagcctcactcgacaggcgggctacgccggtattttggcgcggctggccgatgtggtcgccgcgctgattgtccgcggctgggtggagtgcggctgcggcaacgccaccggctgggtacaggtgctgcgcgatcctaaactggctaaagccatttacgttatgcatcagcagccgggcattaactggaaagtcgaggatctggcccgcgaagcgggaatttcgcgttcggtatttgctgaacgcttcctctcggccaccggcaccacgcccgcccgctatcttaccgagctgcgtatgcgcctcgcggtgcagtacatttcccatgagggtcaggcgctggaaaaagtggccttcaggctggggtacagttctcatgccgccttcagccgcgcctttaaacgcattatcggaaaggcgccgggcgcgttgcgcgatccgtcgcgggaagaaggattttag

SEQ ID NO: 252834 - DNA, 822 bp, Klebsiella pneumoniae
atgtcgactgcgaccaccatgcgtctggttccggcggcgatggtgccgaaagcgctggcgattatcttttccgccgtttccatagcgacggtggttgccgcgccgctgggcagctatttcggcgcgctgatcggctggcgcaacgtatttcttatctgtgcgctgccgagtgtggttgcgctgctctggcagctgtgggttctgccttccatgcggccggagagcgcgggcagctttgccaccctggtcaaagtgctgcgccgtccgggcatggttggcggaatgctggcgacaatcctgatttttagcggccacttcgccttctttacctatctgcgtccgttcctcgaaaccgtggcgcaggccagcgtcgaaggggtttccctgatcctgctcggttttggcgtggcgaactttatcggcacgtcgattgccggacatctgttggccagaagcctgcgcatgacgctggcgctggtaccgctggcgatgagcgtgctggcgctgatgatggtgacgttcggccacttcgcgctgctggacggtctgctggtggcaatgtggggcttcgcctttggcctggtgccggtgggctggtcgacctggcttgccaccacggtgccggatgaggcggaaagcgcggggggtctgctggtggcttctatccagctggcgattagcgccggtgccgccggcggcggggcggtgttcgatcttaacggcgccagcggggttttcgccggcagcggtttgttgttggtcagcgcgatggtgattgtgctgtttgcggtaagagtaaaaccggtggcgagcgaggagtag

SEQ ID NO: 252835 - DNA, 1458 bp, Klebsiella pneumoniae
atgctggattatcgcttaatcaatcaactggatagcgactgtaacggcgcgcacctggtgacctggccgggcagcacgctattaaaacaggccccgctcaacgacagcactctgctcacagaaatggcggcgcaggccgcccgcggcgaggtggctgacacccgcttcggctgttcgcccttcgcgcgcatcactcttatcccgcaggcgcactggcaggatgcgcttaacgatgggctgagcgaggcgctgcggccgctatacaaaaagccggtgagcgaatcgcttatccttgattgttcgctgggagagaccgccggcgcgttaaccaaagcgctgcgcgaactgtttaatctcgactggcagcttgctgatttaggtctgcatcagaatacagccgtcaggccacgcctgcgtcagctggtcctctacgccttacctgaacagcggtcgacgctggatgccctcgcccatcgtcaacgggccacggcgcacggtatgctcgccgcgcggcggctggcggatctgccttcggagcagtgtacgccgcagtacgtggtggaagaagcccgtcgtctgtgcgccgatattcctgctctgcgctgcgaagttctcgatgaaaaagcgattgtcgatcaggggctcggcctgctgcatgcggtgggtaaaggttccgaacgcccgccgcgcctgctggcgattcattatgagggcgtcagcgagggcccggttcgctgctacgtcggtaaaggcatcacctttgataccggcgggctgtggcttaaggaaggcgccggaatgtacaccatgaagtacgatatgtgcggtgcagccaacgttctcggcctgatgctgagcatcgccgagctggcgctaccggtgcgggtaatgggggtactggcgctggcggaaaacgcgattggtcccggcgccatgcagccgggcagcgtcgcccgggcctgcaatggcctgacggtagagatcaataataccgatgccgagggccgtctggtgctttccgacgccattgcctgggccagccagcggtatccgcaggcgcgctatattattgatattgcgaccctcaccggcgcggtggtcaaggcgctgggctatgatttgagcggtttgatgacccaaagcgacacgctacgagcggcgttgaccgaggcggggttaaaaagcggagatgaggtctggtcactgccgctggatagcaggctgaagaaacagaccgcaagcgcaatcgccgacctgtgcaacacgccgggcaataacgcagcgatcagcgcttcggctgcctggcttttgcagcatttctgtccgccggagatcccgtgggcccatctggacgtcagcggtacagcgctgtggcgagaaggtggtaaaagcgtcgcttccggtcggcctgttccgctgctggtgcagcatctgctcgacgatatcggagagagttaa

SEQ ID NO: 252836 - DNA, 954 bp, Klebsiella pneumoniae
atgtggggaatgattgccacctggcgaatggcgctggaaggggtaacggaagccgcgacggcgctggtagccggcgctgataccgccagcgccgtggtcgatgcggtggcggcggtagaagattttccgctctacaaatcggtaggctacggcgggctgccgacggaaaacggcgaggttgagctggatgccgcctttatgcatggcgataccctcgccttcggtgcggtcggcaacctggtggatattgccaacccggtcaaagtggcccacgctctcagccgccagcgctataacagtctgctggttggccagggcgccagagagtgggccatcagtcagggattcgccgccaaatccatgctgaccgagcgggccatgcagcactaccggaaacgctgtcgcgaaacgctggataaaggcctaagcccttacgacggccacgataccgtgggcattatcggcctcgacaaacagggctccatgagcgttgccacctcgaccagcggcctgtttatgaaaaagcgcgggcggctcggtgattctccgattatcggctcgggtttctactgcgacagcgaaatcggcgccgctacggcgaccggcgtcggtgaagatctgatgaaaggctgtaccagctacgagattgtccggcgaatggctcagggcatgacgccgcaggaggcagcggactcggtagtctgcgagctggaagacaaactgatgtcgcgctttggccgtgcgggcgatctctcggtggtgtgcatgaaccgccgcggcgaattcggcgcggccaccaatataaaaaccttctcctttgtcgtcgccaccgcgacgcagccgctcaccgtattctgcgccgaacgcgtgcaggagaaaacccattaccgtccggtggacgacgaatggatgcaggcctatgccgcacgcattcgcgcccccatcgaggagtaa

SEQ ID NO: 252837 - DNA, 204 bp, Klebsiella pneumoniae
gtgtttattccctggacgctgccgccggtgatcagcgggtttatcgtgaccggacatcttagcggcagcgtaatgcagatcctcaatttgctgattggcgccatgctgtacctgcctttcatgcgtatcgtcgataagcagtatcgcgcggcggagacaacctcccgtaccgaaacggacaacacgcttgctaaacaggagtaa

SEQ ID NO: 252838 - DNA, 1215 bp, Klebsiella pneumoniae
  misc_feature (1138)..(1147): n is a, c, g, or t
atgaacaatgttctgggatttcttgaagccaaactgatgcctctggcggcgaaaactgcccagcagcgtcatctcggcgctattcgtggcgcctatgtttcattcatgccttttattattgtcggttcaattctgctggtgatctcgtcgtttcctaatcagatctatcagcagtttatggccagcaccttcggcgccagctggagtgcgataattgaaatcccgttcaatgcggtattttccacgatgtcgctgtttatcagcttcctggtggcctaccgcctggcggagcactacggggatgaccgtatctcctgcggcatcctgtcgctggtgggatttttgatcctcaccccctttattaaagtcgctgaaaacggcggtatcacggtgatccccgttgaatggatcggtaccaaaggtttgttcgtcgccatgatcggttcgctgctgtggaccgaactcttctgctggttaaagcgcaagaagctggtgattaagatgcctgacggggttccacccgccgtgcaggagtctttcgccgccctgatcccggccctgctggtgatgattctgatcctggcgattcgcatcgggtttgaacacacgcactacgccactattcaccagttcatttatgaggtcgtcgcctcgccggttcgccattacggtacctcctatttcggcgcgctgatgaccgtattcagcatcactattctgtggtccgtcggcatcaactccggttcaatgatcaacggcattattcgtcctttgtggatggaaaatcagaccgataacatcgccgcgattcaggccggcgtgaccccgccgcacattatcaccgagcagttcttcgatatgatctggatgggcggcgcgggcgcaacgctgtcgctggtgatcgccatgctgattttcgcccgcagtaaaaatatgcgcgaggtctcccgcctcggggccggcgcttccatctttaatatcaacgaacccatcctcttcggcctgccggtgatcatgaacccgatcatgctgatcccctttaacctcgtaccgctggtgctggtcacggtgcagtacgcggcgatgaaaatcggcgcggtggccgtcaccaccggggggtttattccctggacgctgnnnnnnnnnnaccggggtgtttattccctggacgctgccgccggtgatcagcgggtttatcgtgaccggacatcttag

SEQ ID NO: 252839 - DNA, 822 bp, Klebsiella pneumoniae
atggaaatcaagctgcatgccaacgccaccaccaccccaagaacgcgaaaatatctccaggagtcgacgaaaagcgaccgcgaactggcgcaggaactgggtatatcaatcactacggttcgtcgctggcgcaaccgcagccagatttcagataatcacaccacgccacatctgatacacaaagtgttgagacaagagcaggaggcgctgattaacgccctgcgcgatatactgcgtgcgccgctggacgagctgctatttatggtgaatgaagggctgggtatcaccctttcacgggccacgctaaaccgctatcttcgcccggcccatgaagggcgaaaaaacgccgcgccgcagggaaagaaagcgttaaaagcgggaatgaggccggatactctgacgctgcattaccggcagctcgcgctgtcgatggacgatggcggcgagcatcatctgctgtgggcgcaggagccgatcagcggctggtgctttggtcgtatctattccggcatttcgcccgcgctggtggatagctggctgaaccaggcgctggaagcctgtccggcgcggatacaatgtcttgagacttatgctcataagggcttcgaaccgatacgcgcggatttgtcatgcacaacggtgatcgcggaggagtgcggggcggtacagcttagcgaacgattggccaatattatcccggcgctggatgagcctgacgcaacgctgcagcggctgtgcacgctgtggaaccagggacgggcgcaaaagaaactgggtgacaatacgccgcagggctttcttgcctcgttcaatcagatctaa

SEQ ID NO: 252840 - DNA, 330 bp, Klebsiella pneumoniae
atgaaaacggtagagtttttgctttatacccttaaacccggtaccgggaatgattttcaccgcgtaatgcaggagcaaagcgccccccgccatcgcgccgccgggatggatatcgtctcctttgtcaattcggtggaagacaacgacgcttattacctgattcgggcttatgacgacctggcgcatttaaacgcttcccaggagcgcttttacagtagccccgcgtggcgcgaaggcccacgtcaggccatcatcgacatgattgccgtaagcgtaaaatcggttatggttctaagcgccagcgcggttgatggcctgcgaaacggctga

SEQ ID NO: 252841 - DNA, 810 bp, Klebsiella pneumoniae
atggagaggcgtttgacaaacgggagtagggccagtgaagcggtgcttagcgtcaatattgcatcgctaccgcgtcctggcggcggcgcgcttcttacggatattcatttccacgccagaaaaggagagtgcctggcggtgattgggcctaacggcagcggcaaaacctccttattacgggcgatagaccagcagctgacgacgcgggagggcgaaattcgcttgaatggccgctcggtttcagcgttaacccgccagcagcgtgcccggcagatcgcggtccttgcgcagaatgatgccccggatatgcggctggcgcttgaggattatgtcgccctcgggcggatcccccacgccagggagatgtcgcgtcgtgaccatgacatcatcgtgacccgggcgattaatgatacgggactacagaggctgcgaacgcgctcgctatcggcattatccggcggtgagaggcagcgcgccgcgctggcgcgggtactggcccagtcgccagaactggtgttgctcgacgagcctaccaaccatctcgatcccccgggtcgggttgagcttctttctttagttaaaaaccaggggatcacggtcgtcgcggtattgcacgacctttcgctggtggagtcctttgccgaccgggttttgcttttatcgcaggggcgcgccgcagcctgggatgtgcccgagcgcgtccttatttcggaacagctctatcccgtcttcggcttaaccagctttaccgtgccgcatcctgagaccgggaaggcgctgcggatttttgaagttccaggctatgcgtaa

SEQ ID NO: 252842 - DNA, 957 bp, Klebsiella pneumoniae
atgaataaatggcttgccggcatgatggcggttttttctattacagcggcgaacgcaggagattttcctgtcaccattgagagttgcggaacgcccgtaacctttacccaggcgccgaaaagggcggtcatacacgatctaaatatgtctgaaatggcttttgctctcggtttacaggaccgtatcgtgggtttaaccgggattagcggatggtacaaaatgacgccgcaatttaaacagcagatgggggcgattcctgagctggcgccgaagtatccctcgctggaaacgctgctggcggctaatccggacttctttttcgcgggctggaattacggcatgaaagtgggcggagaagtcaccccttccgtgctggctaaatacggtatcaagacctttgttctgagtgagagctgcgtgtttaccgctaaggacaaacgaaaagccagcatggacctgctgtataacgatgagctgacgctgggcaaaattttcggcaaacagcgggaagcgcaggcgctggtcgacggctggaaaaaaacgctcaatgcgctgcccaggccgccgcagggcgtgcagccgttgaaggtgtttgtttatgattccggcgaagacaagccctttaccagcgggcgctatgctatgccgaccgcgattatcgaagcggccggaggtcaaaacgtcatggatggcctcgaaataagctggggcaccacctcatgggaaagcgtcgcgacggcggaacccgactttattattcttctcgactatcagaccggcagcggcgccgacgcgctgcgccgcttcctcgaaaatcatccgttaatgaagcagaccccggcggtgaaacaccagcgttatctgaagctgcagtatgctgaattgacgcccggtccggcgaatattaaagcggccgaaaagctggcccatgcgatgtatccagcggctaaccaatga

SEQ ID NO: 252843 - DNA, 2283 bp, Klebsiella pneumoniae
atgctcaatcaagaactggaactcagtttaaacatggctttcgccagagcgcgcgagcaccgtcatgagttcatgaccgtcgagcacttgttgctggcgctgcttagcaacccttcggcccgcgaagcgcttgaagcgtgttcagtggacttggtcgcgctgcgtcaggaacttgaagccttcatcgaacagaccacacccgtactgcctgcaacggaagaagagcgcgacactcagccgacgctgagcttccagcgcgtgctgcaacgtgctgttttccacgtccagtcatccggtcgcagcgaagtgaccggcgccaacgttctggttgcgattttcagcgaacaggagtctcaggcggcatacctgctgcgtaaacatgaagtcagccgacttgatgtggtgaacttcatctctcacggtacgcgcaaagacgagccgagccagtcttccgataacagcggaagccagcctggcagcagtgaagagcaagcaggcggggaggatcgtatggaaaacttcaccaccaacctcaaccagcttgcccgcgtaggcggtatcgatccgctgatcggccgcgagaaagagctggaacgtgctattcaggttctgtgccgccgtcgcaagaacaacccgctgctggtgggggaatccggcgtcggtaagaccgcaattgccgaaggtctcgcctggcgtatcgtgcagggcgacgtaccggaagtgatggccgactgcactatctattcactggatattggctcgctgctggcaggcactaaataccgcggcgattttgaaaaacgctttaaagcgctgcttaagcagctggagcaggataccaacagtattctgttcattgatgagatccacactatcattggtgcgggcgcggcttccggcgggcaggtcgatgccgctaacctgattaagccgctgctttccagcggtaaaatccgggttatcggttcgacgacctaccaggagttcagcaacatctttgaaaaagatcgtgcgctggcgcgtcgtttccagaaaattgatatcaccgaaccttccgtggaagagacggtgcagattattaacggtctgaagccgaagtatgaagcgcaccacgacgtgcgttacaccgcgaaagcggtacgtgcggcggtggaactggcggtgaaatacattaacgatcgtcatctgccggataaggcgattgacgtgattgacgaagccggggcgcgcgcgcgcttgatgccggtgagtaaacgtaagaaaacggtcaacgtggcggatattgagtccgtggtggcgcgaattgcgcgtattcctgagaagagcgtttcccgcagcgaccgcgatacgctaaaaaaccttggcgatcgtctgaaaatgctggtctttggccaggataaagcgattgaggccttaaccgaagcgatcaagatggcgcgcgccgggctaggccatgagcacaaacctgtcggctctttcctgtttgccgggcctaccggggtgggtaaaaccgaggttactgtacagctggcgaggtcgctgggtattgagctgctgcgttttgatatgtccgaatatatggaacgtcataccgtcagccgcttaattggtgcgcctccgggatacgtcggattcgatcagggcgggctgctgaccgatgcggttattaagcatccgcacgcgatactgctgctcgatgaaattgaaaaagcgcatccggacgtctttaacctgctgttgcaggtaatggataacggtacgctgaccgataacaacggccgcaaagcggatttccgcaacgtggtgctggtgatgaccaccaacgccggcgtgcgtgaaaccgagcgtaaatcgattggccttatccatcaggacaacagtccggatgcgatggatgagatcaaaaagatctttacgccggagttccgtaaccgcctcgacaacattatctggttcgatcacctgtccacgacggttatccatcaggtggtggataagtttatcgttgagctgcaggtccagctggatcagaaaggcgtctctttggaagtaagccaggaagcccgcgattggctggccgagaaaggctacgaccgggccatgggcgcgcgtccgatggcgagggtgattcaggacaacctgaaaaaaccgctggccaacgagctgctttttggctcactggttgacggcggtcaggtgatcgttgagctggataaagagaaaaatgcgctgacctacgccttccagagcgcgcaaaagcacaaaccggaagcggcacattaa

SEQ ID NO: 252844 - DNA, 318 bp, Klebsiella pneumoniae; identical to SEQ ID NO: 173872

SEQ ID NO: 252845 - DNA, 231 bp, Klebsiella pneumoniae; identical to SEQ ID NO: 173871

SEQ ID NO: 252846 - DNA, 1947 bp, Klebsiella pneumoniae
atgacggcgttacttgaactgcgtgatattcgccgcagctacccctccggcgatggcaacgttgaggtgctgaaaggtattacgttgagcattgccgccggcgagatggtggctattgtcggggcctccggctcagggaaatccacgctgatgaatattctcggctgtctggataaacccaccagcggcacctatcgggttgccggaaccgacgtggcacgtctcaacggcgatgagctggcgcgcctgcggcgggaacatttcggttttatttttcagcgctatcatctgctatcgcatctcaccgcggcgcagaacgtggaagtgccggcggtctatgccggagcggagcgcaaagcgcggctggcccgcgcccatgagctgctggtacgactggggcttggcgaccgggcagaatatcaaccttcacagctctccggcggccaacagcagcgggtgagtatcgcccgcgccctgatgaacggcggggaagtgattctggcggatgagcctaccggtgcgctggacagccgctccggcgaagaggtcatggggatccttcaccagctgaaagcgcagggacatacggtcattatcgtcacccatgacccgcaggtggcggctcaggctgagcgggtcattgagatacacgacggtgagatcgtgcgtaacccgcccgcgttgagctccgcgcaaggcggcgcgctgcgccagcgcacggcggccgaaccgtcggcatggcgtcagttcagtagcggttttcgcgaggcgctggtcatggcctggcgcgccatggcggcgaataaaatgcgcacgctgctgacgatgctcgggataattatcggcattgcatcggtggtgtcgattgtggtggtgggcgatgccgcgaagcaaatggtgctggccgatatccgcgccatcggcaccaataccattgatgtttatcccggtaaggatttcggcgatgacgatccccgctatcagcagtcgctgaagtacgacgatctgcttgctattcagaaacagccctgggtcagctcggcgacccctgcggtctccaaaagcctgcgtctgcgggcggataatatcgacgttgccgctagcgctgagggcgtgggggcgcagtactttaacgtttacggtatgacttttagcgaaggcaacaccttcaacgaactccagctaaatagccgcgcgcaggtggtggtgctcgatagcaacgcgcgtcgtcagctatttccgcacaaagcgcgggtcgttggcgaagtgattcttgtcagcaacatgcccgcgacggtcatcggcgttgccgatgaaaaacagtcgatgtttggcagcagcaaaattctgcgcgtctggttaccctataccacgatggccggccgggttatggggcagtcgtggctgaactccatcaccgtccgggtcaatgaaggttacgacagcgcgcttgccgagcagcagctgttacgtctcctggaactgcgccacggtaagaaagatgttttcacctggaatatggacagcatcttgaaaacggcggaacggaccacacatacactacagctgtttctgaccctggtggcggtgattgcgctggtggttggcgggattggcgtgatgaatattatgctggtctccgttaccgaacgcacgcgagagatcggtatccgtatggctgtcggggcgcgggccagcgacgtactgcagcagtttttgattgaggcggtgctggtttgcctggtcggcggggcgctgggcgtgacgctttcgttgctgattgccttcgtgctgcagctgtttttgcccggctgggaaatcggcttttcgccgctggcgctgctgaccgcatttttatgctcgacgctgaccggagtgttgtttggctggctcccggcgcgcaatgcggctcgtctggacccggtcgacgccctggcacgggagtag

SEQ ID NO: 252847 - DNA, 1116 bp, Klebsiella pneumoniae
atgaaattaaatggaaagcgcaggaaaatttggtggctgctggcgattgtcgtgctggccctcgccgtctggggatggcgaatactgaatgcgccgctgccgcaatatcagacgctggtggtgcgtaaaggggacctgcagcagagcgtgctggcgactggtaagctggatgcgttaaaaaaagtggatgtcggggcgcaggtgagcggacagctcaaaacgctgcgcgtcgagattggcgacaaagtgaaaaaagaccagctgctgggggttattgacccggagcaggcggaaaaccagattaaggaagttgaagcgacgctgatggagctgcgggcgcagctcaaccaggcgcgcgcggagcgtaaactctctgcggcgactttagctcgccagcagcagctggcgcagcgtcagctggtctcccggcaggacctggacaccgccgcgaccgacctggcggtgaaagaggcgcaaatcggcacgattgaagcgcaggtcaaacgcaatcaggccaccctggatacggctaaaaccaacctcgactacaccaaaattctggcgccgatgtccggggaagtgacgcaaatcaccaccctgcaggggcagacggtgattgccgcccagcaggcgccgaatattttgacccttgccgatctcagcaccatgctggtgaaggcgcaggtttcggaagcggacgtcatccatctcaagccggggcaaaaggcctggtttacggtgttgggcgatccgcttacgcgctatgaagggacgctgaaggatattctaccgacgcctgaaaaggttaacgacgctattttctactacgcccgttttgaagtgccgaacccgcagggcatcctgcgcctggagatgaccgcccaggtgcatattcagctttcggaagtcaaaaacgtcatcaccatcccgctgagcgcgctgggggaggccatcggcgataaccgctatcacgtgcgtctgctacgtaccggtgaagttaaagagcgtgaaatcgttatcggtgcgcggaatgacaccgatgtggcggtggtgaaagggctggaagagggggatgaagtcattatcggcgaaggtgcggccggagcagcgaaatga

SEQ ID NO: 252848 - DNA, 1659 bp, Klebsiella pneumoniae
atgcatcttgagcgcgtcgaaatagtaggctttcgcggcatcaaccggttatcgttgatgctggagcaaaataacgtgctgattggcgaaaatgcatggggtaaatccagcctgctggatgccctgacgctgctcctgtcgccggagttcgatctctatcattttgttcgggaagatttttggtttccgcccggggatgttcaggggcgcgagcgtcatctgcatattattctgaccttccgtgaaaatgaaccgggccgccatcgggtccgccgctatcggccgctcagcaaatgctgggtaccctgcgacgatggctatcagcgagtgttctaccgcctggagggggagcttgccgatgatgatagcgtgatgactctgcgcagctttattaacggcgaaggggaagcgctggagcttgaagatattgatgagctcgcccgtcacctggtgcggctgatgccggtgctgcgcctgcgcgatgcccgttttatgcggcggatccataatggtaccgtgccgcattcgccgcagatcgaaattaccgcccgccagctcgattttctctcccgcgagctggtgcaccatccgcaaaatttaaccgacgggcaaatcaggcaggggctgtcggccatggtgcagctgctggagcactattttgccgagcagagcagcgcgcaatctcgtcaccgcctgatgcgccgccattcacatgatgaacagcgcagctggcgctatctggacatcatcaaccgtatgatcgacaaacccggcggccgtagccatcgggtgattttattggggctcttttccacgttgttgcaggcgaaagggaccgtcagactcgatcgcgatgcgcggccgctgctgttaattgaggatccggaaacccgactgcaccccattatgctatccgtggcctggcatttgctcaatttgctgccgctgcagcgggtgacgacgacgaactccggcgagctgctgtcgctaacgcccgtcgagcatgtgtgccgactggtgcgtgaatcgtcacgagtgtcggcctggcggctggggcctggtggaatgaatgcagaagacagtcgacgcatcgcatttcatattcgttttaaccgcgcttcatcgctgtttgcccgctgctggctgctggtggaaggcgagacggaaacctgggttatcaacgaactggcccgccagtgcggccatcactttgatgcggaaggggtgaaggtgatcgagtttgcccagtcgggtttaaaaccgctgattaagttcgcccggcgaatgggcattgagtggcacgtgctggtggatggcgatgaagccgggaagaaatacgcagccaccgttcgcagtttgttgaatgacgataaaatgctggagcgagaccatctcaccgcgctaccggcgatggatatggaacattttatgtatcgtcagggattcgatgatgtttatcatcgggtcgcgcagctgccgatgaatattcctatgaatatgcggcgggtgatcaccaaagcgattcatcgctcgtctaagccagacctggcgattgaagtggcgatggaggccggacgtcgcggcgttgacgccattccgacgctgttgaaaaaaatgttttctcgcgtgctatggctggcgcgcgggcgggcggattag

SEQ ID NO: 252849 - DNA, 900 bp, Klebsiella pneumoniae
atgttttcgggactattaatcattctgctgccgttaatcgcaggctaccttattcctctccatcggccgtcagcccttaaacttatcgcacgacttctgagctggatcgtttacgttattctcttttttatgggaattagcctggcgttcctcgataatctggccagcaacctgttgtcgatacttcattacgcagcggtcagcgtcgtcattatcctgctgtgtaatattgcggctctgatgtggcttgagcagaaaatgccctggcaaaatcatcatcgccaggaaaaattaccctcgcgtctggcaatggcgctggaatcccttcagctatgcggcgtagtccttattggttttcttattggcctgagcggcctgccttttttacaacacgccaccgaggccagtgaatatacgctgattttcctgctgttcctgatcggtattcagctgcgtaataatggcatgaccctgcggcaaattgttctgaatcgccgcggaatgatggttgcggtggtggtgatggtgagctcactgctgggcggaatcattaatgcctttattctcgacctgccgctaaaaaccggcctggccatggcctccggctttggctggtattcgctttccggcatcctgttaacagaatcctatggcccggtgattggtagcgccgccttctttaacgatctggcacgagagctgctggcgattatgctgatcccggggctggtacgccgcagccgttcaacggcgctaggcctgtgcggcgcaacatcgatggattttacgctgccggtgctgcagcgctcaggcggcgtggagatcgtgccggcagctattgttcatggcttcattctcagcctgctggtgcccatcctgatggcctttttctccgcttaa

SEQ ID NO: 252850 - DNA, 1653 bp, Klebsiella pneumoniae
atgttttgtgtgcaatgtgaacaaaccatccgtactccggcaggaaacggctgctcttacgcgcagggtatgtgcgggaaaacggccgaaacgtccgatctgcaggatctgctgattgcctctctgcagggcctctccgcctgggcgcttaaagctcgtgaatatggcatcatcgaccacgacgtcgatagctttgcgccgcgcgcttttttctctacgctgactaacgttaacttcgactccccgcgtatcgttggctatgcgcgtcaggctatcgccatgcgtgaagcgcttaaagcccagtgcctgagcattgatgcccacgcgacggttaacaatccgatggccgctgtgcaactggctagcgacgatctgggcgacctgcagcgtcaggcggcggaatttactccgaacaaagacaaagcggccatcggcgagaacattctcggcctgcgcctgctgtgcctgtacggcctgaaaggcgctgcggcctatatggagcacgcgcacgttctgggccagtacgacaacgacatctacgcccagtaccataaaatcatggcatggctgggtacctggcctgccgatatgaacgctctgctggagtgctcaatggaaatcggccagatgaacttcaaagtcatgagcattctggacgccggtgagaccaccaaatacggtcatccgaccccaacccaggtcaacgttaaagcgaccgagggcaagtgcatcctgatctccggccatgacctgaaagatctctataacctgctggagcagaccgaaggcaccggcgttaacgtctacacccacggggaaatgctgccggcgcacggctatccggagctgcgtaaattcaaacacctgattgggaactacggcagcggctggcagaaccagcaggtggagttcgcccgtttcccggggccgatcgtcatgacctctaactgcatcatcgacccaaccgtcggcgcctatgacgatcgtatctggacccgtagcatcgttggctggccgggcgtgaaccatctggaaggcgaagatttcgccccgattatcgcccaggcgcagcagatggcaggcttcccgtacagcgagatcccgcatctcatcaccgtaggtttcggccgtcagacccttctgggcgctgctgatacccttatcgatctggtgagccgggaaaaactgcgccacatcttcctggttggcggctgcgacggcgcgcggggcgagcgtaattacttcaccgattttgccaccagcgtaccggacgactgcctgatcctgaccctggcctgcggtaaataccgcttcaataaactcgatttcggcgatattgaaggcctgccgcgtctggtcgatgccggtcagtgcaacgacgcttactcggcgattatcctggcggtgaccctggcggaaaaactgggctgcggcgtcaatgatctgccgctatcgctggtgctttcctggttcgagcagaaagcgattgtcattctgctgaccctgctctcactgggcgtgaaaaacatcgtaaccggcccgaccgcgccaggcttcttcaccccggatctgctggccgtgctcaatgagaaattcggtctgcgctctgtgaccaccgtagaagaagacatgaagcaactgctgagcgcgtaa

SEQ ID NO: 252851 - DNA, 969 bp, Klebsiella pneumoniae
atgaccatgccaacctcacaatgcccgtggcggatgcaggtgcatcacatccatcaggaaacgccggatgtgtggaccatttcattgctctgccatgactattatccgtaccgtgccgggcagtacgcactggtgagcgtgcgtaattcggcagagaccctgcgcgcttacactatttcgtccacgccgggcgtcagcgaatatattacgttgaccgttcgccgtattgacgatggcgcgggatcacagtggctcacccgcgacgtaaagcgcggcgactatatctggctgtccgacgcgatgggggatttcacctgcgatgataaagcggacgataagttcctgatgctggccgcaggctgcggcgtcacgccgatcatgtcgatgcgccgctggctggcaaaatatcgcccgcaggctgatgtgcaggtgatttttaacgttcgttcgccgcaggatgtgattttcgctgaggagtggcgtcagtatccggtgacgctggtggcggaaaataacgctacccacggtttcgtggcaggacgtttaacgactgaactactgcaaagcgtgccggatctggcatcgcgcaccgtgatgacctgcggtccggcgccgtatatggatctcgtcgagcaggaagtgaaagcgctgggcgcgacgcgcttctttaaagagcagttctttacgccagtcgccgtcgcggccaccagcggtctgaagttcaccaaactgcagccggcgaaaacgttttatgccccggtcggcaccacgctgctcgaagcgctggaaagcaataaggtgccggttaccgtcgcctgccgcgcgggcgtttgcggctgctgcaaaacgaaagtggtttccggtgaatataccgtcagcagcaccatgacgttaaccgatgcggaaatcgctgaaggctacgtgctggcctgctcctgccagccgcagggagatttggtactggcttaa

SEQ ID NO: 252852 - DNA, 435 bp, Klebsiella pneumoniae
atggttaaatctctgttaaatggtgttaataaactgctgtcgcatgatgattttggcaaacttttgttacgacttgccgttggcggcctgatgctgtttcacggattacacaagctattcgatggcgtggggggcatcagcagcatgctggtggcgaaaggtctgccaggctttatcgcttatggggttttagctggagaagtggttgcgccatgtctgctgattgtggggatcctgacgcgccctgcggcgctggtgctggcattcacgatggttgtggcctggctgatggtcgggacgggtaaaaccttcgcgctggatgcggtaggcgcgtgggcgattgagagtctggtctatttctttgttggcgcgctggcgattgccttcctcggggcaggccgatattccattggtggaaactcggcctggcgctaa

SEQ ID NO: 252853 - DNA, 1719 bp, Klebsiella pneumoniae
atgaaacagaccgtggcggcatatattgccaaaactctagaacaggctggcgttaaacgtatttggggcgtgaccggggattctcttaatggcttaagcgacagcctgaaccgcatggggaccatcgactggatgcccacgcgccatgaagaagttgccgccttcgccgccggagcggaagcgcagcttaccggcgaactggcggtgtgcgtcggttcctgcgggccgggcaacctgcatctgattaacggtcttttcgactgccaccgcaaccatgttccggtgctggccatcgccgcccatattccttccagcgaaatcggcagcggttactttcaggaaacgcatccgcaggagctgtttcgcgaatgcagccactactgcgaactggtctcctcgccggagcagatcccgcaggtgctggccatcgctatgcgcaaagcggtgattaaccgcggcgtctcggtagtggtgctccccggcgacgttgcgctaaaacccgcgccggaaagcgccagcagccactggtaccacgccccgctgccgcaggtgacgccggcagaagaagaactgaaaaaactggcccagctgctgcgctattcgagcaatatcgcgctgatgtgcggcagcggctgcgccggagcgcataaagagctggttgagttcgccgcgaagctgaaagcgcctatcgttcacgcgctgcgcggcaaagagcacgttgaatacgataacccttatgatgttgggatgaccgggctgataggcttctcctccggtttccataccatgatgaacgctgacaccctggtgctgctcggcacccagttcccctatcgcgccttctacccgacggacgcaaaaattattcagatcgatatcaaccccggcagtatcggcgcgcacagtaaagtggacatggcgctgatcggcgatatcaaatccaccctcagcgcgctgctgccgcatctggaagagaaaaccgaccgcaagttcctcgacaaagccctggaacactatcgcgacgcgcgcaaggggctcgatgacctggcgaagccaagcgataaaacccttcatccgcagtatctggcgcagcggatcagccactttgccgacgacgacgccatttttacctgtgacgtcggaacgccaaccgtgtgggctgcgcgctatttacagatgaacggcaagcgccgcctgctcggatcgttcaaccacggttcgatggctaacgccatgccgcaggccatcggcgcgaaggccaccgcccccgaccgtcaggtcgtggcaatgtgcggcgacggcggctttagtatgctgatgggggattttctctcgctggcgcaaatgaagctgccggtcaagatcgttatcttcaataacagcgtcctgggctttgtcgcgatggagatgaaggccggcggctatctgacagacggcaccgagctgcatgcgaccaactttgcccgcatcgccgaggcctgcggcattaagggcatccgtgtcgaaaaagcggctgacgtagaccaggcgttgcaaaccgccttcagtaccgacggcccggtcctggtggatgtggtggtcgccagtgaagaactggcgatgccgccgcagatcaaactggagcaggccaaaggtttcagcctttacatgctgcgcgcgattattagcggccgcggcgatgaggttatcgaactggcgaaaactaactggctaaggtaa

SEQ ID NO: 252854 - DNA, 1434 bp, Klebsiella pneumoniae
gtgtcgcagcgaattctggtgcttggcgccagcggttatatcggccagcatctggtgacaaggctcagcgagcagggcttcaccgtgctggcggcggcgcgccagatcgacagactcaagaagcagcatctccccggcgtcgagtgctactcgctcgatttaaaccagcctgacgcgctacccgccctgctggcgcaggttgacaccgtttattatctggtacacgggatgggcgaaggcggcgactttatccgccacgagcggcaggtcgcccttaacgtccgcgacgcgctgcgcaagacgccggtgaacgaagtcatttttctcagttcgttacaggttgcagaagaggagcaatccgatcatctgcgcgcccgccagatcaccggcgatctgctgcgcgaatcgggcgtaccggtagcggaagttcgcgccggtattatcgtcggcgccggttccgccgcgttcgaagtgatgcgcgatatggtttacaacctgccggtactgacgccgccgcgctgggtacgctcgcgcaccacgccgattgcgctggataacttactctattatctgctgcagctgctgaaccatcctgcggcagagcatcgcatttttgaagccgccgggccggaaattttgagctatcagcagcagtttatccgctttatggcggtcagcggcaaacgtcggccgttgatccccattccttttccgacccgttggatttcggtgtggtttctcaacatcattacttcagtgccgtcaaccacggccagggcgctaattcaggggctaaagcacgatctgatcgccgacgaccgcgccctgcgggcgctcatcccgcaacctctcatcgcttttgatgaagcggtgcgccgcacgctaaaggaagaggagcagctggtgaactccagcgactggggctacgatgcgcaggcctttgcccgctggcgcccagagtacggttactacccgaaacaggcgggctgcaccgttaacacttccgccagccttgctgcgctgtggaaggtggtcaaccaaattggcggcaaagagggctatttcttcggcaacgctctgtggaaaactcgcggcgcgatggatctgctggtcggtcaccggctggcaaaaggtcgcccggaaaatgaatatctgcagaccggcgatgcggtggacagctggaaggtgattatcgtcgagccggaaaagcagttgacgctgttattcggcatgaaagcgcccggccttggccgcctgagctttaccctgcgcgataaaggcgaccatcgcgaactggacgtccgcgcctggtggcacccgcacggtatgccgggactctgctactggttgctgatgatcccggcgcatctgtttatttttcgcggtatggcccgacgcatcgcgcacctggcggagcaaatcaccatcaaatag

SEQ ID NO: 252855 - DNA, 1014 bp, Klebsiella pneumoniae
atgaaggtactggttaccggtgcgaccagcggattaggccgcaacgcggtggaatatctgcgtaacagaggcattagcgtcagagcgaccgggcgcaacgaagcgatgggcaagcttctgagcaaaatgggcgcagagttcgtccctgcggacttaaccgagctggtctcttcgcaggccaaagtgatgctcgccggtatcgataccctgtggcactgttccagctttacttcaccctggggcactcagcaggctttcgatttagccaacgtccgcgcaacccgtcgcctcggcgaatgggcggttgcctggggcgtacgcaacttcgtacatatctcctcgccgtcgctctattttgattaccaccatcatcgcgatgttcaggaagattttcgtccgcagcgtttcgccaacgaattcgcccgcagcaaggcggcaagcgaagacgtgatccatcttctggcgcaggccaacccgaatacccgcttcacgatcctgcgtccgcaaagcctgtttggcccgcatgataaagtgtttattccgcgtctggcgcagatgatgcagcactatggcagcgttctgttaccgcgcggcggcagcgcgctggtggacatgacctattatgaaaacgcggtgcacgcgatgtggctcgccagccagccacagtgcgaccttctgccctcggcccgggcgtacaacatcactaacggcgaaccgcaaaccttgcacagcatcgtgttgaaactcatcgatgagctggggattaagtgccgcatccgatcggttccctatcctatgctggatattatcgcccgcagcatggagcgctttggcaataagtcagctaaagaacccgcctttacccactacggtgtctccaagctgaacttcgattttacccttgatatctctcgtgctcagcaggagctgggctatcagccggtggtgaacatggatgaagggattatccgcaccgccgcgtggttgaaggaccacggcaagctgcactattaa

SEQ ID NO: 252856 - DNA, 831 bp, Klebsiella pneumoniae
atgaaacgatgccgggcaggcgtactgctggcgctgctgctggcgggctgtgccagcgaaaaaggtattatcgatcgcgatggctatcagctggatacgcgccatccggcgcaggccgcttatccgcgcatcaaagtgctggtgatccactataccgccgatgatttcgacgtttccttagcgacgctgacggataatcaggtgagctctcactatctgatcccggagaaaccgccgctgcacggaggcaaaccgcggatctggcagctggtgccggaagaggatctggcctggcatgcgggggtcagcttctggcgcggcagcacgcgcattaacgatacctcgattggcattgagctggagaatcgcggctggcaaaaaacggcgggggtgaaaagctttacgccgtttaatccggcgcagattgacgccctgatcccgttggcgaaggacatcatcgctcgctatcagatcctgccgcagaacgtagtcgcgcatgccgacattgccccgcagcgcaaagacgatccggggccgctgttcccgtggcgcaggctggcggagcaggggattggcgcatggccggatgcccggcgcgtggcgttttatctgcaggggcgtccgtcatacgagccggtagacactgccgagctgctggacgtcctggcgcgctacggctatcaggtgacgccggaaatgaccccagcgcagcaaaagcgggtgattatggctttccagatgcacttccgccccgcgcgctgggacggcgttgccgatgcgcaaacgctggcgattgctgaagcgctgctggaaaagtacgggcgcggttaa

SEQ ID NO: 252857 - DNA, 324 bp, Klebsiella pneumoniae
atgcaattttccactactccgacccttgaaggtcagcccatcattgaatactgcggcgtcgtcaccggggaagcgattctcggcgccaacgtattccgcgattttttcgccagcattcgcgatatcgtcggcggtcgttccggcgcctatgaaaaagagctgcgcaaggcccgcgaaattgcgtttgaagagctgagcgagcaggcgaaggcgctgggcgccaatgcggtagtcgggattgatattgactacgaaaccgtgggaaaagacagcagtatgctgatggtcagcgtcagcggcaccgcggtgaagacccgccgatga

SEQ ID NO: 252858 - DNA, 516 bp, Klebsiella pneumoniae; identical to SEQ ID NO: 173856

SEQ ID NO: 252859 - DNA, 729 bp, Klebsiella pneumoniae
atgagcattaaattaaacggcattaattgcttctacggcgcgcaccaggcgctgttcgacatcacgctggattgcccgcagggggaaacgctggtgctgctcggcccaagcggtgccggaaaaagctcgctgctgcgcgttcttaacctgctggagatgccgcgttccggcacgctgcacatcgccgggaaccatttcgattttaccaaagcgccttctgacaaagccatccgcgagctgcgccagaacgtcggtatggtgttccaacagtacaatctgtggccgcatctgaccgtgcagcaaaacctgattgaagcgccttgccgcgtgctcggtttaagcaaagatcaggctttagtgcgcgcagaaaagctgctagaacgtctgcgcctgaaaccctatagcgatcgctacccgctacatctttccggcggccagcagcagcgtgtcgccattgcccgcgccctgatgatggaaccgcaggttctgctgtttgatgaacctacggcggcgctcgatccagaaatcaccgcccagatcgtcagtattatccgcgaactggctgaaaccggcattacgcaggtcatcgtcacccacgaagtggaagtggcgcgtaaaacggcaagccgcgtggtgtatatggaaaacggccatatcgttgaacaaggtgatgccggctgcttcgcgcatccgcagaccgacgcgtttaaaaactatctttcacattga

SEQ ID NO: 252860 - DNA, 732 bp, Klebsiella pneumoniae
atgaaaaaagtactgattgccgctcttcttgcgggcatgagcctctccgctaccgctgcccagaccattcgtttcgccaccgaggcctcttaccctccgtttgaatcgatcgacgctaataacaaaattgtcggctttgacgtcgatctggcgaacgcgctgtgtaaagagattgatgcgacctgcacctttaccaatcaggctttcgacagcctgatccccagcctgaagttccgccgtttcgacgcggtaatggccgggatggatatcacccctgagcgtgaaaagcaggtgctgttcacgaccccgtactatgaaaactctgcgctgttcgtcggccagcagggtaaattcaccagcatcgatcagctgaaaggcaaaaaagtcggcgtgcagaacggcaccactcaccagaaattcatcaccgacaaacatccggaaatcactaccgttccttatgacagctaccagaacgcgaagctggacctgcagaacggccgtattgacgccgtgtttggcgataccgcagtagtgaccgaatggctgaagagcaatccgaagctgggagcagtcggcgacaaagtcaccgataaagactacttcggcaccggtctcggcattgcgctgcgccagggcaataccgagctgcagcagaaatttaacgctgcgctggaaaaagtgaagagcgatgggacttaccagtctatctataacaaatggttccagaagtaa

SEQ ID NO: 252861 - DNA, 717 bp, Klebsiella pneumoniae
atgaacgaattttttccattagcaagcgccgccgggatgaccgtcggccttgccgtttgcgccctgatcatcggtctggtgctggcgatgctgtttgccgtcctcgagtcggtgaagctgcgcccggtcgcctggctcgcaaccggcattgtcacccttttgcgcggactaccggaaatcctggtagttctgtttatctattttggttcctctcagctgctgctgaccctttctgacggctttactattaatctcggcattgtgcagatcccggtacagatgcagattgaaaattttgacgtcagcccgttcctgtgtggggctatcgcgctttctctgctgtatgccgcttacgcatcgcaaacgctgcgcggggcgcttaaagccgttccgcaggggcaatgggaatccggtcaggcgctgggattatcaaaagccgctattttctttcgcctggtgatgccgcagatgtggcgccacgcgctgccgggcctcggtaaccagtggctggtgctgctgaaggataccgcactggtgagcctcattagcgtcaacgatctgatgctgcaaaccaaaagtatcgctacccgaacccaggagccgtttaactggtatatcatcgcggcagcaatctatctggtcatcaccctgttgagtcagtacattctgaaacgtattgatcagcgagcgacgcgcttcgaacggagaccaggctga

SEQ ID NO: 252862 - DNA, 669 bp, Klebsiella pneumoniae; identical to SEQ ID NO: 173852

SEQ ID NO: 252863 - DNA, 732 bp, Klebsiella pneumoniae
atgaaaaagttagttctggccgcactgcttagttctttcgcctttggcgccgctgccgcagaaaaaatcagctttggcgtttctgcaacttacccaccgtttgaatcgatggacgccaataaccaaatcgccggtttcgacatcgacctggccaacgcgctgtgcaaacagatgcaggccgagtgtactttcaccaaccatgccttcgacagcctgatcccggcgctcaaattcaagaaatatgatgcggtcatctccggcatggacattaccccggagcgcagcaagcaggtggcgtttaccgatccgtactacgctaactccgcgctggttatctcgaagaaagatgctttccactctttcgccgatctgaaaggcaagcgcatcgggatggaaaacggcaccacgcaccagaaatacctccaggataaacatccggaagtgaaaaccgtggcttacgatagctaccagaatgcgttcatcgacctgaaaaatggccgtattgatggggtgtttggcgataccgccgtggtcaacgaatggctgaaaaccaacccgcagctgggcgcggcaacgccgaaagtcaccgacgcgcagtacttcggtaccggcctcggcattgcggtacgcccggataacaaagcgctgctggaaaaactgaacgccgcgctgaaggcgattaaagccgacggcacctacgagaaaatcagcaagcagtggttcccggagtaa

SEQ ID NO: 252864 - DNA, 1473 bp, Klebsiella pneumoniae
atgatccgccgtctcagcctcagccagcgcctggcgctggtgtttacctcgttactgctgctttgtgcgttagccgtttgcctgatccagctctacagcagcgcgcagtacggcaacgtgatggtccagcgtctttccgccgggctggcgcagcaaatcgccgctcgcgagccgctgctggacgctcaggggcaggttgaccgccggatgctgaaaccgcttttcgaccggctgatgaccttcaaccccagcgtggaactgtatctgctttcgcccgacggcgagctgctggccgacgccgcgccgcccggtcatatcaaacgccagcgcatcgatctggcgccggtgcaaacgttcctttccggcggcgcgtggccggtatacggcgacgatccgcgcagccttgataaacaaaaagtatttagcgtggcgccgctgcgccaggacggtcagctacgcggctatctgtatatcattctgcagggcgaaacctttaatgaactggcggcaagcgcctggctgaaaacactgtccagcctgctgctgtggactctgctgctggtggccgctctcggcctgctggcgggactgctcgcctggcggtgggtcacgcgcccggtgcgtcagctcaccgcgctggtggctacgaatgagcaggacagcatccatgcgattaaggcgctggcggcgcaaaccccggaggcgaatccgggaaacgaagtcgccgtactgcataaccgctttattgaactggcccgccagattgccgggcagtgggatcgtctggccgatagcgaccgtcagcggcgagagttcgttgccaatatctcccatgatttacgcacgccgctcccctccttgctgggatatctggaaacgttaagcctgaaggccgatcgcctgacgatggaagagaacaagcagtatttgaatatcgcgctgcgccagggcaataaagtgcgccatctttctcagcagctgtttgagctggcccgcctggagcacggtgggattaagccgcagccggaaacgttcgtgctggccgagctggtgcaggatgtggcgcaaaaattcgatctgcccgtcgcgacgcgcaatatcggtttgcagctggagctggctgccggattaccgccggtcaccgccgatctctcaatgattgaacgggtgttgaccaatttgctcgataacgccattcgtcatacgccggaggggggggttattcgcctggcggctcggcgggcagggccagagattatcgtcgaggtggccgatagcgggccgggcatcgccggcgagctgcgggcaaccttgtttgaacgaccttcggtgctggaacctggcgcgcaaagcgcatcgagaggagggttgggattaatgattgtccggcggatgctgcagctgcacggcggcgatattcgcctgcttgaagcgccggcaggagcctgtttccagtttaccctgccggtttaa

SEQ ID NO: 252865 - DNA, 717 bp, Klebsiella pneumoniae
gtggcaaaaaaaattctgttggttgaagatgatgaagatatcgctgcgctgctgcgcctgaatctgctcgatgagggatatcagattgttcacgtagcggacggggcgcaggccctgcggcagctggaaaaggatctctgggatgcggtgatcctcgacctgatgctgccgggcgttgacggtctggaaatttgtcggcgtattcgtcagcaaacccgctatttgccggtgattattatcagcgcccgcgccagcgaaacccagcgggtgcagggccttgaaatgggggcggatgattatctggccaaacccttttcgattctcgaactgaccgcccgggtcaaagcggtgtttcgtcgccaggaggcgatggggcaaaatttgttaatggatgccgggcgtatcaatagccacggcttgagcatcgatcctctatcccgcgacgttaagctgcgcggcgagatggtggatctcaccccgcgcgagttcgatcttttatactattttgctcgtcaccccggggaggtcttttcccgtcttgagctgctcgatcgggtgtggggctatcagcacgacggctatgagcatacggtcaatacccatatcaaccgcctgcgcaccaaaattgagcgcgacccggccgagccggacatcattttgaccgtctggggtaaaggctataaatttgccgtggagcgcaaagaggcgcagccatga

SEQ ID NO: 252866 - DNA, 1131 bp, Klebsiella pneumoniae
atgcactgcgcactctatgacgcgggccgctgtcgctcctgccagtggctggaactgccggtatcgcaacagctcgccgataaaatggccgatttgcgcacgcttctcgccgatgcccccgtcgctgactggtgcgcgccggtttgcggcccggaaagcgggtttcgcaacaaagcgaaaatggtggtcagcggtagcgtagagcgcccgctgctcggaatgctgcaccgtgatggcgccccggaagacctcaccgattgcccgctctatccgccaggcttcgcccccgtcttcgctgcgctcaagccgtttatcgcccgcgccggactcacgccctataacgttgcccgcaggcgcggagagctgaagtacattctgctgaccgaaagccggctcgacggcgggatgatgctgcgctttgttctgcgttcggagaccaagctggcccagctgcgcgccgcgctgccggcgctccaggcgcagctgccgcagctgaaagtgattaccgccaatattcagccggtgcatatggccatcatggaaggagagcgggaaattttcctcaccgaccagcaggcgctggcggaaaactttaacggcgtgccgctatggatccgcccgcaaagcttctttcagaccaacccggcggtggccagccggctgtatgccaccgctcgcgactgggtgcgccagctaccggttaatcatatgtgggatctcttttgcggcgttggcggctttggtctgcactgcgccacgccggagatgcgcctgaccgggattgagatcgccgctgaggccatcgcctgcgccagacaatcggcggcgcagctcggcctgcagaatctgcatttccaggcgctcgattccacgcagtttgctaccggcgaaggcgaaattcccgatctggtactggtgaacccgccgcgtcggggtatcggcgacggactgtgcgactatttaaaccgtatggcgccggattttattatctactccagctgcaacgcccgcacgatggcgaaagatatcgcccggttgaatggctaccgcatcgcgcgcgtccagctattcgatatgttcccgcataccgcccactatgaggtgttgaccctgctggttcgcgaagtataa

SEQ ID NO: 252867 - DNA, 489 bp, Klebsiella pneumoniae
atggaagactttacgttgggattgtttactaaaacgcgttcgtctcatgctcgtcttaacgttcctgcgctggtgcaggtggcggccttcgccattattttaatccgcggcctggatttgctgatgatcctcaaccagcttggcgttcagggaatcgcggattttgtccatcgcagcgtgcagacgtgggcgctcaccctggtgtttctctcaagtctggtgctggtatttattgaaatctggtgcgcgttttcgctggtaaaagggcgcaactgggcgcgttggctgttcctgttgacgcagattattgtgattggctacctgtgggccgcttcattgggctacggttatcctgagctgtttagcattgccggtgaatcgaagcgcgagatatttcgttctctggtgctgcaaaagctgccggatctactggtgctggccatgctgtttgtgccggccccgtgccgacgctttttccgtttacagtaa

SEQ ID NO: 252868 - DNA, 846 bp, Klebsiella pneumoniae
atgaataatttaccggtagtccgttcgccgtggcgaatcgtcattttgctgcttggctttacctttctgtatgcgccgatgctgatgctggtgatttactcgttcaacagctcaaagctggtgacggtatgggccgggtggtcgacgcgctggtatcgcgagctgtttcatgacgatgcgatgatgagcgcggtaggcttaagcctgaccattgccgcctgcgccgcgacggcggcggcgatcctcggtaccattgccgcagtggtgatggtgcgttttggccgcttccgcggttcaaacggctttgcttttatgatcaccgcgccgctggtgatgcccgatgtgattaccggcctgtcgctgctgctgctgtttgtcgcgctggggcattcaattggctggccgtcggatcgcggcatgctgaccatctggctggcgcacgtgaccttctgtaccgcgtacgtcgcggtggtcatttcatcgcgcctgcgtgagctggaccactctattgaagaggcggcgatggatctgggcgccgcgccgctgaaggtctttttcgtcattacgctgccgatgattatgccggcggtggtctccggttggctgctggcctttacgttgtcgctcgacgacctggttattgccagctttgtttccgggccgggggcgacgacgctgccgatgctggtcttctccagcgtgcgcatgggggttaacccggagattaatgccctggcaacgttaatcctcggcgtggtcggcattgttggttttatcgcctggtatttgatggcccgcgcggaaaagcagcgggtgcgcgatatccagcgtgcaagaagcggctga

SEQ ID NO: 252869 - DNA, 954 bp, Klebsiella pneumoniae
atgcgtacattagaacccccgtcaggcgtaaacaaaccgggcggtttcgcgctgtggctggcgcggctgcagatggcccacgggcgcaagctggtgattgcgctgccttacatatggctgatcctgctgttcctgctgccatttctgatcgtctttaaaatcagcctggcggagatggcgcgggcgatcccgccctacaccgatctgctggagtgggccgacggccagctaacgttaacgctgaatctcggtaatttcctgcagcttaccgacgatcctctctattttgaggcgtatctgcagtcgctccaggtggcagggatctcgacgttctgctgtctgctgctgggttatccgctggcgtgggcggtggcgcacagtaagccatcgacccggaatatcctgctgctgctggtcattctgccgtcatggacgtcgttcctgatccgcgtctatgcctggatggggctgctgaaaagcaacggcgtgctgaacaacttcctgctgtggctgggggttatcgaccagcctctggagatcctgcacaccaacctggcggtctatatcggtattgtttacgcctatctgccgtttatggtgctaccgatttataccgccctcacgcgcatcgattactcgctggttgaggcgtcgctggatctgggcgcccggccgctgaagaccttcttccaggtgatcgtcccgctcaccaaaggcgggattattgccgggtcgatgctggtatttattccggcggtaggggagttcgttatcccggaactgctgggcggcccggacagtattatgattggccgcgtgctgtggcaggagttctttaacaaccgcgactggccggtggcctcggcggtagcgatcgtgatgctgctgttgctgatcgtaccgatcatgtggttccacaagcatcagcaaaaacaggtgggggaacacggatga

SEQ ID NO: 252870 - DNA, 1179 bp, Klebsiella pneumoniae
atggtgcgcctgcaccatgatttgatttctgccggagaacaccccgtgaatgatgtaattcctcgcccgcaggcgaaaatccccaaagcgctgaccccgctgctcgaaatccgtaatttaacgaagtccttcgatggccagcacgccgtcgatgatgtcaatctcaccatttataaaggcgaaatttttgccctgctgggcgcatccggctgcggcaagtcaaccctgctgcgcatgctggcgggattcgaacagcctaccgccgggcagattgtcctggatggcgtcgatctggcgcgggtgccgccgtatcagcggccgattaacatgatgtttcagtcctatgcgctctttccccatatgacggtggagcagaacatcgcctttggcctcaagcaggacaaattgcctaaggctgaaatcaccagtcgggtgcaggagatgctggcgctggtgcatatgcaggagttcgcaaagcgtaaaccgcatcagctctccggcggtcagcgtcaacgcgtggcgctggcccgcagcctggcgaaaagaccgaaactgctgctgcttgacgagccgatgggcgcgctggataagaagctgcgcgacaggatgcagctggaagtggtcgatattcttgagcgcgtcggcgtcacctgcgtgatggtgacccacgatcaggaagaggcgatgaccatggcggggcgtatcgccattatgaaccgcggcaagttcgtacagatcggcgagccggaggaaatttacgagcacccaactacccgctacagcgcggagtttatcggctcggttaacgtctttgaagggctggtaaaagagcgccaggaagatggcctggtgctggattccccgggcctgacgcatccgctgaaggtcgatcccgatgcctccgtcgtcgataacgtcccggtgtgggtggctctgcgcccggaaaaaattatgctctgcgaggacccaccggcggatggctataacttcgcggtaggtgaggttatctatattgcctatctcggtgacctgtctatctaccatgtgcgcctgaaaagcgggcagatgctcagcgctcagctgcagaacgagcaccgttaccgcaaaggtgcgccaacctggggcgatgaagtccgtttatgctgggacgccgatagctgcgtcgtgctgacggtgtga

SEQ ID NO: 252871 - DNA, 1113 bp, Klebsiella pneumoniae
atgaccgcctttggtaaaaaatggttaacaggtctggttacgggtgcgctgatggccgtctctgccggttcgctcgcagccgaacaaaaaaccctgcatgtatataactggtctgattatattgctccggatacggtggcgaattttgaaaaagagaccggtattaaagtggtgtatgacgtttttgactccaatgaagtgctggagggtaagcttatggcgggcagcaccggatttgacctggtggtgccgtcggccagcttcctcgagcgccagctggcggcaggggtgttccagccgctggataagagcaagctccccaactggaaaaatctcgatccggaagtgctgaaactggtcgcgaagcacgacccggacaataaatacgcgattccctacctgtgggcgacaaccggcataggctataacatcgataaagtgaaagccgtgctgggcaaagatgcgccgctggacagctgggatctggtgatgaaaccggaaaatctggagaaactgaaaagctgcggcgtctccttccttgatgccccggaagagattttcgccaccgtgctgaactacctcggcaaagatcctaatagcaccaaagccgatgactacactggcccggcaaccgacctgctgctgaagctgcgtccgaatattcgctacttccactcttcgcagtacatcaacgacctggcgaacggcgatatctgcgtcgcgatcggctgggcgggcgacgtatggcaggcggctaaccgggcgaaagaagcgaagaacggggtcaacgtttcctactttatcccgaaagagggcgcgctggcgttctttgacgtcttcgctatgccggcagatgcgaaaaacaaagaagaggcttatcaattcctgaactatctgatgcgtccggacgttatcgcgcatattagcgatcatgtctattacgctaacggcaacaaagcatctacgccgctggtcagcgaagcgatccgcagcaatccggccatctacccgccggctgacgtcttcgccaagctgttcaccctgaaagtccaggatccgaaaatcgatcgcgtgcgtactcgcgcatggacgaaggtgaaaagcggtaagtaa

SEQ ID NO: 252872 - DNA, 480 bp, Klebsiella pneumoniae
atggattcactggtcgttccgggtcttgatacgttacgtcaatggctcgacgaattgggcatcagcttttttgagtgtgattcctgccaggcactgcacctgccgcatatgcaaaatttcgaaggcatttttgatgccaaacttgacctggttgataacgtggtgcttttctccgcgctggctgaggtgaaaccctccgcgctcctgccgctttccgccgatctttctgcgattaacgccagctcgttgacggtgaaagctttcctcgatattcaggatgataatctgccgaaactggtggtttgccaggcgttgaccgtcggcgtcggcgtgacgatcgatcagtttgcatggtttttccgccagagcgaagaacagatatcgatggtcatccttgaagccagcgctaaccaggtgctgtataagtctgaggaagaagaaccgatagctgagaatattcagtaccattttcttcactga

SEQ ID NO: 252873 - DNA, 903 bp, Klebsiella pneumoniae
gtgaaaattgccatattatcccgggatggaacgctttattcatgtcgacgcctgcgcgaagccgcgcaaaaacgcggtcatcaggtggaaatcctcgatccgctttcctgctatatgaacgtcagcccggtggcctcgtcaattcactataaaggccgccagctcccgcattttgacgccgtgatcccgcgtatcggcacggcgatcacctactacggcaccgcggcgctgcgtcagtttgagctgctcggcagctatccgctgaatgaatcggtagccatcacgcgcgcccgcgacaagctgcgttcgctccagctgctggcgcgccagggcatcgacctgccgctcaccggtattgcccactcgccggacgacaccagcgatctgatcgccatggttggcggcgcgccgctggtggtcaagctggtggaggggacgcaggggatcggcgttgtgctggccgaaacgcgccaggcggcagagagcgtcattgacgcttttcgcggcctgaatgcgcatattctggttcaggagtatattgccgaggcgaaaggccgggacgtgcgctgcctcgtggtgggtaatgaagtggtcgcggcgattgagcggcgggccaaggagggcgattttcgctccaacctgcatcgcggcggcgtagcctcggtggcgcttatcagcgagcaggagcgtgaaatggccattaaggcggcgcaaacgctcgggctggacgtggcgggcgtggatatactgcgcgccacgcgcggaccgctggtgatggaagtgaacgcttctccggggctggagggggttgaaaccaccaccggcgtcgatattgccggcaagatgatcgcctggattgaacgacaagcgacgcccggattttgtctgaaaatggggggatag

SEQ ID NO: 252874 - DNA, 723 bp, Klebsiella pneumoniae
atgacgccgaccattgagctgctgcgtagccaccgttctattcgccattttaccgacgcgccgatcagcgaagaacagcgcgccgcaattatcgccagcgcgcagggagcctccagctccagttttttacaatgtacctcaattattcgcgttaccgacccggaaatacgtcaacagctggtgccgctgagcggcggacagcagcacgtggcgcaggctgcggaattctgggtattctgccctgattttaaccgcaatctgcaaatctgcccggacgctcagctgggtctcgccgaacagctcctgctgggctgcgtcgacaccgcgattatggcgcagaatgcgctggtggcggcggaatctcttggcctgggcggcgtctatatcggcgggctgcgtaacaatattgatgcggtgacccagctgctgaagctcccacagcacgtaatgccgctgtttggcctgtgccttggctggcctgacgataatccggaagtgaaaccgcgcatgccgtcggcgatgctggttcatgaaaatcactatcagccgctggatgagacggtccttgctgaatatgacgagcagttggcgcactattatctctctcgcggcagcaacacgcgtcgcgatacctggagcgaccatatccgccggactatcgtcaaagaaagccggccatttattctggaatatctgcataagcagggatgggctacgcgctga

SEQ ID NO: 252875 - DNA, 291 bp, Klebsiella pneumoniae
atgcgatcgcccgcagcattacccaaaagcgttctggtagttgagtttatcggcatggtgctgttgaccctggcctggctctcgcttaatcagtacgtcagcctgcctgcgccgttttccagcccgacagcggcgctgctgatgatcttcgcggggatcctgctgatgcttccggccgccgtggcgttaatctggcgtgtggcgaaagttgttgctccgcagttgacgcaaacgaaaaattccccttcatcattgcctgacagagaaaaacgagatgacgccgaccattga

SEQ ID NO: 252876 - DNA, 264 bp, Klebsiella pneumoniae
atgtttacggtaatttttggtcgtccaggttgcccatattgcgttcgcgccaaagaactggcggaaaaactgagcaacgaacgcgatgattttaactatcgctacattgatatccacgctgaaggcatcagcaaagccgatctggagaaaaccgtgggtaaaccggttgaaaccgtaccgcagatttttgtcgatcagaagcacattggcggctgcaccgactttgaagcctgggcgaaagagaatctcggtctgtttgcctga

SEQ ID NO: 252877 - DNA, 384 bp, Klebsiella pneumoniae; identical to SEQ ID NO: 173837

SEQ ID NO: 252878 - DNA, 1686 bp, Klebsiella pneumoniae
gtgaatataaacgtcgcagatttgttaaacgggaattacatcctgttattgttcgttgtacttgcactgggactctgcctcgggaaactgcgtctcgggtcggtacaacttggtaattccattggcgttttagtggtttccctattattagggcagcagcatttcagtattaacactgacgccctcaatctcggctttatgctgtttattttttgcgtcggcgtagaagcaggacccaactttttttctattttttttcgcgatgggaaaaattacctgatgctcgcgctggtaatggtcggcagcgcaatgctgatcgccatgggactgggtaagctcttcggctgggatatcggcctgacggccgggatgctcgccggcgcgatgacgtccactcccgtgctggtcggcgccggggatacgcttcgccacttcggcatgcccagcgatcagctcgccctttcgctcgatcatctgagcctaggctatgcgctgacctatctgattggcctggtcagcctgatcgtcggcgcccgctatatgccgaagctgcagcatcaggatttgcagaccagcgcccagcaaatcgcccgcgagcgcggtctcgataccgactcccggcgtaaggtctatttaccggtgatccgcgcctaccgcgtcggtccggagctggtggcgtgggctgatggtaaaaatctgcgcgagctgggtatttaccgccagaccggctgctacattgagcgcatccgccgcaacggcattctcgcgaacccggacggcgatgcggtgctgcagatgggcgatgatatcgccctggtgggttacccggatgcccatgcccgcctcgacccaagcttccgtaacggcaaagaggtcttcgaccgcgatctgctcgatatgcgcatcgtcaccgaagagatcgtggtcaaaaaccacaatgccgtcggccgtcgcctggcgcagctgaagctgaccgaccacggctgcttcttaaaccgcgtcattcgcagccagatcgaaatgcctatcgacgataacgtggtgctcaacaagggcgatgtgctgcaggtcagcggcgacgcgcgtcgcgttaaaaccgtcgccgatcgtatcggcttcatctccattcacagccaggtgaccgacctgctcgccttctgcgccttctttatcgttggcctgatgatcggcatgatcaccttccagttcagttcgttcagcttcggcatcggtaacgccgccggtctgctgtttgccggcattatgctcggcttcctgcgcgccaaccatccgacgttcggctacatcccgcagggcgcgctgaatatggtgaaagagttcggcctgatggtatttatggccggcgtggggctcagcgcgggcgccgggattaacaacggcctcggcgccgtcggcggtcagatgctggcggcgggcctgatcgtcagcctggtaccggtggttatctgcttcctgttcggcgcgtacatcctgcgcatgaaccgcgcgatgctcttcggcgccatgatgggcgcccgtacctgcgcgccggcgatggaaattatcagcgatactgcccgcagcaatattccggcgctgggatacgcggggacctacgccatcgctaacgtattgttaaccctggcaggtacgctgattgtcatcatctggccgggactacagtga

SEQ ID NO: 252879 - DNA, 543 bp, Klebsiella pneumoniae
atggcccgtcgaccaaacgacccgcagcgtcgggagcggattttgcaggcgacgctggacacgatcgcgatacacggcatccacgcggtcacgcatcggaaaatcgccacctgtgcgggcgtgcctttgggctcgctgacctactatttcagcggtatcgaggcgctggtcgaagaagcgttcagcctgtttaccggccagatgtcggcgcagtatcagctgttttttgccgatgtgcatagccgcgaagaggcctgtgacgcgattgccgagctgatattcagcgcccaggtgaccaccgcacgcaatatggagctgatgtatcagctgtatgctttttgcagcagccagccgaatttaaaagcagtcatgcaaaactggatgctgcgcagccagcagactctggaacagtggtttgaaccagcaacggcccgcgggcttgacgcctttatcgagggtatgacgctgcacttcgtgaccgacagagcgccgctatccagagaagcaattcgactgatggtgggaaggctggcgggagagtga

SEQ ID NO: 252880 - DNA, 1122 bp, Klebsiella pneumoniae
atggcctcatgggcgacccgcacgccggcgattcgcgatctgctcgcgctctcgacggcggaaatggggattgtattatttggactatcaataggttcgatgagcggcatcctctgctcagcgtggctggtcaatcgattcggcacccgaaaagtgattcgtaccaccatgtcctgcgcggtggtcggcatgctggtcctcagcgccgcgctatggtttacctcggcggtgctgtttgctgttggcttagccatcttcggcgccagctttggctcagcggaagtggcgattaacgttgaaggcgccgccgttgaacgcgaaatgaataaaaccgtgctgccgatgatgcatggtttctacagcttcggcacgctcgtcggcgccggaataggcatggcggtcaccggcttcggcctgcccgccgcgccgcacattctgctggcggcgctggtggctgtcgcccccatcgctatcgccattcgcgcaattccggaaggtaccggcaagaatgcagcggaagcggcacgccatgaaggcaaaagcctgccgatatggcgagatgctcagttgctgctgattggcgtcatcgtcctcgccatggcctttgccgagggttccgccaacgactggctgccgcttctgatggtggacggccacggcttcagtccgacttccgggtcgctgatttacgcgggcttcaccctcggtatgaccctcggccgttttaccggcggttggtttattgaccgctacagccgggtgacggtggttcgcgccagcgcggtcatgggcgcgctgggcattggcctgattatttttgtcgataacccgtgggtcgccggcctctccgtactattatggggcctcggcgcatcgctcggcttcccgctgaccatttccgccgccagcgacactggcccggatgcgccgaagcgcgtcagcgtggtggcgattaccggctacctcgccttcctcgtcgggccgccgctgctgggcttcctcggcgagcacttcggcctgcgtagcgccatgatggtagtgctggcattggtgctggtcgcggccatcgtcgcccgggcagttgcgaagccacactctgaacccgtgatggagaacagttaa

SEQ ID NO: 252881 - DNA, 816 bp, Klebsiella pneumoniae
atgagcatcaaattgattgcggtagacatggatggcacctttctgagcgatgccaaaacctataaccgtcagcgcttcctcgcccagtatcagcggatgcgcgagcagggcatccgcttcgtcgtcgccagcggcaaccagtattaccagcttatctccttcttcccggaggtagcgcacgagatcgcctttgtcgccgaaaacggcggctgggtggtcagcgccggagaagatgtatttaactgccggataccgcaggaacatttcaataccgtcatcgatcatctccagacgctgaccaacattgaaatcatcgcctgcggtaagcgcagcgcttataccctcaaccagtataatgatgagctgaaagcggtcgcggcaaagtactatcatcgcctcgaactggtcgacgactttaatcatattgctgatgatgcgattctgaaatttggcctcaacgtcccggaccagctgatccctgagatacagccgaagctgcacgccgcgcttggcgatatggtaaccgcagtcgctaccggctacggcagcattgacctgattattcctggggtacacaaggctaacggcctgcgcatcctgcaggagcgctgggggatcgagaatcatgaagtggtcgcctttggcgatagcggcaacgatattgaaatgctgcagcatgccggattcggttacgcgatggccaacgccgccgcgccggtgaaggccgttgctgactatcgtgcgccgcacaataacgaagagggcgtactgcatatcattgataaagtgcttaatcgcgaagcgccgttcgcctga

SEQ ID NO: 252882 - DNA, 1236 bp, Klebsiella pneumoniae
atgcacaattcttcactttcaggcaaacgcctcggacgtcaggcgctgctctttccgctgtgcctggtgttatacgaattcgccacctatatcggcaatgatatgatccagccgggcatgctctcggtcgtggaagagtttggcgttggcaatgaatgggttccgacctccatgaccgcctatctcgccggcggtatgtttttacagtggctgctgggcccgctttcggaccgcatcggccgccgtccggtcatgctgaccggggtggtgtggtttatcgtgacctgcctggcgacgctgctggcgcaaactattgagcagttcacgctgctgcgctttttgcagggtatcagcctgtgctttattggcgcggttggctatgcggcgatacaggagtcttttgaagaggcggtatgcatcaagattaccgccttaatggccaacgtcgcgctgattgcgccgctgcttgggccgctggtgggcgcggcctgggtacatatcctgccgtgggagatgatgtttgtcctgtttgccgtactggccgctatcgccttcttcgggctacagcgggcgatgccggaaaccgccacccgcatgggcgagaaactatcggtaaaagagctggggcgtgattatcgtgaagtgctgaaaaacctgcgctttgtcgccggcgcgctggccaccggttttgtcagcctgccgctgctggcgtggatagcccagtcgccggtgattatcattagcggtgagcaggcgaccagctacgaatatggcttgctgcaggtgccaatctttggcgcgttgatcgccggtaacctggtgctggcgcgccagacttcccgcaaaacggtgcgttcgttgattatcctcggcggctggccaattatgcttggcctgctgatctccgccgtcgctacggtcgcctcgacgcacgcttatttgtggatgaccgccgggctgagcgtttacgccttcggcattgggcttgctaacgccgggctggtgcgcctgacgctgtttgccagcgaaatgagcaaggggacggtatcggcggcgatggggatgctgcaaatgctgatctttaccgtgggtattgaagtgagcaagcacgcctatgagtctggcggcagcggactcttcagtttgctgaatttgcttagcggggtgctctggctggcgatgacggtctacttcctgaaggacaaacgcgtaggcagctccctcgaaccgcagtaa

SEQ ID NO: 252883 - DNA, 594 bp, Klebsiella pneumoniae
atgctggaaaatattaactactcgctgtttgcattactcaatgccactccctcgtccccgtggtgggcgatagagatcgcgacgtttatcgccaaagacctgattattattgtgccattattagtattagccttatggctttggggtccaaaccagcgtcagctagtatttaaggtgatgatggcattagccattagtcttacgctgtcatggatattcggcgcgctttttccgcacgaacggccgttcgccgccggtatgggttataacttcctgcaccactcgcccaacaactccttcccgagcaatcacggcaccatctgctttacctttgcgctggcctttatgttctggcaccgcctgtggtcgggagtactgcttttcgccgttgcctgcgcaattgcctggtccagggtctatctcggcgttcactggccgatggatatgctgggcggacttctcaccgcgatgagcgcctgtctaagcgcccagcttttgtggcaaagcggcggaaagaccctttatcagcatctgcagcggctgtaccgcctgttcttttcgctaccgattcgcaaaggctgggtgcgcgaataa

SEQ ID NO: 252884 - DNA, 759 bp, Klebsiella pneumoniae
atggaaactcgtcgtgacgaacgcatcagccagcttattcaggcactcaagcgcagtgataaactgcatctaaaagaagcggccaccctgcttggggtgtcagagatgactattcgtcgcgacctcaacggccacagcggcccggtcgttttgctgggcggctatatcgttctggagccgcgcagcgcgacgcactatctgctaagcgaccagaaaacgcgccttgttgatgaaaaacgccgcgccgcccgccatgcggcaaagctgcttgaggcccatcagatggcctttttcgactgcgggaccaccacgccgtggattatcgatgccatcgacaacgccctgccgtttaccggggtctgctattcgctcaacaccttcctttccttgcaggaaaagccacagtgccgcgcgattttgtgcggcggtgagttccacgccagcaacgccatttttaaaccgctgagcctgcaggatacgctaagccatctttgccctgatatcgcgttttattccgccgcgggcgtcgattgcgagcagggagcgacctgctttaacctcgaggagctgccggttaaacactgggcgatgaaaagcgcgcgctaccacgtgctggtcgtcgatcacagtaaatttggcaaagttcggccggcgcggatgggcgatttatcgcagtttgacgtgattgccagcgacgtgtgtccggatgacgagctgcttacgctggcgaaagaaaaacagatttcactcctttactaa

SEQ ID NO: 252885 - DNA, 1191 bp, Klebsiella pneumoniae
atggcaaacattagtgatgaactggcggccagtattcaaaagtgctttgaacgtacctacgtggatctggccaatcagcagcaatttttattcggctccggtaacgtgacggtaactaaaccggatggcacgaccgggactgtgaaatcgtgggcgcagttccaaagcgaatacgctacgcggcagacggctatcgactcatcaatcaccgcagccaataaaaaccaggcgaagactacagcggcaaacacatggacgcagacgcagacgttcagtaagggcgtaacgttcagcgctactattacagcagcggggcaaatactcaggaagaacagcagcacgcaattcactgcgattgatgccgggaatctggagatcagcagtgacaccacgccgtttattgattttcaccacaaaggcagcgctgcagactatacgcatcgaattatcaccgaagacggcgcgctggctatttatcccggcttgcgcgtccgtggcggattcgggatttacggcgtttgcactcagtacggcgaaaactacgggcaggggttcatcgccaggttgaacacagatccgggtaacgtagctaacgggacaatcatcgcttcgcccaggatgaccaccagattcaacacgcgcggtaacgacagcaacgtggacggcgggcagggggctatgtggttcgaggagcaggtcggcacaaatcacaggctagttttcatgctgggcgggtttagtcagcctgttcagtattggcaacacttgccggacgggcggatctatagcagttcgcgcggcgatgttgcgttcaacgggacgtccgacgaacggctgaaacacagcattgaaccgactgacggccatttgtcagtcgatcgcattcgtcagcttgagctggtgacgttcgtctacaacgacgatgagcagaacaggacgcgtcggggaataatcgctcagcaggcacagcaggtcgatcaacagtatgttaagcagattaacacgtcgtatatgctcaacggtgagagggtggacgatgaccgcctgcagctcgataacaatgtgctcttgatggatacactggcggtggttaaagtgctaattcagcaagttgaagctctggagaaaaaacttcaagttcaggaggaaggctcaagacatgatcgacgtaggggtgaagacgatctgtaa

SEQ ID NO: 252886 - DNA, 420 bp, Klebsiella pneumoniae
atgtttaatcgtaatgatctgacgctttcactcttctatgcttccagcacgaatgatgacggcgataaggtcgcgtcacttaccgttcaggtgaacaattccgacatggtggccatgcagagcaacaagctgcaatgcatcactgataagacaggtaagaaggcttattccgttggcgagcagatgatcaccaatggttctgatccgctgctggttgcccttgaggactactggcgccggaacactgagacggtcgtgaccggatttctgaacgatgttggcgacttcatcgcagggaacatcagccagtcttcaacgttcctcggcttcaatgggctgaaggtcttcgagaatgagccgctggcggcacgcatccccgaggatgtgctgcaggctgacggcggcgcgtccgcaggctga

SEQ ID NO: 252887 - DNA, 369 bp, Klebsiella pneumoniae
atggtgattgccgacgaaaccgacgaggcagcccgggccaaatgggagcattacaaagccggcgcggatgacgaggcgctggcgtggctgaccgaacagagccagaaagacacccgttccggcagcgacaccaatgtgcgccagatggccgatcccacctcggcggtcaatatcaacatgggcactcttgtgggctcctacgccaatgtcgcccgtatgctcgacgaggtggcggcggttcccggcaccgacggcgtgctgctgacgtttgatgatttccttatcggtatcgaagcctttggacagcgcattcagccgctgatgcgctgccgcgaccatattgccaccatgactcaagaggttgcctga

SEQ ID NO: 252888 - DNA, 711 bp, Klebsiella pneumoniae
atgattaccctgcccgctcgcccggaatccctgaccttcgcgccgctacaaagcgcgctgatcgtcgtcgatatgcagaacgcctacgccagccagggcggctatctcgacctcgccggctttgatgtttccaccacccgaccggttatcgacaatatcaacctcgccgtggccgccgcgcgcgccgccgggatgctggttatctggtttcagaacggctgggatgaccagtacgtggaggccggcggccccggttcgcccaattttcataaatccaacgcgctgaaaaccatgcgccagaacccggagctacagggcaagctgctggcgaaaggcggctgggactatcagctggtcgatcagcttaagccgcagcccggcgatatcgtgctgccgaaaccgcgctacagcggcttctttaataccgcgctcgacagcatcctgcgcagccgcggcatccgccatctggtgtttaccggcatcgccaccaacgtctgcgtggaatcaaccctgcgcgacggctttttcctcgaatatttcggcatcgtgctggaggacgctacgcaccaggccggtccggcgtttgcccagcaggcggcgctgtttaatatcgaaaccttctttggctgggtcagcgatgtcgccagcttctgtaatgcccttgcgcccgccgcgccgcacgcatttaccgaggagaaacgttatgcctaa

SEQ ID NO: 252889 - DNA, 393 bp, Klebsiella pneumoniae
atgcctaaacaggtgattattccgccaggcacctccgcgcctatcgcaccgtttgttcccggcacgctggccgacggcgtggtttacgtctccggcaccctgccgttcgataagcaaaataacgtggtttacatcggcgacccaaaggcgcaaacccgccacgtgctggaaaccatcaggagcgttatcgagacggcggggggcagtatggcggatgtgaccttcaacagcatctttatcaccgactggaaaaactacgccgcgattaacgaagtctacgcggagttcttccccggcgacaaaccggcgcgtttctgcattcagtgcgggctggtgaagcccgaagcgctggtggagatcgccaccgtcgcccatatcgggaaaccggcatga

SEQ ID NO: 252890 - DNA, 804 bp, Klebsiella pneumoniae
atgatgaagctgaatatctccccggcgccttatcccggcgcgccggtggtggttctgagcgccgggctcggcggcgcgggcggctactggctgccgcagcgttcggcgctggaagcgcactaccagctggtgagctatgaccacaacggcaccggcgaaaacggcggcccgttgcccgccagctatagcatggcgcagatggcgcaggagctctacgcggcgctgctggaggcgggtattgggcgctttgcgctgatcggccacgccctgggggcgctgattggcctgcagctcgcgctggaccatcccgaagcgataagcgccctggtactggtgaacggctggctgacgctctccccgcatacccgccgctgcttcctggtccgcgagcgcctgctgcacgcgggtggcgcgcaggcgtgggtagaagcgcagccgctgttcctctatccggcggagtggatggcttctcgcctgccgcgtctggaggccgaagacgcgctcgccatcagccatttccagggcaaagagaatctgctgaaaaggctgaatgccctcaagcaggccgacttttcgcgccgggcggcagccatcgtctgcccgacgctggttatcagcgccgctgacgatctgctggtcccggcctcctgctcccgcctgctgcaggcggcaatccccgacagccagctggtggaaatggcctggggcggccacgcctgcaacgtcaccgatagcgccacctttaaccctattttatgcgacgggctggccgcgatgctgcccgtaccccaggagaacctatga

SEQ ID NO: 252891 - DNA, 591 bp, Klebsiella pneumoniae
atgagcgaagctattagcccggccgcctgcgccgcgctgttcaccgaggcccgaacccacaacggctggctggataagccggtcagcgacgcgcagctgcgcgaactctacgacttgctgaaaatggggccgacctccgccaactgctccccggcgcgcttcgttttcgtccgcaccccggaaggtaaagagaagctgcgcccggccctgtcgagcggcaacatcgcgaagaccctgcaggcgccggtcaccgctattgtcgcctgggaccgcgcgttctatgaccggctgccagagctgttcccccacggcgacgcccgcagctggtttacctccagttcgcaaatggcggaggagaccgcctttcgcaacagctcattgcaggcggcatacctgattttcgcctgccgcgcgctgggcctggataccggtccgatgtcgggttttgaccgcgaaaaagtcgatgcggcgttttttgccgacggcgcctggaaaagcaacctgctgattaatatcggctacggcgatcccggtaaactgtacgcgcgcctgccgcgtctgtcctttgatgatgcctgccagctggtataa

SEQ ID NO: 252892 - DNA, 495 bp, Klebsiella pneumoniae
atgtctcttgccgataaacaaagctttcgcgacgccatggcccacgtcggggcggcggtgaacattatcaccaccgatggtcccgcaggccgcgcaggatttaccgccagcgcggtttgcagcgtcaccgacgcgccgcccacgctgctggtctgcctgaatcgttcagcctcagtatggccgatcttcagccagcatcaggcgctgtgcgttaataccctggcggccggtcaggaaggactctcgaaccttttcggcggtaaaacgccgatggcggagcgcttcgccgccgccgactggcaaaccggcgcgaccggctgcccgcgtctggaggcagcgctggtcagcttcgactgccgcatcagccagatcgtcagcgtcgggacgcacgacattctgttttgcgaagtggcggcgattgttcgccatccggaaccgcgtggactgatgtggttcgatcgcggctaccacacgctgatgcgtccagcctgttaa

SEQ ID NO: 252893 - DNA, 1323 bp, Klebsiella pneumoniae
atggctctcttcgattttcctcgctggcagttaacctccccctccgccgcgtccggcgtcgtggcccccgatgaacggctgtcggtcgggcaaaccgtggtgatgggcgttcagcacgcggtggcgatgtttggcgcaaccgtcctgatgccaatcctgatggggttagatcctaacctgtcgatcctgatgtccggcgtcggcaccctgctgttctttttggtcaccggcgggcgtgtgccgagctaccttggctccagcgccgcctttgtcggcgtggtcatcgccgtcaccggcttcaacggccaggggcttaacccgcaccttagcgtcgcgttgggcggaattatcctctgcggactggtgtataccctgattggtctggtagtgatgaaactcggtacccgctggattgagcggctgatgccgccagtggtcaccggcgcggtggtgatggcgattggtcttaatctggcccctattgcggttcgcagcgtatcagcgacgccgttcgacggctggatggcggtgctgaccgtgctctgtatcggcctggtggcagtgtttacccgcgggatgctgcagcggctgctgatcctcgtcgggctgattatcgcctgcgccctctacgcgctgctggccaacggcctcgggctgggcaagccgctggattttagcctgcttgcgcaggcggcgtggttcggtttgccgcagctgaccgccccgacctttaacggccaggcaatgatgctgatcgctcccgtggcggtaattctggtggcggaaaatctcggccacctgaaggcggttgccgggatgaccgggcgcaatatggacccgtatatgggccgcgcgttcgtcggcgacgggctggcaacgatgctctccggctcggttggcggcagcggcgtgactacctatgcggagaatatcggcgtgatggcggtcaccaaagtgtactcgacgctggtgttcgtcgcggcggcgctgattgcgatgctgcttgggttttcaccgaaattcggcgcgctgatccataccattccgggaccggtgatcggcggcgcatcgatcgtggtgtttggcctgattgccgtcgcgggcgcgcgaatttgggtacagaatcgggtggatctgagccagaatgcgaatctgattatggtggcagtgacgctggtgctgggggcgggcgattttgcgctttcgctcggtggctttaccctcggcgggatcggcacggccaccttcggcgcgattctgctccacgctctgcttaaccgccgtccgcgtgaggctgggcaaaccaacgtcaccccggtatga

SEQ ID NO: 252894 - DNA, 174 bp, Klebsiella pneumoniae
atggcaaaccatcgtggcggtaccggcaactttgctgaagaccgtgaaagagcatcagaagcaggtcgtaaaggtggccagcatagcggggggaactttaaaaacgatcctcagcgcgcttccgaagctggcaaaaaagggggaaaaaacagtcacggcagccgcgatagctag

SEQ ID NO: 252895 - DNA, 597 bp, Klebsiella pneumoniae; identical to SEQ ID NO: 174263

SEQ ID NO: 252896 - DNA, 228 bp, Klebsiella pneumoniae
atgccgaatcaagaagcaaaggcccaccgcgtgggtgaatgggcaagtctgcgcaatacgtctcctgaaattgccgaggcaatttttgaactcgccaattatgatgaaaagctggcggagaaaatctgggaagaaggcagcgatgaagtcctgccccgcgccttcgccaaaacggacaaagactcgctgttctggggcgaacaaaccatcgaacgcaagaacgtgtag

SEQ ID NO: 252897 - DNA, 1248 bp, Klebsiella pneumoniae
atgagaaaaagtctactcgccgccgctgtggccggcgctgttttactgtccgctggcgttcaggcgcaggaaccggccgcaccggaagggtaccagcttcagcaggtgctgatcatgagccgccataacctgcgcgcgccgctggcgaacaacggcagcgtgctggagcaatccacgccaaagtcctggccagagtgggatgtccccggtggacagctgaccaccaagggcggagtgctggaagtctacatggggcactatatgcgcgaatggctggcgcagcagggagtggtgaccagcggcgaatgcccgccggagaacgcggtctacgcctatgccaatagcctgcagcgtaccgtcgccaccgcgcagttctttatcaccggcgcgttccccggctgcggcgtgaccgtacatcatcaggaaaaaatgggcaccatggacccgacgtttaatccggtgatcaccgatgattccgccgccttcagcgaaaaggccgtacaggcgatggagaaagagcggcaggggatgcagctgagcgaaagctataagctgctggaggagatgaccgactaccgtaactccccgtcctgtaaagagaagcagcagtgctcgctgagcgacgcgaaagatacctttagcgctaaatatcagcaggagccgggcgtttccgggccgcttaaagtcggcaactcgctggttgacgcctttacactgcaatattatgaaggtttcccgaaagaccaggtggcgtggggtgaaattaacagcgataagcagtggcaggtgctgtcgaagctgaaaaacggctatcaggacagtctgtttacttcgccggaagtggcgcgcaatgtggccaaaccgctggtgaaatatattgataacgttctggtaggggacgcggcgaagtcggcgaaagtgacgctgctggtggggcacgactctaatatcgcctcgctgctgacggcgctagattttaaaccttatcagctgcacaaccagtacgaacgcacgcccatcggcggcaagctggtgttccagcgctggcatgataagagcggcaatcgtgatttgatgaagatcgagtatctgtaccaaagcaccgagcagttgcgtaatgccgatgcgctgaccctgcaatcgccgccgcagcgggtaacgctggcgctgaacggttgtcctgtggatgacaacggcttctgcccaatggatacctttaaaaaggcgatggccgaggcgacaaagtag

SEQ ID NO: 252898 - DNA, 123 bp, Klebsiella pneumoniae; identical to SEQ ID NO: 174267

SEQ ID NO: 252899 - DNA, 765 bp, Klebsiella pneumoniae
atggaaaatataatgtacaagccagttattggcgtagtgatgtgccgaaacaggcttaagggtcaccagacccagactctgcaagagaagtacctgaacgcgattgttcacgccggcggcgtaccgattgccctgccgcacgcgctggccgagccggaactgcttgctacgctactgccaaaactggacggcatttatctgcccggtagcccgagcaacgtacagccgcacctttatggtgaaaacggcgatgagcctgacgccgatcccgggcgtgatcttctgagcatggcgctgattaacgccgcgctcgaaaggcgcatccccattttcgccatctgccgtggactacaggaactggttgtcgccaccggcgggactctgtatcgtcgtctgttcgagcagcctgagcttcttgagcaccgcgaagaccccgaacttcccgtcgagcagcaatacgcgccctcgcatgaagttcaggttcaggagggaggattactttctcagttaataccgggctgcaacacgttttgggtaaactcgttacacgggcagggagcaaaaatgacgggtccacggctgcgcgtggaagcgcgttctccggacgggctagcggaagcggtcagcgttaacgaccatcctttcgccctcggcgtgcagtggcatcctgaatggaacagtagcgaatacgccctgtcgcgaatgttgtttgaaggttttatcaccgcctgtcagaactatatcgctgaaaaacagcgactctga

SEQ ID NO: 252900 - DNA, 558 bp, Klebsiella pneumoniae
atgagcgatgacggactggcgccagggaaacgtttgtcagcgatccgccaacagctgggtctctcacagcgtcgtgccgccgaactgtctgggttaacacatagtgccatcagcaccatagaacaggacaaagtcagtcctgccatcagcacgctgcaaaagctgctgaaagtctacgggctgtcgctctcggaattcttttctgaaccagaaaaaccggctgaaccgcaggtggttatcaatcagggcgatctgattgaaatcggcagccagggggtatcgatgaagctggttcacaatggcaatccgaaccgcacgctggcgatgatttttgaaacgtaccagcctggaaccacaaccggggagaggatcaagcatcagggtgaagagataggcaccatactggagggtgaagtcgtgttgaccattaacggtcaggcgtatcacctggtggctgggcaaagttatgccattaacaccggcataccgcatagcttcagcaacacttcggcaggtatctgccgaattatcagcgcccatactcccaccaccttctga

SEQ ID NO: 252901 - DNA, 960 bp, Klebsiella pneumoniae
atgaataatcttccgttgctgaacgacttacgcgtctttatgctggtagcccgccgcgccggttttgccgccgctgcggaagagctcggcgtctctccggcatttgtcagcaaacgcgtatcgctgctggagcaaacccttaacgtccagctgctgcaccgcactacccggcgagtggctatcaccgaagagggcgagcgcatctacgaatgggggcagcgcattctgcaggatgtcgaccagatgatggatgagctctccgatgtgcggcaggtgccgcagggaacgctgcggatcatcagcagctttggctttggtcggcgggtggtcgcgccggcgctctccgagctggcccgtcgctacccgcagctggagatccgtttcgacgtcgccgaccggctggtagatttggctaatgaaggggtcgatctggatattcgcgtcggcgacgatattgcgcccaacctgatagcccgccagcttgccagcaatcatcgcatcctctgcgcctcgccggcgtttgtcgcccaccatccctcgccgaaacagctgagcgaccttgccgcgctaccgtgtctggtgatcaaagagcgcgaccggccttttggcgtctggcagctgcgcgatgataaagaaggtgagcacgccatcaaagtgaccgggccgctgtcgtcaaaccacggtgaaatcgtccaccagtggtgcctcgacgggcaggggattgcgctgcgctcatggtgggacgtaaaggagaatatcgccagcggcaatctggtacagctgctgccggagtactatcagcccgccaatatctgggcggtatacgtgtctcggctggcgacttcggccaaaattcgcaccaccgtggagtttttacgccactactttcagcagcgctttccgcagcagtgcggggcggcgatattgccgacggcgggcgccgtcggccggggggattaa

SEQ ID NO: 252902 - DNA, 321 bp, Klebsiella pneumoniae
atgaccaaaattatcgccgttaccgcttgcccctctggcgttgcccatacctatatggccgccgaatcgctggagagcgccgctaaagccaaaggctggcaggtcaaagtcgagacccagggctccatcggcattgagaacgagctgaccgcagaagacgtcgccagcgccgatatggtgattctgaccaaagatatcggcattaagtttgaagaacgctttgccggtaaaaccatcgtgcgcgtcaacatcagtgatgccgtgaagcgcgccgaagccattatgaacaaaatcgacagccacctttcacagaatgcctga

SEQ ID NO: 252903 - DNA, 2298 bp, Klebsiella pneumoniae
atgaccaatcgcactcaacgcttaaaagatcgtctgttcgccaacccgcgcgaaatctcactcgagcgggcgctgctctacaccgccagccataaacagacggagggtgagccggtaatgatccgccgggcgaaagcgaccgcatggatcctcgatcatgtgcagatttcgattcgtgatgatgaactgattgccggcaaccggaccatcaagccgcgcgccggaattatgtccccggagatggacccctactggctgctcaaggagctggaccagttcccgacccgcccgcaggaccgtttcaatatcagcgaagaagacaagcgcatctatcgcgaagagctgttcccctactgggaaaatcgctcgatgaaggacttcatcaacgcccagatgactgatgaagtcaaaaacgccgtcagcacgcagatttttagcgtcaaccagaccgataagggccagggacatatcattatcgactaccctcgcctgctggaaaacggcctcgccgcgctggtgacggagattaaggcggtgcgtcagcagcacccgcagaacagtttttatcaggcggtgctgatcctgctggaagcctcccagcgccatattctgcgctatgcggcccttgccgatgaaatggccgccgattgtgctgatgaacagcggcgcaaagagctggagaccatcgccaacatctcccgccataatgcggtacaccgcccggaagatttctggcaggcctgccagctcttctggtatatgaacatcattttgcagtatgaatccaacgccagctctatctcgctgggacgctttgaccagtacatgctgccgtactatcaggcttcgctgaatcgcggccaggatccgcagtttcttcaggagctgctggagtcgctgtgggtgaagtgcaacgatatcgttctgctacgctccaccagcagcgcgcgctactttgcaggcttcccgaccggctataccgcgctgctcggcggcctgaccgagaccggacgcagcgcggtcaatattttgtcgtttctgtccctcgacgcctaccagaacgttcgactgccgcagccgaaccttggcgtacgcgtcaacgagctcatcgatcgtcctttcctgcgcaaaaccgccgagaccattcgcctcggtaccggcattccgcaaatctttaatgatgaagtggtgatcccggcatttctcaaccgcggcgtatcgctggaggacgcgcgggattattcggtggttggctgcgttgagctgtcgatcccggggcgcacctacggcctgcacgatatcgccatgtttaacctgctgaaggtgatggaaatcgtgatgctggaaaacgaaagcaatcctgatatcacctgggatgggctgattaaccagatccgcgacaagattcgctattacattaagctgatggtggaaggcagcaacatttgcgatatcggccaccgcgactgggcgccggttcccctgctctcttcttttattgaggattgcgtgcagcacggtcaggatattaccgcaggcggcgcgcgctataacttctccggggtccagggcatcggcattgctaacctcagcgactcgctgcacgcgctaaaagggatggtttttgagcaaaaacggctcagcttcgctgaacttatcgcagtgctgaaagccaatttccagacgccggaaggggaaaaaattcgcgctcgcctgatcaaccgcttcgagaaatacggcaacgatattgacgaagtggacaacatcagcgccgatctactgcgcttttactgcaaagaggtagaacaataccagaacccgcgcggcggtcagtttacgccgggttcctataccgtctctgcccacgtgccgctcggttcggtcgtcggcgccaccccggacggacgcctggcgggagaacagctggcggacggcggactgtcgccgatgctcggccaggacgttcagggaccgaccgcggtgctcaagtcggtcagcaagctggataactttctgctctccaacggtacgctgctgaacgtcaaattcaccccggcaacgcttgccggcgacagcggcctgaataagctggccgacttcctgcaggcattcaccaggctgaggctacagcatattcagttcaacgtggtcaacgccgatacgctgcgcgaagcccagcagcggccgcaggattttgccggtctggtggtgcgcgttgcgggttacagcgcctttttcgttgagctgtcgcaggagattcaggatgacattatccgccgcaccgcgcatcagctgtga

SEQ ID NO: 252904 - DNA, 876 bp, Klebsiella pneumoniae
atgacattatccgccgcaccgcgcatcagctgtgaggtcatggaaacgcgcgccgataaggcgcgcatttttaacatccagcgctactctttgaatgacggtcaggggatccgcaccgtggtgttttttaagggctgcccgcatacctgtccgtggtgcgctaatccggagtcgatctcgccgaaaattcagaccgtacgccgggagagcaagtgcctgcgctgctcgcgctgccagcaggacgtggtcgagtgcccctccggcgcgtgggagcagattggccgcgatgttaccctcgatcatctgcttaaagaggtgctgaaggatgagatcttcttccgcgcctcgggcggcggcgtgaccctgtcgggcggcgaagtcctgatgcaggccgaatttgccgcgcgttttctgcgccgcttgcgcgaatgggggatcagaacggcgattgaaacagctggcgataccgcgttcagccgcttttttccgctggctcaggcgtgcgacgaagtgctgttcgacctgaaaatcatggatgaaacgctggcccgggagcagctgcggatgaatatgccgcgggtgctggataacttcacccgtctggtcgaagcccaaatcccgcttattccccgggtgccgctgattccgggatttacgcttaacgaagagaatttccgccagatcctggcgtttttggccccctttaagctgcgcgaaattcatcttctgccgttccatcagttcggcgaaccaaaatatcatttactgggaaaaaaatggtcgatgtcgatgattaaggcccctgcagaatctgagattcagccattcaagacgctggccgaacgggccggttttagcgtgaccattggcggataa

SEQ ID NO: 252905 - DNA, 342 bp, Klebsiella pneumoniae
atggatttcaatatcgttgccgtcacggcctgcgtcagcggcgtcgctcacacttatatggcggccgaacgcctggaaaaggtcggccaccatgagaaatggaatatcaaaatcgaaacccagggcgcgctgggggttgagaacaaaattaccgctgacgatattgcccatgccgatgtcgttctgctggtgacggatattgaaattgacgatgccagacgcttcaacggcatccgcaccattaagaccagcatcaaaacttttctgctgcagccgcagcagattgtcgaagcggttaaatgcattatgaaaaagccggtggtttatattgagatcccttga

SEQ ID NO: 252906 - DNA, 768 bp, Klebsiella pneumoniae
atggaacaacaatctgcggtttatctggatgcgctgggggcgaatgttgcgctgagcccgacaatgaaacaggaactggataccctgggctacaccgtcgtgcataacgtggtggacgcggagtggctggcggcgatgcgcgagcttatcgacgccatcgtcgagagagagggcgacagtctggccattgaacaccaccaggaagcgaccgccacgcgcattgccaacctgattaataaaggggtgatttgggaaaaggtctggtcgcatccgctgatactttccgcctgccggtatatttttcagggcgattttaaagtctccagcctgaacgcgcgggaagcgttatttaacggcggccatcagccgctgcatgcggactggaaaaaaccgcgtcctgactttccgaaagtacatctggtgaatacgatatgggctatcgatgacctgagcgctgaaaacggcgcaccgcgcattatccccggcacccatttgcgtccggagctgccggaagaggtgctggacgacccggagctggcgcatcctgatgaagtggtgttcgccgcgccggcgggcagcgtgatgatttataacgcccacgcctggcacggcgggacgcgcaaccgcgtcggcagcagaaggcgggtgctgcacggcttatatatcgacagagcggataccgcgcagcaggatcagcagcgctggctgacgccggaaaccgccagccgtttgacccccgcgcagaaatggctgctgggggtggcgtaa

SEQ ID NO: 252907 - DNA, 834 bp, Klebsiella pneumoniae
atgattgacgatctggcggatattttaaatcgtttagtaaatcagaaagataatctgcacgtcagattccccgacccggatatctccgagcctgcgctggcgtttaaagtgccctttccgcggctggaaattgtgcttgagggtgagcttaaggagagcgggctgccgctatcggagacgatgctctccgcctcgcaggtgctctacgttcaggcgggcaagtggacgctgccggagtggaccgggccggcatcgacgttaagcatcctctttggccgccagaagctcggattctgcgttcagtactgggacggcaagcagctgcgcacggaaaagcagaacgttgcccgcctcgggccccgcgtcggctcctatctgctgctatcgcttaatgaaatctgcctgcagccggatccggtgaccgccaggctggtggtcgcggccctgttaagccactgccttgagcagctggtggggctggagatgcgcgtcagccgcagtcgcgatctgtttctggcggtgcaggactatctcgaagagcatctcagccagcccctgacccgcgagtcggtggcgaaacgctttcatattacgcccaattacctgtcgcatattttccaaaaatccggctccgtcggttttaatgagtttctcaccagcgtacgcctggaaaaggccaaaaagctgctgcgcggctacgatctcaaggtaaaagagatcgcccacaactgcgggttcgtcgacagcaactatttttgccgggtgtttaaacgctacaccgagcgttcgccatcagaatatcgtcgccactgccgcagcgcgcagcagggctaa

SEQ ID NO: 252908 - DNA, 945 bp, Klebsiella pneumoniae
atgctaaaagtctggcaagccgcgctgttaagagacctgaccatgcccgaacgcgagaaaaacatccatattcaaccctcatcttcaatctcccgcacccatattctaccggcgctgctggcgatcgtcgccgtgaccggactgtgcgcgtatatctcgtcgccgctggggccgtggcgcgaaattttgattaatcccggaatgtatatcgatctgctggcgctgctatttctgctgtttatgctctggagctccaccaaagtgcgcatgaatcacgtggcggttaactgggtacgctacggactgctgctgtggattgccggcggtacgttcgatctgatggatgaaatctttcaccagccgcgctggatggggtactactgcgaagatctgctgcgcctgtccggcatgctgctgagcgcggtcggggtctacaaaattattgagcgcatcaatctgctgtacgttgatgcgcgttcccaatcgttaaaggatgagctgacccaactgcctaaccgtcgcttctttatcgacaccatccgcgagaaggagggacgcaggctggggctgatgattgtcgatatcgattacttcaagaaaattaatgacacctggggccatctggtgggggacgaagtcctctttgctctcggtaagcagctggctaagctcaccagcgataaggtgctgccttcgaggattggcggcgaagagtttgccattattgtcgacggaatgacggcgcaggaagtggatgaactggcgcaggctattctgcaaaacgcccgggcgatcctgatcaaccacgaccatccgctgtcgatcagtatcggcgttggtctgcgtaacaaaggggaaccgcaaaacctgtttattaaaaaggtcgatgacgccctctataaggccaaaaataacggtcgcgggcgggtcgagtgggccgtctga

SEQ ID NO: 252909 - DNA, 315 bp, Klebsiella pneumoniae; identical to SEQ ID NO: 174285

SEQ ID NO: 252910 - DNA, 399 bp, Klebsiella pneumoniae
atgaaagccctcgatatccgggaaattgccgatctttctggcataaatccctccgcgctgcgttattacgaaaaaaaaggattaattcagcctgttggccgtaacggtttacgacggcaatatcaccaaaatgtgctcaataaactgcagctcattacgttggggcaggcggcagggtttacgctggatgaacttgccgcgatgtttggttcgcaagccggggtcacgattaaccgggggctgctcctccagcgggcgaaagagattgatgccaccgtgcgcaagctgcagctgttaagccgcgggctgaagcacgcagcgcgctgcacgcagccggagcctgttcattgtgaagagttcaaaagagtggtggcgaaagggttgaggctggttggctga

SEQ ID NO: 252911 - DNA, 474 bp, Klebsiella pneumoniae; identical to SEQ ID NO: 174287

SEQ ID NO: 252912 - DNA, 774 bp, Klebsiella pneumoniae
atggctgtcgatcgcaatggcgacattgccctgccaatagtgaacgcaatgcagcccgaattcgcccgcgtagtggacggggtcgtggcaacgctaacccggtgcttccctgaactgatgcatagcctttatgtttacggtagcgtggcgcaaggacgagcaacgcccgacaagtccgatctcgacatgagcgtgatattccacgatcgccccgatcgggccacagcggcgcggctcgctgagattaagcgtgaactggaaaagagctatccggttgtcagtaaaatcgattttgattgcggtgtgctgccgcaagtcctgcacccggatcatacgctgagctggggatactggcttaaacatcattgcgtctgcgtgtacggcgaagatctgagccgccggtttgctccctttaaaccggcaaaagctatcgccgttgccgtaaatggggatttcctgccggtactggaaaaattcatggcacaaatacgctcatccgcggataagaatgaagggttacagctgcagcgcgctgccgcacgcaaaatcatccgcgcaaccagtatcctgcgtagtgagtacgacaaagactggccggacacccttgctgagcaccatggtaagctcattgcccgctatcctgaaaaagctgatgacatggattacctgctggcagtgagtcatgaacctcagggagacctggccgactttgaaaaaaggattctggcttttgcccgctggcttaacgtcgagtttcatcgtcgtcaaagctga

SEQ ID NO: 252913 - DNA, 585 bp, Klebsiella pneumoniae
atgaccatttatggaaaggatcgtgtatttatttatggagtagaaaagatactgcaggcgcttagcgatgaggcgggaacggaggcagagagcgatgcggcctgtatgtacgtcacccatgggatggatattcaggagatctatgctcttttcttccgccacccgccggagcactacgccatcttcatcacctccgaacgccattttgaggcgatcaaccgcctgtttccgggcctgttaaagctctgtttagctgagcggttgacggtagacgagctgcatcaggcgttaagggtgatgcgcctgttctcggcgcagaaccaaagcgtggcctatttgcccaccaggttgaattttacccatgcggagcgacagattatgcggctcagtttgcgcggccattccctggatgatattgcccgtatccgtggggttagcccctctacggtcagcgtccagcgtacccggctgatgaagcgtatgggaaccaaaagcctgcaggagctatgctccctctatgcggcaatgcgcgccagcgatcgctcatgcactccggctaagctgaatgaggatcgcggttattga

SEQ ID NO: 252914 - DNA, 702 bp, Klebsiella pneumoniae
atgtttcgctcattattattagtcacaattcctttcatcagtattgctgctcacgcggtgacctttgattatcgtcatgaaacgaatgacaaagccggtaacaatcataaagatcgcctgttgatgtctcaccgttttgccaatggctttggcttatcgctggaaggaaaatggaaaggttcgcaagataaaaataaagcctatgatgaaaccgtgagtaacggcaccgaagtggtggcgagctatgtgcataaaataaataagaccttccagattgagcccggcttctctctggataccagttcgtcctcaaataactatcggccctatctgcgcggtaaagcgaatctgaccgacgatctcagcgcctcattgcgctatcgcccttactacaagcgcaactcaggcaatattggcacgtttaaagacacctcggagaacggctataatctgaccagcgttatttcctggaaattcctcaaagattatcaactggattatgagctggactataaaaaagccaactccgccggggttattttagcggataacgaaagctatgactggacccatgattttaagctgacctataaacttgataaaaactggtctccttatatggccatcggcaacgtttccggtagtaaattcaccgatgaacgccaaacgcgctatcgcgttggcgtgaaatattccttctga

SEQ ID NO: 252915 - DNA, 1710 bp, Klebsiella pneumoniae
atgaagattgcaaaaatcactctggcattgggcgttctgagtctcttctcactgaatgcgggtgcccaggagaacgagcgcctgagcagcgtaaagcagttcgccgacgtcgtgctggacaaagcaagcgatcggtacgggcatcactctcccctgctggctaatggcgtggacccacgcaccggcaaacaaatggaatgggtatttccggacggtaaagtgaccgtgctgtcgaacttctctgcccagcaaaacttgatgcgggtgctggtagggttaagcaacctgactggcgaaacaaaatataaacagcgggtcgcggagaatatacgctactactttgaccactatcaggatgcaagcgggctgctgctatggggagggcatcgttttgttgatttaaaaacgctgcagcctcaaggcccaagtgaaaaagagcgggttcatgaacttaagaatgcctatccctattacgacatgatgtttgccgtcgatgaccaggcgaccgcgcgctttatcaaggctttctggaatgcccatgtttacgactggaaaacgctggaaaccagccgccacggggagtacggcaaaccgatgggcgcgctctggcaaagtgattttgtccaacagccgccctttttcgccaccaaaggtctgagctttctcaatgccggcaacgacctgatctactccgcatcgctgctgtatcaatacgatggtgacgctggcgcactgacgtgggcaaaacggctggccgaacagtacgttttgccgcgagataagaagaccgggctgggcgtataccagtttacccaaccgttaaaacgcgccgataccagcgatgacagcgacacgcattcgaaatacggcgaccgcgcgcagcgtcagtttggcccggaactgggcccggacgcgctggaaggcaatatgctgcttaagggccgaaccagtacgctctattcagaaaatgcgctgatgcagcttgccctggcaaaatcgctcggcaaagacggtgacgatctcaaaaaatggactcttgatggcctcaaggccttcgcgacctacgcttacgatgagcagaataataccttccgcccgatgctggccaacggcacggatctttccgactacgcgttaaaacgcgatggctattatggaaaaaaagggacggtgctcaaagcctatccggcgggaaatgaatttcttctctcctatgcccgcgcctggacgcttgaaccggatcatgccatctggaaggtcgcccgcggcatcgcgaaaggccaggggttaggcgatatcggtgaacccggcggcgcaaaccgcaggctgaatagccaaacggagaaccatcagccgtatgcgattttcgcgcttatcgacctgtggcaggccaccgggcagcgggactatttgacgctggcggatcgcatcggcgcgaacatcatcaacaagcagcgcctcaacggcttttttgtcgatgatcctgaggccgaatatgccagtatcgatagtatcgccccctatgcgcttctcgccctggaagccgccttccgcaacacgccggacgcggtcgctccgttcctgaacggcgctggattcacggaaggcgcttatcggatggctgacggaaccgtgcgctactccaccagagatgacgagctgttcaggctcagacccggtgagcagctgaaaccgaacggcaaaaaataa

SEQ ID NO: 252916 - DNA, 1263 bp, Klebsiella pneumoniae
atgagtcaagcacaacgccagcaggcggatatgcagcaggctgcggcccgggtgttggcccgcgccgatgagctggcggcgatcagcgaaacgccggacgccctgacccgggtttatctctccccacagcatcttgcggctaaccagcgggcggcgctgtggatgacccaggccgggatgaccgtctggcaggacagcgtcggcaatatttgcggtcgctatgagggtgagcaggagggcgcgccggccatcctgctggggtcgcatcttgatacggtgcgcaacgccgggcgctatgacggtatgctcggcgtcctggcggcgattgaggtagtgcatcgcctgcatcaacaggggcgacggctgaaaaaagccattgagattgtcggcttttgcgatgaagaggggacgcgtttcggcattacgctgcttggcagccgcgggctgaccggtacctggcctgaaagctggctggcgcagaccgatgccgatggcatcagcgtggcgcaggcgatggtgctggccgggctggatccggcgcgcattcacctggccgcccgccgccaggaggagatcgccgcgtatctggaactgcatatcgagcaggggccgtgcctggaacaggaaggactggccttaggcgtagtggaagcgattaacggcgcgcgtcggctgaactgccgctttaccggcgaggcgggacacgccgggaccgtaccgatgagccatcggaaagatgcgctggccgccgccgccgagtggatggtgctgatagagtctctgacccgcgagcagggcggaaacctggtcgccacggtgggcacgctgcgctgcgcgcccggcgcggttaacgttatccccggcgacgttacgctgactctggatattcgcgggccgcacgaccagccgctcgaggcgctgctcgagacgctgctgacgggggcacaggcgattgccgcccatcgccagctgcagtttagcgcggaagagttttaccgcattgccgccaccgcctgcgatagcggattgcagcaggtactgagcgaggcggcgcaggcggtgcaggggcgttcgctgaccctgccgagcggcgccgggcatgacgctatcgccatggctgaacgttggccgtccgcgatgctttttgtccgctgtaaaggcggcatcagtcatcatcctgccgagtcggtcaccgccgacgatgtggcgctggcgattgaggcctattttcgcgcggtgacggcgctggcagccgggaagtaa

SEQ ID NO: 252917 - DNA, 678 bp, Klebsiella pneumoniae
atggctgggggtgcaggcatgatgaccacctttaccgattgggacattgttcgcaatctgctgctggccgggcgctggacggtgctgctgtcgctggtggcgtttctcggcggcgcgctggtcacgctgccgctgctgctgctgcgcatgaccggcgggcgtcagataaagcgcctgatccgcggctatgttgagctgtttcagggaacgccgctgctgatgcagctgtttcttgcctttttcggcgtggcgctgttcggcatcgacgtttcagcgtggaccgcggcatcgctggcgctgacgctgtataccagcgcgtttttgctcgatatctggtttggcagcatccgcgcgctgccaaaagggcagtgggaagcatcgcgctgtctggggctgagctttggccagacgctctatcgggtcgttgcgccgcaggcgctgcggatcgccatcgccccgacggtggggtttgccgtgcaggtgattaagggcacggcgctggcgtcgattatcggcttcgttgagctgaccaaagcgggcaccatgctgaccaacgtgacgtatcagccgtttaaagtcttcgcgctggtggcgctgggctatttcattctgtgttatccgctgtcccgctacagccgttatctggagaacaaattcaatgcctctcatcaccattaa

SEQ ID NO: 252918 - DNA, 786 bp, Klebsiella pneumoniae
atgaagaaactgttgatcgcgctggccggggccgcttgtctgttaacccacctctcggcggcgaaagctgaccagctgcaggatatcgaaaaacgcggcgtgatccgcattgcggtgccgcaggatttcccgccgtttggctcggtgggcaccgaccttcagccgcagggctacgacatcgatatggcgcgctatcttgccaaagagatgaagctcaagctgcagctggtaccggtgaccagcgccaatcgcgtgccttatctgcaaactgataaggtagatctggtgatttccagcctgggtaaaaacgccgagcgcgagaaggtgatcgattttagccgggcctacgcgccgttctttctcggcgtatttggcgcgaaaggcgctgagctgaaagacccggcggcgctgagcggtaaaagcgttggcgtaacccgcggcgcggtggaagacatggtgctgaccagcgtggcgccgaaagaggcgcagattaagcgctacgaagacaacaacaccacgctgtcggcgtacctttccggtcaggtgcagtatgtggctaccggtaacctggtggtggcggccatcgcccggcagaacgccgataaagcgccggtgccgagctttatgctgaaagattcgccgtgctttattggtctgaaaaagaaccaaccggccctgaaggcgaaagtggatgcgctgattgagcagggggtaaaagacggcactctcaacggcctttccgagaaatggctgaaagcgccgctgcctgccagcctcggcgcataa

SEQ ID NO: 252919 - DNA, 1584 bp, Klebsiella pneumoniae
atgcaaagtcatgttgctgcccacgggatggcggtcgccccccatcatctggccagccaaagcgcgctggcggtactgcgcgaaggcggaagcgccatcgaagccatggtcgccgccgccgcgaccattgcggtggtttatccgcatatgaacggcctcggcggcgatggtttctggcttatcgtgccgcccgagggcgaccccatcgccattgacgccagcggcgcggcgggttcgctggcgacaccgcaggcctacgccggcctcgcgcagatcccccatcgcggtccgcaggcggcgctgaccgtggcgggcaccgtcagcggctgggacgaagcgcttaaggtgtcgcgcgagttaaccggcgcggccctgccgctcacgcgtctgctggaagatgccatcggctacgccgggaacggtatcccggttaccgcgtcgcaggccagcgcgagcgccgataaattcagtgaactgtgcgaccagcccggcttcgctgaaacctttctggtggacggccagccgccgaaggccgggagccgctttctgcagccggcgctggcgaacaccctgcgccgattaaccgaagaaggcctggatagcttctatcgcgggccgctggcggagcagctggcccgcgggatggaaaaatacggactgcccgtcacccttagcgacctgcagcagcatcgcgctcgccgcccccagccgctcagactggcgcatcgacacggcgaactgtggaacctcgcgccgccgactcaggggctggtttcgctggcgatcctcggcatcaccgacaggctggcgatggccgacgccgacgatgcgatgaccgtccaccgtattgtggaggcgaccaagctggccttcggcctgcgcgacgcgcacatcaccgatccgcgccaccttgatgttgatattcagagcctgctgacaccggcggcgctgcagccgctggcggataacatcgacgaccagcgggcggctccgtggggcgcaggtaaaggcccgggcgataccgtctggatgggggtgatcgataaaagcgggctggcggtctcctttatccaaagcctgtaccacgaattcggcagcggcgtggtgctgccggagtgcggcattgtctggcagaaccgcggggcatcgttcagcctcgacccgagccacctgctggcgctggcgcccggtaaacagccgtttcacaccctcaacccggccgcagcaaagctgaacgatggccgggtgatggtttacggctccatgggcggcgacggccagccgcaaacccaggccgctatcttcacccgctacgtcatgcaaaacgcgccgctgcaggaaagcatcacccgaccgcgctggctgctggggcgcacctgggggcagacttccgactcgctcaagctggagggccgcttcagcgccgaaagcgttgaccgcctgcgtcagttggggcacgaggttgaagtgctggccgatttcagcgaagccatgggccatgcgggagcgattgtacgtcatcccaacggcttgtttgagggggccagcgatccgcgcagcaacggctccgccgccggatattag

SEQ ID NO: 252920 - DNA, 189 bp, Klebsiella pneumoniae; identical to SEQ ID NO: 174300

SEQ ID NO: 252921 - DNA, 1398 bp, Klebsiella pneumoniae
atgaagctgcctgaaatgaccattcacgaaatccagcgcgcactggccaccggcgaactcagcgccaaagagattgcccgccacacgctggagaatatcgctcgcgttaacccgcagatcaacgcctggacccacgtcagcgaaaagcgcatgctcgctgaggcggagaacatcgacaccctgcgacgggaaaaaaagcccctgcccgcgctggcaggcgttccctacgcggtgaaaaatctgttcgatgtcgccggccataccacccttgccggggcgcagctgttgagcgatcgccctgccgccgtagccgacagctgggcggtgcgccagctgcacagcgcgggcgcattattatccggcatgctaaatatggatgcctacgcctacggttttaccacggaaaacagccactacggggcgacgcataacccgcacgatctttcacggatcgccggcggctcctcgggcgggtcggcagccgcagtggccgccgggctggtgaatttctcgctgggcagcgataccaacggctccattcgcgtcccggcctcgctgtgcgggatctttggccttaagcccacttttggccgcctgtcacgctccggcagtcatccttttgtcgccagccttgaccatatcggtccttttgcccgcagcgtcggcgatcttgcggcagtttacgatgcgctgcaggggcgcgatccgagcgatggttttcaggccgataaagccagcgagcgtacggcgaatctgctgccgcgtggtctcgatggcctgcgctgcgccgcgctcggcggctattttacgacatggtgcgatgacgatgcccgtgcggcggttgccagcgttgcccacgcccttgaggcgcatgaggagctgatattcccggaggccgaactggcccgctcggcggcgtttattatcagcgccgccgagggcggtaaccagtacctgcccgcgctgcggagccagcccgaacgttttgagccgaactcccgcgagcggctgctggccggcgcgatgatcccctccgcctggtatctccaggctcagcgctttcgccgttatgcgcagcaggcgttcaaaggcctgttcgctcatgccgatgtgctaatcgccccggccacgccgtgcagcgcgacgctcatcggcgcgcagaccatggagatcaacggccagtcgctgccgattcgcgccagcatggggatgctgacccagcccatctccttccttggcctgccggtcgtcacggtgccgctgcgcacggcgaacggtcagccgattggcctgcagctgattgccgcgccctttaatgaacaagcctgtctgcgcgcggcgcgggcgctggaagagatgggcatcaccgacgcccgcccggtggagatcgccgcatga

SEQ ID NO: 252922 - DNA, 387 bp, Klebsiella pneumoniae; identical to SEQ ID NO: 174302

SEQ ID NO: 252923 - DNA, 933 bp, Klebsiella pneumoniae
atggcatttttggcagacgattacccgcgcgacctgcgcggctacggcggacagccgccgcacgcgcggtggccgaacaacgcgcgcatcgccgtgcagtttgtgctgaactatgaagagggctcggaaaaccacgtgctgcacggcgatgccggttctgaacagtttctgtccgatattatcggcgccgccagctatcctgaccggcatatgtcgatggattcgctgtatgagtacggcagccgcgccggtttctggcgcatccataatgagttcagcaaacggggattgccgttaaccgtgttcggcgtcgcgatggcgctggcgcggcatcccgaggtggtcgaggcgattaagagggcgaactatgacgtggtcagtcacggctggcgctggattcattaccagaatatgcctatcgagcaggagcgggagcatcttcataaagccgtgcaggtattaaccgacctgtttggcaaaccgcccaccggctggtataccgggcgcgacagcccccatacccgccagttggtggtggagcacggcggttttgattacgacagcgactattatggcgacgacctgccgttctggagcgaagtggcctgtagcgacggttcgcgtaggccgcacctgatcgtgccttataccctcgacgctaacgatatgcgcttcgccactgcccaggggttcaataccgccgagcagttttatacctatttaaaagacagcttcgatgtgctgtacgcggagggggccagcgcgccgaagatgatgtccatcggtatgcactgtcgcctgctggggcgcccgggccgcttccgggcgctgcagcgcttccttgattatgtgcagcagcacgaccaggtttgggtctgtacccgtcagcagattgccgaccactggcgcgacgttcatccgttcagggggtaa

SEQ ID NO: 252924 - DNA, 744 bp, Klebsiella pneumoniae
atggccgccgtttgtatacaagtgatcaatcccaacaccagcctggccatgacggaaagcatcggcgccgccgcgcgggcggtggccgcgccgggaaccgagattctggcggtctgccccggcgaaggggtgccctcgatagagggctactttgatgaagccatcgccgctgtcggcgtgctcgagcaaattaaggccggtcgccagcagggcgttgatggtcatgtcatcgcctgctttggcgaccccgggctgctggcggcgcgcgagctggcgcaggggccggtggtggggattgccgaagcggcgatgcatatggcgacgctggtggccacccgtttttccatcgtgaccacgctgccgcgcaccctgattatcgcccgccacctgctgcaccagtacggtttccatcaccactgcgccgccctgcacgccattgatttaccggtgctggcgctggaggacggtagtggtctggcgcaggagaaggtgcgcgcgcgctgtattcaggcgctaaaggaggacggctgcggggctatcgtactgggatgcggcgggatggcgacgctggctcaggagctgacccgcgagctgcgcgtaccggtaatcgatggcgtcagcgcggcggtcaaaatggttgagtcgctggtggcgttaggcctgtcgaccagcaagcagggcgatttagcctttccggaaagcaaggcgttgagcggcaaatttcaggcattaaccccgttttaa

SEQ ID NO: 252925 - DNA, 717 bp, Klebsiella pneumoniae
atgaacaaccaacaacggctgcaggccgcgccagagctgcatgacaaagacgagtccatctttcaggcgctgatgaccgctatcgtcgagcatcagctaccgccgggcagcaaactgccggaggaggcgctggcggaggtgtttggcgtgagccgtaccgggatcagaaaagtgctacagcgactcgcaaccgtgcaaatggtcatcctgacgcccaaacgtggtgcacaggttgccagcccgacggttgaagaggcgcaggcgatcttccgtacccgcgcgctattggaagtggccaacctgccggatgtgctggcccgctgtcagccgccgcacctggcggcgctggaagccatcacccgccaggaacagctggcccacgaaagccatgacggcccggcggcgattcgctattccgccgagtttcatattcagctgcaggcgatctccggcaatcaggtgctcactgagatggtgacccgcctgagccagcgctcttcattagttatcgcggcgtggggatcgccgtggcggcagggctgccgctgcgacgatcacgaacggctgatccagctgctgcgcgataaaacgctgcagcccctgagcgacgccttaagccaccattttgaacatattgtcgccagtctctgctttgagcgttctggcgtgaccctgcctgattttgcccggctgtttgccggctataaggagccgtaa

SEQ ID NO: 252926 - DNA, 1488 bp, Klebsiella pneumoniae
atgccaaatacacaagcgatgcatcaggttaaggccgctgatccccacgctggatacagcccacggctttgcaatgaggatctggcgccgacgcgcgaccagaactggagctggtacaacatcttttctttctggatgtcggacgtgcacagcatgggaggctacgtggtggcggcgagcttctttacgcttggtcttgcgagctggcaggtgctgctgtgcctgctggtggggatttgtatcgttcagctgtgcgctaacctggtggcaaagcccagccagatggcgggggtgccctacgcggtgatctgtcgtcaggcgttcggcgtctttggggctaatatcccggcggtgatccgcgggcttatcgccttcgcgtggtacggtattcagacttatctcgccgctaacgcgctgatgctggtgctgctgaagttctggccgtcgctgtcgaccctcaccgcatccagcttcctgggcctgtcgcatctgggctggctctgcttcgccaccatgtggctgctgcaggcgatggtgttctggcacgggatgaacgccatcaagcgctttatcgatatcgccggcccggcggtctacgtggtgatgctggcgctggcgggatggattgtatacaagaccggttttgacgggatctcctttaccctcgccagcaaatcgctgagcgccggggagcagacctggcagatgatcaccgccaccgcgctggtggtctcctacttctccggcccgctgctcaactttggcgatttctcgcgctatggcaaaagcatgggcgagatccgccgcggcaaccgctggggcctgccgtttaacttcctgcttttctccatcgtgaccgtggtgattgtctccggcacgcagtcgctgtttggccgcatgatcaccgacccgattgagaccgtgagccgcgtaggcaacgacctggcggtcgccattggcctgctgaccatgatcaccgccaccatcgggattaatattgtggccaactttgtctctccggccttcgatttctctaactgttcgccgcagaaaatcagcttccgcaccggcgggatgattgccgccgtagggtctattctgctgacgccgtggaacctgtttaactcgccggagctgatccactacaccctcgacgtgctgggggcgtttatcggcccgctgttcggcatcctgatcgtggatttttacatcattaagcgcgggcaggtttccgttaacgacctgtttgacgacacgcccaggggacagtactggtaccgcaacggctttaacccgaaagcgatcgccgcgctggtgccctccgtcgccattggcctgatcatcagctttattccgaccctgcacgaagtggctaactttagctggtttatcggcgtcttcctgagcggcgcggcctatcgctggatcgcccgcgacgaacgcgtcggcgccaccgccggtttcagccctctcgcccagaaagagtaa

SEQ ID NO: 252927 - DNA, 1323 bp, Klebsiella pneumoniae
atgatgtttgactaccatgccgcggttcgcggcgcatttttcgatatcgccgaggttgccgagagcgccgacgatatcgcccgccaggcgcgctatctggaggatggcgtgctgtttcttcgcgacggacgcattcaggcgctgctgccgtggcaggagggcgaacgctttctgcacccgcagaagggctatcgcgacctgcgcggtaagctgctgctgccgggctttgtcgatgctcatgtccactatccgcaaaccgagatgatcggcgcatttggcgagcagctgctggagtggctcaccacctatacctttccggtggagagccagtttgccgatgccgactacgccgcggagatcgcgcaattttttgtcaaccagctgctgagccacggcaccaccaccgcgctggtcttttgtacgttgcaccctgaatcggtggatgccctgtttaacgaagcgctgcgcctcaatatgcgcctgatcgccgggaaagtgatgatggaccgccacgcgcccgagtatctgagcgaaagcgcggagcagagctaccggcaaacccgcgaactgattcagcgctggcaccagcgcggccgtctgggatacgccattacgccgcgcttcgcgccgacctcaacgccggagctgctggcggcggtgcagcagctccgggaagagtttcccgatacctggctgcatactcacctgagcgaaaacctcaatgaagtggcgtgggttaaaagcctctggccggagcatgaacactatctggatgtttatcatcactatcgactgaccggcgagcgcagcgtatttgcccacggtattcatctggcggatgcggagtggcagtgcctgcacgagaccggctcggcgctggccttctgcccgacgtcaaacctgttcctcggcagcgggctgtttcgtttatcggcctgttggcagaacaaggtgcggatgggtatcggtagcgatgttggcgcgggcaccaccttcagtatgctgcgcaccctcggcgaggcgtataaggtcagccagctgcaaagctatcgtctgcgcgccagcgaagcgttttaccatgcgaccctgggcggcgcgcgcgccctgcgccttgatgagaagattggtaatttccagtccggtaaagaggccgattttgtggttatcgacccggcggtcacgccgctgcaaaggttacgtggcgggcgctgcaaggatatctatgagcagctgttcgtcctgatgaccctgggcgatgagcgtaatatcagcgagacgtgggtgaacggcgagcgcgtatggggagatgcggctgcggagtag

SEQ ID NO: 252928 - DNA, 327 bp, Klebsiella pneumoniae
atgagcaccttaagcacccatattctggatatttccaccggccgaccggcgcagggcgtaaagattacgctggagtgcgaaggcgcgcaggttgcctgcggcgtcaccgatgataacggccgcattggcgaactcggtgccgggccgctggcgccaggacattaccggttaagcgcggaaattggcgcgtggtttgccgccggcgggcgcgagacgctctacctgagtgcgcagattgatttcgtcatccgcgaggaggctgatgagcactatcatttaccgtttttaattgcccccggcggctggtccacctatcgcggcagctaa

SEQ ID NO: 252929 - DNA, 501 bp, Klebsiella pneumoniae
atgatcgcgctgaatcactttaatcagctgagcggcgaacaggccgtcgccgtgctggaaccctgcgtggccgtctctggctgggcggcgacgctggcagccggtcggccatggcgcagccgcgcggaactgctggacgccgcccagcggctgatggcaggttggggggaagcggagctggctgaggcgctgaacgcccatccgcgtatcggcgaaaagcccaccgggcagcaggcccatgcggcgctctcccgccaggagcaggggagcgttgatgaccgtgatgctgcgctggcgcaggcgctgaaagagggtaacgcccgctacgaggcgcggtttggccgggtctttttgattcgcgccaaagggcgcagcggggaggaaatcctggcggcgctgtcgcgtcggctgcacaacagcgatagcgcagaagtacgggacgcgttagcccagctaggcgaaattaccttgttaagactgaaaggagcgattggcgaatga

SEQ ID NO: 252930 - DNA, 1383 bp, Klebsiella pneumoniae
atgtcagatgaaaaaaacggcggcttactgtacggccttgagcagcggatcccgccgctcccggccttttttagcgccttacagcacgtactcgccgggctggtaggcattattacgccgccgctgattatcggcgcggcgctggggctgggggagtggctgccctatttgatcagcatgtccctgctggcttccggcatcgggaccttcctgcaatccaaccgcctgtgggggatcggcgcgggcatgatctgtatgcagggaaccagctttgcgttcctcggggtggcgattgccggcggtatgtgggtaaaagggcagggcggcacgccgcaggatattatggccatgctgtttggcgtcaactttgtcgccgcgctggtgccctgcctcgtcagccgctttattgaaccgctgaagcgtatttttaccccggtgattaccggcagcgtgattgcgctgatcggcattagcctgatcaaagtcagcgtgattaactggtgcggcggtgagcaggctaaagcctttgccagcacgagcaatattgccctcggcgcggttacgctggggaccatcgttctgctgagctgcgcgaaaaaccgctggctacgcctctcgtcggtggtggtggggatggccgtcggctgcgcggcggcggcgctgagcggctcgttccagcttaaaggcgtcggcgatgtctggtttcgcttaccgcagctgttcccgtttggtttccagttcaacagcgccatttttttgccgattgccctggtgtcgctggtgtgcattcttgaggcggtgggcgacctgacggccaactgtctcatctctcagcagtcgattgatgacgaagccttccgttcacggctgaaaggcggcattctggctgatggcatcagctgcatggtggcggcgatgctgtgcgcgttccccaatacgacctttgcgcaaaacaacggcgtgattcagatgaccggcgtcgccagccgctacgttggccgctacatcggggtgattttgattctgctgggtttgtttccgccgttcggcgagatactgcgccagatcccggcgccggtgctgggcggcgcgacgatggtgatgtttggctgcgttgtggcggcggggatccgcattatcacccagaaaccgctgacccgccgcgatatgctgatcgtcggtctggcctttggttttggtctcggcattgaagcggtcccggcgtttctgacccacttcccgccgatcgtcggcaacctgttcggttccgcggcgaccagcggcgggctggtggcgattgtcctgaatctgattatcccggaagagaaaccggccgcggcggcggccacaaggagtactgatgatcgcgctgaatcactttaa

SEQ ID NO: 252931 - DNA, 1155 bp, Klebsiella pneumoniae
atgaaagcattagttatcggcggcggaatcggcggcctgagcgcggcggtggcattaaaaaatgccggtatccactgtgaagtgtttgaagcggtgaaagaaatcaagccggtgggcgcggccatctccatctggcctaacggcgtcaagtgcatgaagcatttaggcatgggcgatattatcgaaaactacggcggaccgatgcattttctggcctacaaggagtatctgcggggagagacgctgactcaatttagcctcgctccgctgattgcgcgcaccggcggacgcccctgcccggtttcccgcgccgaattgcagcgcgaaatgctcaaattctggggacgggaggcagtgcagtttggtaaacgcgttacccgctgcgaagaaaacgccgacggcgttcgggtctggtttaccgacggatcgatggcggagggcgattttctgattgccgccgacggcagccattcggcgctacgcccgcacgtgctcggctatacgccggaacgccgctacgcgggctacgttaactggaacggtctggtcaatattgatgatgcgattgcgcccggcaatcagtggacgaccttcgtcggagaagggaaacgcgtttcgctgatgccggtttccggggggcgattttactttttctttgatgtcccgctcccggcggggctggccgaggaccgcagcaccctgcgggcggatctcagccgctatttcagcggctgggcgccgcaggtgcagacgctgatcgccgccctcgacccgcagaccaccaaccgtattgaaatccacgatattgaacctttcgccaagctggttcacggcagagttgcgctactgggcgatgccggacacagcaccacaccggatatcggccaggggggctgcgcggcgctggaggatgcggtggtgctgggggaggtgttcagccagagccgcgatatcagcggggttttgcgtcagtacgaagcgcagcgctgcgaccgggtgcgcgacctggtgctgaaggcgcgtaagcgctgcgatgtgacccacggtaaagatatggcgctgacggaagcctggtatcaggagctgaaatccgaaaccggagagcgaattatcaacggcctgtgcgaaaccattcagggcggcccgctggggtaa

SEQ ID NO: 252932 - DNA, 933 bp, Klebsiella pneumoniae
atgagcccattttcacgtttcgctatctattttaccgaagtggcgcgcagcggtagcctgcggcgggccggggagaaactgcatatttccgcttcggctatcaaccggcaaattctgcaggcggaagaggatttcggcacgccgctgtttgagcgtctgccggaggggctacgcatgaccactgccggcgagctgctgtacgacaatctgctgcgctggcaaaaggagtttcagctgacgcggcaaaagtttgatgagctgcaggggcttaaacgcggctccgtcagcctcggcatggtgcaggcgctggcggaagggagctttgccgccgcgctggcggacattatcagcagctggccatggctggaactggatctgcaggtggcggatagtcatagcgtcagccagaaggtacggcaggcggatctcgatttcggtctgattctcgatcccgaaggccaggcggggcttagcgtgctggcttttgccgaactggagatgggggtggtgatgtgtccggatcaccctcgggcgcaggctaaaatgctgtctttgggcgagctaagcgaggagcggcatattcttcccggcgcgccgctgatcgtccacgagcgggtcgcgatgctctatcgccattatgatttttccccgacgaacagcatcagctgcaacgatattcggttgattaagtcgctggtgcttaaaggcggcggcgtgaccctcctcagccgtctggacgtgctggaggagatcgcgctcggccagctggcgtttgtcccgctgcgcaaccgtctgctgcggccgcttaccctggccctgtgcgccgcgccatcacgccagctttcacgtccggcgcagatggcgatccagaagctgaccgcggtgatggaggcgatacagggcgggacagcggcttccctcccgtctgcgtaa

SEQ ID NO: 252933 - DNA, 1038 bp, Klebsiella pneumoniae
atgaacagaccacaacctaccccacccgcccactgcacctttgcgccagaggactggctgcgcctggcaaaatgctggcacccggttgcccgcgcctgcgatattggccccgccccggtgaaagccaccctgcttgatgaacagctggtcatctatcgtattaagggccaggtggtcgttgcacgcgacgtctgcccccatcgcggcgtaccactgacgctcggttttcacgatgaagaggggattgtctgcccgtaccacggcctgcgcttcggtgaggatggccgctgcaaccgtatcccttccagccccgaccagccggtaccggcgaaactcaacctcaccagctttgcggtagaagaacgttatggcctgatctggacctgcctggccttcgatccgcaagacccgatgccgctgccggtgatgccgcactggcacgacgatggctttcagcaaatcaactgcccggcttttgaggtcaacggttttgcgggtcgccaggtcgagggatttcttgatgttgcccattttgcctggatccataccgggactttcgccgaccccaataaccaggtggtgccggactacaacccgcaggaaacggcgtttgggtttatcgccgattactggagttcagtcggcaactatcccgccagcaccgaatttcgcgcgccggaaggcttccagtggctgcgccattttgaaatgcatttgccgtttaccgccaccctgacgattcatttccccgaggacgccaggctggtgattatgaacgccgcctcgccggtatcctcgcgcattactcgtatgttcgcgcccatcgcgcgcaatttcgatctgcacgtaccggtggaagacgttcacgcctttaacctgcgcgtctttgaggaagaccgcatgatggtagagacccagcgcccggaaagattgccgctggatttaacgctggaagcgcatattcctgccgaccgcagctccatcgcctatcggcgcgggctgaagaaaatgggcttcggcgattttttcctcgtgtaa

SEQ ID NO: 252934 - DNA, 969 bp, Klebsiella pneumoniae
atgaatgaggtattacaggtcattgtcgacggcctctggcgtcagggaagccagagcctcgccgtcaggctggtggcaccggagggtcagacgctccctgcctggcagcccggcgcgcatattgacgttcatctgccgtgcggcattatccgccagtattcgctgaccggccctgatagcgtcgctgacggatatctgatttgcgtggccctcgacagcgcatcccgcggcggctcgcgctacattcatcagcagctgcgccccggccagacgctgttgatttcccctccgcgcaatctgttccctctgcaggcggcggagcgggtgatgctgctggccgccggcatcgggattacgccgctgtatgcaatggcgctaaggctggaggcagaaggcgtaccgtttaccctgcactactatcttaagagccgcgcgcgcggggcgtttatccgcgaactgcaacagcgatttagcgccgaaagcgtggtaattcactgttcaagcgaagggcgcagcgccaggcaaaacctggatgcggcgctgaatagtgcacatgccgggcagccgatatatctctgcgggccggcaggatttatggccgccgcgcaccgggtcgccctggcgcagggatgggcggaagcgcggatccacagcgaagcctttcagcctgtcgctacgccagcggcgtgcgcagaggaaaacacctttaacgtgatccttgcctcctcgggcgaacgctggccggtacccgcgcataaaaccatcgctcaggtcctccaggagaacggcatcgccgtccccctctcctgcgaaatggggatttgcggcgcctgcctgacgccggttattgaaggcatcgtcgaccaccgcgataccgtgcagtcggaggcagagaaatccgccagcgcgcagcagatagccctgtgctgctcgcgcagccggtcagcgaatttgtgcattgatttatag

SEQ ID NO: 252935 - DNA, 522 bp, Klebsiella pneumoniae
atgggcacaaagataaccatcgccgtggcgagtgctgccctgatggctgcgtcgacggccgcagaggctgatgaaatcactctttattcggttaataccggctcctggatctatcatctgtcaaacaatcacggccagtacaccgagggctttgataaccagtttgcctcggttgaacgcaagttctccgcggattcgaagtacagcctgctggtcgggacgatgaaaaacagctttgacgatcgctgtattgcgctcggggtacgccgcgactgggcgtcgttgggcaacggctgggtatttaaggggatttatggctacgtcggcgaatttttcttcgatgcttttgagcactgcggcgaccatggctcatataaggattttaaagatgcgaccggtattggattttctccctatatttaccatggtctccagtataactttaccgattatttcggcatcgaaagcggaattattctcccggccgtttttgtcatcagcgtgcagtggagttttcgttaa

SEQ ID NO: 252936 - DNA, 948 bp, Klebsiella pneumoniae
atgagtgaaaatacaatatctaaaccaacctctgaaccgaaagtcctgcagcccgtattacggaaagtcgatcttaacctgctgactattttcgataccgttatgcaagagcaaagcttaaccaaggcggcacaaacgctcggcatgtctcagccagcggtgagcagtgcggtatcgcgcctcaaggtgctgtttaaggatgaactgtttgtccgcaacggtcgtgggattaaaccgaccgatcgcgcctttcagctattcggctcggttcgacgcgctctgcaactggtgcaaaatgagctaccggatacgctgttcgatccgctggactgcgaacgtatttaccatctttgcgtctgtagcccgctggataactatctgacaccgcttatttttaacaaagtgagcgagattgcgcctcgggtcagtctctcctttaaatctaccctaagccagcaggtcatcaatcagcttcgctatcaggaagttgaatttgttctcgattacaacaagttcaaccacccggagttcaccagcatcccgctgttcaacgatcgcatggtgctggtggccaggcggaatcatccgcgtattgcatcgccgttgaccgagcaggatatttatcgcgagcagcacgctaccgtcgcgctggatcgctatgcctcattcagccatccctggtatagctctgaggaacagcaggcctgcgtcgcattccacggaaacgccatggtcagcgtgctgagcgtggtgtcgcaaaccaatatggtggccatcgcgcctgagtggctggccaaagagtttgaagaacagtttgcgctccagctgctgccgctgcctttagaaatgaacagtcgcacctgctatctttcatggcatgaaacggcggcccaggagaggagtcaccgctggatggcggaattgctgattaacatttgccagcgttaa

SEQ ID NO: 252937 - DNA, 207 bp, Klebsiella pneumoniae; identical to SEQ ID NO: 174317

SEQ ID NO: 252938 - DNA, 381 bp, Klebsiella pneumoniae; identical to SEQ ID NO: 174318

SEQ ID NO: 252939 - DNA, 2025 bp, Klebsiella pneumoniae
atgctgaatatcttcaggggcctcgtcttcctgttgctgacctgcgcgagcgttgctcatgcggcagacaccggatggctgacatccccacagaacgaccacgcccgggtccgcttccaggcggagaaagagaacgatcggatcgacgccctgctctctattgagctggcttccggctggaaaacttactggcgctcgccgggtgagggcggcgtcgccccgcaaatcgtctggcataacggtgaacaggcgcagtggtactggccggttccctcaaggttcgagatttccggtctgacgacccagggctaccatcagcgggtcgttatcccgataatcatcaccgccgttcccggcgacctgctggacggtacgctcacgctatccacctgcagcaacgtctgtttgttaaccgactacaggctgcgtctggatttgagtcagcccgccactgccggttttcaggaggcttttgcacaggcgatgcgaaccattccgactgataaaggcgtgtcggacgatctcgccgcgcatcgggtcggcagcgacctggtgataaccgccaccacggtcggtgagtggaaaaaccccgctatcttttttgatcccatggagggcgggataatcgctggcgctccgcgcctccgtaccgagggcgccagcctcaaggtaacggtaccggtaaccgatgaatggggggaagagcccgcaacccttgcggggaaagcgctgtcgttggtgctgacaaatggcgcaaaggcgcagcagaccagtctgacgatcggcgcagatcttgcgccaacctcaacggttagcctctggaagatgctgctttttgccctgatcggcggattaattcttaacctgatgccctgcgtgttgccggtaatgggcatgaagctcagcgccgtgctgcagtccgggtcagataagcgcgcgatcgggcggcgttttcttgctaccagcgcaggtattctgacctcatttgtcctgctggcgctgatggtaacgatactgaagcttaccggcgcgtccctgggctgggggatccagttccagaacccctggtttatcggcttaatgattgccgttacgtttatcttttcgctcaacctgtttggcgtcttcgaggtgctgctaccgtcatcagccgttaaccggatggcgaccgccggcggcaccggcatggcgggcagtttctgtgaaggcatttttgccacgctgctggcgaccccctgctctgcccccttcctggggaccgccgtcgcttttgcgcttgctgccccactgcaggaactgtggctaattttcctggcgctcgggctgggtatggccatcccctggctattcgtcgccctgttgcccgggtcggccgctctgatcccgcgccccggtcgctggatgaattcactgaaaatggcgctcggcctcatgatgctggcctccagtttttggctgacgacgctgctgggcctccatttgggtgagccccccggcggcattattgcgctagttcttaccctggcggcgctggccgccctacgggtaacccataagcgtacgacatctgccttctggctggtgattattgcgctggcggcgtttgccggcttccagcttcgcggcctgctggcaggggagcccgcgcgcgctaccacggaggcaatggctcagccgatccgctggcagccccttagcgaggaggctatccagaacgcgctggcggcgggcaaacgggtctttgtcgatatttcggccgactggtgcgtgacgtgcaaagtgaatgaacatcgggtattaaatcagcccgccatcatcagcgcgctctcccagcccgacgtggtggcactgcgcggtgactggagtctgccctccgaaccgatcgcccgtttcctgcaaagcagaaatcgctacgccattccgtttaatcaggtctacggcccaggccagccgcaaggcgacatactgtcgccgctgctcgataaacaaactgtcctcaacgccctcagccgtgccaaaggttaa

SEQ ID NO: 252940 - DNA, 723 bp, Klebsiella pneumoniae
atgaaaaaaacgctgctcgctttcactcttctttcggcctctttgccgacactggcatcttcgccgctgacccctgcgcaggaggctcgcgtccaggcactggtgcaggagacgctgcttaatcatcccgaaatcttgatcgccgccgccgaaaagctcgatcggcagaatgcccttgccgggcaggaacagcttcagcaggttcttactcagtacggcgatgttatctttcacgatcccaactcgccgcgtatcggcgcgcagcgaccgaagctgacgctggtcgtctttacggatcacaactgcccgtattgcaaaaagtttgacccgtatctgcagaagattgtcgagaaatatccggatgttgccgtggtctttaaatttctgccctggcgttctgaaagttcgctgacttcggcaagggctgcgctaactctgtggcgtgcgcatcctgaacagtttgtgaaatttaaccatatcctgatggcaaaaaagggatatcacgacggcgccagcattgagcaagccaagacgaaggccggggtcagcgtagcaacgccggatgaacaaagcctggcgacgattaagcaaagcctgctggtggccgaaaaactcagcattcagggtacgccagccacaatcgtcggcgacgagatgctgtcgggctggatcccctgggagcaatttgacgccatggtcagcgacgcgctgaaaaaacagtaa

SEQ ID NO: 252941 - DNA, 759 bp, Klebsiella pneumoniae
atgaaatatattctactgctggcggcctggataatgccgggcctggcatctgccggggaagctctccctcagatagtgaaaaattttggcgaacagcaagggatcgccatgattaaagagatcgattcgcccggcggggtaaaagggtggatcggccagtatcaggatatgggggtgaccctgtttttgacgccggacggaaagcacgtgatttctggatatctgtatgacgaaaaaggtaaaaaccttagcgaggcctattttcaggaagccatctataccccttcaggccgcaaaatgtggcagacgctgaataatgctcgtccgctgaaggaaggcgcggattcggctgccagaaaaatcattgtctttgccgatcctttctgcccctggtgcaaagcgttctggtcggcggcgcagccgtgggtaaaagcgggcaaggtccagctaaataccctgctcgttgcttttctcaatccgaaaagcggcagatacgcaacggcgatcctgaacgcgcgcgatccggccgccgcgtggcgagagtatgagctttcaggcggcaaaaaagtgccgcattttgagggcgttactccacgcgacacctttaatcttcttcagcatcatcaaaaactgatggatgatttgggcgccagcgcgacgccggctatttattacatgaatgagcagaacgagctccagcaggtcatcggcatgcccgacgaacagcagctgcgggagatgttcgggccagcgccctga

SEQ ID NO: 252942 - DNA, 336 bp, Klebsiella pneumoniae
atggaacgcttatttgtctacggcacgctgcgtccgggccactctaacgcccatattatggacaacattggcggagagtggcagccaggctacgtcaccggcaccttttatgaacgcggctggggagcggcggcagattttccgggcattgttctcgacaaaaacggcccccgggtgcccggctttctgtttctgtcggcgaatctcgaggcccattgggccatgctggatgcgttcgaagagggctacgatcgcgttgctgttgaagtcaccaccgatgagggtcagcgagtgaccgcctggacctaccagctacagccgaagaggatcccgtag

SEQ ID NO: 252943 - DNA, 1029 bp, Klebsiella pneumoniae
atgaaaaagattggctttttatcatttggtcactggacgccgtcgccgcagtccggagcgcgttcagccgctgatgcgctgttacaatccatcgaccttgccgtcgccgccgaagaactgggcgcggacggcgcctatttcagggtgcatcatttcgctcgccagctcagttccccgtttcccctgctggctgcgataggggcgaaaaccaaaaaaattgaaatcggcaccggcgtgatcgatatgcgttatgaaaacccgctgtatatggcagaggatgcgggtgcggcggacctcatctccggtggccgcctgcagctgggtatcagccgcggctctccggagcaggttattgatggctggcgctattttggttacgtcccgggcgaaggcgaaaatgagtcggatatggcgcgtcgtcacaccgaagtgctgctggacgtcctgcgcggggaaggttttgcgaaacccaatccgcagcctatgttccccaacccgccggggctgctgcgtctggaaccgcattccgaaggtctgcgcgaacgaatctggtggggcgccggttcgaatgctaccgcgaagtgggcggcaacgctgggtatgaacctgcaaagttcgacgttgaaggatgatgaaaccggggaaccgtttcacattcagcaggcgaaacagatccgcgcctatcgcgaagcctgggcacaggcgggccatacccgtacgccgcgcgtctcggttagccgcagcattttcgccctgatggacgatcgcgatcgtctctatttcggttcaggccgtgacgagagtgattcgatcggtttcctcgatgagaaaacccgcgctattttcggtcgcagctacgccgcagagccggacaagctcatcacgcagctgaaacaggatgaggccatcgccgaagcggatacgctgctgttgacggtgccgaaccagctgggcgtggaatataatgcgcatgtcattgagtcgattctgaagcacgttgcgccggcaatgggctggcgcgatgcctga

SEQ ID NO: 252944 - DNA, 378 bp, Klebsiella pneumoniae
atgagcaaggtggtacggaaaaattatcctcaactgggtgaagtcaaggctccctacgttcactcggtaacgcacggaaacacgctctatatttcagggttaaccgcgttcggcacgcaggcgcagcaggggagcatcgccgcccaggcggaggagatctttaagcagatcagaaccatcgctgacgcagaaggcgttgatttttcatccctgattaaagtcactatttttataacctcatttgctgagatcgacgcattacgccgggttctctatcaaaactacggtgaccatctgcctgccagctctctcattgaagtcagccgcctcttttcacccgaccttaaaattgaaattgaagcgattttcggcctctga

SEQ ID NO: 252945 - DNA, 453 bp, Klebsiella pneumoniae
atgggattattaagttttgtgaaagacgcgggcgagaaaatctgggatgcggtatctggcggcagcaaggaagatcgggccgaaaagctgaaaaaacacattgatgaccttaacctgcccggcgctgaaaaagtgaatattgatgtcgcggacgatggcaccgcaacgataacgggcgacgtcggctcacaggaagataaagaaaaaattctggtggcggtgggtaacgtcaccggggtaggccaggtcaatgatagcgttaatgtgacgcagagcggagcggaaagccgttattacacggtgaaatccggcgataccctgagcgccatctcaaaagcgatgtacggctcggctaatgactatcagcgtatttttgaagccaataaaccgatgctgacgcatcccgataagatctatccgggtcaggtcctgattatcccggcgaagcagtaa

SEQ ID NO: 252946 - DNA, 228 bp, Klebsiella pneumoniae
atgtcctcaagaattaaaggtctggtgaagtggtataatgaatcgaaggggtttggtttcatctctcctcttgatggcagcaaagatatcgccgttaattactcagcgcttcacggcgataactttaataccctctttgaagggcaaaaagttgaattcgccatacatcgcggtgataaaggtccagcggcgacgaaagttattctgtgcgataaagagatattttag

SEQ ID NO: 252947 - DNA, 903 bp, Klebsiella pneumoniae
atgccctatctgttacttacgctggcggccctgttttggggagggaattatgttgtggggcatattctcgttcagggcgcagatccgattgttatgacggaagcaaggtgggcgctaaccgccatgctgctggtagggctttatcaacgtcaaatccgcgagagttggcgtttattgcgtggaaatgcatcgacgctgctgattttaacgctgtgtgggcaggtgagtttcccgctaaccctctatatcggtctgcagaccacctccgcgctaaacgccgcaatttatatgtcggcgaccccctgcatggtgctgatgattaaccgtctgattttccatgaccgggtttcagcgcgtaactggtgcggcgttgcgtttagcaccgcaggcgtactgctgcttctgctgcacggcaatctgacctacgccgagggactcaaaggatttagccagggcgacctgtgggccatggggtctgcgctaagctgggcggtttattgctctctgctgcgtaataaagatcggcgtattcccgccaacgctttcgtcgccgtcagttcacttatcggctccctgattctgcttccggtggtcattttctggctatggcgacaccccgccacctcgttcgccgcgtaccacgatatctctttcctcaccggcctggcgtatctggttatcttcccctcgtggctggcctatttgttctggaacaaaggcatcgccgccattggcgcgactcgtggtgaaatttacactcaccttattccgctgtctggcgggatattgagtattctgtttttacatacccggccgcacctctatcacttactgagcacgctgttaattttaattggcatcgcgatttgttcgatcgcaaaaaaggaaacggtgcattcgtaa

SEQ ID NO: 252948 - DNA, 1179 bp, Klebsiella pneumoniae
atggactttaataaaataattgatcgtcaccataccggatcgctgaaatgggattttatgacgcgctattttggtgaagaagccactgaactgttgccgatgtgggtttccgattttgactttagctgcccgccggacgttcagaaagccttagttcagcgtattgaacacggtatttttggttacagcgaacgaccgcaaacctactacgacgcattaatctcatggttcttaacgcggcatcagctggctataaaaccagagtggatatgcagtattgaaggggtggttcccggattatccctcctcgtgcaaatgctgagccaccccggtgaaggggtggtggttcagggaccctattatggatcttttgccaaaattatttcgctcaacggtagacgcctgctggataatccgctgtatgaggagcctgaccagggctacagaatggatctcgatcatctggaaaggctgtttcgtacagagcgcccgccgctaatgatcctctgcaatccgcataatccaaccggtcggtgttggtcagctctggaactgagtgagttgctccggctgtgtgaagagtatgatgttattttaatttccgatgaaatctgggccgatttactgcttccaggggaagcatttacctcggtcttgcatttagaggagcgctggcattcgcgcgtgatatccgccacctccgccagtaaaacgtttggtttatctaccctacgcattgcgaactttctcataccgtcgccggcgctgcgtgaacaatttatgcgccgtctcgatgctcatggactggacgtcttcaatgcgttgtccattgaagcgagcacagctgcgtggcaacacggcgctccctggctggatgagctactgcgctatctggcagaaaatcgacggtggtttattcagcaggttgagcaatatctaccgtgggcgcgcatcatccctgctcaagggacgtatctgctatggatagactgcaaacggctgggactggacgatgaacagctgaaatggctcatggtggatgttgcgggtattgccccttcaatgggaaacagctttggcgcaaccggcagcggttttatccgccttaatctcgggtgtccgcgcgcgtacctcgaaaaagcggtggagggactgaaacgcattgcttttacagcataa

SEQ ID NO: 252949 - DNA, 1476 bp, Klebsiella pneumoniae
atgaatgcctctcaaaagcagaaaaaaacgctctcatttggcctggccaccgtccctattttagccatgctaatgctgttaattattggctacggcatcatggggttgcgaatcgaaccgctactgctctgttccgctgccgtagccgccgtattagccttatggcagggctttacgtgggaagagatcattagttcggtcgtggataaactggcgaaagcgatgccagtcattatgatcctcatctgcgttggcgctttaattggcacctggatgttcagcggcaccattccttatatggtgtattgggggcttaaattaatcagtcctgagtatattcttattgccgcattctttttgaccagcgtcgtctcggtgtgtaccggaacatcatggggatcggcgggaacggtgggggtggcgctgatgggggtcgcggccgggctggacgtctccctggcggcggctgccggggcggtggtatccggggcttacttcggcgataaaatttcaccgctgtctgactccaccaacttcgccgccattgtcgccgataccacgctcttcgagcatattcagcacttactatggaccacaatccccagctttctgcttgccgcggcggtatatcttatcgccggtcacagcaatatgctgggcgaggtcgcgacgccgcagcgggtcaccgatattgtcaatgcgctggagtcgctgtaccgctttaatatcgttttgattttaccgcccgtcattgttctgtggggagcggttcgcaaaaaaccggtcattcctttaatgctgggcgcctgcgtgttagccctgattctcggcgtcgtgatgcaggggcttagccttaagcaggggctggatgcctttattgacggtttcaacatctccatgttcccgcaggggagcgaaggcatcattgatgatgtgccgcgactgctcaaccgtggcggtatgttctctatgatgagcaccattctgctggtattttgcgctttctcctttgccggcgctttaaccttaacgggggcgctcaacattattatcaaccgcctattgacggttattcacagcgtcggtcagctcatcgccgccaccattggcaccactattctggtaactggcgcaacgagcgatggaaaactggctcttctggtacccgctgaattattcaaagatgcctaccggcgtatggggctggataccaaaaatctttctcgaaccatcgaagatgcgggcaccgttattgagcctttattaccctggacctctgccggggtctatatggcaacgacgctgggagtgagcaccctggatttactgccctgggcggttcagtgctatgccgccatcttctttgccttatttttcggctttaccggaatcggtatcgcgaaaacctccccagccgcagaaaatgcaacgaatatgctggccacagaacaggaagggaagccagatggactttaa

SEQ ID NO: 252950 - DNA, 1011 bp, Klebsiella pneumoniae
atggcaacaataaaggatgttgcacaacttgcgggggtttcaaccgcgacggtttcgcgcgttattaatcaaaccgcctgggttgaaccggtaacgcgtgagcgtgttgaaaaagcgatgcgtgaactgaattatcatcgcaatgccgcggcgctggcgctggcgaaacgcagcggcgatatgctcgggttattgaccggcaaccttgccgatccctttttcgctcgcctcgcccgcggcgtcgaggaggtctcacggcaggaacaattccgcttgatggtatgcagcggcggacatgatgaagggatggaaaaagccgggctggattttctaatcaaccagggctgtgaggcgatcgtggtccatgcgagcagattggcggaaaaggagttgctacgttatgccgcccatttccccgcgatggtggtggtaaatcgctatattgccgggatggccaatcgctgcgtctggctggagaactgcgaggcctcaaaaaaggcaacgctgcatttacttgagcaggggcaccgctgtattgcctgcgtgacgagcgacttaccgataatcgatcgtcgcgagcggctggaaggctatcgccaggcgttagcggaatacggcattaccccggacaggagctgggtgataagcgttccttttaacgaagaaggcggcgaacgcgcggcgcatcagcttcttaactgcgggagcccttttaccgcggcggtaacctttaatgatgtgatggcggccggcatcatgcgtatcctgcatctgaaaggcattacgctaccgcagcagctttcaattgtcgggttcgatgatgtggtgatggcgcgttatctctatccggcgctgacaacaatgcattacccggttgagcgaatggcgcgttgcgcttcgcagctggcgatccaactctttaaaggcgccacccagcagccctgcatcaatagcttcgctgcggagctggtggtccgcgattccgttcttcctcccgggagcggtagttaa

SEQ ID NO: 252951 - DNA, 453 bp, Klebsiella pneumoniae
atgaaagtgctcagtaaaagacaaatatcattaatcaatcatttaacgcaggaaagtggctggctggccacctcccgggcggcaaaaatactcaatatttcagtcagtacgctcagacgagatgttgaagctattaacctttatttcactgataaaggtcattctgtactcagtaaacccggtctgggcctgaagcttgaggcgaacgacgttgttcccctcccccttatctccggggatgcgcaggttgtaaacatacttaaaaacaagcggctggtgggcattgcgaccgatttgctgacgcattctcccacgccattatctatcagctttttagctgagaaatacttcatcagtcgctcttccattgtggaagacctaattaaagttgaaaaatggctagagtgtttctcccttagaatgataaagaaccataccggtacgtttatataa

SEQ ID NO: 252952 - DNA, 1941 bp, Klebsiella pneumoniae
atgaataataaatcctcaccaaccagaaaagtagaggtgcatacaaccgataacggcacgccattttcctactcaatgacttcccataaaaatataaaagtgaaagcggaagttcaaccgccattgcagttgcctggattaattatattcgtacatggagttaattcagaaggcgaatggtataaagaggctgaagtatcattatgtaatggtttgaataatcgacttgggttatctgacaaagatactgtacatcaattgcaagctaacgaatacgcagatgctcactggaacaaagatggcaccaaatggattgttcctgccaggaaaattatcaaagaaaaccgctccccagttatccgcttctactggggttatcgtgctgctaataacgaaaccgatagatacgccattccgttaaaaaacaagaaaggtgataattactatgatctttctcccgaagagcgcaaaacgaaaggcccatggttctggggcggcgggccgttccagaacggctgtaatcaattggtcagcctgtggagtgagaagggatttgacaactggccgaatgtgctgggtatgccgatccccttcagcactcaattgatgaatggtgagcgtgatcgcctgctgaccgcggcgccgccgcgccactattatgcgcacgccgccgggcgtctggcggacctgataaaaaccatccgcagtaaatatcctgaagacacagttacggtgctgtcgcacagccaggggacaatggttgcgctggcggcagcagccattgaggcaccggatgcgctgttcgtcatgaattcaccttatgcgctggaaaacgaactcaccacctatatttcctatccggtgaaagagatcatcagtagggaagcccgggaggctacgtttgccgatatcgttagaaaggttgcggaaaacaaaacccgccttgcgcagcagggctacgatcgcctgttggcaggcgtcagcagcgatggcgaaagctggacgccggaagggaaaacccacgctggactgccggagcgcgataaccacggtaccacgtggatttactgtaatccgcatgaccgggtgatgggctcggctccgctgcgaagtattggctggcaggggttacctaatacaaaagaaagtgattatagtgaatcccattctttatttaagctggcaggcgacacactttatgtccgtatgctggggcgtaatacaccgtgtggaaatgcaccggatacacaaacccatttcagtaatcttggggatggtaagccattctgggacagtacgaccacggtgcttcagaagatgacctggccggaaccagacaaaggacaaatgctgacggttaatgcgccgcaggtaccagaaccactgacttctgaggaactgaaaaattttgaccaggattatgccagcactgaaaagcaaactggctcaataggatacggctacggacagattaacccgacgacgaaaagacccgttgacatagactaccgttattacatttcactatacggttattttgaccagaagatggtgcctaaaacaccttcctcctggtatcaacctgggccgggatcgaaagaggatcgggtgaaatatgaaaaacagtcgagaactgaaatgctggaagatataaggacctatgttcagcgcccgaccgatcacagtaccctgccaatgaatgaacattttatgagtcgagttgtggcctatgatctaccgctagggtattgctggcattcatgggatcgggcaagcctggcagaattgcgcaggcaggcggactggttggaaagtgatgattattatttcacaggcgaactgaataagccggatattcccccggcaatccggcaggatgtggcagaagatgcggtgaagagaaaggccgaagaaatagcccgatgtatcgggaagaaatga

SEQ ID NO: 252953 - DNA, 774 bp, Klebsiella pneumoniae
atgataaataaattaatcgtattatttttggaactagtgttgttaagctgttctcttttttcattaagcggttgcgttactgaaggcgccgcattcggtctgggggcagggagcctgcatgaaacggtaatgacagaaaaagacaaaaatgcaccgtcaccggtatatggtctgccgcaggtgatctaccggatagataataatcgttattttacattggagaattatacccgctgcgagaatgggcaaacgttttataataacaaagaaaaagatattcatgtcaaagtattggacggttcaggatacctgtttaaaggccgtttattctggttgtccatacgtgatgattatctggcatttccagcaacaatagatacaaatcatgcagcttgtatgggagcagataaaggttgtatgaatgccgtcattgtcacaactgatagtggaaaaacactctacggcgttgaatatggcagccatactcaggatccaacaggtgatacaaaagattatgatatgttagtcatggatgagggattttatttgattgtatatcattcttctaaacgatcgccaacgaatgcttatgccctaaaatggacattttacccaaatgcagagtctgccaaaaaaataggctatcccggagtgactggaccagtttatcaaccagaactttctatagatgtatctcaaattcttcaggaaaaaatgcaatgcgaccgacgattagaacccgtaaaattttcagggatagtctctcatgaataa

SEQ ID NO: 252954 - DNA, 2490 bp, Klebsiella pneumoniae
atgagtgatatcccggcgcagcagttcagccacaaccatcctctgttaacggtgcgcggctgccgcgccctcctggacgtgctggcctttgaaggcgatgaggccctgagcgaaccgttcagctaccagattgaattcaccagcgccgacaaaaccctcacgccgcagcagatgctgatgcaggatgccgccttcaccctgctggccccggttgaccagggcttcggggtaaaaatccggcagccggtacgcacgattcagggcgtggtgacggcgtttgagcgcctttccgcctcccgggacgaaacgcattattccctgactctgcagccgcgtctggcgctgctctcccggagccaccagaaccggatttaccaggatatgtcggtgccggatatcgtggagcatatcctgcgcacccgccacggcatgcgcggggaggactttatcttcacgctggcgcaggcgtatccgcggcgcgagcaggtgatgcagtacggcgaggacgacctgcgctttatcacccgcctgctgagtgaggtgggtatctggttccgcttcaccgccgacacccggctgaacattgacgtggtggagttttacgacgaccagcggcacgacgggcaggggctggttctgccgtcggtgccgccctccggccagcacgacagcggtaccgagtcggtgtgggcgctgaaaagccggcatcgcgtggtgccgcagtcggtgttcacccgggactataactaccgcaacgcgccggcggagatgagcctcagcattgatgtcagccggggcgacagcaccacttacggcgaggcgtaccactggggggataactacctgacgccgggcgacagccatccgcgcgacccggcgccggagagcggggcgttttatgcccgcctgcgtcacgagcgctacctgaacgaccagacccggctgagcggaaagagcagctgcgcgacgctcgcccccggtcaggaactgaaggtgagcggcggcgaagaggtcaccggcaccttccgtgagagggtggtgataacccacatccacagccgcggccggcgcgaccgcagttttgaggtggccttccacgccatcccgtattcggaagattacggcttccgcccggccagtatcgccaggccggtgatggccgggacgctgccggcgcgggtcaccagcacgaaaagcagtgatatctacggccatatcgaccgcgacgggcgttacagggtcagcctgctgttcgaccgcgaccactggccgccgggagaagagagtctgtgggtacgccaggcgcgcccgtatgccggtgacacgtacggcctgcatctgccgctgctggcgggcaccgaggtggccatcgcctttgaacagggcgacccggaccggccgtatatagccggtgtcctgcacgactcggcgcacccggaccctgtcaccatccggaactataaacgtaacgtgctgcgcacgccggcgaacaacaaaatccgcctcgacgacgcgcggggaaaagagcacgtcaaggtcagcacggagtacggcggcaagagccagctgaacctggggcatctggtggacggcggaaaacagccgcgcggggagggattcgagctgcgtaccgacagctacggagcgatacgggccgggaaagggatattcatcaccgctgatgcgcagatgaaagcgcaggggcagcagctggcgatggagcctgcgttgtcgcggctttcagcggcgctggtggaaatgcagtcgctggctgccggtgcacaacaggcacaggcgctggctgcagatgtggggcgtcaacagaagttgctgcaacagaaaatagaacagattcagaaggaaatattgctggcgacggcctctcaaggcgtggcgctggcaagtggtgacgatatgttgctgtcagcgcaggagaatctgacgctgatctccggtaaacaactggatctgggtgcgcaaaaggactttacgctggcagcaggaaaacaaattagcctctggagccagaggggggctaaatggttcgcatcgcagggggatattgatattcaggcgcagagcggaaatattaccacctggtcaacgcaggacacgtatatttcgagtggtaagagactggtaataacggcacaggatgagctgacgctgatatgcgggggcggatatatcaaaatcaaaggtgggaatgttgaaattggcggtcctggaaaattgctgataaaaaacgccggtattaagaaagcaggttcgggtagtatgcaggcagtaatgaagtcgtttgagtcgggaagttttgatgagaagtttattattactcatccggtttctggaaaggctctggcaaatcagaaatatgagattcacttgccggacggaaacgtaatgtctggcatgacgaatgcgatgggacattcttcgcttataaattcacagacaattgatatgctgaaaattatcctgaaaaaataa

SEQ ID NO: 252955 - DNA, 240 bp, Klebsiella pneumoniae
atggaaaatcccgccattttgttacgtcgtcttcacccaaactgcgcccgcgcaacagaaggtctcttctgcctgccgcctaacgccggaaaaagcctgctctgccagcagatattaccggcggtaagccagctgcgcttaagccctgtggctgcaggacagttgcctcagcgcccttctccgggtcgggacgataagaaaatgattgcgatgacgtttgagaaagaggtgaacgaatga

SEQ ID NO: 252956 - DNA, 1677 bp, Klebsiella pneumoniae
  misc_feature (48)..(57): n is a, c, g, or t
ttgcggtactgctctgtttgctgtttctgccgctggctaccggcgggnnnnnnnnnnggcgggcggattctggctgttgcgctgagcctgaccgcagtcatcgttgccctgattgtcgccgggcgcaagggggaatggggacttacagaggatgcctggctggatgacattccggacgcgccgtaccgcctgccggtggtgctggtctgcggtgatatcgccaggtggccggagtgcggggtggttttgcgtacggctcagggctgctggttaaatgttcctaccgccgaactgcagcagacggtacgtactcttctgcgtaaacgcccggatctgatatcgcagctggcggtgatggtctgcgtttgcccgcagttgcacggtgatgaggcggcgctggcggtcgggcttaatgagctgcgctggcagctgaaccaggcgcggagcgactgccgccgctcggtgcctttactactgagcagtcatgtggcaggggcgtctgttccccactcgctatggcagacagcgcagaccggggaagccatgcaggtgtggcaggcgaatgacgcgccttgctgcaccgggacctggctggcgcaaaagaacggaagggagcgtctggccacacaggtgaggatgaattcgctggttcgcctgacgcacgagacggcgctggctatgctgacggcgccctctgttgatacgcccccggtgatacccgctatgatgctgtatcacatgacgccgtcgggggcaccggttctgcctcagaatctgtggcagcgctggttgtctcatcataccgctctgggctcactacctggctggcagcctgatacctcatcagcggatgtcctgttaccggattttattctgccactgttgccattgggcgtcagcgagacgccacgcgccaggattttacgccgggcgttctgtctgttcacccttgccattctcatcgcactgtgcgccagcgcgtggaacaaccgccagctactgcagcgggtggggttcgatattcagcactatgagcagattgcgatggttgactacgcctcgaaagcccgctccctgcaaatcctgagtggggatgcggttcaactggatcagtgggcgcgccgcggtgagccgctgaacctgagtctcggtctgtatcacggggcctatttacgcataccggtgttggccgcgattcgttcctgggaacccccacctccgccacaaaaaccagcacaaaaaaccgtgccgaaaaccatccgcctcgacagcatgtcgctgttcgataccgggaggtgggcgcttaagcccggatcgacaaagctgctggtgcactcgttggttggcatcaaagcaaaacccggctggctgattgtcgttgcgggccataccgacagtaccggtgaggaaaaagccaaccagatactttcgctgaagcgtgccgaatcggtgcgcgactggatgcgtgacaccggagatgtaccggagagctgttttgcggtgcagggcttcggcgagaaccgtcctgtagccaccaatgaaacggttgaagggcgtgcgctgaaccgccgtgtcgaaatcagtctggtaccgcaggtgaatgcctgccagccaccgggcatgccttcggccttatcgcgggagagcggcgcgtcaatcaatgaatcggagaagtag

SEQ ID NO: 252957 - DNA, 666 bp, Klebsiella pneumoniae
atgaaacaggatacgaatatcgacgccctgatggctgacgcctggttgacggtgacggaactgcggtgcggggcgagactggccgacggggagggcgaacgcctctggcgacattgcgtaaagcatattgaaaaggtcatggcggaactggagaccgcgggcctcagcgaggcgagccgtcggcatattctctacgcctggtgtgcgctgctggatgagacagctaaaggacgtgaaggtgaggatgatgcctgcatcgtctggtatgaccgtccgctgcaggcgaaatacttcggtgccctggacgccggcgatgcgctgtatgagcggatgcgacaggttctgcatgagcccgcgccggatgtggcggtactgacctgcttccatcgcgtgttgatgctgggctttaagggatgttatgccctggatgagccggttcgcgaccagcttatcaccaggctggcggagcgcgtttcgccgtttgaaaccgaccagagccagcctgtactgacaggtatatccgggcgtagcggcctggcggacgggttgcgacgctggccggtttgcctcgggctgtcgctggttgcgatcgccgcgctgtggctggggctaaatcattggcttgattccctgattacaaccctgctgcccggggcggaaaaatga

SEQ ID NO: 252958 - DNA, 1344 bp, Klebsiella pneumoniae
atgaaaacagtacgaccgttatggggacgggggcagatgatctctccccaacattttcagcaggaaaccgcgcaatcggcctggcagacagagtatgtcgcccggctgggggcgattcatccctggggagtggcgcgggcggagtttaataccgcgctgctgaagcaggggaaactgaaagccgaccacctgtgcgtgcgtttcgccgacggcacgctcattgatagcgataacgccgatgcgttgccgccggtgatgaacctgccggaaacagaacatcacgaactgacggtggttctggcgctgccccatgagcatgagaacggtggcaactgtctgcaaccggagcagagagcggagcgtcccgtgcgctggcgtctggcctggcgggaggtgcgaaaccgctatggggaggactgccgccagattgcggtaatgcagccggagctgacgctgcgtgcggccgatagcgacaacgctgattaccagaccgtcgccgcgatccgtcttacgcgcgatagccagggacactggtcgcaggacgagtcttttctgccgccgctgcttaacgtacaggccagccgttggttgagggaacagtccgaacagttgacgggtcagctccgtgcgcgcctgcagcgcctgatgtctatgcgtcgggaaagcaacgagcgaatggccgacttcgcggtagcggacgtgtcgctgttctggctgctgagtgcgctcaacagcgctgagccgttgctcggccattttgttcgtcatccgcaggtgcatccggaacgtctgtatacagcgttggccggtctggcaggtagcctgctgaccttttctcttgaacacactacagccgatattccggcctatcgtcatgagcagttaacggcggtctttcctccattgtttgacttgctgggggtactgctggaagccagtctgccatcgagggtggtggcgattgacatggttcatgatgaacgacgcaagcgctggcatgctcgtctgcacgatccacgactgcgtgaagaggcggatttttatctctcggtacgatcggcactgccggtagcgcagctgctggagcagtttccgcttcagtgcaaagcgggcagcccggatgaagtcgaccgggtcgttaacggttcgcaacccggcatccctctgcgcgcgatgagccacgttccggcggccatcccgctgcgcctggagaaccagtatttcacccttgatatggcccatccggcggcgcgagcgatgctgttggaaggcagttgtgtcttttacgtccccggtctgctgggcgcccctgaactcgaactctatgcggtactgcgctcatga

SEQ ID NO: 252959 - DNA, 714 bp, Klebsiella pneumoniae
atgcccgtttctcgtcctcgcccccagcgcggtgattttccgcctggaacccaacgctacggccagtcttacctgggcgcgccgctgttgtggtttccggcgccgctggccgatagccgtagcggcctgatccttgccggtactcacggcgatgaaaacgcctccatcgtcaccctctcctgtgcgctacgaaccctcaagccagagctgcgccgtcatcacgtggtgctggcggtcaaccctgacggctgtcagctggggctgcgggctaacgcacgcggtatcgacctgaaccggaattttccagcggcgaactggaaggaaggagaaaccgtctaccgctggaacagcgcggcagagcagcgcgatgtcgttctactcaccggcgaaaagccaggttcggaacccgagacccgggcgctgtgccagttgatccatcagatccacccggcatgggtaatctcatttcacgatccgctggcctgcattgaagaccccggccacagcgaactggggcactggctggccgatgcgtttagcctgccgctggtgggtagcgtcggctatgaaacgcccggttcttttggcagctggtgcgccgatatcggcctgccctgtatcaccgccgaattcccggcaatatccgccgacgaagcaacggagaaatatctgcaggccatgacggagctgctgcactggcactctcagagatga

SEQ ID NO: 252960 - DNA, 966 bp, Klebsiella pneumoniae
atgcgaaatctgcgagtctatgaagaagcctggccgctacatagcccttttgtgatcgcccgcggcagccgcagcgaggcaaaagtcgtggtggtggaaattgaagagaatggcgtcaagggcacgggggaatgcacgccttatcctcgttatggagagagtatcgcctcggtgatggcgcagattatggcgatcggcgaacagattgagcggggcgtcactcgagagcagattcaacgcctgctgccgccaggggccgcgcgtaatgcagtggactgcgcgctctgggactggcaggcgcgcagcgcgggtaaaagcatctcgcagctgttaggcgtgacgctgcccaagcgggtggttacggcgcaaacggtggtgatcggcacccccgaccagatggcggccagcgcgtcggccctgtgggagaaaggtgccacgctgctgaaagtgaagcttgatgaccatctgattagcgagcggttaattgccattcgcgaggcggttccgcaggcaacgctcatcgtcgatgccaatgaagcctggcgcagcgacggtctggccgagcgctgtcagctgctggcggacgtcggcgtcgcgatgctggagcaaccccttccggctggggccgatgaagcgctggcgaattttatccatccgctgcctatttgcgctgatgagagctgccatactcgcgatagcctggcggcgctgcgcggccgctatgaaatggttaatatcaagctggataagaccggtggtctgactgaagcgctgctgctggcggaggaggcagaacgcctgggatttgcgcggatgctgggctgtatgctgtgtacgtcgagagcgattagcgcggcgctaccgctggcgccgctggcccgttttgccgatcttgatggtccaacatggctggccgtggatgttgagccggcgctgcacttcagcaccggggtgcttcatctctga

SEQ ID NO: 252961 - DNA, 507 bp, Klebsiella pneumoniae
atgtcacaaaccgtgcatttccagggcaaccccgtttctgttcaaggcaccattccgcaggcaggcgctaaagcgcagccgtttacgctggtggccaaagatctctctgacgtcgcgctgagccagtttgcgggctcccgtaaagtgctgaacatattcccaagcatcgataccggcgtttgcgcggcatcggtacgtaaattcaaccaactggcgtcagaactgaacaacaccgtagtgctgtgcatttccgccgacctgccgttcgcccagtcacgcttctgcggcgctgaaggcctgaacaacgtcgtgactctgtccactctgcgcggtgcgcagttcctggccgactacggcgtagcgatctccgcgggcccgctggccggtctggcagcgcgtgctgtggtcgtgattgatgaaaacgaccaggtggtatacagccagctggtgaatgaaatcaccgaagagccggactacgacgcagccctggccgcgctgaaagcgtaa

SEQ ID NO: 252962 - DNA, 1056 bp, Klebsiella pneumoniae
atgtggatctggcgtagtcgtttttttcagtggatgaaactgctggtgctctccagcgcgatctcttttgcgctgttctggtttcacctcccggccgcgctgctgctggggccgatgattgccggcatttgcctgagccttcgcggcgcggaaatccgcgttccccgacccttttttattgccgctcagatgattatcggctgcatgatcgcccgtagcctgacgccctcgattttcggcgttctgctggcaaactgggcgctggtgctgctgattctcttctccacgctcgccatcagcgcgctggcgggatggctgctggtgcgctatagcgcgctacccggcgccaccggggcgtggggaagttcgccgggcggcgcttcggcgatggttatcatggcccaggagtacggcgccgacgttcgactggtggcgctgatgcagtatttgcgcgtactttttgttgccggtgccgcggcgctggtggttcgcgttgcgctcggcggcgaagcccaggagatgactcagcaggtcgcctggtttcccccgataagctggcagctaccgcttacgctgctggtgacggcggcagcgggatggctggggctgcgtctgcgctttccgtccggtgcgatgcttttcccgatgctgatcggcgcgctggtgcagggagaaggctggctgcagcttgaactccctgagtggctgctggcgctggcttatgccgccgttggctggagcgttggtctaaagtttaataaacagatcttcctgctggcgttaaaaaccctgccgcagatcctggcatcgattatcggcctgattctgctatgtgcgctgatggcttatggactgacgcaggttttaccgctggactttatgaccgcctatctggcgaccagcccgggcgggctggacacggtagcgattatcgctgccggcacgcgggcggatatgtcgtttattatggcgatgcagacgttgcgcctgttcactatcttgctgaccggcccggcgattgcgcgctttatctcccgctatgcgacgcgggaataa

SEQ ID NO: 252963 - DNA, 1542 bp, Klebsiella pneumoniae
atgcgtcttgaagtcttttgtgaagaccgtcttggtctgactcgtgaattgctcgatttactggtgctgcgcggtatcgacctgcggggtatcgacattgaccctattggccgaatttatctcaatttcgccgagctggagttcgctagcttcagcagtctgatggcggaaattcgtcgtatcgccggcgtcaccgacgtgcgcaccgtggcgtggatgccgtcagaacgtgaacatctggcgctcagcgcgctgctggtggcgatgccggagcctgtgctctctctcgacaccaaaggaaaagtcgaactggctaacccggccagctgccagctgtttggccagagccaggagaagctgcgcagccatccggtcgcacagctgattaccgattttaacgtccagcgctggctggaaaatagtccgcaggagtcccacgccgagcacgtggtggttaacgggcagaacttcctgctggagattaccccggtttatctcgaaggcgaacacggcgagaaggtgctgaccggcgcggtagcgatgctgcgttcaacggtccgtatggggcgtcagctgcaaacgatgaccattcaggataccagcgccttcagccagatcctcgccgtaggcccgaaaatgcgccacgtcgtcgagcaggctcgcaagctggctatgctcagcgcgccgctgctgatcgtcggcgataccggtactggtaaagatttgctcgcccacgcctgccacctcgccagcccgcgagcggggaaaccttacctggccctgaactgcggctccattccggaggacgcggtagagagcgagctgtttggcgacgctatccagggcaaaaaggggttcttcgagcaggctaacggcggttcggttctgctggatgaaattggcgaaatgtcgccgcgaatgcagactaagctgctgcgcttcctcaacgatggaaccttccgccgggtcggggaagatcatgaagtccacgtagatgtacgggtgatctgcgcgacgcagaaaaacctggtggagctggtgcaaaaagggctgttccgcgaggatctctattatcgtcttaacgtcctgacgctctatctaccgccgctgcgcgattgtccgcaggacatcatgccgctgaccgaactgtttgtggcgcgtttcgccgatgagcagggtatcccgcggccgaaactttctgccgatttaaacagcgtattgacgcgctatagctggccaggcaacgtgcgccagctcaaaaacgcgatttaccgtgccctgactcagctggacggttttgaactgcgccctcaggatatcctgctgccggatcacgacgtctcgtcattagcggttggcgaagaagcgatggaaggctcgctggatgatatcacgcgccgtttcgagcgctcggtgcttacccagctttatcgtagcttccccagcacgcgtaaactggccaggcggcttggcgtctcgcataccgccatcgccaataaacttcgcgagtacggcctgagccagaaaaaaggcgacgagtaa

SEQ ID NO: 252964 - DNA, 1062 bp, Klebsiella pneumoniae
atgaccgaacccttaaaaccgcgtattgatttcgacggtccgctggaggtggaaaaggcgcaaattctgaaatccgctcgcgcttttgacggcgcggatgcggagaagttcgcccctgcgcgccttgacgcgccggaagaagaagagggggcggcggaagcggtagtggagtcggtgctgcggcctaagcgcagcctgtggcgaaagatggtcagcgccgggctggctatttttggcgtcagcgtcgtggcgcagggcgtgcagtggacgatgaccgcctggcaaacgcaggactggatcgccctcggcggctgcgcagccggcgcgctgattgtcggggcgggcgtcggctcggtagcgaccgaatggcgccgtctgtggcggttacgccagcgcgcgcacgagcgcgatgaggctcgggacctgatgcacagccatgcggtcggcaaagggcgtgccttttgcgaaaagctggcccggcaggcgggtctcgatcaatcgcatccggcgctgcaacgctggtatgcagcgatccacgaaacgcaaaacgatcgcgaagtggtaagcctgtacgcgcagatcctgcagccggtgctggatgcgcaggcgcggcgtgagattagccgctcggcggcggaatcgacgctgatgattgccgtcagtcccctggcgctggtggatatggcgtttatcgcctggcgtaatttacgcctcatcaaccgcatcgccactctgtacggtattgagctcggctactacagccgcctgcgcctgttccgtctggtgctgctgaatatcgcttttgccggcgccagcgagctggtgcgggaagtcgggatggactggatgtcgcaggatctggcggccaggctatcggcgcgcgcggcgcaggggattggcgccgggctgttgaccgcgcggctgggtatcaaggcgatggagctctgccgcccgctgccgtggatcgccgatgataaaccgcggctgggggacttccgccgcgagctgatcggccagctaaaagagacgttgcaaaagagcaaaagcggcgcggaaaaataa

SEQ ID NO: 252965 - DNA, 1398 bp, Klebsiella pneumoniae
atgaagcgactcaaaacagaatttaatgcgctggtgaatcgtggggttgaccggcatctccgtctggccgtcaccggtcttagccgcagcggcaaaaccgcgtttatcaccgcactggtcaatcagctactgaatatccacgccggggcacggctgccgctgcttagcgcggccagagaagaacgcctgctgggcgtcaagcgcgtcccgcagcgggattttggcattccgcgttttacctatgacgaagggctggcccagctctatggacaacctccggtctggccgacgcccacccgcggcgtcagcgaaatccgcctcgctctgcgctatcgctctaacgattcgctgctgcgccattttaaagagacttcgacgctctatctggagattgtcgattatcccggcgagtggctgctggatctgccgatgctggcccaggattacctgacctggtcacgacagatgaccggactgctgcaggggcagagggcggcgtggtcggcgcgctggcggcagctttgcgaagggctggatccgctggcgcccgccgatgaaacccgtctggcggagatcgccgcggcgtggaccgattatctgcacagctgtaagcgcgaagggatgcattttattcagcccgggcgctttgtgctgcccggcgaaatggccggcgcgccggcgctgcagttcttcccctggccggacgttgatgccgccggtgaggctaagctggcgcaggcggacaaacagaccaatgccggaatgctgcgcgagcgttttaaatactactgcgagaaagtggtgaaaggcttctacaaagatcattttctccgcttcgaccggcagattgtgctggtggactgcctgcagccgcttaacagcgggcctcaggcgtttaacgacatgcgtctcgcgctgacgcagctgatgcaaagcttccactatggccagcgcacgctgttccgtcgtctgttctcaccggttatcgataagctgctgttcgccgcgaccaaagccgatcacgtcaccgtcgatcagcacagcaatatggtatcgctgctgcagcagctgattcaggatgcctggcagaacgcggcgtttgaaggcatcagcatggattgcctgggtctggcgtcgattcaggcgacgcagagcgggcttattgaggtgaacggggagaagatccctgcgctgcgggggcatcggctaagcgacggacagccgctgaccgtctatcccggcgaagtgcccgcgcgcctgccgggtcaggccttctgggagcagcagggctttcagtttgaaaacttccgcccgcaagtgatggatgttgataaaccgctgccgcatattcgcctcgacgcggcgctggaatttttgatcggagataaattgcgatga

SEQ ID NO: 252966 - DNA, 315 bp, Klebsiella pneumoniae
atgcgaaaattgtttctgggtttagcgctggcgatggctttacccgccttcgcggcggagcactggattgacgtccgcgttccgcagcagtatcaaaaagaacacgttgacggcgcggtgaacataccgctggcggatttaaaatcgcggattgcggctgaagtgccggataaaaacgataccattcacgtctattgtaacgttggccgacagtcgggccaggctcagcagctgctgagcgaaatgggctacacgcaggtggtgaatgccggcggcctcagtcaaatagcgatgccgaaaagcgccagccactaa

SEQ ID NO: 252967 - DNA, 231 bp, Klebsiella pneumoniae; identical to SEQ ID NO: 177065

SEQ ID NO: 252968 - DNA, 360 bp, Klebsiella pneumoniae
atgggcggactggatctgagtaaaaaactgtggcgcattccacagcagggcatggtcaaaggcgtttgcgccggtatcgcgcagtacctggacgtgccggttaagctggtgcgcctgattaccgtactggcaatgatttttggcctgttcctgtttgtggtggtggcctacatcattctctcgtttgcgctggatcctatgccggaaagcgagctgtatggtgaaaaaacgccgagcagcggagagctgctggctgctgcggataaggagctggctgcaggggaacgccgtctgcgtgaaatggaacgctacgtcacctctgacaccttttcgctacgcagtcgttttcgccagctataa

SEQ ID NO: 252969 - DNA, 225 bp, Klebsiella pneumoniae
atgagcatgctttttctcgccatccctttgacgttgtttgtgctgtttgttttgccggtctggctttggctgcattacaacaaccgcaccgccagcggcagtttatcgcaaaacgagcagcagcgcctgctgcagctgaccgatgacgcaaagcgcatgcgcgagcgtattcaggcgctagaagccattcttgacgctgagcatccgaactggagagaaaaataa

SEQ ID NO: 252970 - DNA, 669 bp, Klebsiella pneumoniae
atgggtattttttctcgttttgccgacatcgtgaacgccaacattaactctctgctggagaaagcggaagatccgcagaagctggttcgactgatgatccaggagatggaagacacgttggttgaagtgcgttcgacctcggcgcgggcgttggctgaaaagaaacagctgacccgtcgtattgaacaggccgttgctcagcaggcggaatggcaggagaaagccgaactggcgctgcgtaaagagaaagaggatctggctcgtgcggcgctgatcgagaagcagaagctgaccgacctgatcgctagcctggaaaatgaagcgcagctggtcgatgaaacgctggcgcggatgaaaaaagagattggcgagctggagaataaactgagcgaaacgcgcgcccgccagcaggcgttgatgctgcgccatcaggccgcaagttcctcccgcgacgttcgtcgtcagctggacagtggcaagattgatgaggcgatggcgcgctttgaatcgtttgaacgccgtatcgatcatatggaagccgaagccgaaagccaccgcttcggaaaagataaatcgctggatcagcagttcgccgatctgaaagcggacgatgaaatcagcgagcagctggcggcgttgaaagccaaaatgaatcaaaataaccagtaa

SEQ ID NO: 252971 - DNA, 975 bp, Klebsiella pneumoniae
atggcggaatacaaggacaacctgctcggcgaggccaacagcttcctggaagtgctggaacaggtctcaagactggcgccgctcgataaaccggtgctggtgattggcgaacgcggaaccggcaaagagctgatcgccagccgcctgcacttcctctcttcccgctggcaggggccgtttatctcgctgaactgcgctgcgctgaatgaaaacctgctcgattccgagttattcggtcatgaagccggggcatttacgggggccagtaaacgccatccggggcgcttcgagcgcgccgacggcggtaccctgtttcttgatgagctggccaccgcgccgatgctggtgcaggaaaagctgctgcgcgtgattgagtatggcgaactcgagcgcgtcggcggcagccagccgctgcaggttaacgtccgcctggtgtgcgcgaccaacgccgatctgccacaaatggtggaagatgggctctttcgcgctgacctactcgacaggttggctttcgatgtggtgcagttgccgccgctgcgcgaacgccagagcgatattatgctgctcgccacccagtttgctatccagatgtgccgcgaactcggactgccgttgtttcccggctttagcgaacgcgccgccatgacgctgcagaactaccgctggccggggaatatccgtgaattaaaaaacgtggtggaacggtcggtttaccgtcacggcagcagtgaaagcgagctggataatattattattaaccccttccgccagcagcaaactgccccgcccgctgcagcagaaaaggcgcccggccccacgctgccgctcgatttgcgcgctttccagcaggagcaagaaaaaagcctgctcgagagaagccttgagcaggcgaagtacaatcaaaagcaggcggccgaactactggggctaacctatcaccagctgcgggcgctgctgaaaaagcatcagctttga

SEQ ID NO: 252972 - DNA, 1170 bp, Klebsiella pneumoniae
atgacacacccgattattgaggcattacaggttaatgaggcgcagtttgtcgctcttcgtcgccgtttccaccagcagccggaaatcggttttgaagagcataaaaccagcgaagaggtggcccgactgctcggcgagtggggctatcaggtccatcgtggtctggcgggaaccggcgtggtcggtaccttacgcgcaggcgacggtcaaaaacggttgggacttcgggcggatatggacgcgctgccgatgcaggagatgagcggcaaagcgtgggccagccagatagaggggcgttttcatggctgcggccacgacggtcataccaccacgctattgtacgccgcggaatatctggcgcgcacgcggcagtttaacggcacgctgcagcttatttttcagccggctgaggaactgctctacggcggccgggttatgctcgaagacggcctgttcgaccagttcccctgcgatgccatttttggcctgcataatatgccgggacaaccgttaggcaaaatcggtctgcgcgacggggcgatgatggcctcatccgacactctccatattgaagtcaaaggggttggtggacacggcgcgctgccggagcataccgtcgacgctacgctggtggcctgccatatcaccctggcgttgcaatccattgtctcccgcaatatcacgccgtttgagccggctgtcgtgaccgtgggcagcatccaggccgggcatgcgccgaatattatcaatgacaaggccttaatgaagctcactgtgcgcaccttaaacgaacaggttcgcgagaccgtactgcagcgcattcacgatattgccgtcgctcaggccgagagctttaacgccagcgccgccattacccacgttaacggcagcccggttttaagaaacgatccggcagccaatgagatggttcggaaggtggcgacttcgctatttggcgaggagctggtcggcgaagtgaagccgtttatgggcagcgaagattttgcttttatgatcgagcgtaatccgaacggctgctatttcaccatcggagccggggatgaggcggatcgctgtatggtgcataacccgggatatgacttcaacgatgccctgttgctaaaaggcgccgcgctgtggtgcgccctgacggaacactatttgcgttaa

SEQ ID NO: 252973 - DNA, 2313 bp, Klebsiella pneumoniae
gtggatcatcattcaggcgactttcaggttacggttcgcgatatccgccagttgagccagcaggaaaacgagacgctgacgctactatggctgcttgagggcagcgtcgaactccgcgatggcgagtcgggccggaacctgcaggctgatgaactggcgatagtgaatcgccatcgcccctggagcctgcacagcaagacggcgaacgtcgtgatggcgctgtcgctgaacgctggatggctgacccgcctcgacggcgatttttttgcctctgcctaccagagcagcaacgaaacccgcgatgccgaagataccctgcgctacctgatgcgccagctgctggtcctcggtctggtcaatccgcaggcccactaccggctggaggccaaccgctggcttagcgaaattgctcttctgctggcgtcacgcttcagccgtcccctcaccgcccaggcgcctcgcggagccgaacgctggagtcagcgaataaatcgggtagtggcgcgaatcgacgccaactatcaacggcgcctgtcgctgcaggagatagccgccgccgaatttgtttctgaggcatggctatcgcgtctgttccgcaaagaggtgggcgtcagctttatgcaatacatcaccgggcttcgcctgcgtaaagctgctgagcagttgacgatgacgcgtaaatcgatacagcagatcgctcagcaacagggctttgccagcagccgggtgatgagcgacctgtttaaacgcgaacacggtctgacgccgcgccagtttcgccagcagcatccgcaaacggcggttgaatcccctcgtccacgcgttcaacgggctgagctgtggcaaccagtgtctatagacaggctatattcccggctcaatgcgccgcagatcaatgggttggatagcccgccgctgcggctcaatccccagcaaacccgtcatcttgatatgcgccagctaccggcgcgcggtacgccgctgcggcacacgcgcatcgtcgttaccgttcgggaactggatgacctgctgcgcgaggatgtccgccaggagctcgaagaactgcacaactcgctgccgatattcgccatcgacgttcacgatccgtttctcagtagccgcctgttcggtaccggctgggacgatgcgcagctggccgggtatgcctgctggtataacctgcagcgcatttttagctggctggcgtcgatgggctgggcagtaatactgcataccggtatcaccacccgcggcgatctgctacagcgttttctgcgcctgtccgccaaccattttccaccggcaaccctcgccagctggcgttttgtctggcactggtccccgcaggccagcgatgaggcgcgccagcatgcctggcggcaacaaaaaacgatcctccaggcgctttcgccgcagtcggcgctggggatctggcaccgtttttcacaaaacatggaggacgatcccctcctctgttcaccgctgctggccgaggcggattttcttgcctgccaggcagatgcgaatgaactgctggatctggcgcagattgatagccagaggctggccgccagcgagaattacccggtgcttaaaatgcgcaagctccacagcgcgctgcgccagcggcagctgctgttaccgctttggctactgtcgtggaataccctgaccggcgatactcgcgacaccaacggccgtttctttcgcggcgcgctactgatggataatctgctggggctggcagaccaggtgtggctggcggggttctggctgaattccgggctgcagggggaggctggcgctaacggcaagcttgatacctccagcctggcgctgcactatctccacggtttgccgcgaccggtgtattgggtcttgtggctgtggcgcaggctgcggggcgaagtggtgattaacgaaaaaaatttgctgctgctgcgcgataacggccattaccagttgctgctgcgcaatacggtggttttcaatccctggctttccagcgaggaggcgtttatccagcgctttagtcagccatggagcgtgcgcctgctcggccttgatggacgctggcgcatcaaacatcatctcttcgatcggcatcatggcgcgctctttccgcttttcgaggcttttcgcagccagagtggcccggatgaagaagagtatcgctggctgatgcaccaggcgcgcccggccctgcgcgtgagcgaagaaacgcccgcaagcgatcgctggcagctcgtcgattcgctggagagcaacgcgctggcgctgtatgaatttacgccacttaatgacatgaagtga

SEQ ID NO: 252974 - DNA, 285 bp, Klebsiella pneumoniae
atgattccggttaattcctcaacgcttggccgctatgccgcgcatgtcagcctggttcataccatgaaaagccacaaagccccggcgctcacggtcatgatgatcttttcagacctgcttattcgttcaaccgaagattcctatcgtctgcaaggctgggaaatcacgccgcaaaaaagcggcctggtgctgcgtacgtatgtcgcgaaccatcctgatggcggaaagcttgaaatcaccccaaaagactatattgcacgttataaccggctcctgccgctgtag

SEQ ID NO: 252975 - DNA, 1644 bp, Klebsiella pneumoniae
atgcgcctgaaattgtcttctctcctggcagcggtgtctatgctgtacgggcaagcttttgccgcgcccgccctgcctgctaacgcggatattcgcgatagcggttttgtttattgcgtaagcggccaggttaacaccttcaacccacaaaaggtcagcagcggtctgattgtcgatactcttgccgcccagctgtacgatcgactgcttgatgttgacccctatacctaccgcctggtcccggaactggcagaaagctgggaggtgctggataacggcgccacctaccgcttccacctgcgcaataacgtgccgttccagaccaccgcctggtttaagccgacccgcaatttcaacgctgacgacgtgatttttacctttggccggatttttaaccgcgaccatccgtggcacaacgtgaacggcggcaacttcccctatttcgatagcttacagttcgccgacagcgtcgaaagcgtgcgtaagctggataaccacaccgttgaatttcgcctcaaacgaccggatgcttccttcctgtggcacctggctacccactacgcctcggtgatgtcggcggagtatgccgcaaagctggcccagagcgatcgtcaggagctgatcgatcgtcaacctgttggcaccggcccgttccagcttgaggaataccgcagcgggcaatatattcgtctgcagcgccacccggcctactggcgaggtaaaccgctgatgccgcaggtggtggtcgatctgggctccggcggtaccggacgactgtcaaaactgctgaccggcgagtgtgatgtgctggcctggccggctgccagccagctctctattctgcgtgacgacccgcgccttcgcctgaccctgcgcccgggaatgaacatcgcctggctggcgttcaataccgctaagccgccgctcgataatccggaggtccgtcacgcgctggcgttggccatcaataatcagcgtctgatgcagtcaatctattacggaacggcggaaaccgcagcttcaatgctgcctcgcgcctcctgggcctatgataacgacgccagaatcaccgaatataatcctgcggaagctcgcgccaggcttaaagcgctggggctggaacagctgacgcttaaactatgggtcccgaccagttcgcaggcctggaaccccagccccctgaaaaccgccgagcttatccaggcggatatggcgcaaattggcgtgaaggtgatcattgtgccggtcgaagggcgttttcaggaagccagattaatggatatgagtcatgatctgacgctttccggctgggcaacggacagtaacgatccggacagcttcttccgtccgctattgagctgcgcggcgattgcctcacaaaccaactatgctcactggtgtcatcgtgaattcgacgacgtactgcaaaaagcgctgacatcccagcagctggcttcgcgcattgaagcttataaagaggcccaacgcattcttgctgatgaactgccggtactgccgctggcttcctccctgcgtcttcaggcctatcgttacgacatgaaaggcctggtgctgagtccgtttggcaacgcctcttttgccggcgtctcgcgggaaaaagaagacgaggtgcaaaaaccatga

SEQ ID NO: 252976 - DNA, 966 bp, Klebsiella pneumoniae
atgattatttttaccctgcgtcgcctgctgctgctgctgattacgctctttctgctgacgtttgtcggttttagcctgagctattttacgcctcacgcgccgctgcagggcgcctcgctgtggaacgcctggtggttctggtttgagggcgtgctgcactgggattttggcgtctccagcatcaacgggcagccgatctccgagcagcttaaagaggtattccctgccacgatggagctgtgtatcctcgccttcggcttcgcgctggtgatcgggatccccgtcggcatgctggcggggattatgcgcaacaaatggcaagataccctgattagcgccctggcgctgctgggcttctcgatccccgtattctggctggcgttgctgttgaccctgtttttctccctcaccctgggctggttcccggtctccgggcgcttcgacctgctgtacgaagtaaaatcggtcaccggctttgcgctgatcgacgcgtggctttccgattcgccgtggcgtcatgaaatgatcgtcagcgcggcgcgccatatggtgctgccggtgctgaccctcgcagtggcgccgacgacggaagtgatccgtctgatgcgcatcagcactagcgaagtgtacgacaccaactatgtcaaagctgcggccacccgtggcgtatcgcggcggacaattttacaccgtcacgtactgcataacgccctgccgccggtgattccgcgcctgggtctgcagttttccaccatgctaacgctggcgatgattaccgaaatggtctttagctggccgggactgggccgctggctcattaacgccattcgccaacaggactacgccgcaatctcagcgggcgtgatggtcatcggcgcgctggtgattattgtgaacgtgatatccgatattttgggggctatggctaacccactgaaacataaggaatggtatgccctacgatag

SEQ ID NO: 252977 - DNA, 993 bp, Klebsiella pneumoniae
atgccgttactcgatatccgaaatttaaccattgaattcaaaaccaacgaaggttgggtgaaagccgtcgatcgcgtcagcctgaccctcgctgagggggaaattcgcggcctggtcggagaatccggctcgggtaaaagcttaattgccaaagcgatttgcggcgtcaccaaagacaactggcgggtgaccgccgaccgtatgcgtttcgacgatatcgatctgctgcgtctctcagtgcgcgaacggcgtaaactggtgggccacaacgtctcgatgatttttcaggagccgcaatcctgtctcgatccttccgaacgtatcggcgaacaactcacgcagaatatccccggctggacctttaaaggccgctggtggcaacgttttggctggcgcaagcggcgcgccattgagctcttgcaccgcgtggggattaaagaccataaagatgcgatgcgcagcttcccctacgagctgacggatggtgagtgtcagaaggtcatgatcgccatcgcactggctaaccagccgcggctgctgatcgccgatgaaccgactaacgccatggagccgacaacacaggcgcaaatcatccgcctgctgacgcggctgaaccaaaacaacaacaccacgattttgttgatcagtcacgatatgcagatgctcagtaaatgggcggacaaaattaacgtcatgtactgcgggcagacggtggaaaccgcgccgagcgaggagctggtgacgattcctcatcatccctatacccaggcgctgattcgggcgattcccgatttcggcagcgccatgccgcacaaaagtcggctcaataccttgccgggcgctattccgctgctcgaacagctgcctatcggctgccggctcgggccgcgctgcccttacgcccagcgtgaatgtatcgaaacgccccggctggtgggcgcgcgcaaccacctctatgcctgtcacttcccgctgaacatggagaaagagtga

SEQ ID NO: 252978 - DNA, 810 bp, Klebsiella pneumoniae
atggtcgaaacattgcttgaagtacgcaatctgagtaagacctttcgctaccgcaccggctggtttcaccggcaaacggtagaggcggttaagccgttaagctttaccctgcgcgagcgccagactctggcgattatcggcgaaaacggctccggcaaatcgacgctggcgaaaatgctagccgggatggtcgaacccagcacaggcgaactgctgattgatgaccatccgctggcgtttggcgatttctctttccgcagccagaagattcgcatgatttttcaggatccgtcgacctcgctcaatccacggcagcgaatttcgcaaatcctcgatttccctctgcgtctcaataccgacctcgaacccgaggcgcgacagaaacagattatcgaaacgttacgcatggttggtctgctgcctgaccacgtcagctattatccgcatatgctggcaccgggccaaaaacagcgtctgggcctggcgcgggcgctgatcctgcgcccgaaagtgatcgtctgcgatgaagcgctggcgtcgctggatatgtcaatgcgttcccaactgattaacctgatgctggagctgcaggaaaaacagggtatctcctacatttacgttacccagcatttgggcatgatgaagcacatcagcgatcaggtgctggtgatgcaccagggtgaagtggtcgaacgcggcagcaccgccgacgtactggcctctccgctgcacgatctgacaaaacgtctgattgccggccatttcggcgaggcgctgaccgccgatgcctggcgtaaagacggtaaataa

SEQ ID NO: 252979 - DNA, 543 bp, Klebsiella pneumoniae
atgattgttccggttcagttttctaccctgccggtcacgccgtggaaaaacggcggtggggaaacgcgtgaaattgtcagcgttgcctcgccagatgcgccgtttctctggcgcgccagtatcgctacgctggaaaaggatggcccgttttctccttttcccggcgttgaccgggtcatcacccttcttgagggccagccgctgtggctacggggcgacaatattgctcagcgcctgatgctctggcagccatgggcttttgccggcgaatggcctcttgccagcgaaggcattagcggacgcggtctcgatttcaatattatgacccagcgcgcgcgtgccgcctcgcgggttatcgtcgtcgctgagccgcagcggccaggcgcggagggtatcgcatgggttctgcggggacactggcggatggcggatacgatttaccaggccggctcggggatctggtggcagaatcaaccgcctggcgagctgatcccgcactctgaggacgcccggcttttactggcggaaatcgagcgccgctaa

SEQ ID NO: 252980 - DNA, 789 bp, Klebsiella pneumoniae
atgggttttctttccggtaagcgcattctgttgactggccttgccagcaaactgtccatcgcctggggcatcgcacaagcaatgcaccgtgaaggggctgaactggcgttcacctatcagaacgaaaaactgaaaggtcgtgtggaagaatttgccgccgcgctgggttctaacattgtcctgccgtgcgatgtggcggaagacgagagcatcgagtctctgttcaccgagcttgcaaaagtatggcctaagtttgacggtttcgtacactctatcggctatgctccggcagatcagctggacggcgactacgttaatgcggttacccgcgacggtttcaaaatcgctcacgatatcagcgcctacagttttgtggcgatggcgaaagcctgccgcggtatgctgaacccgggctccgccctgctgacgctctcctacctgggcgcagagcgcgccatcccgaactacaacgtgatgggtctggcgaaagcctccctcgaagctaacgtccgctacatggctaacgccatgggtccggaaggcgtgcgcgttaacgccatctctgccggtccaatccgtaccctggcggcttccggtatcaaagatttccgtaaaatgctggcgcactgcgaagcggtcactccgatccgtcgcaccgtcaccactgaagacgtgggtaacagcgcagcattcctgtgctccgacctgtctgccggcatctccggcgaagtcgttcacgttgacggcggcttcaacatcgccgccatgaacgagctggaaatcaaataa

SEQ ID NO: 252981 - DNA, 1149 bp, Klebsiella pneumoniae
atggagcaacgccgcgtttacggcaaaaaccactggtatcatgagacccagtcaacaatctgcccggtggatgtattgccgctcgtccctgaagccgcccatgtcgaagatcgttttctcctcgatctcacgctacctgaagatctgcttaaggcgcatgcgcgctggctggcacccgccagacggctggctgatgccctgttccccgcttctgtgagcgtaaatcgtctacagacgtttagcgcctatgaccggcttagcacggcgctgaccgtcgcccaggtttatggtgttcagcggctatgcaatcactacgcagcccgcctggcgccgcttcccggcccggactcctcgcgtgaaagcaatcgacgcctggcgcaaattacccaatacgcccgccagctggcgagctctccttcactgatcaacgcgctctcccgcagccagcttgacgaagtcggcctgaccagtcgcgacattattcttatcaatcagattattggctttatcggcttccaggcgcgcgctatcgccgcctttcacgccgcgctgggttacccggtgcgctggatccccgggatgccgcagcaggaagatgcgccagaggcgcttttcgttgcccgagagagcgactggcggcccggactcgaggactcagatttacgctatgccgatgatgagcgtcagtcgctgctggcaaaatggcaaaagtatcccggcctgtttgaactggcgccgctgctggcgacccaggaaccgccgctggatctgcaggaactgctcctgagccacctcagcgatcagccgccgttcgccgcgcaggtggcgctgatcgcagcgcggattaacggcagcatcagctgcttcaacgcctgggcctcgcgatgtccggattttgccgatgctttacgcggtatcgttcctgacgcgcagtcgcgcagagaagagcatgtcatcgagcaccggcttttacagtccgtacagcttttaacccgctcacctgaccgttttagcgccgcccacctaagcccattgacggaatgcgggctttcccgcaccgccgccatcgatcttctcgcctggtgcgggctatgcggttggatgaatcgtctgaaaatcgccctcggcaatggatgtcagcagacgtaa

SEQ ID NO: 252982 - DNA, 183 bp, Klebsiella pneumoniae
atgtcagatctgaatgctcgcctgctcgcccaacgtatcgataccgtgctggatattctggttgccggggattatcactccgcgatccataacctcgaaattctgaaagctgaactccaggcgctttcgaacgacgaacaggaaaacaaacccggtcagcctaaggccccgtgggaaatttga

SEQ ID NO: 252983 - DNA, 720 bp, Klebsiella pneumoniae
atggtcatcgataaaggccgtatgagcgtggccgatctcgcgaaaatgaccggtgtctctgaagtcaccattcgccaggatttaaactcattagaaaagcagagctacctgcgacgtacccacggcttcgccgttccgctggacagcgaagatgtggaaacccgcatgatgacccatttcgccattaagcgagagctggctgcgcgggccgctacgctcgtctcctccggggaaacggtatttatcgaaaacggcagctgcaacgccctgctcgcccgtacgctcgccgagcgcggcgatatcactatcatcaccgtcagcagctatatcgctcacctactgaaagagacgcccggagaagtgatcctgctgggtggaatctaccagaagcgcagcgaaagcatggttggtcctctcacgcggcagtttattcagcaggttcacttcagcaaggcctttatcggcatcgacggctggcaggccgaaaccggatttaccggacgagatatgatgcgcgccgatgtggtgaacgcggtgcttgaaaagggctgtgaggcgattgtgctgagcgatagctcgaagttcaacgttgtgcacccatatccgctcgggccgatcggccgattcaaccgcattattaccgacgacaatctaaacgatgccgtgcataaccagttaacgcagtgcggcttaaccgtaaatatcgtcaaccatccctga

SEQ ID NO: 252984 - DNA, 222 bp, Klebsiella pneumoniae
atgatgacttcaatgaacaaaaaaatggccgctgtggttctggccgtcactgttgcaatgtctctgagcgcttgttcgaactggtctaaacgcgatcgtaataccgctatcggcgcaggcgccggtgcgctcggtggcgcggtgcttaccgatggcagcaccctgggtaccctgggcggcgcggcagtcggcggtattattggccaccaggtaggtaaataa

SEQ ID NO: 252985 - DNA, 327 bp, Klebsiella pneumoniae
atgagcgattccaatagccgactggtgtactcaacggacagcggtcgtattgatgaacctaaaccggtacaagcgcgcccgaaaggggacggtatcgtgcgcatccagcggcagacaagcggtcgtaagggtaagggcgtctgcctgattagtgggattgatgaaaatgatgaagcgctggctaaacttgccgccgagctgaaaaagaaatgcggctgcggtgggtcggtaaaggacggtgtgattgagattcagggcgataagcgcgagctgctaaaaacgcttcttgaagccaaaggaatgaaggttaagctggctggcggttaa

SEQ ID NO: 252986 - DNA, 738 bp, Klebsiella pneumoniae
atgacgtctactgctacatcttcttcccgcgttgtcacatcctctcccgtcgtcgttgctcttgattatgataaccgtgataaagcgctggcgtttgtcgaccgtatcgacccgcgcgactgtcgcctgaaggtgggtaaagagatgtttactctactggggccgcagtttgttcgcgacctgcatcagcgcggtttcgaagtttttctcgatctaaaatttcacgatattccgaataccaccgcccgcgcggtcgccgcagcggctgagctcggcgtctggatggtcaacgttcacgcttccgggggggcgcgtatgatgaccgccgcacgtgaagccttgcaacctttcggcaaagacgccccgcttttaattgccgtcaccgtgctaaccagcatggaagccagcgatctacaggatctggggattacgctttctccagccgactacgccgcgaagctggcggagctgacccagcgctgcggtctggatggcgtggtctgctcggcgcaggaagcggttcgctttaaacaagaacggggccaggcgttcaggctggtgacgccgggcattcgtccacaaggcagcgacgccggcgaccagcggcgaattatgacgccggagcaggcgcaggcagctggcgtggattatatggtcattggtcgcccggtcactcagtctgccgatcctgccgctacgctgcgcagcatcaacgcatcgttgaataaggaggcatga

SEQ ID NO: 252987 - DNA, 768 bp, Klebsiella pneumoniae
atgctgttgattgccagacgaaccgccgttggcgcggccctgctattgattatgcctgctgtggtgtggatttccggctggaaatggcatccggaactgtcggcaggcatgatgaagctgctgtactgggtgaccgagacggtgacgcaaccctggggcatcatcacgcacgttattttatgcgcctggttcctgtggtgtctgcgatttcgtctgcgcgccgcggtagtcctgttcctgattctgggcgccgcgatcctgctgggccagggtatgaagtcgtggattaaagaccgcgttcaggagcctcgcccctttgtcatctggctggaacaggcccggcaggtgccggtcacccaattctacaccttgaaacgcaaagaacgcgctaaactggtgcatgagcagctggcccaggagcagcaaattccgcactttttgcgtaagcactggcaaaaagagaccggcttcgctttcccttctggtcacaccatgtttgctgccagctgggcgctgcttggcgtaggtctgctgtggccccggcgtcgttgggtaaccatggcgctgctgctgacgtgggccgtcgcggtgatggggagccgcctggcgctgggcatgcactggccgcaggacctgatcgtcgcgacgctcatttcctggctgctggtgaccctggcgacctggcttgcccagcggttctgcggtccgctatcgccgccgggtgaagaggcgcaggatattaaaaaaagggcggcagcgccggaatag

SEQ ID NO: 252988 - DNA, 591 bp, Klebsiella pneumoniae; identical to SEQ ID NO: 175141

SEQ ID NO: 252989 - DNA, 2673 bp, Klebsiella pneumoniae
atgtcgtcaaccctacgagcagccagcaaggatacgcttcaggttaaagataaaacctggcattactacagcttaccgctggccgccaaagaactgggcgatctctcgcgcttgcccaaatcacttaaagtgctactggaaaacctgttgcgctggcaggacggtgattccgtcaccgccgaagatattcatgcccttgccggatggctggagcatgcccatgccgaccgggaaattgcctaccgtccagcgcgcgttctgatgcaggacttcaccggtgttcccgccgtcgtcgatctggcggcgatgcgcgaagcggtaaaacgcctgggaggcgacaccgccaaagtgaacccgctttctcctgtcgacctggtcattgaccattcggttacggtagaccgtttcggcgatgatgatgcctttgaagaaaacgtccggcttgagatggagcgtaaccatgagcgctatgtcttcttacgttggggacaacaggctttcagccgcttcagcgtggtgccgccgggcaccggaatttgccaccaggttaacctggaatatctcggtcgggcggtatggggcgaacagcaaaacggcgagtgggtagccttcccggacacgctggtcggtaccgattcacataccacaatgattaacggtttaggcgtactcggctggggcgtgggcggtatcgaagcggaagccgccatgcttggacagccggtatccatgctgataccggacgttgtcggctttaagctgaccggcaagctacgtgaaggcatcaccgcgacggacctggtcctgacggtcactcagatgctgcgtaaacatggcgtagtaggcaagtttgttgaattctacggcgatggcctcgattccctgccgctggcggaccgtgcgactatcgctaatatgtcgccggagtatggcgcaacctgcggcttcttcccgattgatgcggtcacgcttgactatatgcgcctgaccgggcgcagtgaagagcaggtggcgctggtggaagcctatgcgaaagcccaggggatgtggcgtcagcccggagatgaaccggtcttcaccagtacgctggcgctggatatgggtagcgtcgaagccagtctggcagggccgaagcgtccccaggatcgcgtggctctcggcgatgtgcctcatgcctttgctgccagcaccgaactggaggtgaaccacgcgcagaaagataaacgaccaatcgactataccttaaacgggcagcagtactcgctaccggacggggcggtggtgattgccgcgatcacctcctgtacgaatacttccaaccccagcgtgctcatggccgctggcttgctggcgaggaaagctgtcgagctgggcctcaaaccgcagccgtgggttaaagcatcgctggcgccgggatcgaaggtggtttccgactatctggcccatgcaaagctgacgccctatctggatgagctgggatttaacctggtcggttacggctgtaccacctgtatcggtaactctgggccgctgccggatcccattgagcgggcaatcaagcagggcgatctgaccgtcggggccgtgctttccggcaaccgcaactttgaaggacgtattcatccgctggtaaaaactaactggctggcttcaccgccgctggtggtcgcctacgctctggcgggtaatatgaatcttgacctgacgcgtgaaccattagggaccggtaaagagggtcagccggtgtatctgaaagatatctggccgagcggcagcgaagtggcccaggcggttgagcaggtctcaacggagatgttccgcaaagagtacgctgaagtatttgaagggaccgccgagtggaaggcgattaaagtggatcgctctgatacctacgactggcaggatgattcgacctatattcgtctgtcgcccttctttgatgaaatgggcgttgaacctgaaccggtggaggatattcatggcgcgcgcattctggccatgctgggcgactcggttaccaccgaccacatctcaccggcgggcagcattaaagccgacagtcctgcggggcgttatctgcagaatcacggcgtcgaacgcatcgactttaactcctacggctcacgtcgcggcaaccatgaggtgatgatgcgcggcacctttgccaacatccgtatacgtaacgaaatggtgcccggcgtggaagggggaatgacccgccatcttccggatagccagcctattgctatctacgatgctgcaatgctctataaagcggagggcacgccgctggcggtcattgccggcaaagagtacggttccggctccagccgcgactgggcggctaaaggcccgcgtttgctgggcgtcagggtggtgattgccgagtcattcgagcgtatccaccgctccaacctgattggtatggggattctgccgctggagtttccgcaaggggtaacgcgcaaaacgctggggctgaacggcgaggagcggattgatatcagcaacctgcaggctctacagccaggtatgacggtaccggtcaagctcacccgcgcggacggtagtcaggaggtcattgagtgccgctgccgtatcgataccgcgactgagctgacctactatcagaacgacggtattttgcactatgtgatccgcaatatgctctaa

SEQ ID NO: 252990 - DNA, 168 bp, Klebsiella pneumoniae; identical to SEQ ID NO: 175139

SEQ ID NO: 252991 - DNA, 975 bp, Klebsiella pneumoniae
atgaaactacagcagctccgctatatcgttgaggttgttaaccataatctgaacgtctcctctactgccgaaggtctgtatacctcacagccgggcatcagcaagcaggttcgcatgctggaagatgagctgggaattcagattttcgcccgcagcggcaaacatctgacccaggttactcctgcgggccaggagatcatccgcatcgctcgcgaagtactgtcgaaggtggatgcgattaaatcggtggccggagagcacacctggcctgacaaaggttcgctgtacgtggcgaccacgcatacccaggcgcgctacgcgctgccgggggttatcaaaggttttatcgaacgctatccccgcgtctcgctgcacatgcatcagggctcgccaacgcaaatcgccgaggcggtgtcgaaaggtaatgccgacttcgctatcgctacggaagcgcttcatctctatgatgatttggtcatgctgccgtgctatcactggaaccgttccgtggtcgtgacgcctgaacatccgctggcgtcgcgagagtcggtatcgattgaagagctggcgcagtacccattggtgacctacaccttcggtttcaccggtcgttctgaactggataccgcctttaatcgcgctggtttaaccccgcgcatcgtgtttaccgcgactgacgccgatgtgattaaaacctatgtccgcctggggcttggggtaggggtaatagccagtatggcggtcgacccggtttccgatccggacctggtcaagctggacgccaacgatatattcagccacagtaccaccaaaataggcttccggcgcagcaccttcttacgaagctatatgtatgattttattcaacgatttgcaccgcatctgacccgagacgtggtcgataccgcggtcgctctgcgctcaaatgaagatattgaggccatgttcaaagatattaagttaccggaaaaataa

SEQ ID NO: 252992 - DNA, 1092 bp, Klebsiella pneumoniae
atgtacactgtgcgccaacgtcagtggtttacacaaggtgaaaacgtggaattagttgctcaatatggcctgtttttggccaaaatcgcgaccatcgttgtcgcaattgcggttatcgtcgccattattgttaacctgactcagcgcaaaaaacagcgcggcgagctgcgggtaaccaatcttagcgagcaatataaggagatgaaggaagagctggcggtttcgttgctcgatgcgccgcagcagaagctgtggcataaagcgcaaaagaaaaagcttaagcaggaagctaaggcgtctaaggcgcgggcgaagctggggacgcctgagccggacgccaaaccgcgcgtctgggtgatcgattttaaaggcagtatggatgcgcatgaagtcagcagtctgcgcgaagagatcaccgcggtcctggcggcggcaaaggcgcgcgatcaggtggtcattcgcctcgaaagccccggcggcgtggttcacggctatggtcttgccgcttcacagctgcagcgtctgcgcgacaaacagatcccgctaacggtggcggtagataaagtcgcggccagcggaggttatatgatggcctgcgtggcgaacagaatcgtcagtgcgccgtttgctatccttggctctattggcgtcgtcgcgcaaatcccgaaccttcatcgcttcctgaagaataaagatatcgatattgagctgcatacggcaggccagtacaaacgtaccctgacgatgctgggcgaaaataccgaagaagggcgtcagaagttccgcgaagacctcaacgatacccatcgactgttcaaagattttgttcaccagatgcgtcccgaactcgatattgaacaggtagccactggcgaacattggtacggcgttcaggcgctggagaaggggcttgtggatgcggtggaaaccagcgatgagctactgttgggtctgatggataaacacgaggtgatcggcgtgcgctatcagcagcgtaagaaaatgctcgatcgttttaccggtagcgccgcggaaagcgctgataaactcctgctgcgctggtggcagcgcgggcaaaaaccgctgatgtaa

SEQ ID NO: 252993 - DNA, 762 bp, Klebsiella pneumoniae
gtgcactatcaaccgcaacgtcacctgttacaggaccgcatcatcctggttactggcgccagcgacggcattggccgtgaagccgccctgacctattcccgctatagcgccagcgttattctggtcggacgcaatgaagagaaactgcgcggcgtcgcgcaagagattgagcaggctggcggcattcccgccagctggtttactctcgacctgttaacctgcacgccgcaggagtgccagcagctggcgcagaaaatagccatccactacccgcgcctcgacggagtgctacataacgcgggtctgctgggcgacgtttgcccgatggatcaacaaaagccggaagtgtggcagcaggtgatgcaggtgaacgtgaacggcacctttatgctcacccaggccctgcttcctttattactcaaatccgaatcgggttcgctggtctttacctcctccagcgtcggccgccagggacgtgcgaactggggcgcttacgccgcgtcgaaatttgctaccgaaggcatgatgcaggtgctggccgaggagtatcaaaaccgccatctgcgggtcaactgcattaacccaggcggcacccgcaccaaaatgcgcgccaatgcgttcccgacggaagatccgcaaaaattgaaaacccccgctgatatcatgccggtatacctgtggctgatgggcgacgacagtcgtcgtaagacgggaatgacttttgacgcccagccgggccgcaaaccaggaatcgcacaatga

SEQ ID NO: 252994 - DNA, 591 bp, Klebsiella pneumoniae
atgagtgatgaacgccaccgcgaacgccagcagcgggtaaaagacaaagttgacgctcgcgtcgccgccgcgcaggaagagcgcggtatcgtgatcgtttttaccggcaacggtaagggtaaaacgactgccgccttcggtaccgtcacccgcgccgtcgggcacggtaagaaagctggcgtcgtgcagtttattaaaggcacctggccgaacggcgagcgcaatctgctcgaaccccacggcgtcgagtttcaggtgatggcgaccggttttacctggaatacgcaggatcgcgaaagcgataccgccgcatgcctcgcggtctgggagcacgggcgccgcatgctggccgatgaaagcctcgatctcgttttactggacgagctcacctatatggtggcctacgactatctgccgctggaagaggtgcttaccgcgttacgcaaccgtccggcgcagcagacggtgattattaccggacgcggctgccaccgtgaaattaccgaactggccgataccgtcagcgaactacgtccggtgaaacacgcgtttgatgccggtatcaaagcgcagatggggatcgactactag

SEQ ID NO: 252995 - DNA, 975 bp, Klebsiella pneumoniae
atgtttcctttttcagtgactcaccccggttcgctcacgcagagcggacgacagacggcgaacagcggctacgagctgattgccttcgatgccgagaagctgaacgtgtttgccgcggaggttcgctactgcgagccgcactggcatccggctcctgagctgattaccgtactggcagggcggtttacgctcgccgtcggccagcagagcctggagctggcgcagggggacatgctgtacatcaatgcggaagaggttcattccctcaacgcggaggcggcgggcagccaactggtcaccgttcagttttcgcccggcctgtttgacgaacttcacccctcgccgcagctggaatggagtacctgcggacgatcttacactgcggcggacagtgaagtgcatcagcggctggcggggttactgaaacagctgatcgacaaccctgcgccgtttcagcgtatcgccgccatttatctgttactggatgcgttagtctccgctggcaagccgacgcagcgcggcgaaagttcgctgcgcgacgaggcgatgatcaaaaaaggcatagattttatcaatcaacactttgaccagccgctgacgctgagcgaggtcgcctgccatagcgggatgagctactcctggttttcgcggctgtttaaaaaggtgagtcgctataattttaaagagtatctgacgctggtgcggctaaacaaagcccgcacgctgttgcgcgatacccgtacgccgattaccgagattagccacagctgcggatttcaggagcataaatacctgattgccgcctttaataaatactgcggcgttacgccgaccgaatatcgcaagcgcttcgtttcacggcaaaatattgtcgaaagcgaactggctccgggggaggattgcctgtgtctgccgctcaaccatgcgctgcttgagcggctggtggctagtagtcgatccccatctgcgctttga

SEQ ID NO: 252996 - DNA, 2349 bp, Klebsiella pneumoniae
atgaataacgattttaataccaccctcgccgcgatgagcatcgaagataaagtggcgctactgaccggcagcggcctgtggcgtaccgcgtcgctgccgcagcacggtatcgaagatatcattatgaccgacggtacctatggcgttcgctacagcagcgcgcagattgatggccgtgaaaagtggagcatggatgattttatttcggtcatcacccaaacagcagaccaggccagcgcggaagaacctaccgcgaaagggggaagcgaggcgctcttcagtacgtcgctcccggcgacctgctttcctaacggttccagcctggcctgcagttgggacgttgaactggtgcatcagatggggcaggcgctgggaagagagtgccagcatatgggggttgggattctgctcggaccgggcattaacatccgccgtacgccgctggctggtcgaggctatgaatattatgccgaagacccggtggtcagcggcgacattgctgctgcgctgatcaacggtctgcagcaggagggcgtcggcgccagcctgaaacactttgcggcgaacaactccgagtaccgccgtacggaaatggattcgatcattgaagaacgggcgctgcgggaaatctacctggcgggtttccagcgggcgattacaaaatcccacccgtggacggtcatgtcttcgtacaatcgtcttaacggcgtacaaacttcgcaggatccgtttttactcactcaggtattgcgcgatgagtggggatatgacggcctggtcatgtccgactggtacggtattaaagatcgcccggcatcgctgatggcgggtaacgatctggcgatgccggaaacccgccgcgataaacaaactctgctggcggctattgaatccgcagaggtgccgatggcggtggtagaccgcgcctgtctacgcatgctgaaactgctcgacaaggtccagcgccatcgccgcccggaaacgcgagccgatttcccggcgcaccacgcgctggcgcagcgcctggccggcgaatccattgtcttgctgaaaaacgaagatagtctgctgccgctgcatccggagaaaacaccgcgtattgcggtgctgggtaaaccagcccaggagccggtgatccaggggtccggatgcgcgacaacggtgccgtatctgctcgaccgcccgctggatgaaattttcgatcttgccggggacgattttagcgtctcatgggccgtaggcgcgccggacgatctgcgcagcgatgaacaggcgctgtcgcaggcctgccgggtcgctcaggaagctgacgtggcggtgattttcgtcagtaccgccgtgggtgaagatggtgaaaatggcgatcgacaggatctgaatattctgccggtgcatgaacggttgattcgcgaagtggcggcagtccagccgaatatcgtagtggtgctggcaaatagcgatgcggtggtgatgccgtggcttggcgagtgcaaggcgctgctggaaacgttttttgccggacaaggaatggggcgcgcggttgcggaaatcctcttcggccagcgcaacccttgcggtaaattgacggtgacggtgcccaatacgctggaggaaacgccggcctggctgcactatccgggcgaaaacctgcgccatcattacggagaagggctttttgtcggctatcgctattacgacaagcgttgtctgacgccgcagtttcccttcggttttggcttaagctatacccggtttgcttacgataatattgcgctctcagcctcccgtgtaggcgcaagcgagacgcttaccgtttcgttcgatctgaccaactgcggagagtatgcaggcaaggagatagttcagctgtacgtgagcgcgcctcagggagagctgattcgcgaagtgcagtcattaaaagccttcagtaaagtggcgctggccgcaggggagtgccgccgggtcagcctgcagctgcccatcggcgacctggcctgctatcatcctggcctcggcgactgggtcgtgacgccggggctctggcagatccgagtcggcggctcatcgcgggatctgccgctgacggcggaaatcgaagtggactgcccgcagcggtacgtcccgcttcgcgatgataattcgctgcagcagctgattcagcagccggaagcttttgcccgggtagtcaagttgattgccgataagagccagatgcctgcggaacaggtccgtgaaaaactgatccgcctggcgccggatttgttctgcgggctgctgattgcgctgaccgagtttctggcgctggatattgagcgcgacgaacttaacgccgtgctgacagggcgctga

SEQ ID NO: 252997 - DNA, 1362 bp, Klebsiella pneumoniae
atggatacagcaggaaaactatcggcaagctatgtggttatcggcgttaaagaaaaaataggttatggctttggtgattttgcctctaatttatcgttcggttttgtttctctgttcttactctttttctataccaacatttacggcattagcgccgtacaggcgagcctgatttttgttattgcgcgcgtggttgatgccgcttttaatattctgattggctttgccatcgataaaacccacagccgttacggtaaactacgcccgtggttgttatatggctcaattccgctcggctttttaacggtgctctgctttgtgccattcggcggtgaggcaaaattctattttgcgctgatctcctataccatttattgcctggcgtatacggcggtgaatacgccttattcggcgctgactaatcgtctgacccagcatgaagcctcccgctcatcgctatcggtataccggtttgtgctggcgattgttggctatctgattgtttccactactgccgatatgctgatttccccgtttagtgataagcaactgggctacgtctttgcggtctcttgctttgcgctgctggcgacctttttgttccttgcctgtttcggaatgaccaaagagcgcgttggcgaggaagaggaaacacccgcgccgacgctgcgggaaatgttgaaggcggtggcaggcaatgcgccgcttattaacctctcgatgtttaccgtctttttttatattgcctataccgtgtggatggcgattgctatttacttcattaaatacattattggcagcgaaggttttacgtcgaccttctttatgattcagtccgcagcgtatattgtcggcaccgttatttcggaaaaaatcattgcgctgataggtaaaaagaaaatgactttggtggcgctgttgatcggcattgtcggcgtacttatgcaatattttatcgctggcgacaatatctggctgattatgaccggggtatgcttgtatagcattacgctggggatgggctttgtttccatgtggtcaatgattgccgataccgtggaatatgccgagtggcaccatggggtgcgtaccgaaggcgccatctacggcttctttaatttcatcaccaaaatagcaatggctatcggcggcggctgtgcgggatggatgctggactattatcactatgacgcgggtaacattactgccagcgcaattaacggtattaacgtactgatgacgctattccccggcgcgatgtttgctctcagcgccatatttgtcgcgtgctattcgctggatgaaaaaacctatcgcgatattgtgcaaaaaatcagcctgcgtaaacagaacgcgctttaa

SEQ ID NO: 252998 - DNA, 888 bp, Klebsiella pneumoniae
atgagcgagaaattacaaaaagtgctggcccgcgctggccacggctcccgccgtgaaatcgaagccaaaatcgaagctggccgcgtcagcgtcgatggcaaaatcgccacccttggcgatcgcgttgaaattgtcccgggtttaaaaattcgcatcgacggtcacctgatttcggtgaaagagtctgcggaacagatttgtcgcgtgctggcttactataagccggaaggcgaactctgtacccgtaatgacccggaaggacgtccgacggtgttcgatcgcctgccaaagctgcgcggcgcgcgctggattgccgtcggccgactggacgttaatacctgcggtctgctgctgtttaccaccgacggtgagctggcgaatcgcctgatgcacccgagccgcgaagtggaacgtgagtacgcggtgcgcgtgttcgggcagatcgatgatgacaagctgcgccagctggctcgcggcgtgcagcttgaagacggcccggcggcgtttaaaactatcaagtttaccggcggcgaggggatcaaccagtggtacaacgtcacccttacggaaggccgtaatcgcgaagttcgccgcctgtgggaagccgttggtgtgcaggtcagccgcctgatccgcgtgcgctatggcgatattctgctgccgaaaggcctgccgcgcggcggctataccgagctggacctggcgcagaccaactacctgcgcgagctggtcgaacttgcgccggaaaccagctctaaggttgcggttgaaaaagaccgtcgccgtatgaaagcgaaccagattcgccgtgcggttaagcgccacagtcagatgggcaataataataacaaccgtcgctccagcagccgtaataacggtaacggttaa

SEQ ID NO: 252999 - DNA, 621 bp, Klebsiella pneumoniae
atgagccagtttttttatatccatccggaaaacccacaggcgcggttgattaaccaggcggtggacatcgtgcgtaaaggcggggtgatcgtctatccgaccgactccggctacgccttaggctgcaaaattgaagataaaggcgcgatggagcggatttgccgaattcgtaatctgccaaacggccacaactttaccctgatgtgccgcgatctgtccgagttgtcgacctattcattcgtcgataacgtcgccttccgtctgattaaaaataatacgccgggtaattacacctttatccttaagggcaccaaagaggtcccgcgccgtctgctgcaggataagcgtaaaaccatcggtatgcgcgtaccgtcaaatccgattgcccagatgctgctggaaacgctcggcgagccgatgctttccacctcgttgatgctgccgggcagtgattttaccgaatccgacccggaagagatcaaggatcgtctggagaagcaggtagacctgattattcacggcggctatctgggacaacagccgaccacggttatcgatcttactgaagacgtaccggtggtggtgcgtgaaggcgtgggtgacgtgacgccgttcctgtaa

SEQ ID NO: 253000 - DNA, 870 bp, Klebsiella pneumoniae
ttgagtaacaccaactacgcagtgatttacgacctgcacagccataccatcgcctctgacgggcgactgactccagaagaacttgtccatcgcgcgcatcagatgcgcgtcggcaccctggcgataaccgatcacgataccgtggcggcgatccccgcggcccgggcggagattgaacgcgccggtttaccgttgacgctgatatccggagtggaaatctccacgctgtgggaaaaccatgaaatccatattgtcgggctgaatattgatatcgcccatccggcaatgaccgcgctgcttgatgagcagaaagcgcgccgccagatgcggggacagcagattgcagagcggctggaaaaagcgcggatccctggcgcctgggaaggggcgctgaagctggctgacggcggcgcggtaacccgcggccacttcgcccgctttctggtggaggccggctatgccaacaatatggctgacgtttttaagaagtatctggcgcgcgggaaaaccggttacgttccgcctcagtggtgtacaataaaacaagcgattgatgtcattcatcattccggcggtaaagcggtcattgcccatcccggacgctacgacctctctgccaagtggctgaaacgactgttggcccactttagcgagcagggaggcgatgcgatggaagtcgcccagtgtcagcaggcgccgcacgagcgggctcagcttgccgcttacgccgtgcagtatggccttcatgcctcgcaggggtctgattttcatcagccctgtccgtggatcgagctgggccgcaaactttggctacccgctggcgtagaagggatctggcgcagttgggaagtggccgtagaacaaaattga

SEQ ID NO: 253001 - DNA, 1563 bp, Klebsiella pneumoniae
atgcaaacatcaaaaccggcactcgagcttctcaccagcgacgccatctatcgggaaaacccgacggcgctattccaccagctatgcggcgcgcgtcccgccaccctgctgctggaatccgcggatatcgacagtaaggatgatttgaaaagcctgctgctggtggatagcgctctgcgtattaccgcactaggtgacactgtcactattcacgcactttccgctaacggcacggcgctgctggagctgttggacagcgctctgccttcaggcattaataatcagcgtcagccaaacggtcgggtattaactttcccgccggtcagcgcgctgttagatgaagatgcccgtctgtgttcactgtcggtattcgacgcctttcgcctgctgcaggaactgattaccgtaccgcaggacgaacgcgaagccatgttcttcggcggtctgttcgcctatgacctcgtcgccggctttgaaaacctaccgccgctggaaagcgacactgcctgcccggattactgcttctacctggcggaaacgctgctggttatcgaccatcagactaaaaacacgcgcattcaggcgagcctgttcaccccgctggaaagcgaaaagcagcgtctgctgcagcgcatcgctcagcttcgtcaacagctgaacgagccgccggcgccgttgccggtgacgacggtagccgagatgcgctgcgattgcgaccagagcgacgaagagtacggcgccgtggtgcgtaaaatgcagcgcgccatccgcgcgggcgagattttccaggtggtaccttcgcgccgcttctcgctgccctgtccgtcgccgctggccgcttatgatgtgctgaaaaagagcaaccccagtccgtacatgttctttatgcaggacaacgacttcaccctgttcggcgcttcgccggaaagctcgctcaagtacgatgccagcaatcgtcagattgaaatctacccgatagccggtacccgtccgcgcggccgccgcgccgatggttcgctggatcgcgatctcgacagccgtattgagctggagatgcgcaccgaccataaagagctctccgaacatctgatgctggttgaccttgcgcgtaacgacctcgcgcgcatctgcacgccgggaagccgctacgttgctgacttaaccaaagtcgaccgttattccttcgtgatgcaccttgtctcccgcgtggttggagagctgcgcagcgatctcgacgttttgcatgcttatcgcgcctgtatgaatatgggcaccctcagcggagcgccgaaagtgcgcgccatgcagctcattgccgctgccgaaggcaagcgccggggtagctacggcggcgcggtgggttacttcaccgcccatggcgacctcgatacctgcatcgtcattcgttctgcctatgtgcaggatggcgttgccacggtgcaggccggcgccggtatcgtgctcgactccgttccccagtcagaagcggatgaaacccgcaataaagctcgcgcggtgctgcgcgctatcgcccaggcccaccacgcgaaggagattttctaa

SEQ ID NO: 253002 - DNA, 903 bp, Klebsiella pneumoniae
  misc_feature (751)..(760): n is a, c, g, or t
atggccgacattctgctgctcgataatatcgattctttcacctataacctggcagaccagctgcgttcgaacggccataacgtggtgatttatcgcaattccgtcccggcgcaggcgctgattgagcgcatcggcaccatggacaatccagtactgatgctctccccgggcccgggaaccccgagcgaagcgggctgtatgccggagctgctgacccgcatgcgcggtaagctgccgattatcggcatctgcctcggtcaccaggcgattgttgaagcctacggcggctacgtcggccaggccggtgaaatccttcacggcaaggcttcaagcattgaacacgacggccaggcgatgtttgccggtctgagtaatcctctgccggtcgcccgctaccactcgctggtgggcagcaatatcccggccggactaacgatcaacgcccactttaacggcatggtcatggcggtgcgtcacgacgcggatcgcgtctgcggcttccagttccatcctgaatcgattctgaccacccagggggcgcgtctgctggaacagactctggcctgggcgctgcagaagctggaacagacgaataccctccagccgattctggaaaaactgtatcaggcagaaaccctgagccagcaggagagccaccagctgttttccgcagtggtgcgcggcgaagtgaagcctgagcagctggccgccgcgctggtcagcatgaaggtacgcggcggccagctgctcnnnnnnnnnnaatatttcaaccgccagcgcgtttgtggctgccgcctgcggcctgaaggtcgccaaacacggcaaccgcagcgtgtcgagcaagtccggttcttccgacctgctggcagcattcggtatcaatctggatatgaatgccgataa

SEQ ID NO: 253003 - DNA, 1359 bp, Klebsiella pneumoniae
atgcagaccgttttagcaaaaatcgtggccgacaaagcgatttgggtagaagcccgcaaacaacaacaaccgttagccagttttcaaaatgaagtggtaccgacgcagcgcaatttttacgatgccctcgccggcacccgcaccgcatttattcttgagtgcaaaaaggcctcgccatcaaaaggcctgattcgcgaagattttgacccggcggccatcgccggcgtctacaagcactatgcctcggctatctcagtgctttgcgatgagaagtatttccagggcagcttcgattttctgccgatggtcagcaaggtcgcgccgcagccgattctgtgtaaggactttactatcgatccttatcaaatctacctggcgcgctactaccaggctgatgcctgtctgctgatgctttcggtgctggacgatgagcagtatcgtcagctctccgccgtcgcgcatagcctgaacatgggcgtgttgaccgaagtgagcaatgaagaggaactggagcgcgcaattgcgctgaaggctaaagtggtcggcatcaacaatcgcgatctgcgcgatatgtcgattgacctcaaccgcacccgcaccctggcaccccgcctcggtcatggcgtcacggtcatcagcgagtccggcatccatacttatgctgaagtgcgcgaattaagccactttgccaacggcttcctgattggttctgccctgatggagcatgacgatctgaacgccgccgtaaaacgcgtgctgctcggtgagaataaggtctgcggcctgacccgcccccaggatgcccaggtggcatatgaatccggcgcgatctatggcggattgattttcgttccgacgtcgccgcgagcggtgaacgaggctcaggcgcaagcggtaattgccagcgcgcctctgagctatgtcggcgtgttccgcaattcgccggtggcggaagttattgcccgcgcgaaaaatctgagcttagccgccgtgcaactccacggtagtgaagaccagacctatatcgacgccctgcgcgccgaattaccgggcaaggtacaaatctggaaagccctcagcgttggcgaaacgctaccgccgcgcaatctgaatcatgtcgacaaatacgttctcgacaatggtcagggcggcaccggccagcgtttcgactggtctctgctgcaaggccaggatctgcgtaacgttctgttggctggcggcctcggcgccgataactgtgttgaagccgcgaaaagcggctgtgccggactcgattttaattcaggcgtagagtcacagccgggtattaaagatgccagcaagctggcctcggtgtttcaaacgctgcgcgcatattaa

SEQ ID NO: 253004 - DNA, 810 bp, Klebsiella pneumoniae
atggaacgttatgagacgctgtttgcacaactgaaagctcgccgggaaggcgcgtttgttcccttcgtcaccctcggcgaccctaatcctgagctgtcgctgaaaattatcgatacgctgattgaagccggtgccgacgcgctggagctgggcattcctttctccgacccgctggcggatggcccgacgatccaggacgccaccctgcgcgcttttgccgccggggtgacgcccgcgcaatgcttcgagatgctgacggcgattcgccagaagcacccgacgattccagtcgggctgctgatgtacgccaacctggtgttcagccccggtatcgatgaattctacgccgcgtgcgaacgcgctggcgtcgattcggtgctggtggccgatgtgccggttgaagagtccgcgccgttccgccaggccgcgctgcgccacaacatcgcgccgattttcatctgcccgccgaatgccgatgacgacctgctgcgccagatcgcctcttacgggcgcggctatacctacctgctgtcgcgggcgggcgtaaccggtgcggaaaaccgcgccgcgctgccgctgcatcatctgattgaaaagctggccgagtacaacgccgccccgccgctgcaaggatttggcatctcggcgccggagcaggttaccgccgcgattgacgcaggcgcggccggggcgatttccggctctgccatcgtcaaaattatcgagcgcaacgtgaacgacccgcaggccatgctggcagaattaaagaccttcgcccgcagtctgaaagccgccactaaagccgcctga

SEQ ID NO: 253005 - DNA, 855 bp, Klebsiella pneumoniae
atgaaagaaaatgtttttaatgaaatagttgaatggattgagtctcgcctgacaataaatccatcggtcgaagatatcgcccgtggcgtgggatattcgcggcgttcagtttataatatattccatgaatatgccggactgcctgtcggcaagtatatcagaatgcgccgcatgacgcttgctgccggtaaactcaggctaactcaccaacctatttcatctattgcctgctcactgcattttgactctcatcaaaccttttcccgcgagtttaaaaaagcctttggtcgctgccccagccagtatcgacattcagcatactgggatatgtcggcgctctatcagaaggtggggccgcagggcgacagactgcctgtaccctggctttgttttctcgaagagcaaaccttttctggatacggcttcacctatacgctctccctggccgagggtatctgcgccaggaaaaatgtcaccaggcggaaaatcgcggcggaaatgccgggcggcgagcgagacatctatatcctctctgaattctcacctgccgccgataatctctataaagtgaccatcggcagttttattggtgcaccagtaagctcacgggaacgccctttccgcgagataagggtcgctaagcggggtttatacctgggcatggaatttagcggtagctgggaggattatgttttactgtcaaataatgtttatatgaaacatcttcctgagctcgggctgtatcgccgcgagggctacgatatcgaacgttttgttcagccgcaaaacgtgacgtcaggaaacgatcggccttattacaccatccagtattttgtcccggtggcctatctttag

SEQ ID NO: 253006 - DNA, 2181 bp, Klebsiella pneumoniae
atgattgatcattttaacattaagatcaaaaaaactctgctggcccttctggtctgctttatagccattccgctgtccagatttatttctcctcaaactattattgacggaaatcaaatttatctggcatggctgccgttgagcttaatgtatgctgtgctttttatttttggccgctatgccgttgctccattggtaatcgcgtttgcgattaccaatgcctggataatcgatctgaccttcactcaggcggtcatcctgcttttttgccagctcttctcggtattcctctcctgcgctattgtccgttatcagcttggaaggcgctggcgcgccgggctgacggcgaaacatatgggcgtgagggttttctggggcggtttcttcgcgccaattctgctcaagatcacaatgtatctggcggggcgcttcttttcgtttccgctggcgatttccagctatttcggcaatatgtcggttatctacaccgttatcgatatacagagcctgattagcgctgcgttaatttttacgaccttcttttattatccgttgcggatgattatcagtccgcgatatgcgcgagtattctggcgcaatctttatcattcatggcaagtgcgcgagcagcgagtatttacgctgtactggtttgtagcgctggcggcaatattactggtgctatgtacgccttatgattctgtttttattgctggttatttagttcctcttattttcattttgtactttattggtattagtcgtctggcgcatacgctgattcgcatttcgtggtccgtttcagcatttttactcgtggcctataaccagaattttttgcatggggtacaaagtgaatattccctgtcatttgtgctttcggtgctaatttgtttcactatctgtctgttttatatggcggatatctacgcgcgcagtgaaagaatgaagttcagatggcgagaccaggcggaagaagatccgctaaccggtttgcccaatttgcgtgcgctggagagtcatctgcagcgtaatcctgcggttgccatcagcagtttgcgaatacagaatctggatttccttagccgccattacggcatgatgatgagggttgagagcaaacggcagatcgcctgtaagctacagccgctattgtctcagggcgagcggatttttcagcttcccggcagcgagctattgctggtgctaaacggccctgaacctgaggcgcgtttaaatcatatcgtttccacgcttaaccataaaaagttcagctggaacaaccagacgttggatctcgagtttggcgcatcgtggggaggctatagcggtaccgaatcggatattcacccgatgcttggtcagcttagctggctatcggagcaggccggcgcggctcgtcgtgtgttagcgcttgacgccgctcaggaacagatttccgatcaaacaagcgaacaggtccggctgctggcgcagattaagcaggcgcttaacgagcgcggtctggtactgtatgcccagcccatccgcgatgccgcaggaaagggatactacgaagttctttgccgtatgcgctgcggtaataacatcattacgcccgataagtttattccgccgatcgcgcagtttaatctgagccagcgctttgatatgcaggtactggaaacgctgttcagctcgctcaggcaccatcaagggcagcacttctccgtgaatctgctgccctatacgctgatgcaaaaggatagcgcgacgcaaattatctcgctgtttaaacgctataacctgtcggctgaggcgataacgattgaagtcaccgaagagcaggcgttttccgatgtggaaaccagcatgtataacatacagcagctgcgagaattcggctgcgctatcgctatcgatgattttggcaccggctacgctaactatgagcggctgaaaagcctgcaggccgatattttaaaaattgacggttgcttcgtgcgggatatcgaaaccgatccgctggacgccattatggtcaaatcgattatcgaaatggctaaggttaaaaagatgaaggtggtggcggaatacgttgaaacgccggagcagcgggaaaaacttcttcagctaggggtcgattacctccaggggtatctggtaggtaaaccgcagccgctgagcgagctgcggacgtaa

SEQ ID NO: 253007 - DNA, 1203 bp, Klebsiella pneumoniae
atggaccgcgtcttgcactttattctcgcgatcgtagtggtggctattctggccctgttggtcagccacaaccgtaagcagattcgtattcgttatgtcattcagctgcttgtcattgaagtgctgctggcctggttcttcctgaactctgacattggtctgggttttgtgaagggcttctccgagatgttcgaaaaactcctcggttttgccaatgaagggacaaactttgtcttcggcaacatgaacgataaaggcctggctttcttcttcctgaaagttctgtgccctatcgtcttcatttccgcgctgattggtattttgcagcatattcgcattctgcctatcgtcattcgcgcgatcggtaccatactgtccaaaatcaacggtatgggcaagctggaatcctttaacgcagtcagctcgctgattctgggtcagtctgaaaacttcatcgcgtataaagatattcttggcaaaatgtcccgcaaccgcatgtacaccatggctgcgaccgcgatgtctacggtatccatgtctatcgtaggtgcgtacatgaccatgctgcagccgaaatacgttgttgcggcgctggtactcaacatgttcagtacctttatcgttctgtcgctgattaacccgtatcgcgttgacgagagcgaagaaaatctgcagatgtctaatctgcatgaaggccaaagcttcttcgaaatgctgggtgaatatatcctggcgggctttaaggtggcgattatcgtggccgccatgctgattggctttattgccctgatctccgcgctgaacgccctgttcgccaccgttaccggctggtttggctatagcatctccttccaggggatcctcggctatatcttctatccggtggcgtggatcatgggcgtaccggcaggcgaagcgctgcaggtaggtagtattatggcaaccaagctggtttctaacgaattcgtcgccatgatggatctgcagaaagtggccgccacgctctcaccgcgtgcggaaggtatcatctctatcttcctggtctccttcgctaacttctcatctatcggcattatcgctggcgcaattaaaggcctgaacgaagagcaaggtaacgtggtttctcgcttcggcctgaagctggtttacggttccactctggtgagcgtgctttctgcgtctatcgccgcgctggtactgtaa

SEQ ID NO: 253008 - DNA, 1236 bp, Klebsiella pneumoniae
atgacaaacagtcgcgttgagaatagcagcggtcgcgcagcgcgcaagattaagctcgccctgatggggcctgcgttcattgctgccattggctatatcgatccgggtaatttcgccactaacatccaggccggcgccagctttggctaccaactgctatgggtggtcgtgtgggcaaacctgatggcgatgctgattcaggtgatgtcggcgaagctgggtatcgctaccggtaaaaatctggcagagcaaattcgtgaccactacccgcgtccggtggtgtggttttactgggtgcaggcggaaattatcgctatggcgaccgaccttgctgagtttattggcgcagccattggatttaagctggtgctcggcgtgtcattgctgcagggcgcggtattgacggggatcgcgacgttcctgatcctgatgctacagcgccgcggacaaaaaccgctggaaaaagtcatcggcggactgctgctgtttgttgcggcggcttatgtcgttgaacttatcttctcccagccggcgctggcaccgctggcgaaaggcatgctcgtaccgtctctgccaaccagcgaagcggtattccttgccgccggggtattgggggcgaccatcatgccgcatgttatctatttacactcgtcgctcactcagcacctgcacggggggactcgcaaagagcgctataacgccacgcgctgggatgttgccatcgctatgaccatcgcaggttttgttaacctggccatgatggcgaccgccgccgcggccttccatttcaatggtcacaccggcgttgccgatctcgatcaggcctatctgacgctggagccgttgttgagccacgcggcagccaccatctttgggctgagcctggtcgccgccggtttatcctccacggttgtaggcaccctggcggggcaggtcgtaatgcagggttttattcgctttcatatcccgctgtggtttcgtcgggccattaccatgctaccttcattcattgtgattttgatggggcttgatccgacgcgtattctggtgatgagccaggtcttgctgagcttcggtatcgccctggcgctggtgccgctgctcatctttaccagcaatgcgcggctgatgggggatctggtcaattcccggtgggtgaaagtgctggggtgggcgattgtcgcggtggttgtggtgctcaacggctggctgattgttggaacgctgatcggttaa

SEQ ID NO: 253009 - DNA, 348 bp, Klebsiella pneumoniae
atgttcaggtcactgattttggctgcagtgcttctggcttcagcgccattggtcgctaacgctggtgaaatcaccctgttgccatcaataaaattacaaattggcgatcgcgacaattatggtaactactgggacggtggcggctggcgcgaccgtgattactggcgtaaacactatgaatggcgcgataaccgctggcgtcgtcacgataacggctggcatcgcggctgggataaaggtaaagcctacgaacgcggctatcgcgaaggctggaaagatcgcgacgaccgacgcggcgggtggggacgaggccatggcggccgcggccatggtcacgggcaccattaa

SEQ ID NO: 253010 - DNA, 993 bp, Klebsiella pneumoniae
atggtttaccaggcaaacaccacgcgatatcaaacgatggaataccgccgttgcggtcatagtgggctaaagctaccggcaatttctcttgggctttggcataatttcggcgacgaaacgcgggtggaaaccagccgtcagcttctgcgtcacgcattcgatctcggcatcacccatttcgacctggccaacaactacgggccaccgccgggttccgcggagagcaattttggtcgcatcctgaaagaggactttttgccctatcgcgatgaactgattatctccagtaaagccggttacaccatgtgggacggcccctatggcgactggggctcacgcaaatatctgattgccagcctcgaccaaagccttaaacgaatgggcctcgactatgtcgatattttctaccaccaccgtcccgatcctgaaacgccgctgcaggaaaccatgcgcgcgctggatcatctcgtccgccaggggaaggccctgtacgttggattatcgaattatcctctcgatcaggcccgggaagccgtcaatattcttaacgagctgggcacaccgtgtctgattcatcagcctaaatattccatgttcgaacgctgggtcgaggggggcttactcgatttcctgcagagcgcaggggtgggaagtatagcgttttcaccgcttgccggcggccagttaactaaccgttatctgcacggcattccggcggattcccgcgccgccagcggcagtcaattcctgcaaccggatcagcttaccgaaagcaaactggaaaagattcgtcaacttgacgcactggccgaagcccgcgggcagaagctctcgcagatggccctggcctgggtgctgcgcgacgagaaagtaacttcggtattgattggcgccagcaaaaccacgcagctcgacgatgcgattggcatgctggaaaaccgccgtttcaccgccgaagaacaggcaacgattgacgcaatccttgcggtgtaa

SEQ ID NO: 253011 - DNA, 1662 bp, Klebsiella pneumoniae
atgcaaccgacttataccattggcgattatctgctggatcgtctcgtagattgcggcatagaccgcttgtttggcgtacctggcgattacaatttacagtttctcgatagcgttattgcgcagcagaatttagggtgggtaggttgcgctaacgagctcaacgcggcctacgctgctgatggctatgcgcgtatcaaaggcgcaggcgcgctgttgaccacctacggcgtcggcgaactgagcgcgcttaacggtattgccggcagctacgccgaacatgttccggttctgcatattgtcggcgcaccctcaaccggcgcgcagcagcgcggcgaactgctgcaccatacgctgggcgacggtgatttcagccacttctcgcgcatgagcgagcagattacctgttctcaggcggtactggcggcgggaaatgcctgccatgtaattgaccgcgtactcagcgagatgctcacccatcatcgccccggttatttgatgctgcctgccgatgtggcgaaggcaaaagcgacaccccctgcacatcctttgcttattccgaatctgcctgccgatgagaaccagctggcgggattccgagagcacgcggagcggatgctcagaagtcgtcgtcgcgtatcgctgctggctgattttcttgctcagcgctatgggctacaaaatgttctcagaaaatgggtcgccagcgtgcccgtctcctgcgccacgatgttaatgggcaaagggctttttgatgagcaacaaagcggttttgttggcacttacagcgggattgcgagcgcagaggaaacccgcgaggccattgaaaacgctgacaccattatttgtatcggcacccgttttaccgacaccattaccgcgggctttacccagcatctgccgcaggaaaaaacgattgaaatccagccgtttgccgttcgggtaggcgaccattggttcagccgggttccgatggataaggcgctcgaaatagtcattgagctctccgcaagtctggcgggggaatgggtgccgccgaatattcaggcgcccggggtgagcggcgcgcctgaaggaagcctgacgcagaaaaacttctggagtacggtgcaggaacagctccgcccgggagacattattcttgccgatcagggaaccgcggcttttggcgccgccgcgcttaagctgcccactgacgcaacgctgattgtccagccgctatggggatcgataggtttcacccttccggcagcctacggggcgcaaatagcagcggcggacagaagggtcgtgctgattgtcggcgatggcgcagcgcagttaactattcaggaactgggatcgatgctcagggataagcaacgtccgctgattctgttgctcaataacgaaggctatacggtggagcgcgcgattcacggccccgagcagcggtataacgatattgcgctctgggactggaatcgtctgcctgatgcttttgctcccgatgtcccgtcccgatgctggcgcgtgactcgcacgcatgagctgagagaagcgatgaatagcagcgtcgcctcagacaaactgacgctggtagaggtgatgctgcccaaaatggatatccccgactttctgcgcacggtcactcaggcgctggaagagaggaacagtcgcgtttaa

SEQ ID NO: 253012 - DNA, 1236 bp, Klebsiella pneumoniae
atgctgcacccacgcgccagaaccatgctcctattatcgatacccgcaatcgtcattggtattgcttgcagtctggttttaatcgtggcgatgaaaatagccgccgttttgcaaaatatcctgtggaccagcctgcctgcgagcgtaggcatcaatgctgagggccctgtgtggacgatggctattctcaccggaaccggcatcgccgttgggctgatcgtgcgctttagtcccgggcacgcgggaccggacccggcaacagagtcgctgataggcgcaccggtcagcaccagcgcgctgccgggtctgcttgcggcgctgatagtgggtctggcgggcggcgttagcctggggccggaacatcctattatggtcgtgaatatcgccctggcggctgcggtgggcagtcgcctgtttccacgcattacccctctggactggacgattctcgccgcctccggcaccatcggcgcgctattcggcactccggtcgcggcggcgttgatattttcgcaaacgctgaacggcagcaacgatgttcccctgtgggacaagttatttgctccgctgcttgcggcggcagcgggttccctgaccaccagcctgttttttcacccccatttttcgctaccgctgccttatctgtcggagctgcgcttcgtcgacattattagcggcgccatcgtgacgcttatcgcgattgccgttggcatggtcgccgtctggtgcctgccgcgtctacacacgctgatgcatcgtctgaaaaatcctgtgcttacgctgggcgtcggcgggtttttattagggattctgggcgtcatcggcgggcatatcacgctatttaaaggccttgatgagatgcagcagttgccggtaagcctgacgcttggcgccaatgattacctgcttattgccgtgatcaagcttgcggcactgatacttgccgccgcctgcggttttcgcggcggccgtatttttcctgccgtgttcgtcggcgtcgcgctcggtctgatgctgcatgcacacgttcccgccgtgccggcagccatcacggtttcctgcgctatcctcggcctgacgctggtagtgacgcgtgatggctggctgagcctgtttatggcggcagtggtcgtgtcggataccacgctactgccgctactgtgcattgttatgcttccggcctggctgctgctggccggaaagccgttgatgattgccagaaagcatagcgattaa

SEQ ID NO: 253013 - DNA, 966 bp, Klebsiella pneumoniae
atgacaaaatttgctttagtaggggacgtaggcggaacgaatgctcgtctggcgttgtgcgatctggcaagcggggagatctcccgtgcaaagacctattccgggctcgattatcccagtcttgaagctgttgttcaggtctatctggaagagcataacgtcaaggttgaggacggctgtatagccatcgcctgtcccattaccggcgattgggtggcgatgaccaaccacacctgggcattttctatcgccgagatgaaaaaaaatctggggttctcgcatctggaaatcattaatgatttcacggcggtgtcgatggcgatcccgatgttgaaagccgaacatctgattcagtttggcggcgcgaagccgattgaaggcaagccgatagccgtctatggcgcaggtaccgggttgggcgttgctcatctggttcatgtcgataagcgctgggtgagcctgccgggagagggcgggcacgtggattttgcgcctaacagcgaagaggaaggcattattctggaagagctgcgtaccgagctgggtcacgtctccgccgagcgcgtactttcaggtcccggattggtgaacctttatcatgcgatcgttaaatctgacgggcgtctgccggaaaatctgcagcctaaggatgtgactgaacgtgcgctggccgatacctgcatcgattgccgtcgcgcgctatcgctattttgcgtcattatgggccgctttggcggtaacctggcgctgacgctcggtacttttggcggcgtgtatatcgctggcggcattgtgccgcgcttcctcgatttctttaaagcttcaggttttcgcggcggttttgaagataaaggtcggtttaaagccttcgtgcaggatatcccggtctatctgatcgtccacgacaatccggggctactgggatccggagcccacctgcgtcagactctgggacaggttctttaa

SEQ ID NO: 253014 - DNA, 738 bp, Klebsiella pneumoniae
atgaaagtcatcattgttgaagatgagttcctcgcgcagcaagagctcacctggttgattaacacccatagcgagatggagattgtcggcacctttgacgacgggctggacgtactgaagtttttacaacacaacaaagtcgacgccatttttctcgacatcaatattccttcgctggatggcgtactactggcgcaaaatatcagccagttcgcgcataagccctttatcgtatttattaccgcgtggaaagaacatgcggtggaagcctttgagctggaagcctttgattacatcctgaagccctatcaggagtcgcgcatcattaatatgttgcaaaagctgaccagcgcctggcagcaacaacagcagccgagcgccggtgcaatgcctaatccggccagggaaaatgacaccattaatctgattaaagatgagcggattatcgtcaccagcattcacgacatttactatgcggaagcgcatgaaaagatgacttttgtttatacccgaagagagtcatttgtgatgccgatgaatattacggagttctgcaacaagctaccgacggcgcactttttccgctgtcaccgctcatactgcgtcaacctgaacaaaattcgcgaaatcgaaccctggtttaacaacacctatatcctgcggcttcgcgatctggagttccaggttccagtcagccgcagcaaggtcaaagagtttcgccagctcatgcatctgtag

SEQ ID NO: 253015 - DNA, 1698 bp, Klebsiella pneumoniae
atgcacgaaatttttactatgctgctggcggtttttgaccgcgcggcattaatgctgatttgtctctttttcctcattcgcctgcgcctgtttcgtgaacttctgcataaatccgcgcacacgccaaaagagctgctggccgttaccgccattttctccctgtttgcccttttcagtacctggtccggcgtaccggtcgaaggttcactggtcaacgtgcgtattatcgcagtcatgtccggcgggatcctcttcggcccctgggtaggcgcgatagtgggcgtcattgccggcgtacatcgctatctaatcgatattgatggcgtcaccgccatcccctgctttatcaccagcattgtcgccggtctactctccgggttaatcagtcgtaaagtccctaaagcgcagcgctggaaagcggggatcctcgccgggatgctgtgcgaaaccttaaccatggtacttgtggtggcgtgggctccatcgttctcgctggggatagatatcgtgtcaaaaatcggtattccgatgatccttggcagcgtatgcatcggttttatcgttttgctggtgcagagcgttgaaggggaaaaggaggccagcgccgcgcgtcaagcgaaactggcgctcgacatcgctaacaaaacgctccccttgtttcgccacgtcaatagcgagtccctgcgtcaggtatgcgatattatccgccgcgatattaatgccgatgccgtcgccattaccaatactcaacatgtgatggcctacgtcggcgtcggggaaatcaactaccgggataacgacgactttatcagcccgacaacgcaacaggcgattcgctatggaaaaatcattattaaaaacaatgacgaagctcatcggacgccggaaatacactctatgctggtcattccgctatgggaaaaaggcatcgtcaccggtacgttaaaaatctattattgccacgctcaccgcataacctcatcgctacaggaaatggcgattggcctgtcgcaaatcatctcgactcagctggaggtctcccgcgcagagcagcttcgtgaaatggctaataaagccgaactgcgcgcactgcaaagcaaaattaacccccactttttattcaatgccctgaacgcgatttcgtcgtcgattcgcatgaatccggacaccgcgcgccagttaatttttaatctgtcgcgctatctccgctacaacattgaattaaaagatgatgaacaaatagacatcaaaagggagctgtatcaaatcaaggattacatcgccattgaacaggctcgcttcggcgacaagctgacggtgatttatgatattgatgatgaagtcagctttatgatccccagcctgcttattcagccgctggtggagaatgcgattgtccacgggattcagccttgtaaaggtaaaggggtggtgaccatcggcattaatgagtgcggaaatcgggtacgaattagcgttcgcgatacggggaacggtattgaccctgcggtagtggcgagagtcgaggctaacgaaatgccgggaaataaaattggcctgctcaatgttcatcatcgggtcaagctgctgtacggcgaaggcctgcatatccgacgcctgacgccagggaccgaaatcgccttctatgtgcctcaccagcacgcgccccaggcggccagggagtcgctgctgtcatga
